United States Patent Application Publication US 2005/0228172 A9 - sequence listing, part 204

SEQ ID NO: 924199 - DNA, 566 bp, Homo sapiens
aggcaaaattactgtttccactgaacagaagctgaggataaaaacgatgctcttcctctcccagagtaacatccctgctctaccaatgggcactgggggaaggtgatagtctctgacatcttgacttgcctttacattgtggaaactcttccctatgattaaactggggcagggacagtcacgtgtctagtatccattgcctgctgtgtttggagtggagtttcctcactataagtcggaggtggatgatagaagggaatttcaattctcttgatcacaccaaacagaaacagaactcctgcaacttctatagagcaaataagaaactctggtgtcatgccccttctaaattgaaaccatagccctagtgggtactggtgggtagagagccctgycttctttatatagggtgctttactctgcacccattcagagtaaagcatcctacttaaagttccataaatcagagctgggagggggataaaagagcagactatggctcaagagccacagtctcttacacttcttaacaagatttagtaaattttcttgaataaatatttcac

SEQ ID NO: 924200 - DNA, 657 bp, Homo sapiens
atggcagggccttgctccaaaatcctaaaggcctctactgtgattcacctagaggggcctgccaaaggctccaaacagcatccatatctgcccctgatgcctcaaacaccattggatctgctgagtcatatggcccaagtggcagggcagcttagacagcaggctggactgttgtcgagccttctcctgttctggacctcactcaaaactggcaggcttttgggtcactcaacaagtgggccagagtaacacacccaaatgagtaatgtgttgcctccaaaatccaaataggcccactagacgttgtgcctctttcttggttgtaggaggggccaaatgcagcaayttttccttccttagaaggaatatctcaacagaccccacaccgcagaacccctagaaattttaccgatgtagaatgtccctgaattttagtcagatttacttcccatcctctggcatgcaaatgtctcaccgataagtccactgtgtttgctacttcttgctcactggatccaaccagcataatgtcatcaatgtaatgaacaagtgtgatatcttgaggaagcaaaaagtgattggatctctctaaataacgttatgacacaaagccagagagttgacatacccctgaggtaggacagtaaatgtatattg

SEQ ID NO: 924201 - DNA, 734 bp, Homo sapiens
aactccattaattacctcacctccataagctcctacctcaactggaggaccacaatgacgttttgtgtcccttgaaatcaatatcagcacagagccagtgtcctgtagtccctgaaatgtatgttcatttccctttccccagtacacagttactctggtaaaggcaggaggtatccttggggaaggatggaagaaatattcatagcataaattgtcagtaatgtagtggagtccttcctcaaggggatccagtcaccctttcattcagtgggttctgggtctgtaaactggctcaagtctggaaattgattgaggggccatgattctctgtttttataattcaaataagtcttttgtccattcgacctagaagtttttttctgcttatataaattaggtaggaatgcagtaggcttcctatccattttacttctaggaacaccatgattcattagccaatgctrgagctctacttgagtcagattattcagattgtcactttgcctctgctgtccattacagtagctacactcaattgcctttgatgggtgattacctccacttggttcttcccacctcaggatccaattattcccattgaaattgggaatcttttagttgagtgactgaggctcccactgttagatctgacatacagaaaagagcaattacagggctcttcaaagatgcaggtgctgccctcacacgtctattctgtaaggcattggtcaagt

SEQ ID NO: 924202 - DNA, 675 bp, Homo sapiens
aaagcacagacaacaaaaggaaaaatagacaaatgagataacattaagctaaacaacttctgaacagcaaagaaaaccatcacaaagtgaagagacaacttacagaatatgagaaaatatttgcaaactattcatctgacaagggattaataaccagaatatataaggaattcaaacacatatcaaaaaaatggtctgacttaaaaacaagcaaaacgatctgaatagacatttttcaaaasaagatatataaatggccaagaggtatatggaaaaaaaaaaaggacagcatcactaatcatctggggaatgcaaatcaaaaccacaatgagatatcaactgcagctaaaatggctattatcagaaagtcaaaaaataacaaattctggagagaatgcagattaagggtaatgcttgtacaccattagcgtgaatgtaaaccagtgtagtcattatggaaaggtatggagttttctttaaaaaataaaaatagaactaccacatgatccagcaatcccaccactgggtttatattcaaaagtaaggaaatcagtatatatcaaagagatatctgcactcccatgtttactgcaacactatttacagtatctaagacatagaatcaacctaagtgtccatcagtgtatgaatggataaaaaaaaaatgtaatatgt

SEQ ID NO: 924203 - DNA, 580 bp, Homo sapiens
aagattgaacctcaaagaaatccaaaacctgaatagaccaatagcaagtaaccagatcaaagccataattaaaattttcccactaaagaaaagccagggacatgatggcttcactgctgaattttggtaaacatttaaagaactaacaccaatcctactcaaactgttccaaaaaatagaggcaaagggaatacttttaaactcattccacgagtccagtattaccctgataccaaaaccggacagacacatcaaaaaaaaaatactgtaagccaatatccctgacaaacattgatgcaaaaatcttcaacaaaatactagcaaactaagttcaacaatatattagaaagatyattcattgtgacccagtggtatttatccctgggatgcaaggatggttcgacatacacaaatcaaacaacatcatacattataccaaaagagtgaaagagaaaaaccatatgatcgtttcaattgatgctgaaaaagcatttgataaaattcaacatcccttcatgataaaaacctcaaaaaactgggtatttaagtattattcctcaacataataaacaccatatat

SEQ ID NO: 924204 - DNA, 630 bp, Homo sapiens
taagtccagttctttagagttgagtcatggtaggcaaagccactccagggtgccactagtcctattgctgccccatttcccacctgaattaatcctattgctcacttacttctggcattcctcggtcttacacgattatagactgtgacccctgaaagggcaatggtggccaatgtacatcgacccctgtaccaagtttttgatatacaaaagaaagctgctcctaaaagaatagatgactccccaggaaggtgggtgtggtttaggggtgtgacttttccccactcagggccaaaaacaaaaataagcccatttgaggcacaaacagagaagccctgcagggtgtgaygtttacactttgctaccaagttaggtctatagaaatatttcttccctgttccagtgggtgtggtagaaccatctttgttttccagaagggggtggtattcctaccttccccgattaggctgttgtttttttctctgtatgttctgatctgagaaaaggcatcatatatatcctccttgcttatgagtggaatcccatttaccttgctgcagccttgggaacctggcgactagagttggatcatagcattgcagggaaacttccacttttgtctcaacacag

SEQ ID NO: 924205 - DNA, 761 bp, Homo sapiens
gggacaatggcctcactgataatcttgagatcttgcactaagctccactgtccgttgtgtttctgtactcctaaaattggagtattgcaggggctactgcatgcttttactaggccttgggcttttaggtccttaatcttttggagtccttgttgggcctcaggtctaagggggtactgcttttggtagggaaaggaggtggaatccttaatttttttttttttttttttttttttgagacggagtctccctctgtcgcccaggctggagtgcagtgcaagctccrcctcccgggttcctgccattctcctgcctcagcctcccgagtagctgggactacaggtgcccaccaccatgcctggctaattttttgtattttttagtagagacggggtttcaccacgttagccaggatggtctggatctcctgacctcgtgatccccccacctcagcctcccaaaatgctgggattacaggcatgagccaccacacccagcccctcttgtttaacttgaacaggacaggcattctttgctcatccatattgtcctgttgcccagacttcaggattaattccttcctcaagcaggggacaacaagcaggtgttctcctatgttcaggtgtataatggcccctgcttttgctagaatgtctctccctaacaagggagtggggctttcaggcataattagaaaagcatgtgaaaagagtaaagttctccagtcacaacttagtggctgggagaactatctagtgact

SEQ ID NO: 924206 - DNA, 725 bp, Homo sapiens
aaaaaagtgctagtgccactttcactgatgttcaaagtgcagaaaagttggggaaaaaattctgatgggagttagaaatgtgtttcatttatttattgtattgtatttttttttgagatggaatcttgctctgtcacccaggctggagtgcagtggcatgatcttggctcactgcagcctccgcttcctaggttcaagccattctcctgactcagcctcctgagtagctgggattacaggcgtgggccaccatgcctggctaatttttgaatttttagtagagttggggtttcaccatgttagtcaggctggtctcgaactcctgacctcgggaaatctgccagcctcggcctcccaaagtgctgggattacaggcatgagccactgtgcttggccaggaatgtgtttttgtgctcatctggaacttgaggactggaaggtgagtcacatgtctaggaatacataacacttcaaacaacaaaatgatgccacactgtgaaaagagatgggaagctattgaatatccctgtcctgccctggctrgtgacccctccccaacattcaggctgcaggaacacctgagctctggggctctctgcctgatacccagtggtggccttatttattccactgccgagttctttctggcaaccttgtaccattcttgggaaaggttggggaagcaataggtaaatgttgttttggtttgtagacatcttttggtg

SEQ ID NO: 924207 - DNA, 585 bp, Homo sapiens
attgtttttactccataacttttcattatcttgcattatcatgttgaactgcttgcagtttcacaaatatactgtatttttcacagtttagagatacgctctgcaatttccctcactgcactgtctgcctgaatacttatccttgttcttccaggtttagtttatggatcacctcctctagaaagccttctcctaatccctttcatgcacgcatttctctcacaacagtttatttagcagatagtaagtatctgctgttacacagatacctgttactgaggagaccatagaaaacacaacagacggtggcttacacctgtaatcccagcactttgggaggccgaggcaggtgaatcacctgaggtcaggagtacgaggccaacctgaccaacatggcaaaaccctgtctctactaaaaatacaaaaattagccaggcgtsttggcgggcatctgtaatcccagctactggagaggctgagacatgagaatagcttgaaccggggaggtggaggttacagtgaactgagagcgagccattgcactccagcctggcaacagagcgagactccatctcaaaaaaaaga

SEQ ID NO: 924208 - DNA, 598 bp, Homo sapiens
cagcaagaaaatgcctgaaagcttactcatatccctgccccaggggtgacccttagtcaatgacattaaacgggtacaaaagtcagaccctgctgctttgaagtggaataattcgtgccattcatgcttcagagtgccctgtgagagcaggctacaactgtacatctgttgaaaccacatctttgcttaactttttactgtcccatcctgctgtccttatttccctacaggttttyactaagaacattacctaataaatcctttgcacaagaattgccacttcatttctgctttaagataactcattcgaagacactttaatttcacttactcagcacaggtagagtggtacttcttgatgctccttctcaattcccgtaggaagggttgccagatttagcaaataaaaatacagaatgcccagttaaattttatttcagataacggccgggcccagtggctcacgtctgcaatcccagcactttggaaggctgaggcaggcagatggcttgagcccaggagttcaagaccagcttgggcaagcaacgtggctgaaaccccatctctactaaaaaaatacaaaaattagctgggtgtg

SEQ ID NO: 924209 - DNA, 668 bp, Homo sapiens
cagcatcatatatcaaaaatactatcttgtactcattgaattatcttgccatctttgttgaaaatcaattgaccctatatctgtgggtctatttctggattctctattttccattgatttatgtatctgttcttatgccagtaccatgctgccttgatttctgtagttcaatggtaaattgtaaaatcaagtagtgcaagttctcccactttgtcctttttccaaaattattttgactgttctaggtgctttgcatttccatatacattttaaaatcaacctatcaattcctaaagaagccagctaggattttggttaggattccattgaatctctgaatcaatttggaaagaacygccatcttgaaatagaagctttcaatacatgaccatagtgtgtatttaaatttatttgaaccttctttaatttcgctcagcaatgtagttatagtttgcattgtacagctcttgcaaatattttcctaaatctgtcccttaaaatgtttctggtttacttgattttcttataaatagcattttttttttttgagacagagtttcactcttgttgcctaggctgtagtgcaatggcaagatctcggctcaccgcaacctctgcctcctgagttcaagcaattctcctgtctcagcctcctgagtagctgggat

SEQ ID NO: 924210 - DNA, 836 bp, Homo sapiens
cagagatgccatccaagagtgaagtcctgaatacaaggaccctaagagcccacttggtgctctattcccctgtggccgtgctggtaacgaaggtgcaagacaaagtcccctttactcttccctctgcttttctcaagcagaaggagtttcatgccatagccaccacatctggtaatgtgctgagtctcacctgaagccagcaaatttcagaatctcacccaaggcccttggtgtaatacctggtgttgctgctggttgttcagggcccaagggcccttcagttaccaagtgatgactgctgccagggctgggtttttcccttcaaggcatctggtttcttctggcccaggacatatctagaaatatcatctgggagctagggcctagaaaaggggcttcatgactttgtccagtgccctatcctgctgtgactgtgttggtatccaagatgcaaggcatagttctccccactcttctctctcctctcctcaagcagaaggaagaggtctcttttgtgkctgagagctgtgcagcctgtggttaggggaggggtgatgccagcactcttttagctgccctggctggtgtcttggtaggtcgtgtgcaccttccccagtctactgtctctggacacatttcatccctaggactcgcctaagtgttgcaatatttatggccttggtggcctttcaagttttcatggagacctagagcacagttgccctctgtgcgaagtttgcaggaactcaagttcagaccactgggatcagcaattctcctttggctagggatggtttaaatgctccctctttgggcagtcatcagctgaatttggt

SEQ ID NO: 924211 - DNA, 617 bp, Homo sapiens
tcattctatgaggccagcatcatcttgataccaaaacctggcagagacacaacaaaaaaagaaatcttcaggccaatatccttgatgaacatagatgcaaaaatcctcaacaaaatacttgcaaactgaattcagcagcacatcaaaaagctaatccaccgtgatcaagtaggcttcatccccaggatgcaaggttggttcaacataaatgtgattcatcatataaacagaactaaagacaaaaaccacatgattatttcagtgacacagaaaagtcttttgataaaattcaacactgcttcaagttaaaaaaactctcaataaactaggtattaaaggaacatacctcaaaataataagagccatctatgasaaacccacagccaacattatacttaatggacaaaagctggaagcattccccttgaaaaccagcacaagacaaggatgccctgtctcaccacttctattcaacatagtattggaagtcctagccagagcaattaggcaagagaaagaaataaatcacatccaaatagaaaagaggaagccaaattatctttgtttgcagatgacgtgattctgtaactaaaaaaccccatagtctcggcccaaaa

SEQ ID NO: 924212 - DNA, 560 bp, Homo sapiens
catccacaccaaaaccccatctgtacatcaccatcatcaaagacaaaagatagataaagccacaaaaacggggaaaaaacagagcagaaaaactggaaactctaaaaatcagagcgcctctcctcctccaaaggaacgcagctcctcaccagcaatggaacaaagctggatggagaatgactttgatgagctgagaraagaagacttcagacgatcaaactactccgagctaaaggaggaagttcaaacccatggcaaagaagttaaaaaccttgaaaaaaaattagatgaatggctaactagaataaccaatgcagagaagtccttaaaagacctgatggagctgaaaaccatggcatgagagctacgtgatgaatgcacaagccgcagtagctgatttgatcaactggaagaaaggatatcagtgatggaagatcaaatgaatgaagtgaagtgagaagagaagttcagagaaaaaagaataaaaagaaatgaacaaagcctccaagaaatatgggactatatgaaaagaccaaatctacatctgattggtgtaccaa

SEQ ID NO: 924213 - DNA, 646 bp, Homo sapiens
cacagtggctcaatgcctgtaatctcagcactttgggagtctgaggctgaagaatctcttgaggccaggagtttgagacgagcctggacaacacagtgagaccttgtctctaaaaaatgtacaaaaaaaaaaattagctgggtgtggtgtcacatacttacagtcctagctactcagaaggctgggagggggaggattgcttaaacctaggagtttgaggctgcaatgatctataatcatgccactgcactccagcctgagtgacagagccagtcaaccatcttaaaaaaaaagagagttatttgcccatttttgaattgggtttgttttgttgttgttgwtgatgacgtgtagaatatttatatattctgaaatttaatcccatatatataatatgtgtaatatatattatatatatataacttgcaaatattttctcgcattctgagttgtcttttcactctcctgatagttttcttggatgcacaagtttttaattttcatgttcactttatctcctttttttattgcctgtgcttttggtgccatatgtaagcaatcattacccaatccaatgtcatgaagattttccgcatctgttcttctatgagttctatagtttttatctctttagattagatctttg

SEQ ID NO: 924214 - DNA, 720 bp, Homo sapiens
aagcttttaaaaaatagcttcattgagctacagtttatgtaccataaagttcacttgttttaaacaggcaattcaatgatttttagtaaatttatggcactgtacaaccgtcaccacaatctaatcttagaatatttctctcaccccaaaaagtagctttgtgtccatttgcaggtactgcctatgctcaaggcaaccactaatctactttctgtctctacagatttgtcttttctgggcatttcatgtagatggaatcgtacaatatacataatgtcttaaaattccatccatattatagtatgttgatccatacttcattcctctttgttgcaaaatagtaatctattgtatggatwtaccacattctgtttctacattcaccaggtgacgggcatttggattgctttcaccttgtggcgatcatgaataatactgctatgaacattctcatacaagattttatgtaagtttaggttttcatttctcttggatagatacacagaagtgggatttctatatcatatggtaaattaatgtttaatttttcagaaactacaaaatgtttttccaaaatagctgtactattttacttccccgtcagtgatgcgtgaggaatccatttgctccacagccttttcaacacttgatattgtcttcctgtttcatttgagctatttgtgggttgtgaatttgaatcctgagccaagcaacacaagg

SEQ ID NO: 924215 - DNA, 584 bp, Homo sapiens
ggcactgtacaaccgtcaccacaatctaatcttagaatatttctctcaccccaaaaagtagctttgtgtccatttgcaggtactgcctatgctcaaggcaaccactaatctactttctgtctctacagatttgtcttttctgggcatttcatgtagatggaatcgtacaatatacataatgtcttaaaattccatccatattatagtatgttgatccatacttcattcctctttgttgcaaaatagtaatctattgtatggatataccacattctgtttctacmttcaccaggtgacgggcatttggattgctttcaccttgtggcgatcatgaataatactgctatgaacattctcatacaagattttatgtaagtttaggttttcatttctcttggatagatacacagaagtgggatttctatatcatatggtaaattaatgtttaatttttcagaaactacaaaatgtttttccaaaatagctgtactattttacttccccgtcagtgatgcgtgaggaatccatttgctccacagccttttcaacacttgatattgtcttcctgtttcatttgagctatt

SEQ ID NO: 924216 - DNA, 775 bp, Homo sapiens
  misc_feature 38: n = A,T,C or G
gggtgcattatccctctcactgagatctgccaaatgtnctagcaccctaccaaaatggtctaagggcaccataaggtgcctaagaaaacattttgctaaaaatatttttaaccaaccacatttgcaacagttcatgaggcttcctggtttgaactccagttattgcccacaaagaaaaaagtwaacttgagaaagtaatctgtgttttgggtcaaccttttctttgtctaagatataaaaattctaccaatcatcttgtgggtgtcctctcattgtttctgttccttctaggcgtgggctgggatgtcactttcttatcctaagatctctaagatctctaaggctgagacagctatgtccatacggcttgcttagctgtgtgttgtttgcactcccaaatcctcaccatatgagaaagatgggctttccaagtgtctatgtgagctggtgacggttaatgacttgccgtgaagggtatgagccagcctgtggccccaaggtctctgtctgaagaggagaactatcctacatgccctaggtgatggtgaagcagcagatgtggccagaaacaaacaaaaatatgagggtgtgacttgtgctaaaaccacccatgggccctgataggctcacaagcctcataggcaaaggatggtttatattccacttcatgcctctgaaacctaagtagtactcagaacaatgttcaattaaagttttgtgaatagtgaggggactgggattactaggtattcatcttggttctcacagcacaagt

SEQ ID NO: 924217 - DNA, 567 bp, Homo sapiens
agggtggaatttctacttccagtttctatttaaaagggattttcccatatgccatttctactccatcctttcctcccaccatgatgactggctggctgctgagaaacatgatttatgcaggagagggtgataaacacatagtttaatgttttctaaatatgaaccttgtttttctcattttatctacaagcatgtgtgactgtggtgtgcataaaactgtgtcaacaatggtttctttccttgaggagctcacatttacaaagaaaggaagaaatttcaaccaaaaaataaaaaacmccaaacctgaaaggaaaatcaacagcaagagcctggactttctaaactaggaggaaggcagagctccaggagactcttctcatttctctgagggcatggaaactccaatgtggaatagagcttggagtttaaaaagatagtctcttctgtgtcctggatagagaccacaccaaaggtttgcaatatagaggcacaacaatcaaaatcatgaattgagatgtccttgacattccattgtcaaggggaattattgcttcccttgcattaaag

SEQ ID NO: 924218 - DNA, 567 bp, Homo sapiens
agggtggaatttctacttccagtttctatttaaaagggattttcccatatgccatttctactccatcctttcctcccaccatgatgactggctggctgctgagaaacatgatttatgcaggagagggtgataaacacatagtttaatgttttctaaatatgaaccttgtttttctcattttatctacaagcatgtgtgactgtggtgtgcataaaactgtgtcaacaatggtttctttccttgaggagctcacatttacaaagaaaggaagaaatttcaaccaaaaaataaaaaacaccaaacctgaaaggaaaatcaacagcaagagcctggactttctaaactaggaggaaggcagagctccaggagactcttytcatttctctgagggcatggaaactccaatgtggaatagagcttggagtttaaaaagatagtctcttctgtgtcctggatagagaccacaccaaaggtttgcaatatagaggcacaacaatcaaaatcatgaattgagatgtccttgacattccattgtcaaggggaattattgcttcccttgcattaaag

SEQ ID NO: 924219 - DNA, 672 bp, Homo sapiens
agtttgctggaggtccactccagacactgtttgcctgggtatcaccagaggaggctgcaaaacagcaaaaattgcagaacagcaaatgttgctgcctgctccttcctctggaagcttcatctcagaggggcacccagccgtatgaggtgtcagttggccctactgggaggtgtctcccagttaggctactcgggggtcagggacccacttgaggaggcagtctgtccattctcagatctcaaactaccaagcaaatggaaaacaaaaaaagcaggagttgcaatcctagtctctgatgaaacagactttaaaccaacaaagatcaaaagagacaaagaaggccattacataatggtaaaggtatcaattcaacaagaagacctaactatcctaaatatatatgcacccaatacaggagcacccagattcataaaacaagtccttagagacctacaaagagacttagactctcacacaataaaaatgggagactttaacaccccactgtaaccattagacagatcaaygagacagaaagttaacaaggatatccaggacttgaactcagctctggaccaagtggaactaatagatatctacagaactctccaccccaaatcaacagaatatatgttcttctcagcaccatatcacacttatttcaaaattgac

SEQ ID NO: 924220 - DNA, 540 bp, Homo sapiens
tacctagtcaagcctcagcaatggcagacacccctcccccagcctggctgctacctcgcaatttcatctcggactgctgtgctagcagtgagcaaggctccgtgggcgtaggacccaccgagacaggcataggatataatctcctggagtaccgtttgctaagacctttggaaaagcacagtattagagcacgagtgtcctgagtttccaggtaccctgtctcatggcttcccttgggtaggaaagggaattccctgaccccttgcacttctcgggtgaggtgatgccccrccctgcttcagctcacactctgtgggctgcgcccactgtccaacaagtcccagtgagatgaacccaatacctcagttggaaatgcagaaatcacctgtcttctgcatcgctcatgctgggagctgtagactggagccattcctattcggccatcttgaaacgatctcaaaatgctactttcatatacgtattttatctgcaactgaacttcttcattcgtatattatttttcagtccagaagggattac

SEQ ID NO: 924221 - DNA, 754 bp, Homo sapiens
ggctctccctacctaatgaatactacagcttggtataaaatcttcaagttattctgaaattactaatgtttcagtcaactaaatttgctcaagatctttgccttccattctcattcactgttggtgtgaccataaatggcacagtctcaatgaatggtaatttgccagtaaacaaacagaaactcagacttggttctaagatggccgaataggaacagctccagtctacagctcccagcataagcgacgcagaagatgggtgatttctgcatttccaactgaggtaccgggttggtctcactggggcttgtcagacagtgggtgcagcccacagagcgtgagctgaagcarggcagggcatcgcctcagccgggaagcacaaggggtcggggaattccctttcctagccaagggaagccgtgacagatggtacctggaaaattgggacactcccaccctaatactgcacttttccaacagtcttagcaaacagcacactaggagattatatcccgcacctggctcagagggtcccacgcccaaggagcctcgctcgctgctagcacagtagtctgagatcgaactgcaaggtggcagcgaggctgggggaggggtgtccgccattgctgaggcttaagtaggtaaacaaagtggctgggaagctggaactggatgaacccaccgcagctcaaggaggcctgcctgcctctgtagactccacctctgggggcagggcatagctgaaaaaaaggca

SEQ ID NO: 924222 - DNA, 754 bp, Homo sapiens
ggctctccctacctaatgaatactacagcttggtataaaatcttcaagttattctgaaattactaatgtttcagtcaactaaatttgctcaagatctttgccttccattctcattcactgttggtgtgaccataaatggcacagtctcaatgaatggtaatttgccagtaaacaaacagaaactcagacttggttctaagatggccgaataggaacagctccagtctacagctcccagcataagcgacgcagaagatgggtgatttctgcatttccaactgaggtaccgggttggtctcactggggcttgtcagacagtgggtgcagcccacagagcgtgagctgaagcaaggcagggcatcgcctcagccgggaagcacaaggggtcggggaattccctttcctagccaagggaagccgtgacagatggtacctggaaaattgggacactcccaccctaatactgcacttttccaacagtcttagcaaacagcacactaggagattatatcccgcacmtggctcagagggtcccacgcccaaggagcctcgctcgctgctagcacagtagtctgagatcgaactgcaaggtggcagcgaggctgggggaggggtgtccgccattgctgaggcttaagtaggtaaacaaagtggctgggaagctggaactggatgaacccaccgcagctcaaggaggcctgcctgcctctgtagactccacctctgggggcagggcatagctgaaaaaaaggca

SEQ ID NO: 924223 - DNA, 754 bp, Homo sapiens
ggctctccctacctaatgaatactacagcttggtataaaatcttcaagttattctgaaattactaatgtttcagtcaactaaatttgctcaagatctttgccttccattctcattcactgttggtgtgaccataaatggcacagtctcaatgaatggtaatttgccagtaaacaaacagaaactcagacttggttctaagatggccgaataggaacagctccagtctacagctcccagcataagcgacgcagaagatgggtgatttctgcatttccaactgaggtaccgggttggtctcactggggcttgtcagacagtgggtgcagcccacagagcgtgagctgaagcaaggcagggcatcgcctcagccgggaagcacaaggggtcggggaattccctttcctagccaagggaagccgtgacagatggtacctggaaaattgggacactcccaccctaatactgcacttttccaacagtcttagcaaacagcacactaggagattatatcccgcacctggctcagagggtcccacgcccaaggagcctcgctcrctgctagcacagtagtctgagatcgaactgcaaggtggcagcgaggctgggggaggggtgtccgccattgctgaggcttaagtaggtaaacaaagtggctgggaagctggaactggatgaacccaccgcagctcaaggaggcctgcctgcctctgtagactccacctctgggggcagggcatagctgaaaaaaaggca

SEQ ID NO: 924224 - DNA, 625 bp, Homo sapiens
gggtcctgacagttagaaggaaaactaacaaacagaaaggacatccacaccaaaaccccatctgtatgtcaccatcatcaaagaccaaaggtagataaaacaatgaagatggggaaaaaccagagcagaaaagctgaaaattctaaaaatcagagcgcctcttctcctccaaaggaacgcagctcctcacmagcaacggaacaaagctggatggaaaatgactttgatgagttgagagaaaaaggcttcagacgatcggtaataacaaacttctccgagctaaaggaggatgttcgaacccatcacaaagaagctaaaaaccttgaaaaaattagaggaatggctaactagaataaacagcatagagaacaccttaatgacctgatggagctgaaaaccatggcacgagaactacgtgacgcatgcataagcttcagtatctgatacgatcaagtaaaagaaagggtatgagtgtttgaagatcaaatgaatgaaatgaagtgagaagagaagtttacagaaaaaagagtaaaaagaaacaaacaaagcctccaagaaatatgggactatgtgaaaagaacaaatctacatctgattggtgtacctgaaagtgacagggggaatt

SEQ ID NO: 924225 - DNA, 625 bp, Homo sapiens
gggtcctgacagttagaaggaaaactaacaaacagaaaggacatccacaccaaaaccccatctgtatgtcaccatcatcaaagaccaaaggtagataaaacaatgaagatggggaaaaaccagagcagaaaagctgaaaattctaaaaatcagagcgcctcttctcctccaaaggaacgcagctcctcaccagcaacggaacaaagctggatggaaaatgactttgatgagttgagagaaaaaggcttcagacgatcrgtaataacaaacttctccgagctaaaggaggatgttcgaacccatcacaaagaagctaaaaaccttgaaaaaattagaggaatggctaactagaataaacagcatagagaacaccttaatgacctgatggagctgaaaaccatggcacgagaactacgtgacgcatgcataagcttcagtatctgatacgatcaagtaaaagaaagggtatgagtgtttgaagatcaaatgaatgaaatgaagtgagaagagaagtttacagaaaaaagagtaaaaagaaacaaacaaagcctccaagaaatatgggactatgtgaaaagaacaaatctacatctgattggtgtacctgaaagtgacagggggaatt

SEQ ID NO: 924226 - DNA, 632 bp, Homo sapiens
aatgggggtgggcacaaacattcgtatcacagcagctctgtttcttactcttcacagaatctattccaaaccttctccattttccacaagccacaccagtccctcatcagatatccatacatgttacttcgaatagggaataagaagctgctcattgagaattctcttgcctcattgtcaccacatggaaaaggtcctctggagtcgcacacgccctttgctcctctgctcatgtcacagcaggagcagtgtctgtcctcccaaagacatcttctccatcaatgcactgcttcttttctcctcccacctcctatgattatcccgtctcccctgaagcttcatccttcccctctctgctggcatctaccatcagkgtttaagcctgttcaagatttcctgtcataaaaagactttgcttaatcccttctatggattgaattttgacatccctctgctaaattcatatgttgaaacctaaaccctaatatgatgatattcggagatgggacctttggcaggtaactaggtttagatgaagtcatgagagtggggtcctcataacgggattgctgtccttaaaagaagaggaagagaccagaactcacccaccctccaccaaatgaggacaaagt

SEQ ID NO: 924227 - DNA, 632 bp, Homo sapiens
aatgggggtgggcacaaacattcgtatcacagcagctctgtttcttactcttcacagaatctattccaaaccttctccattttccacaagccacaccagtccctcatcagatatccatacatgttacttcgaatagggaataagaagctgctcattgagaattctcttgcctcattgtcaccacatggaaaaggtcctctggagtcgcacacgccctttgctcctctgctcatgtcacagcaggagcagtgtctgtcctcccaaagacatcttctccatcaatgcactgcttcttttctcctcccacctcctatgattatcccgtctcccctgaagcttcatccttcccctctctgctggcatctaccatcagtgtttaagcctgttcaagattkcctgtcataaaaagactttgcttaatcccttctatggattgaattttgacatccctctgctaaattcatatgttgaaacctaaaccctaatatgatgatattcggagatgggacctttggcaggtaactaggtttagatgaagtcatgagagtggggtcctcataacgggattgctgtccttaaaagaagaggaagagaccagaactcacccaccctccaccaaatgaggacaaagt

SEQ ID NO: 924228 - DNA, 754 bp, Homo sapiens
acaaggaggattctcccagcacagtgcaccagctctcctaagggacaaactgcctcctcaagtgggtccctgacccccatgccccctgactgggagagacttcccaacaggggttgacacatacctcatacaggacagctctggctggcatcagrccagtgcccccctgggatgaagattccagaggaaggagcaggcagcaatctttgctgttctgcagcctccactggtgataccaggtgtaacagggtctggagtagacccccagcaaactgcagcagacctgaagaaaaaggttcctggctattagaagaaaaactaacaaacagaaagcaacaacatcaacatcaacaaaaaagacacccacacaaaaaacccacccaaagattatcatcctcaaaaatcaaaggtagataaatccatgaagatgaggaaaaaccagtgcaaaaatgctgaaaattccaaaaaccaggatgcctcttctccaaatgatcacaactcctgtccagcatgggcacaagactggaaggagaatgagattgatgaattgacagaaataggcttcagaaggtgggtaaaaacaaacttgtctgagctaaaggagcatgttctaacccaatgcaaggaagctaagagccttaataaaaggttacaggaactgctaacaagaataagcagtttagagaagaacataaatgacctgatggagctgaaaaacacagcatgagaacttcgtgaagcatacacaagtatc

SEQ ID NO: 924229 - DNA, 785 bp, Homo sapiens
gacaaggaggattctcccagcacagtgcaccagctctcctaagggacaaactgcctcctcaagtgggtccctgacccccatgccccctgactgggagagacttcccaacaggggttgacacatacctcatacaggacagctctggctggcatcaggccagtgcccccctgggatgaagattccagaggaaggagcaggcagcaatctttgctgttctgcagcctccactggtgataycaggtgtaacagggtctggagtagacccccagcaaactgcagcagacctgaagaaaaaggttcctggctattagaagaaaaactaacaaacagaaagcaacaacatcaacatcaacaaaaaagacacccacacaaaaaacccacccaaagattatcatcctcaaaaatcaaaggtagataaatccatgaagatgaggaaaaaccagtgcaaaaatgctgaaaattccaaaaaccaggatgcctcttctccaaatgatcacaactcctgtccagcatgggcacaagactggaaggagaatgagattgatgaattgacagaaataggcttcagaaggtgggtaaaaacaaacttgtctgagctaaaggagcatgttctaacccaatgcaaggaagctaagagccttaataaaaggttacaggaactgctaacaagaataagcagtttagagaagaacataaatgacctgatggagctgaaaaacacagcatgagaacttcgtgaagcatacacaagtatcaatagctgaatggatcaagcagaagagagg

SEQ ID NO: 924230 - DNA, 785 bp, Homo sapiens
gacaaggaggattctcccagcacagtgcaccagctctcctaagggacaaactgcctcctcaagtgggtccctgacccccatgccccctgactgggagagacttcccaacaggggttgacacatacctcatacaggacagctctggctggcatcaggccagtgcccccctgggatgaagattccagaggaaggagcaggcagcaatctttgctgttctgcagcctccactggtgataccaggtgtaacagggtctggagtagacccccagsaaactgcagcagacctgaagaaaaaggttcctggctattagaagaaaaactaacaaacagaaagcaacaacatcaacatcaacaaaaaagacacccacacaaaaaacccacccaaagattatcatcctcaaaaatcaaaggtagataaatccatgaagatgaggaaaaaccagtgcaaaaatgctgaaaattccaaaaaccaggatgcctcttctccaaatgatcacaactcctgtccagcatgggcacaagactggaaggagaatgagattgatgaattgacagaaataggcttcagaaggtgggtaaaaacaaacttgtctgagctaaaggagcatgttctaacccaatgcaaggaagctaagagccttaataaaaggttacaggaactgctaacaagaataagcagtttagagaagaacataaatgacctgatggagctgaaaaacacagcatgagaacttcgtgaagcatacacaagtatcaatagctgaatggatcaagcagaagagagg

SEQ ID NO: 924231 - DNA, 754 bp, Homo sapiens
acaaggaggattctcccagcacagtgcaccagctctcctaagggacaaactgcctcctcaagtgggtccctgacccccatgccccctgactgggagagacttcccaacaggggttgacacatacctcatacaggacagctctggctggcatcaggccagtgcccccctgggatgaagattccagaggaaggagcaggcagcaatctttgctgttctgcagcctccactggtgataccaggtgtaacagggtctggagtagacccccagcaaactgcagcagacctraagaaaaaggttcctggctattagaagaaaaactaacaaacagaaagcaacaacatcaacatcaacaaaaaagacacccacacaaaaaacccacccaaagattatcatcctcaaaaatcaaaggtagataaatccatgaagatgaggaaaaaccagtgcaaaaatgctgaaaattccaaaaaccaggatgcctcttctccaaatgatcacaactcctgtccagcatgggcacaagactggaaggagaatgagattgatgaattgacagaaataggcttcagaaggtgggtaaaaacaaacttgtctgagctaaaggagcatgttctaacccaatgcaaggaagctaagagccttaataaaaggttacaggaactgctaacaagaataagcagtttagagaagaacataaatgacctgatggagctgaaaaacacagcatgagaacttcgtgaagcatacacaagtatc

SEQ ID NO: 924232 - DNA, 754 bp, Homo sapiens
acaaggaggattctcccagcacagtgcaccagctctcctaagggacaaactgcctcctcaagtgggtccctgacccccatgccccctgactgggagagacttcccaacaggggttgacacatacctcatacaggacagctctggctggcatcaggccagtgcccccctgggatgaagattccagaggaaggagcaggcagcaatctttgctgttctgcagcctccactggtgataccaggtgtaacagggtctggagtagacccccagcaaactgcagcagacctgaagaaaaaggttcctggctattagaagaaaaactaacaaacagaaagcaacaacatcaacatcaacaaaaaagamacccacacaaaaaacccacccaaagattatcatcctcaaaaatcaaaggtagataaatccatgaagatgaggaaaaaccagtgcaaaaatgctgaaaattccaaaaaccaggatgcctcttctccaaatgatcacaactcctgtccagcatgggcacaagactggaaggagaatgagattgatgaattgacagaaataggcttcagaaggtgggtaaaaacaaacttgtctgagctaaaggagcatgttctaacccaatgcaaggaagctaagagccttaataaaaggttacaggaactgctaacaagaataagcagtttagagaagaacataaatgacctgatggagctgaaaaacacagcatgagaacttcgtgaagcatacacaagtatc

SEQ ID NO: 924233 - DNA, 791 bp, Homo sapiens
actcaaagatctacagattcggtgtaatctccattaaaattccaacagcctattttgcagaaatgaaaaacatgatgctcaaattcatatggaattgcaaggacccccaaatagccaacatgattttaaaaaagaacaaatttggaggacttactcttcctgatttcaggacttactacaaagttacagtagtcaaaaatcgtgtggtactggcataaagatacacccatgaaatagaactgagaagaaataaatccataaatataaagccaattgattttcgacaagggtgccaactccattcaatggagttgaatggagttgaattattaaaaataagtccaatgccattacaattaagaaatttggttcatctaaagttacaaagaaaatgagaagacaaaatacaaattggaaggatatatttggaacatatttcactgacaaagagtagtgtgaccaatgacctctgcattgttaaacaccgtaatcaattcttaggtctcccttgtcagcaacatttgaccctgttggttactccctctataaaacamcttctcctgtttcctagacgcagtctcctgatttccctcctctttctctgcacaagcctcctcagtctcctttggtggtttcttctcatgtgactataaagcagagtgacctagagctctggtcttggacctcttctgttgtcttatctgctttcattccctaagtcatttcattcagcttcatggctttcataccatctctatgctgatgaattccaattggatatctctagccca

SEQ ID NO: 924234 - DNA, 488 bp, Homo sapiens
catttgataatcctactgcctggcgtgtggaccaggaggaaggagaggaagcagagttaggctgtctgtccactatcaaaaactgcaactgaagtgggtcctgggacacaaatgactggcagtggacacgctagagagaagatctgagactgatctgtcacgcgtgggtggagaaatcacagtcgatggggggtgccatcccacaacatgcagctttcagcagacatcgcacaagttagaagtgcaacctgtctgcatcagaaatacagtgcccatgagcagcttcactccagttggccccaccggagaacaagcccttcatcatgggcatctgcaagasatgtgggaggtctgtgctgcatctgtgctgtgtggtgacggtttcgaaccccactaacaggtgtttaaaacctgccagggttccagagtcaaagatgcctttgttgcattgagctatgcctgctttctgcttggcacagcttgtggtg

SEQ ID NO: 924235 - DNA, 619 bp, Homo sapiens
ttttatttatgtaagaaaatctatgttatttcttgaattgggacaacataacatagcagaggattaagtaccttttataatgtgaaagaacaaagcggtaaaatgggtgagataaagaaataaagaaattaaattggctgggcacggtggctcacgcctgtaatcccagcactttaggaggcagaggcacggggatcacgaggtcaggagatcgagaccattctggctaacacagtgaaacaccatctctattaaaaatacaaaacttagccgggcrtggtggcgggtgcctgtagtcccagctactggggaggctgcggcaggagaatggtgtgaaccctggaggcggagctcgcagtgagccgagatcgcgccactgcactccatccagcctgggcaacagagcgagactccgtctcaaaaaaaaaaaaaaaattagctgggtgaggcggtgggtgcctgtagtcccagctactcaggaggctgagaaggagaatggtgtgaacccaggagacagagcatgcagtgagcccagatcgcactgctgtagcctgggcgacagagcaagactctatctcaaaaaaaaaaaaaattaaattatagttaattcttgtctttc

SEQ ID NO: 924236 - DNA, 585 bp, Homo sapiens
ataaaaggcatattagcaggaagcgcaacgttgtgggggaaaagggagtcgtatcatacaggacttgtaagccaatatacaacctttggttcttactcagggaaatgggaaaccactgagagattttaacagatgaaaatgwgatttttttttcgaaggattctattgcctttggtgtgttaaaaagagtgaagggtaagggcaaaggtcaaagcaggcaactgatccagtgacatgatccaggtgaaagttagattattgcaatagcccagtgtgggagtagcagagatagtgagaggtactttgcatcagcttgtattctcagattgtgtcaacaaagtttggatgatagatctaatagatccagaagcagaagactttaagaataagataattccaaagtttttgtttcagcaactgaaaggatggggtcaccatgtattgaaatggaaaacactgtcataaaatggttttgagggagaagatcaggagtcagggttttagatgttaagattgttgttttcactatgtgaaggtgtaagcagaagttgtatatataaatctggacttctggggagtggtgtg

SEQ ID NO: 924237 - DNA, 578 bp, Homo sapiens
tgccgttatccaaagagcagcacgaacccgacagggctgagtggcttgtgctagggagaggtttgtgtcattcctgctgaccaaactgcaggaaaaactgctaattgtcatgctgaagactgcctgacggggagactctgccttctgtaagtaggtcatgtaaagagcacktgctccttgctgctactcatagatgcctgctccgtgatctgatttctgcactgaatctatgttatgcatatggaatgtatacagatacatgtatgtaatatatacacaatatgtaccatttttataacctatgagaaaagtgcagttcttgccaaggattagcaccaatcacagacatcctaagaataccaatgctgacactgctagcatcctgtcagattggagaaagaattaaattcccccgtattgtggatggttacatgttctttggtttatctcatggcctatttaaagtctgtgggagaagaattagagaaacctatatcttccagccagattttgtcttgtttcagcactgtattagtttggggaagaatatatttgacctctgaattgactttagactt

SEQ ID NO: 924238 - DNA, 603 bp, Homo sapiens
gcttggcaggggcaaagctgagtgatgaagacctcgagtgttagtgtctggacccaaatcatggcttcactattttctttgcttgggggtggtacttgatctgtctcagtttcctgctttataaaaggaggataaataatggtaatagcttcagtcaaagggcacttatgaagatgaattgagattaaccatatcataagggtttaattctgtccttggcaaataatatgcactatattagtttcctatggctgctgtaacaaattgccacaaacttggtggcttaacactgtacaaatttactatctttcagctttggaggtcagatatttgaaatcartttcactgggctaaagtcaaggtattggcagaccatcattccttatggaggttctgggagagaatcagtttccttgtcttttccaactttcagaggccacctttgtcacttggctcatggcccgtcttctatcttcaaagtgcatcactccaacctcctgcttctgtcatcccatctcttgacttccaccttttgactctcctggccttcctcttaataatgccccatggtgtttgcatcaggccccaccttggatcattaca

SEQ ID NO: 924239 - DNA, 573 bp, Homo sapiens
taatgttggtttctagcacattgggcagtgagccttttttgcttggtaacacctagagtagtcacgctcttagggacagaaagtagaagggtagttgccagggggtgggaagaatgaagaatagcaagttgtttaatgggtatagcacttcagttttgcaagatgaaaagagttctggagatggatagtggtggtagcacaacaaygttaatgcacttaatactactgaatttttttacttaaaatatttaagatggtattacggactgaattgtgtcccccctcccaagttcatatattgaaattctaacccctattaccttagaatgtgactgtatttggagttaagaactttgaagaggtaattaagtttaaataagatcataaaggtggaacttataagaaggaggaagagacagcagggatgtgcacatagataaaaggctatgtggggaaataacaaaaagatgtctgctttcaacaacgcagggaggcctcaggagaaactagacccactgtcaccttaagctttcacttccagccttcagaacttgagaaaataaattgctgcta

SEQ ID NO: 924240 - DNA, 579 bp, Homo sapiens
taatgttggtttctagcacattgggcagtgagccttttttgcttggtaacacctagagtagtcacgctcttagggacagaaagtagaagggtagttgccagggggtgggaagaatgaagaatagcaagttgtttaatgggtatagcacttcagttttgcaagatgaaaagagttctggagatggatagtggtggtagcacaacaatgttaatgcacttaatactactgaatttttttacttaaaatatttaagatggtattacggactgaattgtgtcccccctcccaagttcatatattgaaattctaacccctattaccttagaatgtgactgtatttggagttaagaactttgaagaggtaattaagtttaaataagatcataaaggtggaacttwtaagaaggaggaagagacagcagggatgtgcacatagataaaaggctatgtggggaaataacaaaaagatgtctgctttcaacaacgcagggaggcctcaggagaaactagacccactgtcaccttaagctttcacttccagccttcagaacttgagaaaataaattgctgctattgaag

SEQ ID NO: 924241 - DNA, 624 bp, Homo sapiens
ctgactaaaatttcaccaggctggaatttcccaatcctagcaagcctgggggtgctgcaggagacgagggcgtatttcatcccttattttcaactgcataagacaaacactcccagagcggccattttagagacctccccttgggaatgcattcctttcccagggctattacttgctgagaaaaagaattcagtgatatttcttctattcgcttttgcaagaagagaaatgtaacactgttctgcccggccccacaagcagtcagaccttacggttatctcccgtgttccctgaaaatcgctgttatcctgttcttttaggatgcccagatttcatattgttcaaacacatatgttttacaaacaatttgtacagataatgcactcatcacagggtcctgaggcaacatacatcctcagcttaggaagatgatgggattaagagattaaagtaaagacrggaataggaaagtataagagtattgattggggaagtgatcagtgtccatgaaatcttcacaatttatgttcagagattgcagtaaagacaggcataagaaattatgaaagtattaatttggggaactaataaatgtctgtgaaatcttcacaacttatgttcttc

SEQ ID NO: 924242 - DNA, 824 bp, Homo sapiens
gcacccatagtcccagctactcaggaggctgaagtaggaggatcgcttgaacctgggaggtggtggttgcagtgagctgagattgtgccactgcattctagaataggcaagagagtgggaccctgtctcaaaacatcttaaaaaataaaagaaggagaagctttagagacaggtgctccaaacttcctacgtaaaatacaaaacaatacagcttactactaaaaacctacaaagtcttcacctaacacattaatttgtaactcagagagcaaatgatttctagatgcagagttaggggcagagattaggttttatcaactttctactttaaattcttggacagtgccaggcacgtgcaagttctaaataagagtttcaaagaaaaacattgaacaaggctggtgtttaactsatcttaccctcaagggattttcattgaggtatggaggctctccttctaccatctcaatagccatgatacccagagaccatatgtcgactttagggccataagctttccgtgtaaccacctctggtgccatccagtatggcgttccgaccatggtactgcgtttgctctgctcaggggtgatctgggcacagaaaccaaagtcagctacaaaacaaaacaaaacagagttaatggcttccatggatggttttagcagaagagttcacttcagattatgtaattaattatattttgactattaggcctcttgtttttaaagatttcattaataaagtaaaccagaatgagtttaaaaatattttcatgatgtaacacactctcacattttacttttacttgccacagagtccaa

SEQ ID NO: 924243 - DNA, 587 bp, Homo sapiens
gatctgatggttttatttatttatttatttatttttatttctttttgagatggagtcttgttctgttgcccagggtggagtgcaatggcatgatctcagctcactgcaacctgtgcctcccaggttcaagcaattctcccgcttcagcctctcaagtagctgggatcacaggcatgcatcaccacgtctggctaatttttgtacttttgtagagacagggtttcaccatgttggccaggctggtcttgaacttctgacctcaggtgatccrcccacctcagcctcccaaagtgctgggatgataggcatgaaccactgtgcccagcctgatctgatttctggttttaaaagtggcagtttctcctatgcttgcattcattctctctctcctgccaccatgtaagatgtgtctgcttctccttctgctataagtttcctaaggcttccccagccttgcagaactgtgagtcaattaaacctcttttctttataaattacccagtcttgggtatgcctttatagcagtgtgagaacggactaatacaggaggattagtcttagtctttgtacatgtagtagaattcagc

SEQ ID NO: 924244 - DNA, 768 bp, Homo sapiens
agcactttgggaggccgaggcaggtggatcatttgaggtcaggagttcaagaccagcctgaccaatatgatgaaaccccacctctactaaaaatacaaagattagcaggtcatggtggtatgcatctgtaatcccagctactcgggaggctgaggcaggaaagtcacttgaacccaggaggcagaggttgcagtgagccaagattgcaccactgcactccagcctgggtgacagagcaagattccrtctcaacaaaaaaaaacaaaacaaaagcaatatgtattgcatttataaccgaagaaaaaccaaaggtgaatctgatttcggaaaagtaacttaaggaaatgtaacatctaaaaataagaggaaagtatcaaatctaaatttaaatgggataatgataaccccagtttagtatttatggtgattttctttaaagaagaaagaatcccttagactttatggagtgctctgtgactgtgttgagctatcttaagtggatcaaagatgttcttctatttttaggccttgtacctaatagcaactaatggaaccccagaacttcagaatccagagaaactttccccaatatttcgggatttcttaaatcgatgtttggaaatggatgtggaaaaaaggggttcagccaaagaattattacaggtaaatttaaaaatgatttcatttgggggaatagttgacttttttggtaaccgacagaaagctttcctagggctaataagtagatttcactactcattgatcacc

SEQ ID NO: 924245 - DNA, 768 bp, Homo sapiens
agcactttgggaggccgaggcaggtggatcatttgaggtcaggagttcaagaccagcctgaccaatatgatgaaaccccacctctactaaaaatacaaagattagcaggtcatggtggtatgcatctgtaatcccagctactcgggaggctgaggcaggaaagtcacttgaacccaggaggcagaggttgcagtgagccaagattgcaccactgcactccagcctgggtgacagagcaagattccatctcaacaaaaaaaaacaaaacaaaagcaatatgtattgcatttataaccgaagaaaaaccaaaggtgaatctgatttcrgaaaagtaacttaaggaaatgtaacatctaaaaataagaggaaagtatcaaatctaaatttaaatgggataatgataaccccagtttagtatttatggtgattttctttaaagaagaaagaatcccttagactttatggagtgctctgtgactgtgttgagctatcttaagtggatcaaagatgttcttctatttttaggccttgtacctaatagcaactaatggaaccccagaacttcagaatccagagaaactttccccaatatttcgggatttcttaaatcgatgtttggaaatggatgtggaaaaaaggggttcagccaaagaattattacaggtaaatttaaaaatgatttcatttgggggaatagttgacttttttggtaaccgacagaaagctttcctagggctaataagtagatttcactactcattgatcacc

SEQ ID NO: 924246 - DNA, 768 bp, Homo sapiens
agcactttgggaggccgaggcaggtggatcatttgaggtcaggagttcaagaccagcctgaccaatatgatgaaaccccacctctactaaaaatacaaagattagcaggtcatggtggtatgcatctgtaatcccagctactcgggaggctgaggcaggaaagtcacttgaacccaggaggcagaggttgcagtgagccaagattgcaccactgcactccagcctgggtgacagagcaagattccatctcaacaaaaaaaaacaaaacaaaagcaatatgtattgcatttataaccgaagaaaaaccaaaggtgaatctgatttcggaaaagtaacttaaggaaatgtaacatctaaaaataagaggaaagtatcaaatctaaatttaaatgggataatgataaccccagtttagtatttatggtgattttctttaaagaagaaagaatcccttagactttatggagtgctctgtgacygtgttgagctatcttaagtggatcaaagatgttcttctatttttaggccttgtacctaatagcaactaatggaaccccagaacttcagaatccagagaaactttccccaatatttcgggatttcttaaatcgatgtttggaaatggatgtggaaaaaaggggttcagccaaagaattattacaggtaaatttaaaaatgatttcatttgggggaatagttgacttttttggtaaccgacagaaagctttcctagggctaataagtagatttcactactcattgatcacc

SEQ ID NO: 924247 - DNA, 458 bp, Homo sapiens
gctgcgtgcggcgcttgcgggccagcttgagttccgggtgggcatgggcttggtgggccccgcactcgaagcagccagccagccctgctggccccgagcaaggggggacttagcagccgggccagtggctgcggagggtgtactgagtccaccagcagtgccggcccacyggcgctgtgctcgatttctcgccgggccttagctgccttcccgcggggcagggctcgggacctgcagcccaccatgcctgagcctcccacccactccgtgggctcctgtgcagcccgagcctccccgacgggagcaccaccccctactccacggcgcccagtcccatcgaccacccaagggatgaggaatgcgagcgcacggtgcaggactggcaggcagctccacctgcagccccagtgcgggatccactaggtgaagccagctgggctcctgagtctggtggggac

SEQ ID NO: 924248 - DNA, 479 bp, Homo sapiens
gcagtggctcatgcctataaccccggcaatttgggagatccaggcaggcagatcacttgagcccaggagttcaagaccagcatggacaatgtggagaaaccctgcctctacaaaatatacaaaaattcgccaggcatggtggtgtatacctccagtcacagctacgctggatgctgaggcaggaggattatttgagcccaggaggcagaagttgcagtgagctgagaccaggccactacactccagacaaggctacagagtgagaccccatcaagaaacagagaaagagagaaagggagaaagagagagagagaaggaagaaaagaragaagggattctttgtaaccttcttgagggaggagccaagagggccgaataggaacagctccagtctacagctctcagcctgacgacacagaagacaggtgatttctgcatttccatctgaggtacggggttcatctcactagggagtgcca

SEQ ID NO: 924249 - DNA, 545 bp, Homo sapiens
gggttcatctcactagggagtgccagacagtgggcgcaggtcagtgggtgcgcgcaccgtgcacgagccaaagcagggcgagacattgcctgactcgggaagcgcaaggggtcagggagttccctttcctaatcaaagaaaggggtgatggacggcacctggagaatagggtcacwcccacccgaatactgcgcttttccgacgggcttaaaaaatggcgcaccacgagattacatgccgcacctggctccgagggtcctactccaaggagtctcgctgattgctagcacagcagtctgagatcaaactgcaaggcggcagcgaggctgggggaggggcgcccaccattgcccaggcttgcttaggtaaacaaagcagcagggaagcttgaactgggtggagcccaccacagctcaaggaggcctgcctgcctctgtaggctccacctctgggggcagggcacagacaaacaaaaagacagcagtaacctctgcggacttaaatgtccctgtctgacagcttcgaagagagcagtggttctccca

SEQ ID NO: 924250 - DNA, 749 bp, Homo sapiens
ttgttctgttttcatttaacagatggcacagagcaagtagggattcagagatgcatcaggcatggccactgcccctgaggagcttagggagtagaggaacgggaatgtgagctgggcatgatgatgcaggtgacaggtgcagtgacrgtgacttcagttcactctcactggtgaatatgatcactccatgaatttcctggttcatcccttaccaatgggaaatgaacactatccgtgaagtccccaaatgtagatcaaattctgatgacttttctttgtgcatgttagtgaaggcttacatcttagtccaaacggaatgctgatgccaactcccatcaaaaattacaaatcttggctcttctttagcttgggaggcatagagaatagtggttaccagcagaacctccaagtcctgtgttgtatgatcttgagaaaattacttaccttctcggtgcctcggtatcttcaatggaaaaatgaggctaataatcacatgtacctcataaagctctgtgaggatttaagagttaatgcagaaaaagaatttggcagagcatctagcacaccgtcactgctttataaatgacagccacactgtattagcatttcgacacaagatggaagccaatccagaagtgtgctccatacccaggttataaccatcatacaaccatcagtggcagtggaatgtggggctacactgaagagtgcataagctgctctcctagcccaggtaaacagagcatcag

SEQ ID NO: 924251 - DNA, 625 bp, Homo sapiens
caaattcaatataaaaatgaaagtctgtgaaataaaatatgtttcattgaggcatttttcatgaactatattattttagacaaactcccatagggataaatgtatttcatcttcctcaggtgtaaaaaaaatcttccaagaagcactatttcctaacaaatgaaaatatttccatctctaaccagcctagaaatgttacccttaggaataaaaaactttgctgtgattctgggcccttgttcaggactcattatgtcaaaagcagattaaaatattttatttatcccatctgtgaatttagtatttcactccttgtggtaactctttcttttctcctcgaagacagagatattttatttcaatgatgattatagcctattattatcctcgtgtgactaaaaaggtaatmaaatgaatgttgcatttatcattcaaaaatcgtcctcagaaaatatcagtatgtgcttaccgtagcaaaacacaactatattgttgctaaaattaatttaaaaattaagttaaaatttgtatatactaaaagtgaattaactatgcttgtcattgcttagataaatcatgtcaaattatgtcccttgatgtatactctgtcctattaaatgaatgt

SEQ ID NO: 924252 - DNA, 832 bp, Homo sapiens
ttaagacattaattcttccaatctatgaacatatgaagcttttccacttatttgtgttcttattaatttctctcattagattgtatagttttctatgtattggtttttgccttcttagataagtttattcctaagtgttttattctttttggtgttattgtaaatgggattgatttcctaattcttttcagaaagaacattgttagtgtatattaacacatgacttttygcatgttgatttgtatcttgtaattttattgaaaattttcactaattctaatagttgtttggtgaaatctttaggattttctatatataagatcatgtcatcagcacacagggataatatcatttcttcctttcctacttgaatgccttttatttctttttcttgtctaccttctttggctgggacttgccaatactgtgtttaatagaagtgataaaaatgagaatccttgctttgttcctgatcttagaggaaaaattttaatttttcaccattgagtaagcccatggaaaagcttacagcttttcatatatggtctttgttatcttgaaattttttccttctaatttttgtttgttgacagtttttctcatgaaagaatgttgaattttatccaatactttcccagcatctattgcaatcatgtgattttattctctattccgtaaatgtggcataccaatttgattgattttcacatgctgaaccatatcagcattccagggctatatcctacttggtcatggtgtgtgattcttttactgtgctgttggatttggtttgctagtattttgtagaggatttctgcatctaaatttatcg

SEQ ID NO: 924253 - DNA, 571 bp, Homo sapiens
aaataaaatcaagaactcaatcccttttccaatagctgccaaaaaaaaaaaaaaaatacttaggaatatacctaaccaaggaggtgaaagacctctacgaggaaaactacaaaacattactgaaagaaatcacagatgacacaaagaaatggaaacacgtcacatgctcacagatgggtggtatccatattgtgaaaatgaccatactgccaaaagcaatctacaaattcatgcaattcctatcaaaatacyaccatcatttttcacaaaattaggaaaaacaatcctaaaattcatatggaaccaaaaaagagactcacagccaaagcaagactaagcaaaaagaacaaatccggaggcatcacattatctgacttcaaactatactaaaaggccatagtcaccaaaacagcatgacactggtgtaaaaataggcacatacaccactggaacagcacagagaacccagaaataagcccaaatacagccaactggtctttgacaaagcaaacaaaaacactaagtggggaaaggacaccatattcaataaacagtgttgggataattggca

SEQ ID NO: 924254 - DNA, 615 bp, Homo sapiens
gagaaactttctttttttttgagacagagtctcactccgacggggtttcaccatgttggccaggctgatctcaaactcctgacctcaagtgatccgcccgcctcagcctcctaaagtgctaggattacaggtgtaagccaccgggcctggtcttttatttatttatttttttgagatggagtctcgctctgtcacccaggctggaatgcagtggcgctctcggctcactgtaacctgcaccccctgagttcaagtgattctcctgcctcagcctcctgagtagctgggactacaggcgaccgccaccatgcccagctaatttttgtattttyagtagagatggggttttaccatgttagccaggatggtctcgatctcttgaccttgtgatacacctccctcggcctcccaaagtgagtgagggagccaccgcgcccaaccggcacctggtcttttatgagaagctttgactgaacatgagttagttttctttcatccacatagtattctgtttctccaaggtgctttccctgcttgtgtgctttttgtcttgcatgatagaggcttactttagagttctggtaatttttggtttcttacgatgaggaatgaagg

SEQ ID NO: 924255 - DNA, 604 bp, Homo sapiens
agatatgccatgttcaaatatttgaagacagcattaaagatgccaataatctcaaaatttaggtcaagcgcagtggctcttgcctgtaatcccagcactttgggaggctgagctgggcgactgcttgaggtcagaagttcaagaccagcctgaacaacatggtgaaatcctgtctctaccaaaaatacaaaaaaaaaattagccaggtgtgcacacctgttgtcccagctacttggaaggctgaggtgggaggattacttgagcctgggaggtggaggttgcagtgagctgagattgcaccatttgcactccagcctgggcagcagaatgagctcttgtctcaaaaaaaaaaaaaaraaaaaagaaagaaagaaaaagtaattaagagtcaatacaatcccagtggattttttgattttttggggtaacaagcttgattataaactttccatggaaatgcaaaacaagcatgaatagcgaagacatacacacacttttatatatagacacttgttttatgacaaagttaggaaaaaagttcttttcaatacatgaagctaggtcaattggttatctatatgccacgaatgaaaataagccttat

SEQ ID NO: 924256 - DNA, 611 bp, Homo sapiens
tcaccatgttggccaggctggtctcgaacttctgacctcaagtgatcagcgtgcctctgcctcccaaagtgctggaattacaggcgtgagccactgctccctgccggctactcccttttcaacccctcctttttctgtgtcaaagttgctgagtggcagtcagaaaatgaaagtacctctgattggtcccctcccacaaccaatcaggctagtggctggccactacttcatttacataacgtgaatccatggtaaacctctagagagtatttaaactgcagaaaattatgtaacttgactgtcttgagccactgctgcccccgctcccaccctgtggagtgtgctgtcctttaaaataagtctctgctttggctgccttgcttgtgtggtttgttcagttctttgttcaagacgccaagaacctggacarctaccctcaactgcatggtttagaggaactcttctgttccactgaaggcattttgtctatctccagtggcagaaaattgactcactcataataggagcgatgaagaagcgatacttctggccaacatggtgaaaagccatctctactaaaaatacaaaaattagctgggcgtggtggcgtg

SEQ ID NO: 924257 - DNA, 757 bp, Homo sapiens
gggacaatggcctcactgataatcttgagatcttgcactaagctccactgtccgttgtgtttctgtactcctaaaattggagtattgcaggggctactgcatgcttttactaggccttgggcttttaggtccttaatcttttggagtccttgttgggcctcaggtctaagggggtactgcttttggtagggaaaggaggtggaatccttaatttttttttttttttttttttttttgagacggagtctccctctgtcgcccaggctggagtgcagtgcaagctccrcctcccgggttcctgccattctcctgcctcagcctcccgagtagctgggactacaggtgcccaccaccatgcctggctaattttttgtattttttagtagagacggggtttcaccacgttagccaggatggtctggatctcctgacctcgtgatccccccacctcagcctcccaaaatgctgggattacaggcatgagccaccacacccagcccctcttgtttaacttgaacaggacaggcattctttgctcatccatattgtcctgttgcccagacttcaggattaattccttcctcaagcaggggacaacaagcaggtgttctcctatgttcaggtgtataatggcccctgcttttgctagaatgtctctccctaacaagggagtggggctttcaggcataattagaaaagcatgtgaaaagagtaaagttctccagtcacaacttagtggctgggagaactatctagt

SEQ ID NO: 924258 - DNA, 633 bp, Homo sapiens
taagtccagttctttagagttgagtcatggtaggcaaagccactccagggtgccactagtcctattgctgccccatttcccacctgaattaatcctattgctcacttacttctggcattcctcggtcttacacgattatagactgtgacccctgaaagggcaatggtggccaatgtacatcgacccctgtaccaagtttttgatatacaaaagaaagctgctcctaaaagaatagatgactccccaggaaggtgggtgtggtttaggggtgtgacttttccccactcagggccaaaaacaaaaataagcccatttgaggcacaaacagagaagccctgcagggtgtgaygtttacactttgctaccaagttaggtctatagaaatatttcttccctgttccagtgggtgtggtagaaccatctttgttttccagaagggggtggtattcctaccttccccgattaggctgttgtttttttctctgtatgttctgatctgagaaaaggcatcatatatatcctccttgcttatgagtggaatcccatttaccttgctgcagccttgggaacctggcgactagagttggatcatagcattgcagggaaacttccacttttgtctcaacacagcag

SEQ ID NO: 924259 - DNA, 727 bp, Homo sapiens
cattattttcaagtatataaaagtctatcagtcacttttcagtttgaaaaataatctgtagctaggcgaggtggctcatgcctgtaatctcagctacttgggaggctgaggcaggaggatcccgagcccaggagtccaaggctgcagtaagctatgatcccaccactgcactccagcctgggtgacagaatgagaccccattaaaaaaaawatatatatatatatacacacatatatatatgtccactatttgagaacatctatttgttgaaattaattgtgctagggaaatgttattgcacgggactacaaaaaatgagtctttctagtaaataagatgctcatcacggtgtatgagcaataacttaataatgctagtgaggagagtaacttaataccttacatctctttgttctgttatttaactaattcaccttactcataaaagaaaggtattttagaaagagtaagtcatactgctcaggagacagtttcccttactcagatggatataggatggacctcatcctcatgtgtgcctaaattcaacaattccggccaacaaactgtttttagtggcaattgtagttgcaggttagggcactattgagaaaggccaatcagttatgtatgttcctcttaaaaaattcatagtccacttagggaagaaatatgtaaataataagtataaaataatgtgtaggggccaggcacggtggctcacacc

SEQ ID NO: 924260 - DNA, 841 bp, Homo sapiens
gctgcaggagccagagtgggcataaaaaatcctgttatccaaatattagagagctgtgttcttattgctgattgtcagttctaaacacagaagtgcagacgaagagactttggctattatctttgtacctccctcactgttgcaagcccctcctccttgggctgaattgacttccaagaaatttaaagaacgggtgacctttcttccctcttcacatccccttcatctttttctttttccactttggggtgcaggatattaatgattaggacattcaaaagaaagtaaatatatggggaaaattagaaagtgactaaaatgtatggtcaggtaaaggtamaagcatagaaaagacctgaaaaaaaaacttaagtttagaatgtaggctgattcttggcacagagattacctacaaaaatctttaaagaccgaaaagaataaaaacaatttaaaaaagcaaaccatgggaaagaagaagaacgtgattttgttttagcacattattatatataaatgtccagttttcaacaacaacaaaaaatcaacaaggcatacaaagaaatgggaaagtatgggcaattcaaagggtaaaaatatcaacagaaactcttcttgaaaaagacctgatagcagttccactggacagaaaaacaactaaaagatattcaaaaaggctgggcgcagtggctcacgcctgtaatcctaacactttgaacaccttgggaggccaaggtgggcagatcacctgaggctaggagtttgagatcagcttggccaacattatgaaaccctgtctctactaaaaatacaaaaattaaccaggcgttgtggctcatgcctg

SEQ ID NO: 924261 - DNA, 841 bp, Homo sapiens
gctgcaggagccagagtgggcataaaaaatcctgttatccaaatattagagagctgtgttcttattgctgattgtcagttctaaacacagaagtgcagacgaagagactttggctattatctttgtacctccctcactgttgcaagcccctcctccttgggctgaattgacttccaagaaatttaaagaacgggtgacctttcttccctcttcacatccccttcatctttttctttttccactttggggtgcaggatattaatgattaggacattcaaaagaaagtaaatatatggggaaaattagaaagtgactaaaatgtatggtcaggtaaaggtacaagcatagaaaagacctgaaaaaaaaacttaagtttagaatgtaggctgattcttggcacagagattacctacaaaaatctttaaaraccgaaaagaataaaaacaatttaaaaaagcaaaccatgggaaagaagaagaacgtgattttgttttagcacattattatatataaatgtccagttttcaacaacaacaaaaaatcaacaaggcatacaaagaaatgggaaagtatgggcaattcaaagggtaaaaatatcaacagaaactcttcttgaaaaagacctgatagcagttccactggacagaaaaacaactaaaagatattcaaaaaggctgggcgcagtggctcacgcctgtaatcctaacactttgaacaccttgggaggccaaggtgggcagatcacctgaggctaggagtttgagatcagcttggccaacattatgaaaccctgtctctactaaaaatacaaaaattaaccaggcgttgtggctcatgcctg

SEQ ID NO: 924262 - DNA, 841 bp, Homo sapiens
gctgcaggagccagagtgggcataaaaaatcctgttatccaaatattagagagctgtgttcttattgctgattgtcagttctaaacacagaagtgcagacgaagagactttggctattatctttgtacctccctcactgttgcaagcccctcctccttgggctgaattgacttccaagaaatttaaagaacgggtgacctttcttccctcttcacatccccttcatctttttctttttccactttggggtgcaggatattaatgattaggacattcaaaagaaagtaaatatatggggaaaattagaaagtgactaaaatgtatggtcaggtaaaggtacaagcatagaaaagacctgaaaaaaaaacttaagtttagaatgtaggctgattcttggcacagagattacctacaaaaatctttaaagaccgaaaagaataaaaacaatttaaaaaagcaaaccrtgggaaagaagaagaacgtgattttgttttagcacattattatatataaatgtccagttttcaacaacaacaaaaaatcaacaaggcatacaaagaaatgggaaagtatgggcaattcaaagggtaaaaatatcaacagaaactcttcttgaaaaagacctgatagcagttccactggacagaaaaacaactaaaagatattcaaaaaggctgggcgcagtggctcacgcctgtaatcctaacactttgaacaccttgggaggccaaggtgggcagatcacctgaggctaggagtttgagatcagcttggccaacattatgaaaccctgtctctactaaaaatacaaaaattaaccaggcgttgtggctcatgcctg

SEQ ID NO: 924263 - DNA, 638 bp, Homo sapiens
aaaccaataatgtggtattttgaaagccagatatagaaaatattttcaggagggaggaccaacaaacttccgtgtatttttcatatgtcaagtaaaatttaggtttgcattgacaattgaatttaagagtatggagataatttgttactttaagaagcaagcttagaagagtattgggtataaaaaaktgattttaggagtttataaatagtatgggaggagataaatgacaggcaaagattaagaacaacaatttaaaattttttaaatgtaaaatgaaacagataaatgaattattagaaaaaattgaagttaaaagagattttttttaagatgagagaaataagtacatatttttatacttatggaaacaatttgcttgagaggaaaaatagaagatgcagaaaatctgaagtaattttatttttggagatattttgaaataataactttgaataaagaacaagtgatgtgatccagtacaccggaggaaatgttctttgagagtcccatggagaaatcatgtatagtaataggaagaaaagcacatcagagtgctagagacgcagtttaacaaagaggtattgggatcagattcttctgacagcttccattttctcagaaaaatacaaagtaag

SEQ ID NO: 924264 - DNA, 796 bp, Homo sapiens
acaggtttttcccaaaacggggtctttagtgcctcttctgtttttcctaaggaatccctagggctgttagaacttgaatatctgcttttaattaagctgacttttgactatcgcattcttttgaaaagtccttttaaatttcttattacccgacgttagccaggccaaatgaccgatatttctggcttttaaactttaccaaaagtaacctcacaggggctctgagaaaggaaaatttaagacggtttgtggagggaaagagaattttaaaattgcaaaggacacccaaatatcaatcagaaaggctcatcccttaagctagygattgaaccctgaatccaggcctccattgtgaaaagagaaagcatggccaaaaggttacaaggtcaagctcccaaagacatgcaagacaagagggaaacctcatccagttttttttttttttttttttagggaccagcaacaaagtttgtaactgaccagtttgctaggctgtcttgaacagtggacttataggtgtcctaggcccacattctatcctaaggtatccctctccatgacagaaccatacagaaagacacacaaagcacaccagattcactacagcttaagactagcctcacaaatccttttttccattaatcaaaactttacagaggagataaacggtgatttttaccattcattccaccagtttgcacagagagagagagagaagctttacctgacgcagggtggggaaggcgaggcactcagggaggccagggaaagagccacccattgcagcaacactgaa

SEQ ID NO: 924265 - DNA, 796 bp, Homo sapiens
acaggtttttcccaaaacggggtctttagtgcctcttctgtttttcctaaggaatccctagggctgttagaacttgaatatctgcttttaattaagctgacttttgactatcgcattcttttgaaaagtccttttaaatttcttattacccgacgttagccaggccaaatgaccgatatttctggcttttaaactttaccaaaagtaacctcacaggggctctgagaaaggaaaatttaagacggtttgtggagggaaagagaattttaaaattgcaaaggacacccaaatatcaatcagaaaggctcatcccttaagctagcgattgaaccctgaatccaggcctccattgtgaaaagagaaagcatggccaaaaggttacaaggtcaagctcccaaagacatgcaagacaagagggaaacctcatccagttttttttttktttttttttagggaccagcaacaaagtttgtaactgaccagtttgctaggctgtcttgaacagtggacttataggtgtcctaggcccacattctatcctaaggtatccctctccatgacagaaccatacagaaagacacacaaagcacaccagattcactacagcttaagactagcctcacaaatccttttttccattaatcaaaactttacagaggagataaacggtgatttttaccattcattccaccagtttgcacagagagagagagagaagctttacctgacgcagggtggggaaggcgaggcactcagggaggccagggaaagagccacccattgcagcaacactgaa

SEQ ID NO: 924266 - DNA, 746 bp, Homo sapiens
gccagctgcatttttcagctccagaatctctgcttgattctttatatctccctctcttcattagatttgtctaatacaactctgaactccttctctgtgttatcttggattccactgagcttcttcaaaacagctattttgaattccctttctgaaagctcacatatctctctctctctccaggattggctacaggtgacttagtttggtgaggtcatgttttyctggaaggtcttgatgctttgggtgtttgtcagtgtctgggttttgaagagttaggtattcactgtagtcttttcagtctgggcttgtttctgcctatccttgggaaggctttccaggtatttgaagggacatgggtgtagtcatctaagtttttggtcactttacccgtttctactttaggggtgccccaagcccaataacactgtggctattgcaggcttgtacagataccaccgtggtggtcttgggtaacttccagaagaattccctggattaccaggcagagactcttgttctcatcccttacttccctccaaacagatgaaatctgtctctgtctctctgtctctctcccctctcctctctctttctttctctctctctctctctctctccagagctgcctgaagctgtgggaggggtgacacaagcactcctgtggccaccgccactgggactatattgggtcagaaatgaagccagcctaacactgggtctcacccaaggcctacaacaattac

SEQ ID NO: 924267 - DNA, 771 bp, Homo sapiens
gggctcaaagggaggaggaaacactgggctcctctccatatgggggctgtggtgtactagtaggacaagtgaagccctcaggctctttgtctcttctgtttcttctccagactgaaggcagcaggggcaaaaccactgctgttgttgtggcagaggggctgttggttgcttctgggaacccctctccagggaaacacagagccagtaacagtgagtatgctcactaggggtggggcaactgttctgcagtcccaagccaggggcccttcctggtaaagagtacgggtgggagctcacagggaggagagactggggttctcttcgcatgttggctgcaacgagatggaggtgccagtgtagcatccagaccctttttcccttccccagctcaagtgtagttagtgcaataccgctgcaactgcaatggaagaggggctgtgkgttgtctctgggatttcctcctcagagaaatgcagagctgcttctgactgaagtgttcaactgggggcagggtggttgtcctggagtcttaggccaaaagggtccacccagtgagaagtgggaatgaggatgtgtatggaaaacagtctgaccagttttccatggggcaactgcactgtgctagggatctgcaccagaagctagtcaccactcacatttcagagcctgagggcaacagcagtgagggctaagaggcagcaaaaatggtggcctgcctctccctctgggagctccatcccagagaatggcaaagctgctaaaagcactaga

SEQ ID NO: 924268 - DNA, 771 bp, Homo sapiens
gggctcaaagggaggaggaaacactgggctcctctccatatgggggctgtggtgtactagtaggacaagtgaagccctcaggctctttgtctcttctgtttcttctccagactgaaggcagcaggggcaaaaccactgctgttgttgtggcagaggggctgttggttgcttctgggaacccctctccagggaaacacagagccagtaacagtgagtatgctcactaggggtggggcaactgttctgcagtcccaagccaggggcccttcctggtaaagagtacgggtgggagctcacagggaggagagactggggttctcttcgcatgttggctgcaacgagatggaggtgccagtgtagcatccagaccctttttcccttccccagctcaagtgtagttagtgcaataccgctgcaactgcaatggaagaggggctgtgtgttgtctctgggatttcctcctcagagaaatgcagagctgcttctgactgaagtgttcaactgggggcagggtggttgtcctggagtcttaggccaaragggtccacccagtgagaagtgggaatgaggatgtgtatggaaaacagtctgaccagttttccatggggcaactgcactgtgctagggatctgcaccagaagctagtcaccactcacatttcagagcctgagggcaacagcagtgagggctaagaggcagcaaaaatggtggcctgcctctccctctgggagctccatcccagagaatggcaaagctgctaaaagcactaga

SEQ ID NO: 924269 - DNA, 619 bp, Homo sapiens
agaattgcttgacccgaggagcagaggttgcagtgagccgagatcatgccactgcactccagcctgggtgactgtgcctcagaaaaaaaaaaaaaagagaaaaaaagaaatggtgtcacatcaaataatttgtataaagtttctccagtgggagggccacaacacatttgctccctactcatccttgctttgcctgcagagagcacaatttttcttacacrtagatgctcaataagtatctgttgaattgttttgaatgtattcccctttggagaactatactttcaacatacacacacacacacacacacacacacacacacacacacacacacacacacgttgctggtgtttggatgagcatatatgtgtgtttatgggtaggggcagaagaagtgatgatgaaagaaagtgggtttgataaagggagggagataaaattgagtgaactgctgagtagatttgagttatacttaaggaaaacgtaactacaagttctattttggtttacttcctctcttgccctgggatcttaagcaagcaagctactttcgtttctctatttcaacagtgtcttttttttttttttggaatgtgccttgtggaattatttttaaaa

SEQ ID NO: 924270 - DNA, 648 bp, Homo sapiens
aaatactcaggaacccagcccagctctagaactcactcctgactgaaaaggcaatgttgagaatgctggtaagggaccactagaatccagcaacccagacccctttctttgtggtcaagaaaagaaggaaaacaggtgcaggactgctgcattggtgagcgtaacgaatccaataagcagaggtccatgggtggttacgcacctggaagggaataagcattaggaccatagaggacgctctaggactaatgctcattggaaatrtactaggggtgctggcatccctgtgtttttttttcagatgggaaacattccccctaagtcaaaaacacccctgagatgtattctggagaattcagctcagagtacatgtacctttttctctctcagacttgaagcatattaaaatagacctagataaattctcagataaccctgatggctatattgatgttttacaagggttaggacaatcctttgatctgacatggagagatataatgttactgctagatcagacactaaccccaagtgagagaagtgccgccataactgcagctcgagagtttggcaatctctggtatctcagtcaggtcaatgataggatgacaacagagaaaagataatgattccccacaggccagcagg

SEQ ID NO: 924271 - DNA, 648 bp, Homo sapiens
aagaaatactcaggaacccagcccagctctagaactcactcctgactgaaaaggcaatgttgagaatgctggtaagggaccactagaatccagcaacccagacccctttctttgtggtcaagaaaagaaggaaaacaggtgcaggactgctgcattggtgagcgtaacgaatccaataagcagaggtccatgggtggttacgcacctggaagggaataagcattaggaccatagaggacgctctaggactaatgctcattggaaatgtactaggggtgctggcatccctgtgtttttttttcagatgggaaacattccccctaagtcaaaaacacccctgagatgtattctggagaattcagctcagagtacatgtacctttttctctctcagacttgaagcatattaaaatagacctagataaattctcagataaccctgatggctatattgatgttktacaagggttaggacaatcctttgatctgacatggagagatataatgttactgctagatcagacactaaccccaagtgagagaagtgccgccataactgcagctcgagagtttggcaatctctggtatctcagtcaggtcaatgataggatgacaacagagaaaagataatgattccccacaggccagc

SEQ ID NO: 924272 - DNA, 564 bp, Homo sapiens
accttattttttttatactagagatcaggaggagcaggtggaacgggacaaacaagataagaaaaaggccaccgctttagtcatggccctcaggaaagcagactttggaggctctggaatatggaaaggctgggcaaattgaatgcctcataggrcttgcttccagtgcggtctacaaggacattttaaaaaagattgtccaaatagaaataagccgccccctcgtccatgccccttatgtcaagggaatcactggaaggccaactgccccaggggatgaaggtcctctgagtcagaagccactaaccagatgatccagcagcagaactgaaggtgctgggggcaagtcccagcccatgccatcaccctcacagagccccaggtatgcttgaccattgaaagccaggaagttaactgtctcctggacactggcgcagccttctcagtcttactttcctgtcctggacaactgtcctccagacctgtcactatctgaggggtcctaggacagccagtcactagatatttctcccagccactaagttgtgatggggaactttactc

SEQ ID NO: 924273 - DNA, 630 bp, Homo sapiens
gaaactccacagacactacattactacactgtgcaaacaaaggcaatataccttacccgacccaaatcctaagaaacatctgcaagtgaaagtctttccccatgaaagccactctacacaactggaagaggtgactgtcttaccaaatgcacagatataatacaatgatacaagaaaaatgtaaaatcaaggatacatgacaccaccgaaaaccacaatcactctccagtaactgacaccaatgaaataaacatacatacctgaaaaaaattttgacaatattattaagaaaactcagccaatacagatagamaattgaacaaaaatcagagaaacaattcatgatctctgaaataagacatcatgaattgttgagagagaactctcatttgagagactatgaattgaaatgaggaattcaacaaagaggtagatatcataaaagagaaccaaacagaaatgttgaagctgaaaaatccaatgaatgaaataaaaagtacagttgagagcttcaacaatatactagatcaagcaaaggaagcatccctaacttgaggaagggacttttgaaataatccagtaagacactcccccaaaacagaaaaaaataaaaataatgaagaaagtcta

SEQ ID NO: 924274 - DNA, 589 bp, Homo sapiens
tcctattatatgctgtctaaaagagattaattttacctttaagcagacatacagactcaaagtaaagggatggaaaaatacgttccctacacacagaagccaaaataaagcaggagtagctatacctatattagacaaaatagaatttaagtcaaaaactgtaaaaggagacaaagttggacattatataattataatgaggtcaatttatcaagtagatgtaacagttgtaaatatatacgcactcaatgttggagcacctaaatatataaagcaaatattaaaatatctgaagggagagatagaatactgtacagtaaaaatgggagaacttcgatgctccaattttaataatggatagatcattcaaagagaaaattaataaagaaacaatggacattaacaasactttaaaccaagttgaactttacagaaatatacagaccattccatccaacagtaccagaatacacattttttttcaagtgtatataaaacactcactaggataaacactacgttaagtcaaaagaaaagtcttcacaaatttacaaaagattgaaatcatatcaagtatcttgtctgacca

SEQ ID NO: 924275 - DNA, 566 bp, Homo sapiens
aaacttgtacacaaatgtttacagcagcattattcacaatagccaaaaggtagaaacaacacaaatgtgtatcagtgggtgaatggataaactctgatatatccatataatggagtacaactcaacaatggaaagaacaaactactgaaacatgaacaaaaaggacgcgtctcaagaacattatgccaggtgaaggaagcatcacacaaaaggctacatactccatggttccaaattcaagaataagcaaaactaatctatggtgtggtagctgcctgggcccaggggtgaaggggcatttgatgcaaagggaactgcggagggkattgtttgagggtggtggaaatggtatgtatcttgactagcactggttacataggatgtcttagttcattttgtgttgttatgaaggaatacctgaggctgggtaatttataaagaaaagaggcttacttggctttacagttttgcagactgaacaagaagcatggtgctggcacctgcatttggtgagggcttcaggctgcttccacttgtgacagaaggcaaaggggagcttgtgtatg

SEQ ID NO: 924276 - DNA, 591 bp, Homo sapiens
acacaatgacaactatttgtgtatctaaacacagaaaaggtacagtagaaatacagaataaaagaccaaaaaaaagtacacctgtatagggcacttaccatgaatggagtttgcaggactggaagttgctctgggtgagcaattragtgagtggtgagggaatgttaaggcctaagatattactgtacactactggaaactttataacactgaacacttaggctacactatattaaaaattgtttctttcttggctgggcacggtggctcatgcctataatcccagcgctttgggaggccgaggtggatgaatcaccttaggtcaggagttcaagaccagcctggccaacatggtgaaattcaatctctgctaaaaatacaaaaattagccaggcatggtggtgcacgcctgtaatcccagctactcaggaggctgaggcaggagaatcacttgaacccgggaggtggaggttgcagtgagcctagatcctgccgttgtactccagtctgggtgacaagaacaaaactccatcacaaaaaaataaataaataacaataaaaactaaattttttctttcttcaataattaac

SEQ ID NO: 924277 - DNA, 596 bp, Homo sapiens
attcttctcagctgcaaagggaacattctctaggacagaccacatgttatgccatggtaaaacaagtttttacaaattaaaaaaaaatcaaaatcgtatcaatttaccttttctgacaatagtggtataaaactagaaattaacaacaggaaattctttgaaaactgtacaaatacatggaaattaaacatgctcctaaaaaacaacaggtcaatgaagaaattaaaggagaattctaaaatattattgagataaatgaaaatggaaatacagtatactaaaacttaagggaaatagcaaaattagtttttagagggaaaattatagtaataaacatctacatccaaaaagaagaaatgtctcaaataaactaacagaacacctcaagaaactaaaaaagcaagarcaaactaagcccaaatttagtagaggaaaaaaataataaagatcaaagcacaggccaggcgcagtggctcactatgatcccagcactttgggaggctgaggagggtggatcgcgaggtcaggagatcgagaccatcctggctaacacagtgaaaccccgtctctactaaaaatacaaaaaattagccggc

SEQ ID NO: 924278 - DNA, 594 bp, Homo sapiens
ataaagacatacccaagactgggtaatttataaagaaaaagaggtttaatggactcacagttccacgtggctagggagacctcacaatcatggcaggagagcaagggacgtcttacatggtggcaggcaagagagaatgagagccacacataaggggaaaccccttataaaaccatcagatctcatgagatttattcactaccacaagaacagtataggggaaactgcccccatgattcaattatctcccaccaggtccctcccacaatacatgggaattaatggragctacaattcaagatgagatttgggtggggacacaggcaaactatagcacacatgtacagatttctttaactcttattcttcaaaaatgaagtgatttggtgaactttgctgagtagtttagtatatccttagaatcacaatagtatgaacttaaatccagcaggataatattgatcttattctagagtaaacggggaaaaatcatctaaagagcaagaaaacagtctactttacttgggccaaatataactttgatgagatttgtaaataatgatcaataagaagcaaaacttactacctgcaaat

SEQ ID NO: 924279 - DNA, 486 bp, Homo sapiens
acatgtgattcacagctcattttaaagcttagcacattgatttggtacaaggatgaccatgaatctgcatggtaatattatatgagatggatttaagcaagccatttgggctaatccaggcaaattactgccagctgatagagggtttctgcatatgtagctgtgtttgctctggtcttcttgcctgttggtagcagtaaaatatcgtattaattttatccttctggtgtccacctggctctccattactagaccttgagttccaatgatgtcaccctttgatccttcctcttttaaygtccatctgctgaataactgtcccttccagcttggagcacagacctgtaagaaagaacaacccttcatttaatatgaaaaccctatcaattctattaaataatgtttaaaactagacacggtctaatgctttcaatagatttgtagttagttcatcagagtttcaaaactctatttgttcttttgcct

SEQ ID NO: 924280 - DNA, 569 bp, Homo sapiens
acaatccctcttctgggcacatacccaaacgaaatgaaatcaccacctcataaagatatctgcacgctcatgtttattgcagtgttatttacaattttttaatgggatatgtttgggagtatatcccattaaaagccaagatatggaaacaacctaagtgttcattgatggatgaatggataaagataatgttacacacacagagaaatattactcagccttaaaaaaagaaggtgatcctaccatttgccacatcatggatgaatctggaggacattatgctaagtgaaataaascagacatggaaagaaatatattgcatgatctcactgatatgtggaatctaaaaaaaagaaagtcaaatatacacagatggagaataaacagtggctactaggttcagggaagcgggagtgaggagaggaaatgggaagatgcagttcagaggattcaaagttgcaaatatgtaagatgaaaaagtctagagatctaatgtacaacataaggattataggtcataaaattgtactgtatttgggattcctgttaaatgaataaattttaactgc

SEQ ID NO: 924281 - DNA, 827 bp, Homo sapiens
catcaggtgcaggtttttgtgtgaatttaagtttccaacttgggtaaatacctaggagcctgattgctggattgcatggtgagagtgtttagttttataagaaaccgccaaaccgtcttccaaagtggctgcaccagtttgcactcccatggacaaggaatgagatttccttttgctccacctccttgycagcatttggtgctgtcagtatgtagactttgtccatcctagtaggtgtgtggtggtttctctttgtcttgaattgcgattccctgatgataaatgacatgagcatcttttcagacgcatacttgtcatctgtgtcccttttttggtgaggtgtctgtttagatctttctccgcattttttaattaggtggtttgatttctcattgttgagttttaagagttctttgtatgttttggatactagttctttatatgtatgtgttctataaagattttctcccaatctgtggcttcacattctcttgacagtgtctttttcagagcagaagtttttaattttaatgaagcttcactatgaattatttctttgatggatgtgcctttggtattatattgaaaaagccatcactgtacccaaggttttcccagttatgtgctagttgtgaattttgactgtggtttttatgttactttattaaggttatccaaagtttgtgttgaaaaacattgctatataaaaatagagaaaatttgtgttaattatgacagattagtcttattctaaatttagttaatttcttcaagaggactgatctttattgcaaagctaacttagaattaagatgttagaattaaat

SEQ ID NO: 924282 - DNA, 827 bp, Homo sapiens
catcaggtgcaggtttttgtgtgaatttaagtttccaacttgggtaaatacctaggagcctgattgctggattgcatggtgagagtgtttagttttataagaaaccgccaaaccgtcttccaaagtggctgcaccagtttgcactcccatggacaaggaatgagatttccttttgctccacctccttgccagcatttggtgctgtcagtatgtagaytttgtccatcctagtaggtgtgtggtggtttctctttgtcttgaattgcgattccctgatgataaatgacatgagcatcttttcagacgcatacttgtcatctgtgtcccttttttggtgaggtgtctgtttagatctttctccgcattttttaattaggtggtttgatttctcattgttgagttttaagagttctttgtatgttttggatactagttctttatatgtatgtgttctataaagattttctcccaatctgtggcttcacattctcttgacagtgtctttttcagagcagaagtttttaattttaatgaagcttcactatgaattatttctttgatggatgtgcctttggtattatattgaaaaagccatcactgtacccaaggttttcccagttatgtgctagttgtgaattttgactgtggtttttatgttactttattaaggttatccaaagtttgtgttgaaaaacattgctatataaaaatagagaaaatttgtgttaattatgacagattagtcttattctaaatttagttaatttcttcaagaggactgatctttattgcaaagctaacttagaattaagatgttagaattaaat

SEQ ID NO: 924283 - DNA, 827 bp, Homo sapiens
catcaggtgcaggtttttgtgtgaatttaagtttccaacttgggtaaatacctaggagcctgattgctggattgcatggtgagagtgtttagttttataagaaaccgccaaaccgtcttccaaagtggctgcaccagtttgcactcccatggacaaggaatgagatttccttttgctccacctccttgccagcatttggtgctgtcagtatgtagactttgtccatcctagtaggtgtgtggtggtttctctttgtcttgaattgcgattccctgatgataaatgacatgagcatcttttcagacgcatacttgtcatctgtgtcccttttttggtgaggtgtctgtttagatctttctccgcattttttaattaggtggtttgatttctcattgttgagttttaagagttctttgtatgttttggatactagttctttatatgtatgtgttctrtaaagattttctcccaatctgtggcttcacattctcttgacagtgtctttttcagagcagaagtttttaattttaatgaagcttcactatgaattatttctttgatggatgtgcctttggtattatattgaaaaagccatcactgtacccaaggttttcccagttatgtgctagttgtgaattttgactgtggtttttatgttactttattaaggttatccaaagtttgtgttgaaaaacattgctatataaaaatagagaaaatttgtgttaattatgacagattagtcttattctaaatttagttaatttcttcaagaggactgatctttattgcaaagctaacttagaattaagatgttagaattaaat

SEQ ID NO: 924284 - DNA, 589 bp, Homo sapiens
agaatctcatttttaatgggcaaggatctttcgaaaagaccttgggacatgttgaggtgagttgctttgtgaatggatccgtttaaatttgttcagtcagcctgtctgttttgagcacctgcttcctgaaaggtcctgagctctgagcacaaacatgaacaagggagaggcgtctactccagggactctcggtgtagccrgacacacagttgtgaggacgatggccgcgtggccagagctgtaataaaccacggagggcttatctccatctggacaccgtcatggtgctaagaaacttggctgggggcattcctacagaaatacacagatttgtattattgagaatttttaatgtcttattaaaattgttattacatgacattaaatggaaaaaggctggatgaaaaatttgaatttagagtattttttgttttttgagacagagtctcgttgtattgcccaagctggagtgcgtggcgcaatctcagcttagtgcaaccttcgcctcctggggtcaagcagttctcctacctcagcctcccgagtagctgggattacaggcgtgcgccaccatgcttggctaattttt

SEQ ID NO: 924285 - DNA, 589 bp, Homo sapiens
agaatctcatttttaatgggcaaggatctttcgaaaagaccttgggacatgttgaggtgagttgctttgtgaatggatccgtttaaatttgttcagtcagcctgtctgttttgagcacctgcttcctgaaaggtcctgagctctgagcacaaacatgaacaagggagaggcgtctactccagggactctcggtgtagccggacacacagttgtgaggacgatggccgcgtggccagagctgtaataaaccacggagggcttatctccatctggacaccgtcatggtgctaagaaacttggctgggrgcattcctacagaaatacacagatttgtattattgagaatttttaatgtcttattaaaattgttattacatgacattaaatggaaaaaggctggatgaaaaatttgaatttagagtattttttgttttttgagacagagtctcgttgtattgcccaagctggagtgcgtggcgcaatctcagcttagtgcaaccttcgcctcctggggtcaagcagttctcctacctcagcctcccgagtagctgggattacaggcgtgcgccaccatgcttggctaattttt

SEQ ID NO: 924286 - DNA, 589 bp, Homo sapiens
agaatctcatttttaatgggcaaggatctttcgaaaagaccttgggacatgttgaggtgagttgctttgtgaatggatccgtttaaatttgttcagtcagcctgtctgttttgagcacctgcttcctgaaaggtcctgagctctgagcacaaacatgaacaagggagaggcgtctactccagggactctcggtgtagccggacacacagttgtgaggacgatggccgcgtggccagagctgtaataaaccacggagggcttatctccatctggacaccgtcatggtgctaagaaacttggctgggggcattcctacagaaatacacagatttgtattattgagaatttttaatgtcttattaaaattsttattacatgacattaaatggaaaaaggctggatgaaaaatttgaatttagagtattttttgttttttgagacagagtctcgttgtattgcccaagctggagtgcgtggcgcaatctcagcttagtgcaaccttcgcctcctggggtcaagcagttctcctacctcagcctcccgagtagctgggattacaggcgtgcgccaccatgcttggctaattttt

SEQ ID NO: 924287 - DNA, 589 bp, Homo sapiens
agaatctcatttttaatgggcaaggatctttcgaaaagaccttgggacatgttgaggtgagttgctttgtgaatggatccgtttaaatttgttcagtcagcctgtctgttttgagcacctgcttcctgaaaggtcctgagctctgagcacaaacatgaacaagggagaggcgtctactccagggactctcggtgtagccggacacacagttgtgaggacgatggccgcgtggccagagctgtaataaaccacggagggcttatctccatctggacaccgtcatggtgctaagaaacttggctgggggcattcctacagaaatacacagatttgtattattgagaatttttaatgtcttattaaaattgttattacatgacattaaatggaaaaaggctggatgaaaaatttgaatttagagtattttttgttttttgagacagagtctcgttstattgcccaagctggagtgcgtggcgcaatctcagcttagtgcaaccttcgcctcctggggtcaagcagttctcctacctcagcctcccgagtagctgggattacaggcgtgcgccaccatgcttggctaattttt

SEQ ID NO: 924288 - DNA, 822 bp, Homo sapiens
gtgtcctggttagaaaacaagcaatcagagaaaatatgttttgaaaagaattagtgggcgggctgagcttcctatctttcacctggtagattaatgattgtatgtcaacacagcgacaggctaacattttcaaatagaaagacatgtgattaaatctctcttttgatgtgttctgcaaattgcttctctaagctctgcttccaaagggcggctctccaattagagtcagattattattacgggttagygatcactcctgctcccgtagctgactcattctttaacatgctaattagcaaatacatccagtgccttgcatcatatttgaccttcagcgttcttttctaactggaatcatttcatgccattccgatgaaatggagacattgttctgaggtttctgacccctccctcctaagggccccgtgatctgccacgaagcctgggaagatcagccacgcacacacccctctccggatcattcttttccagaggtcaatgacttaataagttcactttcgttcagcaagtttaccgttgctcctcttaaagtgatagcttgtgtattcatgacaatttggtattgttactgaagtggacctcacactggggtcaagaattcctaaattgctacctaatggtcactgtgaagagaggatgctgtaccgaccacgtctgcatcccacggggtctggagaggaccagaggcctgggccccaccaggtcacagagttggtcatgaattccccttctcctttctctccttacttcacggaggtatattctttctaaaaagattaaacagcatcatataaaatggat

SEQ ID NO: 924289 - DNA, 646 bp, Homo sapiens
ctcaagagatccacctgcctcagcctcccaaagtgctgggattacaggcatgagccaccgctcctggcccccaaagaacttttatttgtgtgggccttatcagctttatctattgatacgtattgtacttgaaatcaaaactgggaaattttaaaaataattcatttaaaaataacaaaaataagctattacagtagcctcgccttcctggtggggcatctgtttcaacacccccagtggatgcctgaaaccaaggaaaatacagaaccggatagctgtcagtctcagcgtttccctttgtgtcttccacccacaaatttaatgagyttttcaccttaactaagcccctagcactcactgtggccataacttctgcagtttgagatgtgacagtaaagccagtacaatttttttcttcattgaaatttcatggatagaagattcattcttactgcagatcttagcaacctcagcatctaatttttttctcagtaagtcagaaactttcgcttttgcttaaaggaagaaatttacagctttctctttggcatatccaaattgccagcatcaccactcttgtcctttggggccattatgaagtaaaataatggtttcttgcacacaaataccacaatactcagacggt

SEQ ID NO: 924290 - DNA, 542 bp, Homo sapiens
gctggctgtgggaccctgtgcgaaattagaatgtggagccatttattcaaaaaacaggaaagaagtgccctccaaggtactaaaacaaaatgttttgccctttccttcccactgcttccctgccctcctttcccttctcttccttgcctcttgaattgtcacagtatttttaatgttccaagtaaagaaaaattaaaaatgtaattattggtatgtttttttctgttattgttaactcgtgcaatgccagttttaaatgcaaatttaaaagcatttaacttgtttgcataatcactgaagttacacaatttgtatttcatagctgttacattcctatgtatttctttctgaccagaacagaggaaacactgccaaaaactaaytctgttgtttttattttacttcttgatacatgcgtgttttaccaacacattctaccttcagcttcctgatgaataaggcagggatttccttctgtgtcaccatttggagcacaagtgtttggccaatataaggaaataagaaaggacatgataggggcc

SEQ ID NO: 924291 - DNA, 632 bp, Homo sapiens
gcggaaactccgccagagctgacttattcccaggcttatctcagcaggggcctgcagaagtggggacacggaattgaggccactgtgagttttcggtgtaagcttagtcccatttccaatccacatgatcacctccctgccccctccccctccacattcttggcctgagccagtccctcccgtgaacacagcaaaggccaggtgaccaagaaagtggaataataaaggattttagactgggggaggcaactaatggtcttctaagccagtgaataaaaaactgttttagctgcccaaccctttcttcaaaagaaccttattggaaagtcaaacaggcaaaacctataaaaacccagaaagaacaatccacacttctrctctctggttttgcttctatctggccatgatgttttcatcattttactcttctgccttagctccctttcattcctgacaagcagaggcctctgacatctctgagcccaaacatgggtacagcagtgcctctgaagccagcagtgccagaccagcagcagaacttctcttgcccatctgggaatggtgtttactgaaaaccagagaaaacaggcacattgatgagtccatcagttagattattctttcttgagagt

SEQ ID NO: 924292 - DNA, 685 bp, Homo sapiens
cagaattgtgataatgcagttgaagatactctagtcagggctctccgctcctcccatttgacagacagccatatcttctcgtgtagcaccagccacatcctgagataccatggttaaggtgaaggccagagtcaacagatttggccacattgggcaccagatcaccagggctgcttttaactctggtaaagtggatattgttgccatcagtgaccccttcactggcctcaactacatggtctacgtgttccagtgtggttctacccatggcaaattccatggcactgtcaaggctgasaatgggaagcttgtcattaacggaaatctcatcaccatctttcaggagcgagatcccaccaaaatcaaatgggacaatgttgacgctgagtacatttgggtgtccaccggtgtcttcaccaccacagagaaggctggggctcacttgcagcagggagccaaaagggtcataatctctactccctctgctgacgcccccatgttcatgatgggcgtgaaccataagaaatatgaaaacagcctcaagatcatcagcaattgcctcctgtaccaccaacttcttagcctccctggccaagctcatccatgacaactttggtattgtggaaggactcatgaccacgacccacaccatcactgccacccagaagactgtagatggaccctc

SEQ ID NO: 924293 - DNA, 613 bp, Homo sapiens
cctcccaaagtgctgggattacaggcataagccaccgtgcctggctcatctcaactttccactgacaagattcattcataactgggaaggaggcagagcaagatggccaaatagaagcctccagtgatcaccacctccaaggaatatcaaattgacaactatctacataaaaaaccaccttcataagaaccaaaaatcaggtgagcaatcacagtacctggttttaacttcagatcactgaaagaggcactgaagaggatgtgaaaaacagtcttgaatcacctacaccacccctcccccatcctctcagcagcaaccacatggtgtggagagacaatctatgtgcttagggaagtcgaaagcagtgactgtggaatttttgcattgaaactcagygctgccctgccacagtggaaagaactcagccagcacccatggaggaagaatttagaccagccctaggcagccagtcctgccaccatgggctacagtgctctgaggtcctgaataaacttgaaaggccatctaggccacaaggactgcaattcctgggcaggtcctggtgctgggctgggctcagagccagtggacctggggtgcatatgatatagta

SEQ ID NO: 924294 - DNA, 662 bp, Homo sapiens
gcaaagcctttcccttgtggtttagtgtgaaattggtccccactttaagtagattaaccggaaaggcttttccagttacaagtagcttttgcctccaggtttgctaacaataaagtggtgcagtatttgcatgtaacctgcacacatcctcctgaatactttaaatcatttctaggtgtaacctgcacacatcctcccgcatactttaaatcatttctaggttactcatcagtcctcctayaacgttataatttgtaatactgttacataacaatgttacaatgttataattgtaggagctctcatgagtaatctagaaattgtacaaggtcataacactctccaaacaaatacacagttgttacactgtatatctttaatttgtatttttaactttttttctgaacatttcaatccacagttggttgaatctaacgatgtgggacccttggacagtgagctcctggggctcagcccggctcctcagggcccagcagggctcactagggccctggaccaccccatatacccgggacggctcctctctttctcactggctttccccaaagctccaataaactcccaggatttgtgctcagaaaagagctggatgagaggcaggagccacagaagccagccagtgcttttccaggggcaagtgt

SEQ ID NO: 924295 - DNA, 669 bp, Homo sapiens
tcccgaaggcgcgaaccctggacctaccatcgtctttggtgcgctccaggatgaggggcgtgctggggaccccgttcccgatgcgggtgaacgccagcacctggagctcgtagagcacgaacttgcgcaggcctgccagcagggccgactgcgtgtggttccctcgcacgatgtggctcctgggctcgggatccaggtctttggcccggaacaggatctgtggtatcgacacagcacgagggttatcaggaggygggtgccaggagggaccgccgtggcatggggcaggcccccttcgtgaatcaaggcccagccaactgtgctttctccctgaggatggctgtgtgcagggcttctggatctaatttgtccatgctggcatttggggaggaaggtggttgtaaagtgactgcgctccaggggagcttgagttagtgcccacggcttggcgagcctgctgcctggtcataatctgcaagatctgagggcccaactgcagccatgccaaccacagccactaaaacaaagactcgattatgaacacagacaacactctgcttcctgccacaggagccagcagccccctgggttttccagccatggaagctggtttcctgccccagaagacctgctgtcctcacacagaccgggagctctggcctccttggg

SEQ ID NO: 924296 - DNA, 735 bp, Homo sapiens
gccatgaattactctagactttcaatagaaaagaacatccaccaggcatggtgacttgctcctagagtcccaggtacttggaaagctgaggtgggaggatagtttaagctcaagagctgaaggctgcagtgagctatgattgtaccactgtactccagcctggatgayagggtgagatcttgtcaagaaagaaagaaaaaaggaaggaaggaaggaaggaaggaaggaaagagaaagaaagaaagaaaggaaagaaagagagagaaagagagaaaaagaaagagagagaaaagaaaggaacatcctactaaacttggattcaacaaaggaaaaggttcctgtctatctctcctttattaattaattaactaatttatttatttatttatttatttatttattgagacattctcttttttgtcgcccaggctgaagagcagtggtgagatctcagctcaccgtaacctctgcttcccaggctcaagcaatcccccaacctcagcctcccaagtagctgggactataggcatacaccactatgcctggctaatttttaaattttttttgtagagacagggttttgccacattgccgaggctggtctcaaactcctgggctcaagcaatccacctgcctcagcctcacaaagtgttgagattacacgagtgagccaccacacctggctatctcaccttcttgccttcatccaatgtttcatgcatttgactaacaggt

SEQ ID NO: 924297 - DNA, 735 bp, Homo sapiens
gccatgaattactctagactttcaatagaaaagaacatccaccaggcatggtgacttgctcctagagtcccaggtacttggaaagctgaggtgggaggatagtttaagctcaagagctgaaggctgcagtgagctatgattgtaccactgtactccagcctggatgacagggtgagatcttgtcaagaaagaaagaaaaaaggaaggaaggaaggaaggaaggaaggaargagaaagaaagaaagaaaggaaagaaagagagagaaagagagaaaaagaaagagagagaaaagaaaggaacatcctactaaacttggattcaacaaaggaaaaggttcctgtctatctctcctttattaattaattaactaatttatttatttatttatttatttatttattgagacattctcttttttgtcgcccaggctgaagagcagtggtgagatctcagctcaccgtaacctctgcttcccaggctcaagcaatcccccaacctcagcctcccaagtagctgggactataggcatacaccactatgcctggctaatttttaaattttttttgtagagacagggttttgccacattgccgaggctggtctcaaactcctgggctcaagcaatccacctgcctcagcctcacaaagtgttgagattacacgagtgagccaccacacctggctatctcaccttcttgccttcatccaatgtttcatgcatttgactaacaggt

SEQ ID NO: 924298 - DNA, 601 bp, Homo sapiens
aactagaaaagcaagtttccaagttcagcagctactccaacaggaaaaaacatcatgtggaaggttggtgtgctgcttaagaaagggtgagaaccaaagttcacacccctgccactccctaccatagaaaatcaaacccataggcgccaacaaaattaatcatcttaagaatccttgtgttaaaagtcaaggaaatcagatataaatctagaataaaagactggttaataaagggagaaaaaaaaaaacgaatcctcaacaggtaatrtggtttcttttactatctgatgaaggtcaagatgatgttataaaaatagtgaattcacactaaggaggcacaatatctgacatttctttgtcaccaattctcagaattctaacatggaacaacaatcatcataataaactgtggttttgtgaactgtgacctattgaattactagaggggtttcacccaatgttaacccctcaatgacttttttttttttttgtatctgatgttattgtctccatttgcaaagggcagttatgacagagcaattgtgacccagggtgagcacccatgtgtcatccctggcagatttctgccttctcataggac

SEQ ID NO: 924299 - DNA, 616 bp, Homo sapiens
actctttaggaaactggagaaataaaggctatttaattgtaaagcaagcggaagaagaaacataataatagaatagaaatcaatgaatttaaaaagagaaaaacaatgggaaaaataataaaataaaaaactgatttaaaaggtcaataaaatgtaggcatctttaggcagactaaccatgaataaaataaggtgrtgcaatttagtaatgtcagaaatgaaaaagagatcaagggaagctgaaaaacggcctccctccaaagaccttcttcctggaatttatgaatatgttggtaccttacatggcaaaattgactttgcagatgtgattgcattaagaatcttaagatagggtgattattctggatgcatgagtacaatcacaaggtctttatgacagggaggcagaaagtcagaggggagacaaaagattatgcagctttatttgaagatggctgaaagggccacatgcagcctctaaaagctggaataggcaagaatggattttcttctcgtgcctccagaaggaacgagtcatgccaacatcttgattttagacctgtaaatgtcttgacgacttctgttcttcagtactgaaagaaaataaatgtatgct

SEQ ID NO: 924300 - DNA, 616 bp, Homo sapiens
actctttaggaaactggagaaataaaggctatttaattgtaaagcaagcggaagaagaaacataataatagaatagaaatcaatgaatttaaaaagagaaaaacaatgggaaaaataataaaataaaaaactgatttaaaaggtcaataaaatgtaggcatctttaggcagactaaccatgaataaaataaggtggtgcaatttagtaatgtcagaaatgaaaaagagatcaagggaagctgaaaaayggcctccctccaaagaccttcttcctggaatttatgaatatgttggtaccttacatggcaaaattgactttgcagatgtgattgcattaagaatcttaagatagggtgattattctggatgcatgagtacaatcacaaggtctttatgacagggaggcagaaagtcagaggggagacaaaagattatgcagctttatttgaagatggctgaaagggccacatgcagcctctaaaagctggaataggcaagaatggattttcttctcgtgcctccagaaggaacgagtcatgccaacatcttgattttagacctgtaaatgtcttgacgacttctgttcttcagtactgaaagaaaataaatgtatgct

SEQ ID NO: 924301 - DNA, 616 bp, Homo sapiens
actctttaggaaactggagaaataaaggctatttaattgtaaagcaagcggaagaagaaacataataatagaatagaaatcaatgaatttaaaaagagaaaaacaatgggaaaaataataaaataaaaaactgatttaaaaggtcaataaaatgtaggcatctttaggcagactaaccatgaataaaataaggtggtgcaatttagtaatgtcagaaatgaaaaagagatcaagggaagctgaaaaacggcctccctccaaagaccttcttcctggaatttatgaatatgttggtaccttacatggcaaaattgactttgcagatgtgattgcattaagaatcttaagatagggtgattattctggatgcatgagtacaatcacaaggtctttatgasagggaggcagaaagtcagaggggagacaaaagattatgcagctttatttgaagatggctgaaagggccacatgcagcctctaaaagctggaataggcaagaatggattttcttctcgtgcctccagaaggaacgagtcatgccaacatcttgattttagacctgtaaatgtcttgacgacttctgttcttcagtactgaaagaaaataaatgtatgct

SEQ ID NO: 924302 - DNA, 574 bp, Homo sapiens
tgcaaagattttatagctcttacatcgatttcacataaatgaccaactaaagaccaggcttggaacagcccatacttgatatgctggtgacagcatgagcagtttctccaatgtaccatataaggaaattgtgggtcctaacttcacactctgaaacatcttctcccctccatgtctatatcatctaacctatcaattcaacaggtctttcctgggggcccagattttgggtaggtggctgggggatatagaagatgatataagccatggcttatgtttttcaagagctagaaactgaagacaggaaatcatggaaaacaacacaaaatgctgtataattatgtgctaaactctcctgtatccaatcagactgtgaagtctatgcatctggattgtatcttagcaccccctagagaataatcatygctcatccaggctttatcacttagagaagatcattacacaaaacagtcctatggaaagtcctatattttctttttttttttttttttgagacagagtcttgctctgtcactcaggctggagtgcagtggcatgatctcagctcactgca

SEQ ID NO: 924303 - DNA, 620 bp, Homo sapiens
agatgtgcactaccatgcctggctttgaaataatttcttatattaaaattattttaaggactttctgccaaagaaggaaccttttaaacaagttgtttacaaaaagcaaaagaaagcatttatttggtatactttaagttgtgagatacacatgactactctcctctttctgaggctatgagaatacctactgtagctcctaatggcacatggtggrgtggggattctggccccttgtctacatggttctcctgtattataggtgtagttccctattttgtaaaattttagcactgaaaataacttaagacacctgacccagtttcttaatgttacagaggagaaattgaggctcggtgcaattagttttctggtgttgatcacccaatctacatgaactaggtttctagtttcctcacttttaatctatctcttttccttagcttttcattgggttgaaattataccagctaataacaaccaacttttactgcatacttaatatgatgcatatattttattctgcattccacacatattctcttattttattgcaacaatttttaaaaatatctgttttacacgtgaggaagctaagtcacagagaggttaagtggagt

SEQ ID NO: 924304 - DNA, 617 bp, Homo sapiens
tccagcaagggcacaaacctggatggagaatgagattgacgaattgacagaagtaggactcagaagatgggtaataacaagctcctctgagctaaaggagcatgttctaccccaatgcaaggaagctaagaaccttgataaaaggttacaggaactgctaactaaaataaccagtttagagaagaacataaatgaccagatggagctgaaaaacacagcacaagaacttcgygaggcatatacaagtatcaatagctcaatcaatcgagtggaagaaaggatatcagggattgaagatcaacttaatgaaataaggtgtgaagataagattagagaaaaacagaaagaaaagaaacaaacaaagcctccaagaaatatggaactatgtgaaaagaccaaacctacgttagattggtgtacctgaaagtgacaaggagaatggaatcaagctggaaaacacacctcaggatattatccaggagaacttctccaacatagcaagacaggccaacattcaaattcaggaaatacagagaacaccactaagatactccttgagaagagcaaccccatgacacataatcatcagattctccaaggttaaaacaaaggaaaaa

SEQ ID NO: 924305 - DNA, 617 bp, Homo sapiens
tccagcaagggcacaaacctggatggagaatgagattgacgaattgacagaagtaggactcagaagatgggtaataacaagctcctctgagctaaaggagcatgttctaccccaatgcaaggaagctaagaaccttgataaaaggttacaggaactgctaactaaaataaccagtttagagaagaacataaatgaccagatggagctgaaaaacacagcacaagaacttcgtgaggcatatacaagtatcaatagctcaatcaatcgagtggaagaaaggatatcagggattgaagatcaacttaatgaaataargtgtgaagataagattagagaaaaacagaaagaaaagaaacaaacaaagcctccaagaaatatggaactatgtgaaaagaccaaacctacgttagattggtgtacctgaaagtgacaaggagaatggaatcaagctggaaaacacacctcaggatattatccaggagaacttctccaacatagcaagacaggccaacattcaaattcaggaaatacagagaacaccactaagatactccttgagaagagcaaccccatgacacataatcatcagattctccaaggttaaaacaaaggaaaaa

SEQ ID NO: 924306 - DNA, 617 bp, Homo sapiens
tccagcaagggcacaaacctggatggagaatgagattgacgaattgacagaagtaggactcagaagatgggtaataacaagctcctctgagctaaaggagcatgttctaccccaatgcaaggaagctaagaaccttgataaaaggttacaggaactgctaactaaaataaccagtttagagaagaacataaatgaccagatggagctgaaaaacacagcacaagaacttcgtgaggcatatacaagtatcaatagctcaatcaatcgagtggaagaaaggatatcagggattgaagatcaacttaatgaaataaggtgtgaagataagattagagaaaaamagaaagaaaagaaacaaacaaagcctccaagaaatatggaactatgtgaaaagaccaaacctacgttagattggtgtacctgaaagtgacaaggagaatggaatcaagctggaaaacacacctcaggatattatccaggagaacttctccaacatagcaagacaggccaacattcaaattcaggaaatacagagaacaccactaagatactccttgagaagagcaaccccatgacacataatcatcagattctccaaggttaaaacaaaggaaaaa

SEQ ID NO: 924307 - DNA, 776 bp, Homo sapiens
caggctaaaaaaacttagagttaataatgttagattcaattgtatatgtggtgtcccatggtcctagtttccccctttctgcttttgcaattgtcattttagggagagattcattctttctactgtggcttgtccttgagaattatatgggatgccagtaatgtgtttaatattccatatagagaaaaatgtacctagagcttggctagtgtagcctggggcattatctgtttaatagaagctggaatgcccatcactgcaaaaggtgacacttaacacagacagaagactctcctgattggcatgtagcccagacaaaatgagaaaaggtgtccacacrtacatgtacataagctagtctcccaaacgagggaacatgtgtgacatccatttgccaaagagaattaggttccagtcctcgaggattaactcctcctgtaaaagataaggaacgcaccatttggcaagttgggcatcgctggataatagctttagcttctttccaggtaatgctgtatctgcgtttgagaccagaggcattaatatgggttaaattgtgaaagtgtctggcattagatattgcagtagcaactaggtgatcagccatttgattcccttcagttaaaggtcctggaagaggtgtatgagccctaatgtgagtgatattaaaaagagtgcattctagtcctaactgctgtttgcaattgggtaaataaagtcatcagttgttcatctgtatcaaatcataactgagcattttcaattaattgtgtgga

SEQ ID NO: 924308 - DNA, 776 bp, Homo sapiens
caggctaaaaaaacttagagttaataatgttagattcaattgtatatgtggtgtcccatggtcctagtttccccctttctgcttttgcaattgtcattttagggagagattcattctttctactgtggcttgtccttgagaattatatgggatgccagtaatgtgtttaatattccatatagagaaaaatgtacctagagcttggctagtgtagcctggggcattatctgtttaatagaagctggaatgcccatcactgcaaaaggtgacacttaacacagacagaagactctcctgattggcatgtagcccagacaaaatgagaaaaggtgtccacacatacatgtacataagctagtctcccaaacgagggaacatgtgtgacatccatttgccaaagagaattaggttccagtcctcgaggattaactcctcctgtaaaagataaggaacgcaccatttggcaagttgggcatcrctggataatagctttagcttctttccaggtaatgctgtatctgcgtttgagaccagaggcattaatatgggttaaattgtgaaagtgtctggcattagatattgcagtagcaactaggtgatcagccatttgattcccttcagttaaaggtcctggaagaggtgtatgagccctaatgtgagtgatattaaaaagagtgcattctagtcctaactgctgtttgcaattgggtaaataaagtcatcagttgttcatctgtatcaaatcataactgagcattttcaattaattgtgtgga

SEQ ID NO: 924309 - DNA, 797 bp, Homo sapiens
attagatattgcagtagcaactaggtgatcagccatttgattcccttcagttaaaggtcctggaagaggtgtatgagccctaatgtgagtgatattaaaaagagtgcattctagtcctaactgctgtttgcaattgggtaaataaagtcatcagttgttcatctgtatcaaatcataactgagcattttcaattaattgtgtggaatgaaccacatatgaagaatcagaaatcacattaataggcataataaaagcagtcaatacctcaattacagctacaagctcggctttttgagctgaagtatagggagtctgaaaaaccttacctttcaagccagaataagaagatttaccattactagacccatctgtaaaaacattttcagcaccttcaattggtttaaatttaattttagggagaatccaattagttaatttcaaaaattgaaataattttgttttcggaaagtgattttcaagaacacccgtgaaatcagctaaatgggtttgccaagtaagactatttataaaggcttgctgtatttgtgccttcgtgagagggacgacaatttttccaggatcatatccatgtaaattaacaatccaagttctcccatttcctatcatagtagcgatttgatytaaataaggagttagagtccatgaattagtatgtggaagaaaaagccattctactaagtcctgctcttagacaataacaccagtaggttaatgctgagttggaaaaatcagcaaatctagagtcttctctggttctgttctatttatttgagtc

SEQ ID NO: 924310 - DNA, 657 bp, Homo sapiens
gtgctcacccctggactataggcacaccttcctccaccgcccagcggccgcctgtaacacgctcagtgccactcacccacccagcccagcaagcctgccaggagagtggaggcaagtcctgggctgttgcttcccagcctggaggagaggaacgggggtgactggcaggtgaactcctccacagccccgggtacagaggtctgggtgtggaaggagaagggagtctctcagggtcaaaccaagggmacccaccaatcctgcagccccaggtcctggccagccagacctctctccaagtcacctcccctgttgtctctggccagacttgaaaggagggaagcccctcacccaccctgggccaaggcgggacaggccttcagctcaaggcccagagagcagcccatggcctcagtattgggagacgtgttgtggggccaggggctcaggggacagataagaatgtgcagcctcatcaagctctggcctgttttccacttccctgccctgagctgaggtggctgccttagtaaccgcacagatgtggtgacacaggcagctcccagcacggctgaggggacatctcagaccccagagcctgcagggtcccaggatgtattagtcagggttctttagagggacagaagtcctctctagagg

SEQ ID NO: 924311 - DNA, 406 bp, Homo sapiens
tctggctgagtttgatagaaattgattttttgttactgatggtttaggaacattttattttcatcgttgcaattgattattgatgacgtcccatatatcattagtactattgccaaatctgggaaaatcactatccaggttttttcatatagcagccatgagatttcagggctttttaaaacttcttgagcaaccgtgaaccccaagtaattcttgaattgataattctcrctaagcacattgctagggcccttcccagggtcttaaaagggtcaggggaatggcgggccctaaagctaaagccacatgtaaagccgcctctaactgaatgggattccactaaggagaggaaggatctgactatcctggccgctgtgcagagaatagacaatggggcagcgggggc

SEQ ID NO: 924312 - DNA, 575 bp, Homo sapiens
gctgattgggcaggtgtgggtccacagtggtactcacagtaggacaggtcaggtgtgtgtttcaggtgggctaatcaccatagatgggagcgtgcatctccaatgtccgcttggattgtcagctttctttggaataattaagagaaggtaaaggaagaggaaaaggastaaagaaatcatctttgtacattttaatctgagctgttttcgagcagtgtgataaggtaggttgtcgaaatgtcagcttctccttatctctaattgacttaagtagaggcagctctaatccttgtgtgcacaggagcctggaatggagagatgaggccaattgattcctactttttaattaacaggtgagctgcttaaaaacaatagtatattgggggcaggttgggaacaggaaggaatgtgagggagggtcatctccaccacagtggcatttagagaaatattaacaagtgtcagcatttgatttgaatcaggggctggagcagagggaaaagttatgtcttatgcatgggtgtggtcacaaaagactgctgccaaagtgacaaaaaatatttatacttctctcc

SEQ ID NO: 924313 - DNA, 575 bp, Homo sapiens
gctgattgggcaggtgtgggtccacagtggtactcacagtaggacaggtcaggtgtgtgtttcaggtgggctaatcaccatagatgggagcgtgcatctccaatgtccgcttggattgtcagctttctttggaataattaagagaaggtaaaggaagaggaaaaggagtaaagaaatcatctttgtacattttaatctgagctgttttcgagcagtgtgataaggtaggttgtcraaatgtcagcttctccttatctctaattgacttaagtagaggcagctctaatccttgtgtgcacaggagcctggaatggagagatgaggccaattgattcctactttttaattaacaggtgagctgcttaaaaacaatagtatattgggggcaggttgggaacaggaaggaatgtgagggagggtcatctccaccacagtggcatttagagaaatattaacaagtgtcagcatttgatttgaatcaggggctggagcagagggaaaagttatgtcttatgcatgggtgtggtcacaaaagactgctgccaaagtgacaaaaaatatttatacttctctcc

SEQ ID NO: 924314 - DNA, 681 bp, Homo sapiens
gggacctcactgttagaaggaaaactaacaaacagaaaagaatagcatcagcatcaacaaaaaggacatccataccaaaaccccatctataggtcaccatcatcaaagagtaaaggtagataaagaccacaaagatgaggagaaaccagagcagaaaagctaaaaattctaaaaaccagagcgtctcttctcctccaaaggactgcagttcctctccagcaatggaacaaagctggatggagaatgactttgatgagctgacagaagtagccttcagaaggtcagtaataacaaacttctccaagctaaaggaggatgttcgaatccatcacaaggaagctaaaaaccttgaaaaaagattagacgaatggctaactacaataaacagtgtgragaagaccttaaatgacccaacggagctgaaaaccatggcatgagaactacgtgacacatgcacaaacttcaacagccgattcgatcaagtggaagaaagggtatcggtgattgaaggtcaaattaacgaaataaagcaagaagcaaagtttagagaaaaaagagtaaaaggaaacgaacaaagtctccaagaaatatgggactatgtgaaaagaccaaatctacgtctgactggtgtacctgaaagtgacagggagaatggaaccaagttggaaaacactcttcagg

SEQ ID NO: 924315 - DNA, 681 bp, Homo sapiens
gggacctcactgttagaaggaaaactaacaaacagaaaagaatagcatcagcatcaacaaaaaggacatccataccaaaaccccatctataggtcaccatcatcaaagagtaaaggtagataaagaccacaaagatgaggagaaaccagagcagaaaagctaaaaattctaaaaaccagagcgtctcttctcctccaaaggactgcagttcctctccagcaatggaacaaagctggatggagaatgactttgatgagctgacagaagtagccttcagaaggtcagtaataacaaacttctccaagctaaaggaggatgttcgaatccatcacaaggaagctaaaaaccttgaaaaaagattagacgaatggctaactacaataaacagtgtgaagaagaccttaaatgacccaacggagctgaaaaccatggcatgagaactacgtgacacatgcacaaacttcaacagccgattcgatcaagtggaagaaagggtatcggtgattgaaggtcaaattaaygaaataaagcaagaagcaaagtttagagaaaaaagagtaaaaggaaacgaacaaagtctccaagaaatatgggactatgtgaaaagaccaaatctacgtctgactggtgtacctgaaagtgacagggagaatggaaccaagttggaaaacactcttcagg

SEQ ID NO: 924316 - DNA, 689 bp, Homo sapiens
gtcaaattaacgaaataaagcaagaagcaaagtttagagaaaaaagagtaaaaggaaacgaacaaagtctccaagaaatatgggactatgtgaaaagaccaaatctacgtctgactggtgtacctgaaagtgacagggagaatggaaccaagttggaaaacactcttcaggacattatccaggagaacttccccaacctagcaaggcaggccaacattcaaattcaggaaatacagaggacaccacaaagatactcctcaagaagagcaaccccaagacacataattgtcagattcaccaaggttgaaatgaaggaaaaaattttaagggcagccagagagaaaggtcaggttaacarcaaatggaagcccatcagactacagaggatccctcggcagaaactctacaagtcagaagagagtgggggctaatactcaacattcttaaagaaaagaattttcaacccacaatttcatatccagccaaactaagcttcataagtgaaggagaaataaaatcctttacagacaagcaaatgctgagagattttctcaccaccaggcctgccttacaagagctcctgaaggaacactaaacatggaaaggaaaaactggtaccagccactgcaaaaacatgccagattgtaaagaccatcaatgctaggaagaaactgcatcaactaacgggc

SEQ ID NO: 924317 - DNA, 689 bp, Homo sapiens
gtcaaattaacgaaataaagcaagaagcaaagtttagagaaaaaagagtaaaaggaaacgaacaaagtctccaagaaatatgggactatgtgaaaagaccaaatctacgtctgactggtgtacctgaaagtgacagggagaatggaaccaagttggaaaacactcttcaggacattatccaggagaacttccccaacctagcaaggcaggccaacattcaaattcaggaaatacagaggacaccacaaagatactcctcaagaagagcaaccccaagacacataattgtcagattcaccaaggttgaaatgaaggaaaaaattttaagggcagccagagagaaaggtcaggttaacagcaaatggaagcccatcagactacagaggatccctcggcagaaactctacaagtcagaagagagtgggggctaataytcaacattcttaaagaaaagaattttcaacccacaatttcatatccagccaaactaagcttcataagtgaaggagaaataaaatcctttacagacaagcaaatgctgagagattttctcaccaccaggcctgccttacaagagctcctgaaggaacactaaacatggaaaggaaaaactggtaccagccactgcaaaaacatgccagattgtaaagaccatcaatgctaggaagaaactgcatcaactaacgggc

SEQ ID NO: 924318 - DNA, 598 bp, Homo sapiens
cctgattaaaccctggatgggcccaaacagtttgcaacttactaaacttactaaatgggtttttctcagtatggtttagacctcaccaggtgactgttcttgtgctgttatacagcttttgccctaggcaattgagtcttcctatggggatggtgaagtcttttcttctctagctatgcagtattgtccaataattgaggtttcgaagacccaaaagttaccagtgtgggccttctggactggaattatatcaggaactggatccatgggcactaattctcgggcctcccaaggccattggtctcccacagtggttcccctgtatacataataggaagtaacattgaggaaatgggctwcattttctgctaactgcaggaacaaattttttgtcttccttcagagttctggtactggcacattcagttcatcataaaaggtgtggaatactggtttgggactgcacttgtggatctccccttggactaaaaagttgactcgggggtcaagcacagttccatcaattcctaggtttacattttcccctgtcttccattgggggtccaggaagttagcaattattaattctaatgggtta

SEQ ID NO: 924319 - DNA, 598 bp, Homo sapiens
cctgattaaaccctggatgggcccaaacagtttgcaacttactaaacttactaaatgggtttttctcagtatggtttagacctcaccaggtgactgttcttgtgctgttatacagcttttgccctaggcaattgagtcttcctatggggatggtgaagtcttttcttctctagctatgcagtattgtccaataattgaggtttcgaagacccaaaagttaccagtgtgggccttctggactggaattatatcaggaactggatccatgggcactaattctcgggcctcccaaggccattggtctcccacagtggttcccctgtatacataataggaagtaacattgaggaaatgggcttcattttctgctaactgcaggaacaaattttttgtcttccttcagagttctggtactggcacattcagttcatcataaaaggtgtggaayactggtttgggactgcacttgtggatctccccttggactaaaaagttgactcgggggtcaagcacagttccatcaattcctaggtttacattttcccctgtcttccattgggggtccaggaagttagcaattattaattctaatgggtta

SEQ ID NO: 924320 - DNA, 636 bp, Homo sapiens
agttccatcaattcctaggtttacattttcccctgtcttccattgggggtccaggaagttagcaattattaattctaatgggttacagttactggaggtgcaagacgaattactttttctttttgtaggtgagcagcrtcttttttgtcctttttcaggtagcccaaatgacacaggaccaataactacattcaataccacatagtcctaattcatgacaaatgtacttattttctgccttatagcttttttcccaactgagagaaccacatcccatccctagcttgttactattaatgactgcacaggcatcagatcttaaggtgacttgtttgggaacccctttttcttctgttctggttaatactttacttgtaactttcacgggtccccaccagtcctcagttcttaatcttatttcaaaaaactgtggtcataggaggctcagacgggttgtaacacacatcaggttggtcattccctgtgccacatactttatacttcagtggcattatataagcaagtccctttcaaagttcctagacattcttaatatctataaaacagaaagattgttttaatttgttcccttacctcagtaacttgattaatacactgggtacagtcctccctgtg

SEQ ID NO: 924321 - DNA, 616 bp, Homo sapiens
cccagtagctgtggcacggctactcttccgtctggtaactggatccttccttcctttatcgcttgctccccctctgcctggaaaaagtctctttcctctttagaataagcaggcactagatcaggtgcctgagggagcaaggcggctgtgactgatgctcggtattgggtggatgctgctttgtaagcttctgagtctgcttgagaatttcctaaggcaacagaagtggtggcttgctgatgtcctttacaatgcatgayggccaccctccgaggctttcatactgcttttaataactgtaaaatttcttgctggtatttaatgtcctttccccctgagttcaacaggcctttttctttgtataatgccccatgcacttggagggttaaaaaggcataccgagagtccatacaaatgtttacagtcttaccttcacttagctctaaggcccaagttaaaacagtgagtttggcgttttaggctgaagttctgtgaggcagcggtttggcttcaataacagtgtccaaggttaccattgcctatccagcgcacctctctccttgtgggttaatgaagctgcttccgtccacatatagctcccagtctacaaatgtcc

SEQ ID NO: 924322 - DNA, 616 bp, Homo sapiens
cccagtagctgtggcacggctactcttccgtctggtaactggatccttccttcctttatcgcttgctccccctctgcctggaaaaagtctctttcctctttagaataagcaggcactagatcaggtgcctgagggagcaaggcggctgtgactgatgctcggtattgggtggatgctgctttgtaagcttctgagtctgcttgagaatttcctaaggcaacagaagtggtggcttgctgatgtcctttacaatgcatgacggccamcctccgaggctttcatactgcttttaataactgtaaaatttcttgctggtatttaatgtcctttccccctgagttcaacaggcctttttctttgtataatgccccatgcacttggagggttaaaaaggcataccgagagtccatacaaatgtttacagtcttaccttcacttagctctaaggcccaagttaaaacagtgagtttggcgttttaggctgaagttctgtgaggcagcggtttggcttcaataacagtgtccaaggttaccattgcctatccagcgcacctctctccttgtgggttaatgaagctgcttccgtccacatatagctcccagtctacaaatgtcc

SEQ ID NO: 924323 - DNA, 616 bp, Homo sapiens
cccagtagctgtggcacggctactcttccgtctggtaactggatccttccttcctttatcgcttgctccccctctgcctggaaaaagtctctttcctctttagaataagcaggcactagatcaggtgcctgagggagcaaggcggctgtgactgatgctcggtattgggtggatgctgctttgtaagcttctgagtctgcttgagaatttcctaaggcaacagaagtggtggcttgctgatgtcctttacaatgcatgacggccaccctccgaggctttcatactgcttttaataactgtaaaatktcttgctggtatttaatgtcctttccccctgagttcaacaggcctttttctttgtataatgccccatgcacttggagggttaaaaaggcataccgagagtccatacaaatgtttacagtcttaccttcacttagctctaaggcccaagttaaaacagtgagtttggcgttttaggctgaagttctgtgaggcagcggtttggcttcaataacagtgtccaaggttaccattgcctatccagcgcacctctctccttgtgggttaatgaagctgcttccgtccacatatagctcccagtctacaaatgtcc

SEQ ID NO: 924324 - DNA, 591 bp, Homo sapiens
gagaaggctctacaacaggaccaggttgttgtgcaagctgctctgcctcttgggccatatgacccagcagatccaatggtgcttgaggtgtcagtggcagatagggatgctgtttggagcctttggtaggcccccataggtgaatcacaatgaaggcctctaggagtttgaagcaagaccctgccatcttctgcagataactactctccttttgagagacaactcttggcctgttactaggctttggtggaaactgaatgtttgactgtgggtcattaagtgaccatgcgacctgaactgcctatcatgaactgggtgctttctgacccatctagccataaagtgggtcatgcacagcagcattccatcatcatatggaagtggtatatatgtgatcgggctcaagcaggtcctgaaggcacatgtaattcacaggagaaagaggctcaaatrctcatggtctccactcctgccaccctgccttccctcccctgcactaattgcctcatggggagttccttatgatcagttggcagaggaagagaagtctggggcctggttcacagatgattctgcatgatatgcaggcac

SEQ ID NO: 924325 - DNA, 553 bp, Homo sapiens
ctttatgcctccttcactttagtgaatggatgagaacgtggtttaaactaaggactgaaataataatttttgctattttacactgatgccttaatggatcctgaaaagctactctggcaactaccaagactgtcaatcctaggtgagctagattccatcacaggccccacacagaggatcaaagtgaaggtcagttaaatcaggctccccttcagatggtggagcagggtgcccaggagcttgaaaagaagcagccaatggcttgctttccgaatcctctaaaaagtaaacaaaatataccttgtagaatttctagtagcaaggacaaaatggcagcatatgctgtgtgactttttcaayagaatttatttaatgacttattgatactggtactttgaagatctgtggtaatacaggtctaaatattccatatttctttagtatgttttctattacaagtcattagtatttctagatgtatggtatcttagggatgagaacttgaacaaattaccctaagttcagtttttcacgtgtattcaatgttttatta

SEQ ID NO: 924326 - DNA, 691 bp, Homo sapiens
gccggaggagcgacagcaggcaatggccaaggtcagggccttggcggggtcaggaccttgcatcgccaaggggagccccttgggacctgcagcctgggccatcgcaggggcctgcgccagccagaggggtgccgagaggggacatgggcagtggctgcaggtaccaggacacgccctgccttctggccatctttgctggtcagggatggtgttcatgttaacataaatcacaagtagatcaaagatccaggtggcatccctgcagcgggtgagctggccagcgacaggctggataaaagaccgggctgctgtttaaaatgtccaaagcactttacaggtcctttcttcacatcaaacagtcttttccccctttttgctccagttaaaaggcaactgacgtatatattctaccatcccgaagccttatggttcttctggctagttattttaaataacartagggaacttcgctttcagccgtggcctgttcttgcttcctgatgcgtgtttgcgcttctaacaagaaaatgttcttttacttaaacacgtcaaaaaggaggaagcactagttttatcaaggtctctttaaaagtctctttaatgcacaagagttggcctgggccccgcccctctgcccggcagcctttgatgaaggttgatatacagtgtgccaggcgatctggcacacaca

SEQ ID NO: 924327 - DNA, 729 bp, Homo sapiens
atccacccattcctaataggtctcttatttttaataaatcaaggtgaaattacacctgatatttcttttttttcttttctctctttctttctttctttttttttttttttttgatatggagtttcattcttgttgcccaggctggagtgcagtggcatgatctcagctcaccacagcctctgcctctggggttcaagtgattctcctacctcagcttcccaaatagctgggattacaggcacctgccactatgcctgactattttttttttttttcwttttggtgcttttgtcaagacaggatttcaccatgtcggccaggctggtctcgaactcttgacctcaggtgatctgtctgcctcagcctctcaagtgctgggattacaggtttgagtcaccgtgcccagtctatacttcatatttcgtgataagcaatcaactagtacaaattcagtatctgtaagagatttcatctcactgatttgccagggacgggggtcaccaggcagtgtaatctgaacatttgagttcaagtttggtcacattaatagtgtgtggtgtgattccctctgggacttttgtctgtttgttctcatctcttttgtctgtttgttctcatctctgtcgaaggggcctctccaggtgacttgtcacgtgcatgcgaagctgtaacagaatactgagaatctaagaaatagacctcagactctgttgtcttttttcttcttct

SEQ ID NO: 924328 - DNA, 602 bp, Homo sapiens
ggctaacacggtgaaaccccgtctctactaaaaatacaaaaattagccgggcatggtggtgggtgcctatagtcccagctactcgggaggctgaggcaggagaatggtgtgaacccgggaggcggagcttgcagtgagccgagatcgagccactactgcactccagcctggatgacagagcaagactctgtctcaaaaaaaaaaaaaaaaaaaaaaattagctgtgcatggtggtgggcacctgtaatcccagctacttgggaggctgagacaggagaattggttgaaccygggagacagaggtggcagtgagccgagattgcaccactgcactccagcctaggtgacagagcaagactccatctctaaataaataaataaacaaacaaacaaatggatttatggttatttatataaatcagttgcactcaaatgcatatagccctccattgtctttaacctttttaagagacagggtctctctgtcacccatactgaagtaccatggtgcgatcacagctcactgcagcctcaaacacctgggctcaagcaatcctcctgcctcagcctcccgagtagctgggactacaggtacatgccac

SEQ ID NO: 924329 - DNA, 567 bp, Homo sapiens
taaatctctttttctacccagtctcaagtatgcctttatctgcagcatgaaaatggactaatacagtaaactggtaccagtagagtggggcgttgctgacaagatacctgaaaatgtggaagcgactttggaactgrgtaacaggcagagactggaacagtttgaagggcttagaaaaagacaggaaaatgtgggaaagtttagaacttcctagatacttgttgaatggctgtgcccaaaatgctgatagcaatagggacaataaaatccaggctgaggtggtctcagatggggatgaggaatttgctgggaactggagcaaaagtgactcttgttatgtttcagcagagactggaggcattttgcccctaccctagagatttgtggaactttgaacttgagagagatgatttagggtatctgacagaagaaatttctaaggagcaaagcatttaagaggtgacttgggtgctgttaaaggcattcagttttataagggaagcagagcatagaagtttggaaaatttgcagcctgactatgtgacagaaaagaaaacttctcgggag

SEQ ID NO: 924330 - DNA, 567 bp, Homo sapiens
atggtggattatctttttgtatactgttggatttggttagctagtattttgttgaggatttttgcatctgtgttcattagaaatattggtctgtagttttcattttttgttatatcctttcctggttttggtgttagggtgatactgccttcatataatgatttagggaggattcccactttatctttyggaacagtttcaatagaattggtaccaattcagttgtgaatccatctggtcctgaactttcttttgttggcaatttttaaattaccatttcaatcttgctgcttgttattggtctgttcagagtctctatttcttcctggtttaatctaggagtgttgtatatttccaggaatttatccatgtcttctaggttttctagtttgtgcacataaaggtgttaacagcagccttaaataatcttttgtatttctgtggtattggttgtagtatctcctttttcatttctaattgagcctacttggatcttctctcttcttttcttggttagcctcactaatagtctatcaactttgtttatatttttaaagaacttgtttc

SEQ ID NO: 924331 - DNA, 729 bp, Homo sapiens
cctttgagtcagcactgtgctaggcattcagaggggagggggcgcatgttttgctaagggcaggtgtgcctgcgtgtgtgtgtgtgtatatatgtgcacgtgtgtgtaaagtttccttagaagaggtggcttttgagcagaagcgccttgggtgaaaagtgtagcaggcttggaagtcagagtgtgctgctgagtgagtgggagtctggtggaggtggtctttctaaccggccacaagaccctgggcccgctctgcccctccgtctgagtacctgccatcccagggggtgagtgctggctgggctcctggtkcagccacctgcaccgtgcagtgccatcaccgggtcgtgtcttgagcccctccttgccctcctgtttgtttaagtggccttggcctagctccctctgccctctgagggtctcactgtgccctagccctgtgggcatagtgcctggcacatagggggccctcagtctagggcacagggtgagtagaggaggaggttggccctgctggggcagcatgcttgccaagcctgtgtgtgtgtgggtttttgttcatgcttctgctggtgtgtacggagaagtgggcccagacacacacagacatacacggatgcccaccaggccccacgtccatccatgggaagggcagcacatgctggtaatgtgttccccaaacagcagcctcttggggctgctgagctcagggcagagcagggacggggc

SEQ ID NO: 924332 - DNA, 856 bp, Homo sapiens
agtattttattttattttttgctgctgttgtaaaagggattgagttcttaatttgattctcagcttggtcattgttggtgtatagcagtgctactgacttttgtacattgattttgtatcctgaaacttcgctgaattcattaatcagatctaggagctttttggatgagtctttagggttttctaggtatacaatcatatcacttgcagcgacagyctgacttcctctttactgatttagaggccctttatttctttcttttgttggatggttctggctaggacttccagtactatgttgcatagaagtggtgaaagtgggcatccttgttttgttccagttctcggtggaatgctttcaattttttcccgttcagcataatgttggctgtgagtttgtcatacacggcttttattacattgaggtatgtcctttgtatgcccattttgctgagggttttaatcataaagggatgccagattttgtcaaatactttttcagagtctattgagatggtcatatgatttttgtttttaattctgttcatgtggtataccacatttattgacttgcacatgttaaaccaaccctgtatccctggtataaaatcctcttgatcatggtggattatctttttgatgtgctgttggatttgatgagttagtattttgttgaggatttttgcatctatgttcattagtgatattggtatgtagttttcttttttttgctatgccctttcctgattttgatattagggtaatactggattcatagaatgattagggaggattccctctttctctatcttttggaatagtttcggtagtggtgccaattcttctctgagtgtgt

SEQ ID NO: 924333 - DNA, 615 bp, Homo sapiens
cctcaggaaacttacggccatggcagaagaagaagcaaatacatccttcttcacaaggtagcagcagagagaagaatgagagttcagtgaagggggaagccccttataaaaccatcagatctcatgagaacttactgtcatgagaacagcatgggggaaaccaycccatgattcaattacctcccactgtgtccctcccacaacacatggagattatgagaactacacctcaagatgagatttgggtggggacatagccaaaccatatgtattagtccattttcatactgctataaagaaatacccaagactgggtgatttataaagaaaaagaggtttaatggactcaccattccacatggctgggcaggcctcacaatcatggcaaaagacaaaggaggagcacaggcacatcttacatggtggcaggcaagatggcacgtgcaggggaactgccctttataaaaccatcagaccttgtgaaactattcactatcatgagaacagcacgggaaaaacccacgcccatgattcaattacctccgaccaggtcgctcccacgacatgtggggattatgggagctacaattcaagataagatttgggtggagacac

SEQ ID NO: 924334 - DNA, 662 bp, Homo sapiens
acattcttacataaatgacagtgggggatctgtgttaccatgtgaaacaggctggggggatgattgccagagccactcccactttagtctgcccatcccaggaagttattcttgattcttttcttcacctatcacctccaattgctcagcaagtcctgttgattctaccttcaaactatacccaaaatctgactacgtcttaccacctctaccaccaccacttcatccaaaccactggtatctcccatctaagctattgcagtaaccttctaactggtcttgctgcctcctccttcatcccctgtatcagtgtagattagattttaaatatattcatcagatcacaagccgcytctaagaaaactcaaattcctgccaggcacagtggctcctgcctgtaatcttagctatttgggaggctgaggtaggaggattgcttgaggccaagagttcaagaccagccaaggcaacataatgaaaccctgtctctaaaaccagaaaacaaaaaaacaaaaattatccaggtgtggtggtgtgtgcctgtagtcccagctactgaggaagctgagatgggaggattgcttgagcctggaaggtcgaggctgcagtgagccttgatccttgatcatgccactatactccagcctgggtgacagagtgag

SEQ ID NO: 924335 - DNA, 884 bp, Homo sapiens
gctgcctgggagactgaggtaggaggattgtttaaacctgggaggcagaggttgcagtgagccaagatcacaccacggcagtccagcctgggtaacagagtgacactctgtctcataaaataaaataaaaacaaaacaaaactcaaattccttacgtggcggacaggcccctacgtgagctgcccctggccacccrctgcttccgactcctgttggctccttctcctccagtcactggcattcatgatggtctgtgacttttactccagtctcaggatccttgtgtttgttcttcctattgtagtttgttctttcttcatacttcttatggtgtgttccgtcccttaatcagggggatggtggggtccttggattcaggtgtctacttagggttttctacgtaggttctcagagacattctcccgctgctgtacgtaaaagaggcctttttccatggtttacgttatttatttatttatctttttgaggtggagttttgctcttttgtccaggctggagtggacaatctggggtcactgcaacctccgccttccagtttcaagtgattctcctgcctcagtctcccgagtagctgggactacaggggcccgccactatgcctggctgatgttttgtgtttttagtagagacagggtttcaccatgttggccaggatggtctcaacctcctgacctcgtgatcctccctcctaggcctcccaaagtgctgggattacaggtgtgagccaccgcatctggctaccttacattttaaaataacccttatcactactgaaaatgatgtctttatatgtctatctccttattttctgtttccttactctcctcccaggaacataaacttcatgagggcaaggactttgc

SEQ ID NO: 924336 - DNA, 841 bp, Homo sapiens
gtaggaggattgtttaaacctgggaggcagaggttgcagtgagccaagatcacaccacggcagtccagcctgggtaacagagtgacactctgtctcataaaataaaataaaaacaaaacaaaactcaaattccttacgtggcggacaggcccctacgtgagctgcccctggccacccgctgcttccgactcctgttggctccttctcctccagtcactggcattcatgatggtctgtgactttyactccagtctcaggatccttgtgtttgttcttcctattgtagtttgttctttcttcatacttcttatggtgtgttccgtcccttaatcagggggatggtggggtccttggattcaggtgtctacttagggttttctacgtaggttctcagagacattctcccgctgctgtacgtaaaagaggcctttttccatggtttacgttatttatttatttatctttttgaggtggagttttgctcttttgtccaggctggagtggacaatctggggtcactgcaacctccgccttccagtttcaagtgattctcctgcctcagtctcccgagtagctgggactacaggggcccgccactatgcctggctgatgttttgtgtttttagtagagacagggtttcaccatgttggccaggatggtctcaacctcctgacctcgtgatcctccctcctaggcctcccaaagtgctgggattacaggtgtgagccaccgcatctggctaccttacattttaaaataacccttatcactactgaaaatgatgtctttatatgtctatctccttattttctgtttccttactctcctcccaggaacata

SEQ ID NO: 924337 - DNA, 884 bp, Homo sapiens
gctgcctgggagactgaggtaggaggattgtttaaacctgggaggcagaggttgcagtgagccaagatcacaccacggcagtccagcctgggtaacagagtgacactctgtctcataaaataaaataaaaacaaaacaaaactcaaattccttacgtggcggacaggcccctacgtgagctgcccctggccacccgctgcttccgactcctgttggctccttctcctccagtcactggcattcatgatggtctgtgacttttactccagtctcaggatccttgtgtttgttcttcctattgtagtttgttctttcttcatacttcttatggtgtgttccgtcccttaatcagggggatggtggggtccttggattcaggtgtctacttagggttttctacgtaggttctcagagacattctccygctgctgtacgtaaaagaggcctttttccatggtttacgttatttatttatttatctttttgaggtggagttttgctcttttgtccaggctggagtggacaatctggggtcactgcaacctccgccttccagtttcaagtgattctcctgcctcagtctcccgagtagctgggactacaggggcccgccactatgcctggctgatgttttgtgtttttagtagagacagggtttcaccatgttggccaggatggtctcaacctcctgacctcgtgatcctccctcctaggcctcccaaagtgctgggattacaggtgtgagccaccgcatctggctaccttacattttaaaataacccttatcactactgaaaatgatgtctttatatgtctatctccttattttctgtttccttactctcctcccaggaacataaacttcatgagggcaaggactttgc

SEQ ID NO: 924338 - DNA, 884 bp, Homo sapiens
gctgcctgggagactgaggtaggaggattgtttaaacctgggaggcagaggttgcagtgagccaagatcacaccacggcagtccagcctgggtaacagagtgacactctgtctcataaaataaaataaaaacaaaacaaaactcaaattccttacgtggcggacaggcccctacgtgagctgcccctggccacccgctgcttccgactcctgttggctccttctcctccagtcactggcattcatgatggtctgtgacttttactccagtctcaggatccttgtgtttgttcttcctattgtagtttgttctttcttcatacttcttatggtgtgttccgtcccttaatcagggggatggtggggtccttggattcaggtgtctacttagggttttctacgtaggttctcagagacattctcccgctgctgtacgtaaaagaggcctttttccatggtttacgttatttatttatttatytttttgaggtggagttttgctcttttgtccaggctggagtggacaatctggggtcactgcaacctccgccttccagtttcaagtgattctcctgcctcagtctcccgagtagctgggactacaggggcccgccactatgcctggctgatgttttgtgtttttagtagagacagggtttcaccatgttggccaggatggtctcaacctcctgacctcgtgatcctccctcctaggcctcccaaagtgctgggattacaggtgtgagccaccgcatctggctaccttacattttaaaataacccttatcactactgaaaatgatgtctttatatgtctatctccttattttctgtttccttactctcctcccaggaacataaacttcatgagggcaaggactttgc

SEQ ID NO: 924339 - DNA, 631 bp, Homo sapiens
acagtaaaagatgataaagggggtatcaccaatgatcccacagaaatacaaactaccatcaaagaatactctaaacacctctacacacataaactagaaaatctagaagaaatggataaattcctggacatatacaccctcccaacactaaactaggaagaagtcgaatccctgaatagaccgataacaagttctgaaattgaggcagtaattaatagcctaccaaccaaaarcagctcagaaccagattcacagacgaattctaccacaggtacaaagaggagctggtaccattccttctgaaactatttcaaataatagaaaaagagggactcctccctaactcattttatgaggccagcatcatcctgataccaaaacctggcagagatacaacaaaaaaaagaacatttcaggccaatatccctgatgaacatcaatgagaaaatcctcaataaaatactgggaaactgaatacagtagcacatcaaaaaggttatccaccatgatcaagtcagcttcatacctgggatgcaaggctggttcaacatatgcaaatcaataaatgtaatccatcacataaacagaaccaatgacaaaaaccacatgattatctcaaaaaatgcacaaa

SEQ ID NO: 924340 - DNA, 717 bp, Homo sapiens
aaagagtccagtacgttacccaggctggtctcaaactcctgacttcaagccatcctccgacctccacttcccaaaatgctaggactacaggagtaaggcagtgtgccaggttaacagaataacttaagcgcatctattttgttccagttttcggctatctaactccatttgtctcgattacacccacttattcggtttaaactatttacggtgccaaagacacatgaaacgtttcaaatactgycatacaacgaaggagacaatcacaggctttacagaggcaaactgaaactcagattatttgtggccccatatttctacatacactaaagtaacacaatttatgtcaaaatttgataattcttccaagcaaatcagacacgcgacacgtgctaactaaaagtgtgactttttaatcgcagtggttaagtgtattgcctgtattctgaattatcaccacattcacagagaaaacccgctttaataaaaagtgcacatgaaaaccaatggcggcttagcaccatctcccacaactagtcggacacattaggcagttaaaggtagaatcctcaggaaaaatcaatgagtttaacgaaagtgagtctcttaatagcactgaggagttctttccccactgactcctcccgtaattcaacacccacacatagaaaacccatccccttttatagacaaaatcccaaaccttcgctttctatt

SEQ ID NO: 924341 - DNA, 769 bp, Homo sapiens
atttctatcagatgtacaaagagctggtaccactcctactgaaactattccaaaaaattgaggaggagggactcccccccaactcattctgtgaggctggcattattctgataccaaaatctggcagagatacaacaaatagagaaaacttcaggacaatatccttgataaacattgatgcaataatcctcaacaaaatacttgtaaacagaatctagcaacacatcaaaaagagtatccactgtagatatggtttggctgtgtccccacccagatctcagtttgaattgtatctcccagaatttccacatgttgtgggagkgacccagggaaaagtaattgaataacgggggttggtctttcctgtgctactcttgtgatcgtgattaagtctcatgagatctgatgagtttatgaggggtttccacttttgcttcttcctcattttctcttgctgccaccatgtaagaagtatctttcacctcccaccatgattctgaggcctcctcagccatgtggaactgtaagtccaattaaacctctttttcttcccagtctcaggtatgtctttatcagcagcatgaacacagattaatacagtaaattggtaccagtagagtggggcattggtgaaagagacccaaaaatgtggaagcaacattggaattgggtaacaggcataggatggaaaagtttgaggggctcagaagacaggaaaatgtgggaaagtttggaaccttctagagacttgttgaatggctttaacaaa

SEQ ID NO: 924342 - DNA, 781 bp, Homo sapiens
tgtacaaagagctggtaccactcctactgaaactattccaaaaaattgaggaggagggactcccccccaactcattctgtgaggctggcattattctgataccaaaatctggcagagatacaacaaatagagaaaacttcaggacaatatccttgataaacattgatgcaataatcctcaacaaaatacttgtaaacagaatctagcaacacatcaaaaagagtatccactgtagatatggtttggctgtgtccccacccagatctcagtttgaattgtatctcccagaatttccacatgttgtgggagggacccagggaaaagtaattgaataacgggggttggtctttcctgtgctactcttgtgatcgtgattaagtctcatgagatctgatgagtttatgaggggtttccacttttgcttcttcctcattttctcttgctgccaccatgtaagaagtatctttcacctcccaccatgattctgaggcctcctcagccatgtggaactgtaagtccaattaaacctctttttmttcccagtctcaggtatgtctttatcagcagcatgaacacagattaatacagtaaattggtaccagtagagtggggcattggtgaaagagacccaaaaatgtggaagcaacattggaattgggtaacaggcataggatggaaaagtttgaggggctcagaagacaggaaaatgtgggaaagtttggaaccttctagagacttgttgaatggctttaacaaaaatgttgatagtgatatgaacaat

SEQ ID NO: 924343 - DNA, 702 bp, Homo sapiens
atgattctgaggcctcctcagccatgtggaactgtaagtccaattaaacctctttttcttcccagtctcaggtatgtctttatcagcagcatgaacacagattaatacagtaaattggtaccagtagagtggggcattggtgaaagagacccaaaaatgtggaagcaacattggaattgggtaacaggcataggatggaaaagtttgaggggctcagaagacaggaaaatgtgggaaagtttggaaccttctagagacttgttgaatggctttaacaaaaatgttgatagtgatatgaacaataaggtccaggctgagatggtctcagatggagatgaggaacttgttgggaaatggagcaaagatgactcttgttatgttttagcaaagagactggcagcattttgcctctgccctagagatttgtgggactctgaacatgagagagatgatttagggtatctagcagaagaaatttttaagcmgcaaagcattcaaaatgtgacttgggtgctgttaaaagcattccattttaaaagggaaacagagcatgaaagttcagaaaatttgcaacttgatgctgtagaaaagaaaaacccattttttgaggagaaattcaagctggctgcataaatttgcataagtaacaaggagcgtaatgttaatccccaagaccatggggaaaatgtctccaggccatgt

SEQ ID NO: 924344 - DNA, 489 bp, Homo sapiens
aacaacttcagcaaaatttcaggataaaaaaaatcaatgtacaaaaatcactagcattcctgtacatcaataacagccaagccgaagaccaaatcaggaacaaaatcccattcaaaattgctacaaaaagaataaaatacctagaaatacagctaaccagagaagtaaaagagctctacaataagaattacaaaacactgytcagagaaatcagagaagacccaaacaaatggagaaacatgtcatgctcatggataggaagaatcaatatcattaaaatcgccatactgcccaaagcaatttacagattcaatgctattcttatcaaactaccaatgacattcttcacagaactagaaaaactatttaaaaattcatatggaaccataaaaagagccaaggccctaagcaaaaagaagaaagctggaggcatcacattacctgacttcatgctgtactataaggctacagtaaccaaaacaccatggt

SEQ ID NO: 924345 - DNA, 577 bp, Homo sapiens
ctgggttgagtggggacttggagaacttttctgtctagctagaggattgtaaatgcaccagtcagcactctgtagaaacgcaccaatcagcgctgtgtgtctagctaaaggattgtaaatgcaccaatcagcactctgtaaaaacacaccaatcagcactctgtgtctagctagaggactgtaaacgcaccaatcagcactctgtaaaaacacaccaatcagcgctctgtgtctagctagaggattgtaaacacaccaatcagcactctgtaaaaactcaccagtcagcactgtgtctagctggaggattgtaaacgcaccamtcagcactctgtaaaaacataccaatcagcgctctacgtctagctaaaggattgtaaatgcaccagtcagaactctgtaaaaaggcatcagtcagcgctctgtgtctagctaaaggtttgtaaacgcaccaatcaacactctgtaaaactgaccaatcagcaccctgtaagatggaccaatcagtaggacgtgggtggggacaaatcagggaataaaaactggccaccccagccagcagcagcaacccacttgg

SEQ ID NO: 924346 - DNA, 577 bp, Homo sapiens
ctgggttgagtggggacttggagaacttttctgtctagctagaggattgtaaatgcaccagtcagcactctgtagaaacgcaccaatcagcgctgtgtgtctagctaaaggattgtaaatgcaccaatcagcactctgtaaaaacacaccaatcagcactctgtgtctagctagaggactgtaaacgcaccaatcagcactctgtaaaaacacaccaatcagcgctctgtgtctagctagaggattgtaaacacaccaatcagcactctgtaaaaactcaccagtcagcactgtgtctagctggaggattgtaaacgcaccactcagcactctgtaaaaacataccaatcagcgctctaygtctagctaaaggattgtaaatgcaccagtcagaactctgtaaaaaggcatcagtcagcgctctgtgtctagctaaaggtttgtaaacgcaccaatcaacactctgtaaaactgaccaatcagcaccctgtaagatggaccaatcagtaggacgtgggtggggacaaatcagggaataaaaactggccaccccagccagcagcagcaacccacttgg

SEQ ID NO: 924347 - DNA, 667 bp, Homo sapiens
aaaatctggcaaagtactttcttggtattcaatttattcttgttctgcttaggttagcagttttataaaccagtttttgttaaagtttcaggaattcttagccagtccaaatgatataaacttaaagttattagaaagctatattcaagaatgcttttcagggtcctttccatcctttcatgaacctcctaagacaccatattctaggattttgcatgctagtgaacttttcagaaactatatcagcattatgcaattaaccatggaaatgactttaaatagtcataaagacacaattgacaaggaaatttggttatttctgtggtcagcaataatctaatataataaccttaattatgattgatagcatatactcagacattagaattttagaaatcccatrcaattttggagcatatattaatattattcactaaaatataacctgaagaagattaaacattatttttattttgactattccatgcaactaagcatgtcacataatcctgtttacatctcttttggatgctccaggggccctctgtagcatccaaaagttaggggttagaaaagacaattttaaagctgaaatttgatttttgggaagcctatcgagtatgttaaaggcctataacccttgctattatgcttaaccaatttgacc

SEQ ID NO: 924348 - DNA, 608 bp, Homo sapiens
tcaacagtcctcccatcttaactcattcagcattaactcaaaagttcacaatccaatgtctcatctgagaaaacataagtcccttctgcgtatgagtctgtaaaatcaaaaacaaatgagttatttttaaaatacaatggaggcacaggcactgagtaaatgcttcaattccaaatggtagaaatggataaaacaaagcggctacagcmcccattcaagtccaaaacccagcagatcagtcgttacatcttaaagctccaaaataatctcctttgactccatacatcacatccagtgcatgctgaaactagaggtgggctcccaagaccttagacagctctgcctctgtagcactgtagggtacagcccccaggactgctctcacagactggcattgagtgtctgcagcctttccaagcacacggtgcaacctgttggtaaatctaccattctggggtttggaaaatggtggccctcttctcacagctccactaggcagtgcccagtggggactctgtgtgggggttccaaccccatatttttcctccatgctgtcctagcagaggttctccatgatggctctgctcatgcagcagacttctgcctgg

SEQ ID NO: 924349 - DNA, 676 bp, Homo sapiens
agtagctgggacacaaggtgccatccccctaggctacacagagcagcagggccccagagcgcccattgaaaccattttcttccctaggcctccagacctataatgggaggggctggccatgaaggtgtctgacatgccctggagatgtttttccacattatcttggctattaacattcagttccttattacctatgtaaatttctgcagccagcttgaatttctcccctgaaaatgggtttttcttttctactgaatggtcaggttcaaattttccaaayttttatgctctgtcacctctcaaatgttttgctgcttagaaatatcttccacaggatactgtaaatcatctctcccaagttcaaagttccacagacctctagggccggggcaaaatgctgccagtctctttgccaaagcataccaagagtcatttttactccagttgccaagaagttcctcatctccatctgagaccaccttagcctagatttcactgtccatatcactatcggcattttggtcaaagccattcaacaagtctttaggaaatttcaatctttcccacatcttcctgtcttcttcggagtcttccaaactttcaacctctctccgttatccagttccaaagtctcttccacattttgaggtatcatttgagcagcaccccactcctg

SEQ ID NO: 924350 - DNA, 623 bp, Homo sapiens
aagtactgcagggcttggccctggagaccacctcctcactgtggaaccttagcttgaacagttctaggttgctgtggagttaatgaccattctatcttgcggtgcttctaactctaacagggaagactgtggtcttggttaaactgatatttatttattgggttagactcaaccaacttggaagcttacttttatcctaagtttattttaaattggtcacagcaaaatttcacacaaaaaattagtcagttaatgagaaagagaaaatgatattttggtcacaaagttgggaagtccatcagccatttcttagttggcataatcttgaaagcattttactctagatagttatgggcaaactgtaaaagtagtaggaacractgaattttgaaataagaatctggccataccacacccaacgagagctcttttactaagtggaaatatcaggtagctttaggagctggcaaagataatttttagtagaaaatgaactttaaaactttcttttttctttttaagacacggtctcaggcactcacaggctggagagcagttgcgagattacagctctctgcagccttgacctccctgggctcaggcaatcctcccacctcagcctc

SEQ ID NO: 924351 - DNA, 595 bp, Homo sapiens
ttcctgtcttcttctgagccctgaaaactgttccaatctctgcctgttacccagttccaaagttgcttccacattttcaggttatcttatggcagtaccccactctctgctctaccaatttcctatattagtctgttatcacactgctataaagatactgcctgagactgggtaatttataaaggaaagaagtttaattggctcacagttccacatggctggggaggcctcaggaaacttgcagttatggcagaaggggaagcaggcacctttttcccgtggtggcaggagagagagagagggragctctgggaaactgacattataaaaccatcagatcttgagagaactcactcactatcacaagaatggcatgggggaaactgcctccatgatccaatcacctgccaccaggtagattcctccctcaacacctggggattacaattcaaaatgagatttgagtggggacacaaagccaaaccatatcacccaggctggtctcaaactcttagactcaagttatcctcccaccccaatttcccaaagtgctgggattgtatgtgtaagcactgcacccagccttagttacttt

SEQ ID NO: 924352 - DNA, 575 bp, Homo sapiens
ctaaggaaaagtaaagcaacaactattcctcttcaattttatttaaccttttataatacttgatatttcagatgctgggaaatgtgtcatattcagtttgattcaataaatgtgtgttaagcacctacgattaggcaccgtggtaggcactgggtatagagatgaagaaggcatgagatattccctggagagatgtgaggttaatggaaattggaagcatgtgtatttccctccaggcaactaaaaaggtgctttgcagacatctgaacacagatcaagagacactttcaaaaatatgaacactgcatgtaaaaagytgaataccaaaatgaattttctgtcagcatcaatacaacaaacctattcctggcttatgaagagaaagaaaaaggatcagactctaatacaaaataatttgaagaataattaaaaatatgactgatttgaagaagaacagccttatctacattcacctggtcatttggggggaagaaatatatgtatatataatgtactattacaggagactgccttttctaaaaagttggttgttttgttgtcaatgtcgtttgagt

SEQ ID NO: 924353 - DNA, 642 bp, Homo sapiens
tacaggcccactgattgtggacccgactgcatacacgaacacagccccatgaccaatggaacagaacagaaagcccaaaaataaatccacgctaaagtttctgctatgcaaaataagatctggagaatgtttttaaaggcatgtcagataaagaatctgtatctagaatatgtaaagaactctcgaaaaggtaagaagataattttwaaagtaggccaaaaaactgaacagacatttcaccaaagaagatatacaaatggaaaataagcacacgaaagaatgttcagtatttagtcattaggaaaatgtcaactaaaaccataatctgataccactaccccactcattgattaaaaattgaaaaaaaaaaggaaaaaaggaaaaaacagacaacatggcaaggatgtggaacaactgaagttctcaggcattgcgggtggtcatgtgaaatgacacagccactttgaaaagttgtttggcagtttcctaggaattaagtatatacttaaccacacaaatctaaaaatcttgcttcatgactcttacccaagaaaaatgaaaacttctgtccccacaaaaactgaatgtttacagtggtctttactcacaatcactaaaaactagtaaaagcccaaatgtcct

SEQ ID NO: 924354 - DNA, 666 bp, Homo sapiens
ctctgggggtggcatcacatatgggtaggactgtgaagcccacctgagctgtaaaaccagcaagtttttattaaggatttcaaaaggggagggggtgtaagaacagggagtaggtcacaaagatcacatgcttcaaagggcaaaaaggagaacaaagatcacatgcttctgaggaaacaggacaagggcaaaaccagaaactgataagagttcaacaaagatcacaaggcaaagggcaaaagcagaattactgataagggtctaggttcagcagtgcacgtattgtcttgataaacatcttaaacaacagaaaacagggtttgagagcagaaaactggtctgacstcaaatcagggtgggggtttttccccaccctaataagcctgagggtactgcaggagaccagggcatatttcaatccttatcccaactgcataagacagacactcccagacccaccatttacagacctccccccaggaatgcattccttccccagggtattaattattaatattccttgctaggaaaagaatttagcaatatcttccctacttgcatgtccatttataggctctctgcaagatgaaaaatatgactattttgcccaaccctgcaagcagtcagaccctacggttgtcttcccttgttcccttaaaatcgctg

SEQ ID NO: 924355 - DNA, 666 bp, Homo sapiens
ctctgggggtggcatcacatatgggtaggactgtgaagcccacctgagctgtaaaaccagcaagtttttattaaggatttcaaaaggggagggggtgtaagaacagggagtaggtcacaaagatcacatgcttcaaagggcaaaaaggagaacaaagatcacatgcttctgaggaaacaggacaagggcaaaaccagaaactgataagagttcaacaaagatcacaaggcaaagggcaaaagcagaattactgataagggtctaggttcagcagtgcacgtattgtcttgataaacatcttaaacaacagaaaacagggtttgagagcagaaaactggtctgacgtcaaatcagggtgggggtttttccccaccctaataagcctgagggtactgcaggagaccagggcatatttcaatccttatcccaactgcataagacagacactcccagasccaccatttacagacctccccccaggaatgcattccttccccagggtattaattattaatattccttgctaggaaaagaatttagcaatatcttccctacttgcatgtccatttataggctctctgcaagatgaaaaatatgactattttgcccaaccctgcaagcagtcagaccctacggttgtcttcccttgttcccttaaaatcgctg

SEQ ID NO: 924356 - DNA, 545 bp, Homo sapiens
tggtcagagccagaccaggcgtatccatctatgggtcccccaatggcaggcacaagcaccagctctgaggaagaatccagtgggtggtgactaagtgcccagaggtgtgtgtaggtgtagcgttgggaaatctcctcattcccaagttctctgcatagagaagcaggcagcctcaactaatccaggagagtgagtgctccagatgcctcaagatctgcctgggcatagagaagaaagccctccaccaccacctacaccaagatcttkgtgcaggcaggtggggcagctcaggcttctgaaccaggcaagcaggtgctctgaatgccttcagatctgcctgggtttgaagcacagaaggtctccctataacagaatttctacacaggaagggtggggtgggtcaggccactgctccaggtgaataggcactccaaatgcctagatatctgcctggtcatggagtggagacggccctcctggaccaggatctctgtgcaggaaaggttgggcaacttaggctgctggcccaggtgaggaagtgctct

SEQ ID NO: 924357 - DNA, 672 bp, Homo sapiens
tgaatgcctggagttgtgcctgcgcgtggagtggagagggccccaatgttaggccatctcaggctgctgatccaggtgaggaaatggtctaaatgcctggagatctgcctgggagtagagtggagagggccctgcttcaccatgatctcagtggagcaggctggtgcacacagcaatggcacactcagaccagtttcaggtyaccaaggtggccctggctgcaaatctcatcaccccaaaaaactgcagtggtagcagctctcctcccactccacacctgtgatgggggagagcacaattccaggatctactcctgaggtactttccacagtcctagctgtggaggcccctaccctgcttcagagcaggtgctgcaatctctggcccaagagtaaaatgcctgtgcagccatgatgctgtgttaccgaagaatggctgattttgtatgcactcagaataaaaatgacattctcctcttggttctggcctgggaaaatgtctacagcttttcccaatgtctttctctcacagtatgtccaagcttctccccattttagctccagagcttaggagaaacaaaatgctctccctggcctgggttgctcagatccttaggggaaaggtgagtcatagagggaggctctctgcctctctcacatactagggcttcag

SEQ ID NO: 924358 - DNA, 774 bp, Homo sapiens
ccccttcaagggtgaccttttacctcatagtgttcctgaagccttctattgaaaatacaacctatagatattctgacgattactgagatttgctggaagtaaatgaaattcagctaggtcagagcagctcagcaggttagaaatagtcacaatcaacctctccattttamagatgacaacactgagtctcatagaggtgatgtgacttgcccagagccatattgatcagtccatggcagtagagttaaaagtttgggattgaatcctgtccttactcatttttgagctgtgtgtccttgagctggtttcttaaattccctgtgctttagtatcttaatttttaaaatgatataagaacaagtaactttgttacaggtttttatacttcatgagacacttacaatgcttagcacagtgcctggcagatggtgaattctcaaaaaatagttattgataatttgttgagtgccagatgctagtctatgtgctgatggcagaaaaaaagaataaaacagacaaagtctttacctccatgtagcttatattctagtagaagacagactatccattaaaaaagcaaatgcatgtataatatgatgtcaggtactctgataaaagataaagaaattggaaaaagaagagttggaataataggtatgttatctggatatgttggttccagaaagtctctttgaggagacaacacagacaggaatggtaggcattgtcatcatcatcattgtcatcattatgatcaccatccttctcctcctc

SEQ ID NO: 924359 - DNA, 774 bp, Homo sapiens
ccccttcaagggtgaccttttacctcatagtgttcctgaagccttctattgaaaatacaacctatagatattctgacgattactgagatttgctggaagtaaatgaaattcagctaggtcagagcagctcagcaggttagaaatagtcacaatcaacctctccattttaaagatgacaacactgagtctcatagaggtgatgtgacttgcccagagccatattgatcagtccatggcagtagagttaaaagtttgggattgaatcctgtccttactcatttttgagctgtgtgtccttgagctggtttcttaaattccctgtgctttagtatcttaatttttaaaatgayataagaacaagtaactttgttacaggtttttatacttcatgagacacttacaatgcttagcacagtgcctggcagatggtgaattctcaaaaaatagttattgataatttgttgagtgccagatgctagtctatgtgctgatggcagaaaaaaagaataaaacagacaaagtctttacctccatgtagcttatattctagtagaagacagactatccattaaaaaagcaaatgcatgtataatatgatgtcaggtactctgataaaagataaagaaattggaaaaagaagagttggaataataggtatgttatctggatatgttggttccagaaagtctctttgaggagacaacacagacaggaatggtaggcattgtcatcatcatcattgtcatcattatgatcaccatccttctcctcctc

SEQ ID NO: 924360 - DNA, 774 bp, Homo sapiens
ccccttcaagggtgaccttttacctcatagtgttcctgaagccttctattgaaaatacaacctatagatattctgacgattactgagatttgctggaagtaaatgaaattcagctaggtcagagcagctcagcaggttagaaatagtcacaatcaacctctccattttaaagatgacaacactgagtctcatagaggtgatgtgacttgcccagagccatattgatcagtccatggcagtagagttaaaagtttgggattgaatcctgtccttactcatttttgagctgtgtgtccttgagctggtttcttaaattccctgtgctttagtatcttaatttttaaaatgatataagaacaagtaactttgttacaggtttttatacttcatgagacacttacaatgcttagcacagtgcctggcagatggtgaattctcaaaaaatagttattgataatttgttgagtgccagatgctagtctatgtgctgatggcagaaaaaaagaatraaacagacaaagtctttacctccatgtagcttatattctagtagaagacagactatccattaaaaaagcaaatgcatgtataatatgatgtcaggtactctgataaaagataaagaaattggaaaaagaagagttggaataataggtatgttatctggatatgttggttccagaaagtctctttgaggagacaacacagacaggaatggtaggcattgtcatcatcatcattgtcatcattatgatcaccatccttctcctcctc

SEQ ID NO: 924361 - DNA, 610 bp, Homo sapiens
tcttcctctgtgtatatatgtttcagaaaatagagatgttttatttctctaatgtctcatcttcttggtcagctttggtggacaagttgaagctcagctataacttttcctgcattttcttcgaagaagcattgtttcctactgtgacttttattcaattgaatttaaaaccccagatgaaagtgaatacatgtcactcagcaggcaattcacatacacacacatacacaaaaggaaggcttccaggcagatgagatagttacagtaaatttaattcaatccaaccagcctttgtcagatatctttaggaagaggagagaragaaagaaaattttgcttcctgagcatctactatgtgccaggccagtgctaggtgcttcataactctgctgtaggatattttcctcattttaaaaataatcctgacaccactccaacatgtgaggtgtaaaaggatgtatgagaaatgaggttcatagccaatgatgaataccagttaaagaaatctgaaattccttcagtcatagggagccatctagtcacagactttaacaggctccaccgtcagacttaggtccccaaagctccaggcggcatgagcaggacatca

SEQ ID NO: 924362 - DNA, 623 bp, Homo sapiens
agacagtgcttatttaccaccccaaaaatcctaggtcccttaaggattatgctaaatctctgcccatgctcatgctctataaatggaagaacaaagcctacatgacaacacattacagcatggtttactcaatattttaagcccactgttgagacctactgctaaataaaaagattcatttcaaagtattactgcttcctgaccatgcmtctggtcacccaagagttctaatggagaagtacaaggaaattaattttgttttcatgcatgctaacacatggtcatttcatagcccttaaataaaggagtaatttcaactttcaagtcttattatttaagcaatacatttcatgtagctatcacttccataggtaatgattcctctgaggcatctaggcaaggtaaattgaacaccttctggaaaggatttaccactctagatgccattaaatacatttgtgtttcatgagaggtgttcaaaatagcaatattaacaggagtttggaagaagctgattttaaccctcatggatgactttgaaggattcaagacttcagtggaagaagtcactgcagttgtggtggaaatagcaagggagccgaaattagagatgaagcctgaag

SEQ ID NO: 924363 - DNA, 622 bp, Homo sapiens
atttctaactaaatctcagtgttagacattgtcaaattttaattagcaaatctcttaccctatctttattagttctattcgaaactaccattagagaatagtataaacagctctatgcaaataaactagaaaatctagaagaaatgaataaattcctggacacatacaccctcccaagmctaaaccagaaagaaggagaatccttgaatagaccaataacaaattctgaaattgaggcagaaatagcctactaaccaaaaaagcccaggtccagatggagtcacagctgaattctaccagaggtacaaagagcagctgttgccattccttctgaaagtattctaaacaacagaaaatgagggactcctccctaactcattttatgaggccagcatcatcctgataccaaaacctggcagagacaaaataaaaaaagaaaatttcaggcaaatatccctgatgaacatcgatgtgaaaatcctcaataaaatactggcaaaccaaatccagcagcacatcataaagcttatccaccaccatcaagtcagcttcatccctgggatgcaaggctggttcaacatatgcaaattaataaacataatccatcacataaacagaacca

SEQ ID NO: 924364 - DNA, 759 bp, Homo sapiens
ctgtagtcccagctattcgggaggctgaggcaggggaatcacttgaatctgggaggtggaggttgcagtgagccgagattacaccaccgcactcccgcctgggcaacagagtgagactccatctcaaaaaaaaaaaaaaaattcatgacagatgtccttagcagcaggcaggatcaactcttcaccaatagtgaagggcatcttacctttagcaatgcagttagccactaagaatgatgctctctgtgcagacacatttgatgaagtggtggccttcrctaattgcttctgttctttgtgttcatgtttttttcttttgaaaaactccaaaggcttgtcttttaatgcagggtgcctcatctccatgtagcaaagcagtttggaaggtttcatggcttcggtggatagccagtcaccacatattatacaaagcaggcttggagaaggtgaatcacttggtgcaatgaaaccataatttaagtaggactcttagtattttcttttaaatgaagatttctttttgttggcagtcttagagtcttctgctgtctcatcattgggtctttccctcttttcaaagaagctctctagtgacgtttatttttcactcattttggcttgggttagcttgtgggcttaccaaaactgtgacagagacaagtgcgcagtgcaggaaggaggcatggatggaagtggtaaataaaataatgggcaggccacacacggactgaaataagtgtcagattctgacttaaagcc

SEQ ID NO: 924365 - DNA, 790 bp, Homo sapiens
tatcttgtcttgtaaggtgtctgttaaggtattcagctcactttttaattgggttgtttgtgttcttattgttgagttttgagagtccttgtgtattttgaataacagtcctttatcaggattaaagaagaaaaatcatacgatcatatcagtagatgtaggctcctttagctcagaggagtttgttattacccaccgtctgaagcctacttctgtcaattcgtcaaactcatcatccgtccagttttgttctcttgctggcgaggagttgtgatcctttggaggagaagaggtgttctggtttttggaattttcagcctttttgtgctggtttctccccatctttgtgaatttatctacctttggcctttgatgttggtgaccttcggatggggtctctgagtggacgtcctttttattgatgttgatgttattcctttctgtttgttagttttccgtctaacagttaggcccctctgctgcaggtatgctggagtttgctggaggtccacttcacaccctgtttgcctgggtaacaccagcggaggctgcagaacggcaaagattgctgcctgtttcttcctctggaagcttcgtcccagaggggcacccgccagatgccagygagagctctcctgtatgaggtgtctctcggcccgtactgggaggtgtctcccagtcaggatacacaggggtcagggacccactgaggaggcagcttgacccttagcagagtttgaacgctgtgctggtagatctgctgctctcttctgagccatcaggcagggat

SEQ ID NO: 924366 - DNA, 629 bp, Homo sapiens
cagtgtttgtttgtttgtttgtttgtttgttttgcgatagtttgctgagaatgatggtttccagcttcatccatgtccctacaaaggacatgaactcatcttttttatggctgcatagtattccatggtgtatatgtgccacattttcttaatccagtctatcattgttggacatttgggttggttccaagtctttgctattgtgaatagtgccacaataaacatacgtgtgcatgtgtctttatagctgcatggcttataatcctttgggtatatactcagtaatgggattgctgggtcaaatcgtatttctagttcaagatccctgaggaatcgccacactgacttccacaatggttcaactagtttacagtcccaccaacagtgtaaaagtgtttctatttctccacgwcctctccagcacctgttgtttcctgactttttaatgatcaccattctaactggtgtgagatggtatctcattgtggttttgatttgcatttctctgatggccagtgatgatgagcattttttcatgtgtcttttggctgcataaatgtcttcttttgagaagtgtctgttcatatcctttgcccacttttttgatggggctgtttgttttttcttgt

SEQ ID NO: 924367 - DNA, 615 bp, Homo sapiens
gctatccccaaatcgccactcttaactcttgaagtaaataaataatctttgctggcaaggctatactgaaccttcttaggcactctttacttaaatgtcctaggtcctcccaattcttagtcctttaatacctgtttttctccttctcttatcccatttagtttttcaattcatayaaaactgtatccaggccatcaccaataattctaaatgacaaatgtttcttctaacaaccccataataccaccccttaccacaaaatcttccttcagtttaatctctcccactctatgttcccacgccacccctaatcccactggaagcagccctgagaaacatcgcccattaactctccataccacccccaaaattttcaccatcccaacactttaccactatttcattttatttttcttattaatataagaagacaggaatgtcaggcctctgagcccaagctaagccatcatatcccctgtgacctgcacatacacatccagatggccagttcctgccttaactgatgacattccaccacaaaagaagtgaaaatggcctgttcctgccttaactgatgacattatcttgtgaaattccttctcctggctcatcctg

SEQ ID NO: 924368 - DNA, 615 bp, Homo sapiens
taatttaggctttctgattctcaccctgcatcaaattctaatcaatttaccctccttttggggggcttatgaaatcagtattgattatcgttctcaatgccatcatctgttaacttctttattagttcttcatatttattaaagacatggatggaatctggtcctcgtaatttctctccaccctaactcccatcatcatgatgaataacttcaatgttcctagaaytgatcttattggtttaagttttctaaatactgtatatatgccatgtcttctaccaaaaaaaatgtgtcatctcttttgtcttaaacagtaagtcatggagctttatatgatgatgaatatcagatgattttgtaaaattaatgatattaggtaaactaaattatactgaatactgtgacaatgtacccagtaacatggaggagctggttggcctatgacccccactttttataggtaatttctgagaccctaccttttcccttttaccctttaacctttatttttaatgtctttgtttgttcatttgtttgttagttaacgtactttcttgtttcatcctaaacggagttttctatagcaaattctaaaatatattagtgcctcataga

SEQ ID NO: 924369 - DNA, 774 bp, Homo sapiens
aaaatatttttatagccttattctatataccttttactattgctaaaattttggattttttactttttaagcgtttttattaaaaactgagacaaaaacacacatattagtctgggcctgcacagggtcaggatcatcaatatcaccatcttacatctccacatcttgtgccgctggaagttcttygggtgcagtaacatgcatggagctgtcatctcctaggataacaatgccttcttctggaatacttcctgaaagacctgcctaaggctgttttacaattaactctttttttaataagtagaaggagtaaactcaaaagtaatgataaaaagtatagtatagtaaatatataaaccagtaacatagtcatttattatcatgatcaagtattatgaactgtatataattgtatgtgccatacttttatatgactggcagtgcagcaggcttgtgtacaccagtatcaccacaaacgaaatgagtaatgccttctgctatggcattactatggctacaacatcactaggccataggaatttttcagttccattataaccttatggttccaccatcgtacatgcggtctgccattgatcaaaacattaagaggcatatgattgtaatattgatgtaaaaactgagacttatttcaaacaagaaacaaattctagatttggcaattgtctggtagatgatacctctttaatccagataactaatacatcatccactcaattcttctttttttaaattatgattttaaaataggaa

SEQ ID NO: 924370 - DNA, 550 bp, Homo sapiens
cacacaaactgtggaattacactggtgaaatacccaaaaccgtgactaaacggcagtcatatgccagtttggtgcaaatcattgggcagatgggtatgtggcaggctatgtttgacctgaacacccaggggccagatgatgaacatttcacctcccacatgagggatctcatgttgggttccattcccccgagtgcctttggctccctagctgctgtcctcaccccatatgtagggtgctgcctacatgaagtgaccactgctatggcagctctccgggaagtagaaggccatcggtgggaccragaggtctgtgcagtaaagaaggggaagatgttccgcttgcggggcccccccatcccatgggagaaaaggggaccccaacaagtgacatacttacagatgtggatagatgtgattctggccagagctgaccaagagaaaatcaataagcagcccaatgatgtactcttaactttgtggacaaagttgtccctggagcaccaattccagaaaatgcccaaggggaaggacatttctgtgtgacccgg

SEQ ID NO: 924371 - DNA, 550 bp, Homo sapiens
cacacaaactgtggaattacactggtgaaatacccaaaaccgtgactaaacggcagtcatatgccagtttggtgcaaatcattgggcagatgggtatgtggcaggctatgtttgacctgaacacccaggggccagatgatgaacatttcacctcccacatgagggatctcatgttgggttccattcccccgagtgcctttggctccctagctgctgtcctcaccccatatgtagggtgctgcctacatgaagtgaccactgctatggcagctctccgggaagtagaaggccatcggtgggaccgagaggtctgtgcagtaaagaaggggaagatgttccgcttgcggggcycccccatcccatgggagaaaaggggaccccaacaagtgacatacttacagatgtggatagatgtgattctggccagagctgaccaagagaaaatcaataagcagcccaatgatgtactcttaactttgtggacaaagttgtccctggagcaccaattccagaaaatgcccaaggggaaggacatttctgtgtgacccgg

SEQ ID NO: 924372 - DNA, 721 bp, Homo sapiens
caacttcctgcagccagccggaaatgtagagcctttcctgtttgattacggagctggccaaggtacccagcttgggaggacactggatgactagaggccacatgtggaattagcaatcgactggttccccaccaatgtacagtgggtgttgctgctggtggacactggcgcagatcacagccttgtttatggggaaccagataagtttctgggcaaacctgcttacaytgacggttatggaggctggttagtaacagtaaaaccagtatctctgcaccttggtatctgccatttggctccccatttaaatactctgtgtgtctatctcataccagaatacattctgggggtggaccatttccatggcctggtgttacaaaccatggctggggaattcagactctgagtgcatgtgatgaagttggtgctgtgtggacatgcacatcaccagcctcaggtcttgccacaaccccaacgagttatgtccacccaacagtatcgtttgccagatgggcatacagagataactgagacaattaaaaaggtggagaaggtgcagatagtgcgaggaacccacatcctatatgattctgcaatgttgccagctagaaagcctgatggaacttggtggatgatggcagactatcaggaactgaataaagtaacaccccctttgcaagcaactgtaccatcagtcatggatttgatgaactgtatgaca

SEQ ID NO: 924373 - DNA, 774 bp, Homo sapiens
tgggcatacagagataactgagacaattaaaaaggtggagaaggtgcagatagtgcgaggaacccacatcctatatgattctgcaatgttgccagctagaaagcctgatggaacttggtggatgatggcagactatcaggaactgaataaagtaacaccccctttgcaagcaactgtaccatcagtcatggatttgatgaactgtatgacaacggaactgggaccttaccactatgtagtggacttggccaatgcatttttctccattaacattgcttcagagakccagaacagttcaccttcacatgggacaggcgacaatggacttttacaatgttgccacagcactctgtgcttgccccaccatatgtcatggtctcgttgccacggatttagccacctggcaatgtccagaaggggcctgcctattccaatatattgatgatattatgttatctctgattctcttgcagatttagaaggagcagcgcccctcttgcagcaacatttggcagcatgtggttggactgtcaataaatccaaggtccaaggacctggattatctgccaaatttttggaagttatctggtcgggtaagacaaaggccatccgagaggctatcatttataaggttcagacatacctccagccctctatggtgaagcagttgcaaacttttctgggcctcctgggatactgatggacatttgtgccccatttagctcaaatgataaaaaaccattgcatctgttaacaaagaaggactctacctgg

SEQ ID NO: 924374 - DNA, 774 bp, Homo sapiens
tgggcatacagagataactgagacaattaaaaaggtggagaaggtgcagatagtgcgaggaacccacatcctatatgattctgcaatgttgccagctagaaagcctgatggaacttggtggatgatggcagactatcaggaactgaataaagtaacaccccctttgcaagcaactgtaccatcagtcatggatttgatgaactgtatgacaacggaactgggaccttaccactatgtagtggacttggccaatgcatttttctccattaacattgcttcagagagccagaacagttcaccttcacatgggacaggcgacaatggacttttacaatrttgccacagcactctgtgcttgccccaccatatgtcatggtctcgttgccacggatttagccacctggcaatgtccagaaggggcctgcctattccaatatattgatgatattatgttatctctgattctcttgcagatttagaaggagcagcgcccctcttgcagcaacatttggcagcatgtggttggactgtcaataaatccaaggtccaaggacctggattatctgccaaatttttggaagttatctggtcgggtaagacaaaggccatccgagaggctatcatttataaggttcagacatacctccagccctctatggtgaagcagttgcaaacttttctgggcctcctgggatactgatggacatttgtgccccatttagctcaaatgataaaaaaccattgcatctgttaacaaagaaggactctacctgg

SEQ ID NO: 924375 - DNA, 606 bp, Homo sapiens
  misc_feature 422: n = A,T,C or G
ttgcaggtaagtaccaatgatgagctcctccgatcaggtagggcgacaaatggtaacctgttgttgcctgtcccaatgcccctgaaggtaggagaacagaaaacctggctgtggccatggaccctgcaaccaccacccccgcctccaccaatgccggtggttggccattgtatctccctggagaagggcttacagtatgacttgcatgtcaytccttgggtgtttaaaataaggcccccacagttgactgttcataggggaacggccagggaaggaaccctcctccaggggatatatgtactgtctgtgtggcctattatgagctccccctgtgactctggtgcagatacaggactcaaaggaaccatggcaagctgagaaggtgtggtaccatcgcccagggcaaaagcccctgggtgttngcatgttattcagggatgaaaggttagcctgtattttgcctgagagacgtgatttacctctgttagtatctgtgcctgctgtgtcatcttgaccataagttaacatgatccaactgcattgtggactgggcccacacttatgctgaggtgaccaatgtttccaacagatggatctgcactgccc

SEQ ID NO: 924376 - DNA, 606 bp, Homo sapiens
  misc_feature 422: n = A,T,C or G
ttgcaggtaagtaccaatgatgagctcctccgatcaggtagggcgacaaatggtaacctgttgttgcctgtcccaatgcccctgaaggtaggagaacagaaaacctggctgtggccatggaccctgcaaccaccacccccgcctccaccaatgccggtggttggccattgtatctccctggagaagggcttacagtatgacttgcatgtcactccttgggtgtttaaaataaggcccccacagttgactgttcataggggaacggccagggaaggaaccctcctccaggggatatatgtactgtctgtgtggcctattatgagctccccctgtgactctggtgcagatacaggactcaaaggaaccatggcaagctgagaaggtgtggtaccatcrcccagggcaaaagcccctgggtgttngcatgttattcagggatgaaaggttagcctgtattttgcctgagagacgtgatttacctctgttagtatctgtgcctgctgtgtcatcttgaccataagttaacatgatccaactgcattgtggactgggcccacacttatgctgaggtgaccaatgtttccaacagatggatctgcactgccc

SEQ ID NO: 924377 - DNA, 622 bp, Homo sapiens
atgtgcttgcatggttagtaacatctgtcccccaggacacaaaccagcatgggcctggggctctgtctgtcccattccccgctaggcccctgtacctagcatagcatctggcactaagtcaagctcattgagtattagtttatttattttaaatataaaggttttaaataaactgcacacaggctggagtgcaatagtgtgatcatagctcactgtagcctcaaacttctgggctcaagaaattctcctgtctcagccccccaagtagctggaactactggcatatgccatcatacctggctaatttttttacttttttttttttttttttttttttttgtagagacagggtctcactacgttgctcaractggccttgaactcgtgggctcaagagatcctcccttggctgggtgcagtggctcatgcctgtaatcccagcactttgtgaggtcaaggcaggcagatcacctgaggtcaggagttcaagaccagcctggtcaacatggcgaaaccccatctctactaaaaatacaaaaattagccaggcacagtggcacacgcctgtaatcccagctactcgggaggctgaggcaggagaatcacttgaacttgggaggca

SEQ ID NO: 924378 - DNA, 646 bp, Homo sapiens
ctgtggaaaagcaaatattttcaaataaaaactacacagaagcattcagagaaacttctttgtgatgtatgcatagaacttacagagttgaacctatcttttgattgagcagttttgaatctctctttttgcagaatctgcaggtggatatttggagcyctttgatggctactgtggaaaagcaaatatcttcaaataaaaactacacagtagcattgtgtgaaacttcttggggatgtgtgcgttcatctcacagagttgaaactatattttgattaggcagttttgaatctgtctctttgcagaatctgcaagtgcatattaggagccctttgcggtctatggtggaaaaggaaatatcttcaaataaaaactacacagaagaattatcagaaacttcttcatgatgtgtgcattcaactcacagagttgaacctatgctttgattcagcagttttgaatctctctttttggagaatctgcaagtgggcatttagagctctttgaggcctactgtggaaaagcaaatattttcacataaaaactacaaagaagcattctgaggaacttctttttgatgtgtgcattcaactcacagagttgaatctatactttgattgagcagttttgaatctctctttttaga

SEQ ID NO: 924379 - DNA, 611 bp, Homo sapiens
cattgcagcctcgacctcctgggcttaagggattctccttcctgagtctcctaagtagctgggactacaagtgggtgccaccatacccagctatttttttaaatattttttgtagagacaaggtctcactatgttatcaaggctggtcttgaactcttgggctcaagcactcttcccacctcagccttccaaagtgcttggattacaggtgtgagccactgcacctgacctaaagctatttcttttcttttctttttttttttttttgagacggagtctcgctgtcgcccaggctggagtgcagtggcatgatctcrgctcactgcaggctccaccccctggggttcatgccattctcctgcctcagcctcccgagtagctgggactacaagtgcccaccacctcgcccggctaattttttgtatttttagtagagacggggtttcaccgtgttagccaggatggtctcgatctcctgacctcatgatccgcccacctcagcctcccaaagtgaagctatttcttacaggtgaatttttaaagtataaatcagtttatgtctctcctttatcagaaacattccaatggctccccagtgcactcagaataaa

SEQ ID NO: 924380 - DNA, 594 bp, Homo sapiens
tatccaccattattcacaggccacgcccacaccacccccacccccaccaccaccacctaatgcactgtcaggatttgcaaggccttaatgtttaaaatattcaaatgttaatttctcttaaaggggagaaataaggacttctaacattagagtaaattcaaattcagsctatatagtgttttgctttatgttttcagttttaaatgtgagtgttagttttgtaaaacacatttaattgggaaagcaaggaacaatttcacggaggtatcttatgtgttaagggaagatattttatgttgcatttaattctttctttttttaatccaaaattttatttgaccatgtttgtctagaagtgacaatattgtttcttacgttaactagaactggagcctggagatagaaaataagtctagttacataaaaattttaaatttatgcacatttgaatttatcaattatgaatatatacactctacacaatgaatagtggagaataatgaaagtagcaaaccattgtatatgtcaaagtaatttctatagcatatatatatgtgtgtgtatgtgtatgtgtattatactttaagttctggg

SEQ ID NO: 924381 - DNA, 633 bp, Homo sapiens
atttcttccacttgatcgattcggctattgatacttgtgtatgcttcatgaagttcttgtgctgtgtttttcagctctatcaggtcatttatgttcttctctaaactggttattctagttagcagttcctgtaaccttttatcaaggttcttagcttccttgcattgggttaggacatgctcctttagcttggaggagtttgttgttacccaccttctgaagtctacctctgtcagtctgtcaaactcattctgcatccagttttgtttccttgctggtggggagttgtgatcctttggaggagaagaggcattgtggtttttggaattttcagcatttttgtgctggtttttcctcatctttgtggatttatctacctttcatctttgatgttggtgacctttggatggggtttttgcatgggcatcctttctgtggatgttgatgttactgatttctatttgttagttttccatctaacagtcagacccctcttcygcaggtctgctggagtttgccggaggtccactcccgaccttgtttccctgattagcaccagcagaggctgcagaacagcaaatattgctgcctgcttcttcctctggaagctttgttccagagggtcgcctgcca

SEQ ID NO: 924382 - DNA, 669 bp, Homo sapiens
tttacatttgggttgtctttggattgttaagtattcttcatatattctgaatccgaggcctttatcagatatatgatttgcaaatgcacttttgcattctgtgggttgtctttttactctcttgatggcatttttgacatgcaaacatttttaactgtgatgaattacaatgtatctattttttcttgtttgagcttttagcaccatatttaagaaaccatttcttcatctgtgatcacaaaaatttacttttatgttttatttgtaagagttttataaatttagctgttatatttaggtctatgattcatttgctgttaatttttgtgaaaggtttaaggtctgtgtttagattcagtttttcagcactattcgttgaaaaaaaaamcactatcatttacccattgaaatgtcatgatactcttgtcaagaatcaattaaccagaaatgtagatgcttacttttggactgtcacttctaatctattaatccatatgtctgtccttatgtcactattacactatcttgattaatatagctttatagtaagttttgacattaagaagtgtaactcccccaagttttttttcttttctaggttcttttagctactaagagtctcttggatttctgtgtgaattttaggatcagcttgtcaatttttattga

SEQ ID NO: 924383 - DNA, 567 bp, Homo sapiens
ggtggatcacgaggtctggagatcaagaccatcctggctaacacggtgaaaccccgtctctactaaaaatacaaaaaattagccaggcatggtggccggcgcctgtagtcccagctactcgggaggctgaggcaggagaatggcatgaacccaggagcgggagcttgcagtgagctgagatcgtgccactgcattccagcctcggtaacagagcgagattccatctcaaaataaataaataaaaatcaattaattaattaattaaataaatwaaaagaaaatcccagacatattatctcacccatatcttttaaagccttccagatgattcacatgtaaaaccccaggtggaaagcaatgaactgctgttttagcccatttgtgctgctgtaacaaaatatctgggactgggtaatttataaagaaaacgaactgctgggcacggtggctcatgcctgtaatcccagcactttgggaggttgaggagagagggtctctcaaccccagaagttcgagaccagcctgggcaacacagggaaactgtgtctctacaaaatatgaagataa

SEQ ID NO: 924384 - DNA, 811 bp, Homo sapiens
cagtacatgcagaattgccttagagagagtggacatctttgtcttattcatgatcttagagggaatgcatctgactcttccccatggggaccatgcttgctctaggttttggggatactttatcaaattaaggaacttttttttttaatttgagacagtttcactcttttgcccaggctggagtgctatgacacgatctccgctcactgcaacctccacttcctgggttcaagtgattcttacgcctcagcctctttataggtgcgtgccaycatgcatgctaaattttttttttttttttttttttttttttgtatttttagtagagacggtgtttcgccatgttggcaaggctggtcttgaactcctgacctcaagtcatccacctgcctcagcctcccaaagtgctgggattacaagtgtgagctaccacgcctggccaaattaagggacttctattcctagtttcctgagagtttttattatgaatagtgtttttagcagatgcttcttacacatttactgagctctgtagtctgttgctgtgatgagtcacatgtatggattttctcctgttaagccatccttgcatacctggggttactaagtatggtcgtagtgtaatatcttttatatgctcaattgggttggatttgataagatttttgttgaggaatttttgtatctatatttgaactctgagcttagcagatgtgtccaccaggctgcaattttcctctcttgtgcatttgtccaacttcggtattaggattatgttggcctcatagaatgaattgggagtgtccactgc

SEQ ID NO: 924385 - DNA, 594 bp, Homo sapiens
ggtaagaacatatattttttacttgatcctcatcttagggaaaaagtatccggtcttttaccattaagtatgatgttagctgtaggtttttggaaataacctgtaggttgagtaaattcccttctgttctgagtttgctgacagttttttaaaaaatcaggaatggatgatggatwttgccaaacacattttattgtcagttgagatgatctatggtttttcttttttagtctgttaataagataaataacttttttttttaaaccattcagcaaaccttccattctatggataagtcccacttcattatgacatattgtcctttcatatattgttggaatcaatttactaaaatttgttaagaatttttgcatctatgttcatgaggtatatttgtctgaacttttcttttcttgcaaggtctttgtctaattttggtgtcagagtaatgttggcctcagaatcagttgtgacatagttcctcctctacagttttctggaagagttcatgaagaattagtattatttctttcttcgaagcttagtggacttgactaataaagcagctaacactgcagttttctttatagcaag

SEQ ID NO: 924386 - DNA, 645 bp, Homo sapiens
tatgagactgggtggaagcaaaaaattgaaaacaaaggcagttttaaattgcctggctagatgttgaacgtgtgccccaacacatacgtatagccactcagcaaagactggtaaacttactgattccagatatcaaaaggcatctttgtcagatcataacacagagacatcattatacatgacaaacaacatacatatcatagagttatttcagaaaagtaactaaacaaatamcaataacaaatagcaacaacaacaaactttgggagagtgaagaatctgatttccaggactgccatattatattattttaaatgtctcctctttaacaaaaaattatgacacatggaaaaaaaaaaatatggtccaaaaacaagaagcagtcactagaaactgtctgaggaagctgggatgttagacttaaggagacaactatttttcaaatattttatttaattttattttttaattgacaaataatggtaaatattcatggggtacatagtgatgttttgatacatgtaatgtatagtgatcaaatcaggttaattcacatatccatcatctcacacacttatcatttctttgttttggaaacactcaatatcttccctctagctatttgaaactatatattattgttaa

SEQ ID NO: 924387 - DNA, 645 bp, Homo sapiens
tatgagactgggtggaagcaaaaaattgaaaacaaaggcagttttaaattgcctggctagatgttgaacgtgtgccccaacacatacgtatagccactcagcaaagactggtaaacttactgattccagatatcaaaaggcatctttgtcagatcataacacagagacatcattatacatgacaaacaacatacatatcatagagttatttcagaaaagtaactaaacaaataacaataacaaatagcaacaacaacaaactttgggagagtgaagaatctgatttccaggactgccatattatattattttaaatgtctcctctttaacaaaaaattatgacacatggaaaaaaaaaaatatggtccaaaaacaagaagcwgtcactagaaactgtctgaggaagctgggatgttagacttaaggagacaactatttttcaaatattttatttaattttattttttaattgacaaataatggtaaatattcatggggtacatagtgatgttttgatacatgtaatgtatagtgatcaaatcaggttaattcacatatccatcatctcacacacttatcatttctttgttttggaaacactcaatatcttccctctagctatttgaaactatatattattgttaa

SEQ ID NO: 924388 - DNA, 629 bp, Homo sapiens
aattttcttcataaattaaccagcctcaggtgttctattatagcagcacaaaatgcactaagatgtactaacagtgtaccaggatttctccctaggtccttactccaaatttttgacatctaccttatgatatattgcaactctactttaggaccagagttctgttctaagccagctctgttttatgctatggtcttgttgctttctctcccatgggcccatgtcttgatccctacttcagcctaatgactggaatgccacctctgttttcatttacctgcctcactactgagtatcaattgccttctgcattccttgccatggtgcattacttatccactgggattctgggatcgtgtagtaatgatttccgtttcttcccaaagatttatactmcctttcctttacaacattatgtgataatgtaacattattgctgagatgtgactgactacccagaaagtacatttccttccctgccatcttccaatgagttggaaacatagagcaattttgtctaatatatatgtaagagatgtatgctgcttccaacccagttcataaaacctccacagagccaagtgatatcaccatccagagtaacttggtcctgttaaagtggcagaacc

SEQ ID NO: 924389 - DNA, 743 bp, Homo sapiens
atttctaccaaagcccagtaacaggccaaaagctgtctcttaaaaggagagtagttatctgcagaagatggcagaaccttgctccaaaatcctagaggcctctgctgtgattcacctatacggacctaccaaaggctccaaacagcatccctatctgccactgacacctcaggcacaattggatctgctgggtcttatggcccaactgtcagagcagcttgcacagcagccttgacctgtagcagagccttctcctgttctggaccccactcaaaactggcagccttttgagtcacttgataaatgggccagagtaacatacccaaatgagggatgtgttgcctccaaaacccaaataggtccactaggcattgtgcctttttcttggttgcagggggtgccaaatgcagcaacttatccttcatcttagaaggaatgtcttgacagaccacacacaactggacccctggaaattttactgaggtagaagttccctgaattttagttgattttatttccyatcttctggcatgcaaatgtctcaccaataagtccagtgtgtttgctgcttcttgctcagtggatccagtcagcataatgtcatcagtgtaatggaccagtgtgatatcttgtggaagctaaaagtgatcaaggtttctctgaataagattattacacaaagccagagagttgatatacccctgaggtaggactgtaacatacattgctggctttgccagctg

SEQ ID NO: 924390 - DNA, 339 bp, Homo sapiens
gtgatcctagcatggagagaaaggttgtgtctttccaagtcctagtcaatcaggtgtattcattgtatgcagttttgttttatcacaccttttgcttccgatattccagatttaaccttatagtaatatgtgcttcatgctcttaraccagacaggtacatctgatgagctccaccttgattttcagattggagctaaattaggcattaaaatgtggtcacatacataagagcacctgcatttagtcatcttcccgttttcaaatgtgagcctaaagtcttggctcttatctgtatttaaaactgacattgttaaatgcataaacacatctgaattatt

SEQ ID NO: 924391 - DNA, 607 bp, Homo sapiens
atttgtgtattttgtttttgttgcttgtgcttttgcagtaatgtccaaaaatttattgcccaaaccagttttataaaatttttcctttttattttctcctaggagctttacagtgtaggttatatttgtagtatttaatcaatgttgagttaaattttatatatgatgtgagatggggtatatttctattcttctgtatgtagacatgcagttttcccaacaccgtttgtgcaagagattgttctttcccacttgtatattcttggcatctttgtcaaaaaaaataaatggacagtaaatgcataaacttacttctgggacctctattctgttccactggtctgtgtgtctctttttatgctagtaccaggctgtcttgcttatyatagatttatggtaccttttgaagtcaggtattgcgatgtttccagctttgttctttttgctcaagattgctttggctatttgaggtcctttttagttcaataaaaaatttttcatttctatgaaaatatgtcattgtagctttaagagtaattacacttgatatgttgattcctttgatagtatggacactttaacaatattaactcttccaatgcatgaa

SEQ ID NO: 924392 - DNA, 607 bp, Homo sapiens
atttgtgtattttgtttttgttgcttgtgcttttgcagtaatgtccaaaaatttattgcccaaaccagttttataaaatttttcctttttattttctcctaggagctttacagtgtaggttatatttgtagtatttaatcaatgttgagttaaattttatatatgatgtgagatggggtatatttctattcttctgtatgtagacatgcagttttcccaacaccgtttgtgcaagagattgttctttcccacttgtatattcttggcatctttgtcaaaaaaaataaatggacagtaaatgcataaacttacttctgggacctctattctgttccactggtctgtgtgtctctttttatgctagtaccaggctgtcttgcttatcatagatttatggtrccttttgaagtcaggtattgcgatgtttccagctttgttctttttgctcaagattgctttggctatttgaggtcctttttagttcaataaaaaatttttcatttctatgaaaatatgtcattgtagctttaagagtaattacacttgatatgttgattcctttgatagtatggacactttaacaatattaactcttccaatgcatgaa

SEQ ID NO: 924393 - DNA, 596 bp, Homo sapiens
tattattcattaatgaagagagtgctgtatggcacacttgtaaggcactgtttgtctgagcaaagtgggcagttgatatttacaagtatgaaatataaagatatcaaatatattaactggagtgctgctttatggattggctgactttcagaagcatgagaatgactctcaaaagcctggctactggtgccaaattgtyatggatcatttacaaccattttaaataattacaattattttaaataattctggtatgtgttacttactacagctgaagaaaaatcagtcctttcctagtaggtcagaaactttttattcttagtcaactctgtttgtctgtcccagccaaagctccaggaaatatcatcaggtattgtctagagccctgttgttgaggtgttgattcgaccagaagacaaacatgtcatttgtgaaattctgattttcagtttgtgtattgattagcataattttttctgcttttttctttgaatcatatacagagccatatggcgacgatagctgtacaaaaggccttgtgtaacatatcaaatggatataagtcaagtaacaataattgaaagtattaaaagatt

SEQ ID NO: 924394 - DNA, 590 bp, Homo sapiens
attgacctagcattgggagtacaatagaaaccaggatagaggcatttcctattctctttagtttctcccctatctcattattctccttttcacttctcagtttgttgtttctatatctcttttatttatatttaaaacttatctttcaagaactattttttgacatatgcattgttttgtgatcttttaacaacagttaattagatttagtgtatattttattcattgtgtttattcatgtattttttacttttattttaaattcaggggtaaatgtgcaggtttgttgtaatataggtaaattccatgtcatgggggtttggtgtataaactattttgccacccaggtaataagcgtagtacctgataatttagttttttgatgctcatcctccttcctccctscagcttcaagtaggccctggtgtctgttgttcctttctttgtgtccatgtgttctcatcatttagctcccacttataagtgagaacatgtggtatatggttgtctgttcctgtgttacttcacttaggataatggcctctagctgcatccaggttgctgcaaaagacatgatttcattctttttg

SEQ ID NO: 924395 - DNA, 642 bp, Homo sapiens
gtaaatttgtctttctttaaatcctgcctttctttcttcttctttttctcagagaaagtattgctcctttttctgtctaaagcgaatccttttactttccactgatactgtcccattcagattcctctgagaccatgtcccatcaataataagttctctttcatttccactggttccttctttcaacatggagatacacttaagactctcccatyttaagggagaaaggaagacagagttataataagtgcctactgtatgttggttacttgagaatatattatcttatataatcctcataacaggtttattagttaggtgttattatctttattctttgatttagataagaaaaccaagattcagggaggttaaatggaccaaagttttaagttagtaagtggcagagccagaattgaaactgacttggtctaatggcaaaaccatgaatgctgccctattagcccactccaatttcacttgtctttcccttcacaatcatatttcttaatagagtaacaaatcacttaagttctacttcaacctgatttgctaatgagttgtctctgtgggattgtttaagatgtatctacacactgaatatggaaccaggagcttcttacccaacctagatagcacttg

SEQ ID NO: 924396 - DNA, 686 bp, Homo sapiens
agagcaaggggctagtagatgagattcgaaaataattaggggatggagaatgagatcacatgggaccacagtagaccattgtaaagaatctggctcttgctctgagggaaattggaaccactgcagggttttgagaagacaaaatgcttgatatgacttacattaagaaggacctttctggcaagtgtttggagaatagattgtagggggcaatgcagatgcagggaatcaactgcagtaatccaggagagagaccagggtggtacagaccatgctattcacagtgggaggagaagagttggattctggatatattttaargtagattcagcatgattctccaagagtttgggtgtgggttgtgatttaaaaaatgtatattcaaaaatgactgcatttatttttggcccaaagaattggaagtttggaaatcccatcaaatgaaatagaaagacatgaatttatcagatttgagggaagaagatcaggacatgttgaatgtaagagagatattagacatgtgacatttgggttatatctggagtttggaagagaggtatgatctagggatacttgagacttcttggtatatagttggtgaagtcatttgactggatcagatcatctatcatgttactgtaaatagaaaaagttagagggtcaacgattagcctggagccttccaa

SEQ ID NO: 924397 - DNA, 635 bp, Homo sapiens
aagttcaagacacttttgtaggtgatagtaccattaatttcatccatccatctcaaaagaattgcaggtcttgagaatttaaccatgtcaatggttcattacattattaactaaagaaaaatgggtttcctttagagattgtttttaatatcaggaaacaaaaagaagtcagaaggagccaaatcaggactttaaggtataaatataatgatttcccatgaaaattctcataaaattgaccttgtttgaagagaggagtgagcaggaacattgtcgtggtggagaagggctcttggygaagctttcctgggtgcttttctcctaaagctacggctgactttctcaaaacactctcataataaacagatgttatcattctttggccttctggaaaatcaataagcaaaatgcattgcgtatcccttaaaactgctgccttgacctttgttcttgactggtctgtttttgctttacctggaccaatttcacctcttggtaattatttctttgcttgtgctttgccttcaaaatagtctgggtaaagccatgttttatcacctgttccaattctttgaaaaaatgctttataattgttatcccacttgttcaaaatttccactgaaagctctactgtt

SEQ ID NO: 924398 - DNA, 478 bp, Homo sapiens
tccagagaaggaggagctacacaaaggaagaatgccagaaacctgcataagagtcccactgagtggctgaatccaaaactgcacatgtgtaagtgaactccacaaatccaggcaaagaacaactgccggggttttctatcggaacaattctctgagctcattcagggctgaatgacattcaacgttttattccttggagtggaaagactccatttgaatatctaggtattcaataaagactacagaaaagccaagccttagtagtaggaataaactaacactacaataaggctactctagacctatcctaacaaagcttaacaataagsctcaaaaggataaaactgatatgcaagtaacggcctgccaaagcaaatatcaacactctaaaagacgataacaaaatccaaatagtcaataatataacattcctaacatctaacatccaataaaaaattgttagatatgccaagaagta

SEQ ID NO: 924399 - DNA, 780 bp, Homo sapiens
atcaatccagaagaaacccattatccattcacaggtatttctgattcccttgtcccacagcctctggcatccattgatctattgtttcttttaacagatttgtctattctggacattttatataaatagatcataaactaagggcctctttggtttatttcatttagcataatgttttcaaggttcatttatgttgtggcatgtttcagtgcttaatttcttactattgctgagtaataaccgattrtatgcatgtagtaatttaaaaatccagctcaccataggtggcacgtgcccacctacatggtagtcccagctacatggtaagctgaggcaggaggattgcttaagcccagaagttctgggctgtactgcactatgccaactgggtgtctgcactgtttggcatcaatatgttgacctctcaggaacaggggaccaccagattggcgtaaggaagattgaactggcccaagacggcaatggagtatgccaaaactcccatgctgatcagtctggcatcatgtttgtgaacagccactgcattccagcctgagtaacatagctgtatgctgtctctaaaaaaatataaaaataaaaataagtccgttcatgtgttaatggacactttgtttctatctattggctattgtggacaattcaataatagcagtgttcagtgatctgagtccctgttttcaatttttaaagtaaatacctataagtagatcatatgttaattttatagttattattttgaggaaccaccaaattgtaaca

SEQ ID NO: 924400 - DNA, 780 bp, Homo sapiens
atcaatccagaagaaacccattatccattcacaggtatttctgattcccttgtcccacagcctctggcatccattgatctattgtttcttttaacagatttgtctattctggacattttatataaatagatcataaactaagggcctctttggtttatttcatttagcataatgttttcaaggttcatttatgttgtggcatgtttcagtgcttaatttcttactattgctgagtaataaccgattgtatgcatgtagtaatttaaaaatccagctcaccataggtggcacgtgcccacctacatggtagtcccagctacatggtaagctgaggcaggaggattgcttaagcccagaagttctgggctgtactgcactatgccaactgggtgtctgcactgtttggcatcaatatgttgacctctcaggaacaggggaccaccagattggcgtaaggaagattgaactggcccargacggcaatggagtatgccaaaactcccatgctgatcagtctggcatcatgtttgtgaacagccactgcattccagcctgagtaacatagctgtatgctgtctctaaaaaaatataaaaataaaaataagtccgttcatgtgttaatggacactttgtttctatctattggctattgtggacaattcaataatagcagtgttcagtgatctgagtccctgttttcaatttttaaagtaaatacctataagtagatcatatgttaattttatagttattattttgaggaaccaccaaattgtaaca

SEQ ID NO: 924401 - DNA, 586 bp, Homo sapiens
ctcacttccttaatgacatattttagcaaataaaaattaggttaaaataacactaaggcagtttgaaggggacataatcataaatgggcctcctgggtgggtagaaccatagactgggctgtggaggcagaggtgactgctaagcttcagtgaaaatgacagagttgtsaactgattattttcccactgtttaaccaaccgtctgttacctgccaggttctctgatggacacccaatatactgggttctgtttgttttttgtttgtttgttatgtaattgaaccgattatttactgaaatgtccttgggacatgggctcaatttattatataatgcacatggaaatgtggttttggataagggaaacacactggtaagtgacatactgttaaacagggcagcgatggtccctctcacattggttgttctgcaggaggcaaagctctccagctcctcctgcctttagcaaactcccttgattgttgtcaactggcccccaaagtgtagctcctgaaaccaaatgctgatttgttatatctttgcagatgttctcaaaaccaatgtatataaacaatatcctatgtca

SEQ ID NO: 924402 - DNA, 693 bp, Homo sapiens
agactagatgggcacacagccattaactctcagaaggcagtgttgtgctgagcccctgttagcctcagttggaaaagcaccaagttcaagaggccaaagaaagcacccagagccagcaaatgagacaaggggtttaattaggggcttacgtacagggagacggagtccagtggtggtgggctgggcaggagaactaccttgtgtacagaaaacatctagtggcagtgggtgggaaaagataacctcacggcccagtggtagtgagctcagcaggaaaaccacaactacccacaaatattatgcagtttatatttgattttcacttaacatctgatatggtttgggtctgtttccccacccaaatctcattttgaattgtactcccataattcctatgtgttgtgagagggacccagtgggagataattgaattatgggggcagtttctcctatattgttcttgtggtagggaatgagtctcatgagaactgatggtttgataargggaaaccgatttcgcttagctctcattctctctcttgccaccaccatataagaagtgcctttcgccttcctccatgattgtgaggcctctctagccacgtggaactgtaagtccattaaacctctttcttctgtaaattgcccagtcatgggtatgtctttatcagcagtgtgaaaacagcagtgtga

SEQ ID NO: 924403 - DNA, 592 bp, Homo sapiens
atgtgtgattctagaatgtagggctttatgggaaaaaagaacgagggtggctgaagtccttgagtgcaaagataaatgccttcatatataaattaaattacattaaaaataatcttaaaatatatacatttctatataactaaaatgtgactattttaaaattcatgtatatatattaataaaaattattaagacaataaagatagactacaggtaacaaagtgtgaataggatttgctgtacctgaaaattgcaagaaaaataaaaaccaattacacatggaatacccatttagcatcctttgtgccctgaaagtccaagagcttcctcttctgaagcctgaaggagacgttcacaaatgcggtttgtagtaatkaacattgttttttaccaagtatttctagctctcagccctctggtaagattgtattttcttttctttttttgaaatagggactcactttgttgcccaggctggagggtagtggtgtcatcttggctcactgcagccttgacctccaggttcaagtgatcctactgtctcagtcccccaagtagctgggactataggtgcatgccaccacacccggct

SEQ ID NO: 924404 - DNA, 620 bp, Homo sapiens
agaggaggaaagaatcagggatctgtgtaaagaatctgcctggccactatttggtagagcagttgtgatgtgctgggggatcccttccacccccagtcatttgggactctccaaagctggccccatcctctcccccaggccccagttggaaggactcccactgggcaggaactccagaactccctcccagggagaattcaaattcctctcagccccagacaccagtggggtagctggaggccctggttgggaggaacagattgggaatccccttaaagattctgtctggggccggccacggtggctcatgcctgtaatccccatacttcgggaggcccagcagggtggatcacttgaggtcaggagttccagaccagcctggccaacatggtgaaaccccatctctactaaaaataaaaaaattcgctgtgygtggtgatgggcacctgtagtcctagctacttgggaggctgaggcagaagaactgcttgaaccagggctgtgatgggtgctgtaagccgagatcatgccactgcactccagcctgggtgacagagcaagactccttctcaaaaaaaaaaaaaaaaaaaaaaaaaaaaaaaaggatctgggcacatgtt

SEQ ID NO: 924405 - DNA, 551 bp, Homo sapiens
ataaaacattgaatacacgtgaaaaactgaacttagggtaatttgttcaagttctcatccctaagataccatacatctagaaatactaatgacttgtaatagaaaacatactaaagaaatatggaatatttagacctgtattaccacagatcttcaaagtaccagtatcaataagtcattaaataaattctrttgaaaaagtcacacagcatatgctgccattttgtccttgctactagaaattctacaaggtatattttgtttactttttagaggattcggaaagcaagccattggctgcttcttttcaagctcctgggcaccctgctccaccatctgaaggggagcctgatttaactgaccttcactttgatcctctgtgtggggcctgtgatggaatctagctcacctaggattgacagtcttggtagttgccagagtagcttttcaggatccattaaggcatcagtgtaaaatagcaaaaattattatttcagtccttagtttaaaccacgttctcatccattcactaaagtgaaggaggcataaag

SEQ ID NO: 924406 - DNA, 593 bp, Homo sapiens
aaccttatgaatgtataacagagaagagagatctgcagagaaagagaaccccaaagatctaaaagggttccattttgcctgttcaatagagtcaagcatatacatctgaagaaactgtccaaggctggggaaatagccatcagaaagaatcaaaggaagcatcagaggtgcttggcatgaacacagcgtccgtagtagttcctgttcccaacattcaggctggaaaaactcgtaattcatggaatagtgggtagaagayacaggaaggtccagtttcagtaatggggaatacttgtccctatactgagcactgcttcagacccacctaacaattcatacagcaaaacacaaaaggacaaaattatctccaagtgaattaactgaattctaaaacagagctcaagaagatttataggaatacaaaaaatacccagaatccaccggagtacaattcaccaagtctggcattcaataaaatattatgagttatgtaaagaggcaaggaaataacgacttatataatgaggagaaaaatcagtataaatcaacccagaactgactcaaatgttacaattaacagagaaaaatattaa

SEQ ID NO: 924407 - DNA, 745 bp, Homo sapiens
agggtataccacaatggaaaaacagccctaaaagatttggtcctgcaaagctctgaacagcatctatgtggtagcttgcagcagtattgcctctggttcattcggggtccctgtatccacatcctttcacacagacttgggccttggccatgtggtctgctttggacaatgggagaatagtgaacgtgatatgagacttgggcttgatttctctaactgccatgggagccccgaggccaccatgtgaacaagcctaagccagaggagaaccaagggctcagccaacagccaactaccagacatgagcgamgcccctgactgccctctgaccataagacatagttgagttcagccaagcccagcagaagaatcgcctgtccgtgcccagcccccatcactgatccaaatcattataaagctaatacatttgttggtttaagccactaagtttcagaggtagtttgttaatatgcaaaagctaacctaatcacttcttagaacagcacaccccaaatagtatctggagagataaagctaggcaaacaggcacaccaccagccccaggctgtgctatcaggcactgtgggagggacaggaggatcccccagattctaggccaggagagaggggtgaggtattcaccttgcatacaaaatttaaagggctaccccaaaactcagtaatgaagacacatgatgtaatattttaatgtaatatttaagaaaaatcaaattggtatctctgg

SEQ ID NO: 924408 - DNA, 585 bp, Homo sapiens
cagtctcacttggctatttatgtctttgttgcctccttttcgtatcttagtaataaatcattgccaagatcaatgtcaaaaagcttttccctttatgtttttgtctggtagttttatagtttcagaccttatgtttatgtcttcaatctatttaaagytgatttttctgtataatgtaaggcaagggtccagttgccttcttctatatgtggatacccagttttcccaacgccatttgtggaagagactaatatctccatcatggattcaactgatcgtgtatgaatggatttatttatgggctgtctattctgttctactggcttatgtgtttgtctttatgtcagtgctatagagttttaattaccagggcctcataatacattttgaaatccggaagtgggatgactccaactttgttcttctctgtcaagattgtgtaggctattttgggtcttttctggtttcacatgaattttaggattttctttactttataaaaatgtaactcaacaattaacaataacccaatttaaaaatgggcaaaggacttgaagagacatttttttcaaagaagacatacaa

SEQ ID NO: 924409 - DNA, 577 bp, Homo sapiens
actgatcagcgtggtggttcctgaaggttggagtgctgtggcgttttcttaaaataagacaacaatgaagtttgcaacatcaatggattctcatgcaagatttctctctagcatgcaatgcttttagatagcattttttttttttataaaacaaggtctcattctctcacccaggttggartgcagtggtgtaatcatggctcactgcaacctcaaactcctggcctcaagtgatcctcccaccttggtctcccaaatcactgggattacaggcatgagcccacacaccttgcctgatagcattttacccacattagaacttctctcaaaactggagtcaatcctctcaaatcctgccactgcttaatcaactaggtttacataatattctaaatcttttgttgtcatttcaacaatgttcatagcatcttcaccaggagcagattcctctcaagaaaccacttttttgctgagccataagaagcaactcttcatccgttatagttgtatcatgaaattgcagcaattctgtcacatcttcaggctccacttctaattctacttgtcttgctatctc

SEQ ID NO: 924410 - DNA, 557 bp, Homo sapiens
ttgttttaacagaaaggataaatgcttgagggtatggatgacctattttccatgatgtgactatatgtgttacatgcctatatcaaaatatctcatgtaccccattactatatacacctactatgtacccacaaaaattaaaaattaaaagaaaattcctccaaagagttgtctattctccttgtctccataccatgtattgtcactctcttgtcacacttcaatcaatctttgatttcaagcctccactgagatctctctcactaaggtcamtgataatctccatattgtcaaatcctatagtcaatcctcaaatcacatttagcttgatcgctcagcaacatttgtgacaattgattatgccctcattctggaaatacttacttcacttggatttcatgacaattatttcttcttatgttcctcctaccttactagctactcattctcatctccttcactcgattcttttacttcctgaacttgaaacgttggaatgtgccagagctggtccttggactcattctctatctatacttattcactaaagtcattgt

SEQ ID NO: 924411 - DNA, 704 bp, Homo sapiens
aataagaggtttctttgctgtttatttgctttgcttttttttcgctaaatgtactagccagaaaaccacaggtttcctggctcaaatttgcatgaagcagtgttcagagtttgtgagcaaacctggaaatttagtaggactcagggtggaagatgtgattccaatagaaaaatcactgtagaacttctacttggagtattattttttccatatacttggctcactgttgaagtgtgagtattccttaagaaaatacttgaaaacattataaaccagcaatcagaaaatagccaggaatctacatgtgaaagacaaaaatataccagataagttttgtgaattcaaagttttttttttcttttttyttttttttttttttttgaggcggagtcttgctctgtcgcccaggctggagtgcagcggcaccatctcggctcacggcaagctccgcctcccgggttcccgccattctcctgcctcagcctcccgagtagctgggactacaggcgtgtgccaccacgtgcgggtaatttttttttttttttgtatttttagtagagacagtgtttcaccgtgttagccaggatggtctcaatcttctgagctcgtgatccgcctacctcagcctcccaaagtgctgggattacagacgtgagccaccgcgcctggctgaattcaaagtttttataatgaattcaacttct

SEQ ID NO: 924412 - DNA, 558 bp, Homo sapiens
tgactacaaatttgggacttgtcatgactacccttgataattcagtataataattcacagaactcaagataatactatacctatgattacaacttatttgtttatttttattttttttgagacagagtcttgctcctgttgccccggctggagtgcagtggcacgatctcggctcactgcaacctccgcctcctgggttcaagcgattctcctgcctcagcctcgtgagtagctgggattacaggcacccrccaccatgcccagctaaatttttgtacttttagtagagacgaggtttcaccatgttggtcttgaactcctgaccacaagtgatctgcccacctcagcctcccaaagtgctgggattacaggcatgagccaccgcacctggcctatgattacaaccttattatagtgaaaggatacaaattacaactagccagaggaagagacacatagaatgaagtctgagaggggtccaaagatgagtcttctggtcatcctatccctatggagtcctggatggcattacctccttccagctacaatgtgtactga

SEQ ID NO: 924413 - DNA, 725 bp, Homo sapiens
gctatgtgctactacaagagtcaaaaagttttaaaaaattgaaaagctggctggacacagtggctcacccctataatcccagcactttgggaggccgaggcgggtggattacaggaggtcaagagttagagaccaggctgaccaacatggtgaaaccccgtctctactaaaaatacaaaaattagccgggtgtggtggcagacacctgtaatcccagctacttgggaggctgaggcaggagaatcacttgaacccaggaggcttaggttgcagttagccaagatggtgccattactccagcctgggtgacagagtgagactccatctaaaaaaaaaaaaaaaatgaaaagcttataaagtaacaaagttatagtaagctaaggctaattcaacaatttgaagaaataaaaattttataaatttagtgtagcctargtgtacagtgtttataaagtctacagtagtgtacagtagtgtcctaggcctttgcgttcactcgccactcactcactcagagcaacttccagttctgcaagtttcattcatggtaagtgccctttaccagtgtaccattttttatcttttatattatatttttaccatttctctcctgtgtttaggtatgtttagatatacaaacacctacctttgtattgcagttgtctacagtattcagtacagtaacatgccatacaggttcgtagcctaggagcaataggctatac

SEQ ID NO: 924414 - DNA, 587 bp, Homo sapiens
cccctctcttcacaaaaaaatacaaaaaaaattatcctgtagtgccagctactcgggaggctgaggcaaaaggctcagtggagtcgcagagttcgaggctgtagtaagctgtgactgcgccactgcactcaagcgtgggtgacagagcaagaccctgagtcaaaaaaaaaaacaaaaaacagtaaagtgaaataactttcaataggtatcaagaaggggagaaaatacagaaacctctaagagtataaagggagggggctaattgagaatgagtagattctaagaaagtagaatttaaatggagttctgttaaatgaaggagagaagtacacrtgaagtcccaaggtgcaaaggagctcagagcattggaggacccaaagggacaacaggtggctgcaggcagcggggaggcactggggcatagagatgtgggaagggccagatcatgctgggccttttcagtcatattacaaaattggagatttaagcctccattgcaatctaagcattaccagcattgtaagcatcccctgaagattctctccttaaattgcctcctagttgccatgtttttgaaaactgtttat

SEQ ID NO: 924415 - DNA, 653 bp, Homo sapiens
taggtttggtaaacacagcattgtctctgccacagtaccaccaaatcacagggtttctatcctgttactgttggtggctctcataaccctccctggaagagtttcaaggtccttctcaacttgtttgcagccactagtccagccatttccctccctaagccagacctgagctctggtaggcaggcctcctccaggctcctgccttcacctcaggccctggccctagtaccctgccatcttcccctayaggagtgaccgtcttgtgtttcctccttctttcaatgacctcatccttctggaaggaactgctagcactgggaatctgcactctgcactgaaatacatgactctgacccattctgagggcaggagccaaataaaagggggcaggacacacaggaggcccccaaacaaggccttgccaatgggagtaacttcctcaaaacttcaaggccgaggaaaacactggccacggctgagacctgtcagcacacctgagatttagcagtttggagacaacctagaggacattcaggagcctgtgaggagagcgcaaagtggagggataacagcaccactggagacagtggtgtggttagtggagcagtgagacggctgtccatacctcactgctcagatctgtccctgcccca

SEQ ID NO: 924416 - DNA, 555 bp, Homo sapiens
ttttgacaaaggccctgcaaaggcaattcaatgaagaaaggatagccttttaacgaatagtgctagagcagttggacaaccataggcaactaaaggaatctctaaatctcacatcttatataagaattaacgcaatattgatcacagatctaaatgtaaaacataaaactataaaacttttagaaaaaaatataggagaaaatctttgaatcccaaaacgaaacaaaasctttttagactcgatactaaaaacgtgattcataaaaggaaaacttgataaactggaccacataaaaccaaaagtttttgctctgtgagaaaccctgttatgaagatgaaaaggcaagctatggactgggagaaaatatttgcaaaccatatttctgggaaagcacttgaatctagaatataataactctcaaaactcaacagtaaacaaacgaacaattcagttagaaaatgggcaaaagacatgaatagacatttaaccaaagaggatatacatatggcaaataatgacataaaagatgatcggcatcaataaccattagagag

SEQ ID NO: 924417 - DNA, 792 bp, Homo sapiens
ggtaggcatgcagaggaggcctgagtaagcctggaatggagccctctacacgtctttcagggcctcaagtggagctggctctattgctgcatttcagaggatgggtgtttgtccagtgtggcatatggattagtggtagcctggcttcaggggaatcaactggtctctcctgattacacgtcctaactatgggaggccaagttccatttgatgtctttatgggcggtagcaccatcatgactttccggtcagatagagatgagggatgttaaagaaacattattcagaccctttgtattggtgggttcttgctttgctacaaggaaatacctgaggctgggtaatttgtaaagaaaaggggtttattggctcacagttctgcaggctgtacatgaagcataatgctagcatctgcttctggtcagggcytcagaagcttccaatcatggcagaaagtgaaggggaagcaggtggtgtcacatggtgagagagagaacaagagcgagaaaggggagatcccagactcttttaaagaaccagatctcttgtgaactgagtgagaactcactcatcaccaaggggatggcaccaagccatccatgaggatctggccccatgatgcaatacctcctactatgccccacttccaacattggggatcacacttctacatgagatttagatggaacaaacatccaaaccatattacatttgtgaaaacaataagaaagacttcattaaagactgttgaaatagagaagaaagactgagctcaactctgaatatagcaaa

SEQ ID NO: 924418 - DNA, 608 bp, Homo sapiens
cttcagagacatgcaaaataggaaagagaaaactctatcagattagcaaactacatgaggatgatgaacatgatggtaggaattcaattacacactgcctgtggaactataaaattgtacaaacctttcagcaaacaatttggcaaaacagagcttgtatcttagtgtycgttcccttgaatcctttcattctaagattctattttatggaaataaccagaaatatgagcaaatatttatgttcaaaatgtttgcggcagtttttttttaagaagcaaaaaaaaaaaaatagaaacattctaaatgctcgggattaaatatattattctcatgatggaatattttgcaatcactaaagcgaggtccgtgaacagttttaataacttgagaaaatcttaaagttaagagaaaggttcagatagaaaattacatacagtattttctcaataattcaatgtactaaacatgcaaaagactggaagaaaatacaataaaatgtcaattggttaactctgggtgaaattatgggtggttttcattttgttatttatattatatttttctatgttttccaaatttttcagcctgagcaatttccaaagtgctga

SEQ ID NO: 924419 - DNA, 680 bp, Homo sapiens
agagtagttatctgcagaagatgacagggctttgcttcaaaatccaaagggtttgtgtagtgactcatctgtaggggcctgccaaaggctccaaacagcatctctctctgcagacacttcaagcacaattggatctgctgtattacatggctcaagtggcagagcagctagcacagcagcctggacctgttgcagagccttctctcgtctgcacatcactcaaaaatagcagcttttcagctcactcagtaaacgtgccaagtagcacacacaaatgaagaatatgttgcctccaaaattcaaagaggcccactaggcattgtgtctctttcttggttgtaggagggggctagatgcaacaacttttccttcaccttagaagggatgtctcgacatgctccacaccactggacccctagaaattttacagrcgtaggaggcacctgaagttttgtcaaatttatttcccaccctctggcatccaaatatcttacccataagtctagggagtagctgctacttcttcctcactaagtccaatcagcataatgtcatcaatgcaatggaccactgttatagcttgtggaaaaaaaaggtgagcaagatccctgtgaactaaattatgacatagtgttggagagctgatagactcctgagaaggacagtggcagtgtattgct

SEQ ID NO: 924420 - DNA, 770 bp, Homo sapiens
gctgttgaatatatctattcttattacacatttggaaactggggaaatgatcacaggagggtttaacaatccactgtgagatgaacctgagttaaaactccattgagccaggcgtcgtggctcacgcctttaaccccagcactttgggaggctgaggcgagcagatcacctgaggtcaggagttcgaggccagcctgaccaacatggtgaaaccctgtctctactaaaaatacaaaattagctgggcatggtggcrcatgcctgtaatcccagctacttgggaggctgaggcagaagaattgcttgaacctggaggcggaggttgcagtgagctgagattgtgccattgcactcccacctgggcaataagagtgaaactccaactcaaaaaaaaaaattagccaggcgtggtggcaggtgtctgtaatcccagttacttgggaggccgtggcatgagaattgcttgaacccaggaggcagaggttgcagtgagccaagattgcatcactgcactccagcctggaggatagagtgagactctgcctccagaaaaaaacaaaaacaaaacaaaaaaaaccctccattgattacctgacctccataagccagaggtccccaactcccaggccacaaactagtaccactccgtggtctgtcaggaaccaggccacacagcaggaggtgagtagcaggtgagtgagcaaagcttcccatgtatttatagccactccccatcactcacattaccacctgagctgcacctcctgtca

SEQ ID NO: 924421 - DNA, 583 bp, Homo sapiens
ttcatctttaaaaaatcagatatattttgtgccatgtaacccctaattttgaaatgattgccatgtagtttaattaagctttatctagaatttgacaccttcaatgctaggagacttgggataaagataaccgtcacgttcaatagattctgttctgtgtatctctgctcccacagttacaacacataaagctttttggccttgaggtgaaagcaccttccgctctgcctcactgacaaccactgggatcagagctrgagctgagtaataaataatgaaattttgccttcaaaatgtgttagcctccatagaatatgagaatgtacaaattttttatttttctcttttaaattttagttctttcttttgttctccaggactttgtttcgtatcatgctctgggccccctctaaatgggctgccttgtagaactcttttgtcagccagagagggcaaaaattttatattgattccctaagggaggtaccaaacaggctgtggaagatgacagtgtttcaggaaaaactgtactgtcccagcaagtctaatgggacctaataacatgtacagtattgtggtaata

SEQ ID NO: 924422 - DNA, 605 bp, Homo sapiens
ggagctacaactccatttatcacctctgcactggcctaatagaagttttcctcaagggctctgcccctgtaactggcttctacctggacatccaggcttttcatacatcctctaaaatctaggtggaggctcacaagcctcaactcttgtacactgtatatctgcaagtttaaaatcacatggagttaccaaggcttagggcttgtatyctctgaagcagtggcttgagctgtacctgagccactttgagccatagctagaactggagtagccaggttgcagggagcagggtcccaaggctgcacaaggtagctgggccctgcatctgacccaggaaataattctgccctcctaggcctctgggtctgtaatgggaagagctgtgtcttaggtctctgaataggcctttttcccattgtcttggctgtggttacctgcctcctttttagctatgcaaatttctgcagcctgcttgaattcctcctctggaaatgggcttttcttttctttcacatggccaggctgcaagttttccaaacatttatgctctactttcctttttaatataagttccaacttattatttgctcctgcatctgagcata

SEQ ID NO: 924423 - DNA, 605 bp, Homo sapiens
ggagctacaactccatttatcacctctgcactggcctaatagaagttttcctcaagggctctgcccctgtaactggcttctacctggacatccaggcttttcatacatcctctaaaatctaggtggaggctcacaagcctcaactcttgtacactgtatatctgcaagtttaaaatcacatggagttaccaaggcttagggcttgtattctctgaagcagtggcttgagctgtacctgagccactttgagccatagctagaactggagtagccaggttgcagggagcagggtcccarggctgcacaaggtagctgggccctgcatctgacccaggaaataattctgccctcctaggcctctgggtctgtaatgggaagagctgtgtcttaggtctctgaataggcctttttcccattgtcttggctgtggttacctgcctcctttttagctatgcaaatttctgcagcctgcttgaattcctcctctggaaatgggcttttcttttctttcacatggccaggctgcaagttttccaaacatttatgctctactttcctttttaatataagttccaacttattatttgctcctgcatctgagcata

SEQ ID NO: 924424 - DNA, 646 bp, Homo sapiens
gagttctttatattttctatatatgaattcctaatcagatatatgattggcagatattgtctctcattctttgtcatttcactttcttggtattctttgaagcactaaacttaaatttttttgatgttcaacttayacattttttgttgcttgtgcttttgattgtcatataagaaacaaatcatttccataggaaaccattccaaggtcatcaagatttatccctgtgttttcttctaagagttatagaacttatattatgtatcttgagttaaattttgtatttagtatgtagtaagatacaactttattcttttgcatgtggatatctagttttccccagcatcatttgttgaaaagactactccttcccctaggaactgttttgatacccttgccaaaaatcatttgatcataactgtggggtgggagtgttgctcctaaactgtcaattttatcccattgttctatgtatttctccttatgccagtatcacagtctggattactgtagctttatagtgatatttggaatctggaaatgtgggttctttaaatttgttctttgttttcaatattgttttagttcttctaggacccttgaattgccatacaaattttatcatcagcttgtcaatctcagcaaa

SEQ ID NO: 924425 - DNA, 658 bp, Homo sapiens
ttgccatacgggaaggaaaacccagggtttccaggccttcttttccttttttctcctccaaaacaagaaagattctgatttttaagtaaaatttcctgaaacatagaacttaatttgaggcttttgaaaaacaatatttaggctagatttgaccctgaagctaccagagtcctgcagtgtagactaaggtaagtgacagcttggaaggtgtttaggaagataaatttatggatccggatcaaacaaaccaactataaaaagacatacttgagaaaaagaggcaaaggtgaatttggataggtattaaataacattaaggaatcactgttgaatgcaataacaatattaagatcatgttaaaaataatctttacccgtttcaaatatctaatagatatctaattatttatacaggcaggcaggcaggcaggcacgcrcacacacacacacacacacacacacacacttttcactacagatgaaacaaacaaaaaaagacagagacaaaataatgagcaaagcactatacctaaatacgaagaataaatcagaggaatgagaaaaaaatgacttcaaagttttgaagttcaaagttagaggtctctagtctccttgtatagtgagcgccctctggctatatcaagaaagcaaacactcct

SEQ ID NO: 924426 - DNA, 766 bp, Homo sapiens
cagtgtgcctgccacctaatggtgacaccagttgcttttttatttaagaggctgattgcacttttcaaaaaatctaaatttctttcctcactctaatttaagtgaaatgataggagtataaattgctttgttacagttccaaacagtagccctgcttgaattttttatggctctaatgaagatcctgagtatccttttaaatattaaaattcagattaaatatcaactagatgtaatgacagcttaaaaaacgttatcagtacattgctatgcttaatgaatataaaacacgaaaaaggctgggcttcatttactgtgctccttccaacccaggaatttcagcctaaatttcccgacaccttcattttctccctgagtcctatgttttagctgttaaatgggggtgcagcaaagagttttagaaccaaacattaaaattaacaacccttctttaagaaacacattttctgcaccatcattttctctggccacttatttcttctttgcattttatgcacacgtctcatcaagatgtgttatttgaaggctgcgcccccaagtatgctctctctacccagatcttacatcaaagaggtgaattgttaaggaatttacaccacatktggaatcagggtaaaattaccagagaaaacaaagggctaaaaacccaatatcacacttcatcaggaaaagtaatggaaggtgggtcttcctaaatcatttgaaaaaaaaaaatactgttctgatgggacagaaaaagcagtct

SEQ ID NO: 924427 - DNA, 343 bp, Homo sapiens
cacattggagtcacctgaaaagcctttctaaaatcccaatcccaggctgtaccccagaccaatgaaatcagaacctctgggagaaggaccctggtactggtgtttttaaagctccccaggtgattccaacctgcagtcaaggtcgataaccactgctttgtgccatttatcactttcttccttgtagtcgtaattacactgyatttgtcttattcccaggactaagtttgcaactcctcgagggcacagaccatcttatcacatctgcttatgccctgcagttcttagtgaatcagagctgcaacaaatactgttgaatcgaatttaggaacttaaaattaac

SEQ ID NO: 924428 - DNA, 617 bp, Homo sapiens
ctaaagtcacttgaatttttgtttctcttaaattatgtactagagcccaattcattaaaaataaaataaaaattatcagtattatttattttcatttcagccaccaacacagcacaatgaaacacattgctggctgggtttcagccatggctatgccattcaaaaattgctgggactttggttaagtcacttatgctttgtgttttcatctgtaaaatgagtatctcaggttagaatacctctaagatcgcttacagattcctcattccagaatccaaccttttctaagcaatccttccccatctattagcagttcatttagaaatccttttatgaaaggacaatttttcagtatagattacaytgtaatgattaggtgggaagtgtgtgccctaatagccggaatgaagttaagtgtatttttgtaaatatgcaaactcctcatttgtctttatgaggtcccatttgtcttttggcattttgatgagtaaaccaatgccaaaccaatttagagcaagtaaaatatgttatcatgagatatttgttttgtcaattgtactcacaaagtccctctctctctctctctctctcttcctctctttcttttagtctgttct

SEQ ID NO: 924429 - DNA, 583 bp, Homo sapiens
ccttcccaaatagtcagagtctccaagttgaattgtgggaatgtagggtccaaatgtcagccctcctgggggggagcacttatcatatggtaagtactgtgataggcttggggccaccaatattaataagacctgtcccatccctccaggaggtcatggcataaactccttcccactgtcaggcactgggagttgtgtgtaataatcagcttaagaccttgtctagcttctaggccaggtgttaaragggttggttttgcattcagacctatcttggttcaaattctgtcactgtcatttatctacctcgtggctttggggaaattagtgactctctgtgactctaaattatcttatctgtaaaataggcataaagacacccaccacacagggcgattgtgatggttagaggtaatgtagcatttgctcaatacatgttagatcttgttactttgattgctttctgattcaagacagcagttctgcctctctctgtagttatcagcagtgactcaccaccagtcctccctaaacaagagattcctagaatctgccactttatggaaataaagcttttccagca

SEQ ID NO: 924430 - DNA, 571 bp, Homo sapiens
acataaaatgttgagtttaaaatttttaagaattggccgggcacgggggctcacgcctgtaatcccaacactctgggaggaccaggcgggtggaccatgaggtcaagagatcgagaccatcctggccaacatggtgaaaccccgtctttactaaatatacaaaaaattagctgggcgtgctggtgggcgcctgtagtcccagctactcgggaggctgaggcaggagaatggtgtgaacccagggggcggagcttgcagtgagccgagatcgygccactgcactccagcctgggcgacagagcgagactccgtctcaaaaaaaaaaaaaaaaaaaaaaaaaaaaaaaaaaaaaaatttaagaatcatccctaactatcctatgtaaaacgcaatggcttaattattttgctttaaaccagaaaatttttgccatccagaaggagttttagaaaataaagtgacaactgagtttaactacatggatatttggtccaaactataattacagttgtatatatgtaataaataacaggagcaaatgggtgatgataaagtttaaatattgcaggac

SEQ ID NO: 924431 - DNA, 901 bp, Homo sapiens
cgagtctggtagggatgtggagaacctttatgtctagctcagggattgtaaatacaccaatcagcaccctgtgtctacctcagggtttgtgaatgcaccaatcaacactctgtatccagctactctggtggggccttggagaacctttatgtctagctcagggattgtaaatacaccaatcagcactctgtatctagctcaaggtttataaacacaccaatcggcaccctgtgtctagctcagggtttgtgaatgcaccaatcgacactctgtatctagctgctactctggtggggccttggrgaacctttgcgtccacactctgtatctagctaatctggtgggaggtggagaacctttgtatctagctcagggattgtaaatgcaccaatcagctccctgtcaaaacagaccactgggctctaccaatcagcaggatgtgggtggggccagataaaagaataaaagcaggctgcctgagtcagcagtggcaacccgctcgggtccccttctacaccgtggaagctttgttgtttcactctttgcaataagtcttgctactgctcactctttgagtccacactgcttttatgagctgtaacactcaccacgaaggtctgcagcttcactcctgaagccacagagaccacaagcccaccgggaggaacgaataattccagacgcgctgccttaagagctgtaacactcaccgcgaaggtctgcagcttcactcctgagccagcgagaccacaaacccaccagaaggaagaaactcccaacacatccgaacatcagaaggaacaaaactccagacgcgccaccttaagagctgtaacactcaccgagagggtccgcggcttcattcttgaagttagtgagaccaagaacccaccaattccgg

SEQ ID NO: 924432 - DNA, 901 bp, Homo sapiens
cgagtctggtagggatgtggagaacctttatgtctagctcagggattgtaaatacaccaatcagcaccctgtgtctacctcagggtttgtgaatgcaccaatcaacactctgtatccagctactctggtggggccttggagaacctttatgtctagctcagggattgtaaatacaccaatcagcactctgtatctagctcaaggtttataaacacaccaatcggcaccctgtgtctagctcagggtttgtgaatgcaccaatcgacactctgtatctagctgctactctggtggggccttggggaacctttgcgtccacactctgtatctagctaatctggtgggaggtggagaacctttgtatctagctcagggattgtaaatgcaccaatcagctccctgtcaaaacagaccactgggctctaccaatcagcaggatgtgggtggggccagataaaagaataaaagcaggctgcctgagtcagcagtggcaacccgctcgggtcyccttctacaccgtggaagctttgttgtttcactctttgcaataagtcttgctactgctcactctttgagtccacactgcttttatgagctgtaacactcaccacgaaggtctgcagcttcactcctgaagccacagagaccacaagcccaccgggaggaacgaataattccagacgcgctgccttaagagctgtaacactcaccgcgaaggtctgcagcttcactcctgagccagcgagaccacaaacccaccagaaggaagaaactcccaacacatccgaacatcagaaggaacaaaactccagacgcgccaccttaagagctgtaacactcaccgagagggtccgcggcttcattcttgaagttagtgagaccaagaacccaccaattccgg

SEQ ID NO: 924433 - DNA, 594 bp, Homo sapiens
aatattattaatgcatgaaaaaaatgaagtactgatatatgctactgtgtggatgaaccttgaaaacattatgctaagtgaaagcaaccagtcacaaaacgccatatattatatgatttcatgtatatgagatgtacagaataagcaaatatatggagayatagtgtagattagtggtagcttaggcctgagcttaaggctggagtgaatttgagagtaatagctataggggacagggtttctttctgaggggacaaaaatgttctataattgattgtggtgatgtgtgcacaactgtgaatatactaagataccattgaactgtgtgcttttaaaatgggtgacttttatagtagatgaattatataaatataaagctgttataaaaagagagagagagaaaaaaaaggaagaaagaaagaaaaaagagggagggagggagggagggagaaagggaggaaacatgtcaggatcagaatttgcaggaagtaccagcagcttgaaagaagaaacaaagggggtgacaagggtagagaagaggggactctttcaaagggggaatatgcatcttaaaggcctctttaatagggtgat

SEQ ID NO: 924434 - DNA, 785 bp, Homo sapiens
aatctcagtaaatgaaaaagaaactgaaattatactgaatacactctcaagccacagggcaatgaaaacagaaattaatatccagatctctcaaagctacacaaatacatgaaaatcaaacaatttgctcctgaataattactgggtgtgcataaaaattaatacagaaatcaaaaaatgctttgaaattaatgaaaataaagatacaagttaccaaaatctcagggatgcaactaaatcaatgataagaggaaagtttatggccctaaacatctttatcaagaagttagaaagatctcgaattaacaatctaactttgtacctgaaggaactagaaaaaaaaaaaagaaaagaaaaaaggaaaaaccaatgccaaaggtagcagaaggaaagaaataaccaaaattaaagaagaacttaatgaaattgaaatgaaaaaatttatacaaaagttaataaaactaagagattggttctttgaaaaataacattaatagctcactaggtatacyaataaagaaaacaatagaaaatcaaaatacaataaaaaatgacaatgatgacattaaaactgatccaatggaaatacaaaagatcctcagagactactatgaccaagtatatgcacacaaattagaaaatctagaggaaattgatttgaaacacacaaactcccaagattgaatcaggaataaattgttattctgaataggtcaataaccaactctgaaactgaatcactaataaaacaacctactaaccaaaaaaaagctctggacaagatg

SEQ ID NO: 924435 - DNA, 785 bp, Homo sapiens
aatctcagtaaatgaaaaagaaactgaaattatactgaatacactctcaagccacagggcaatgaaaacagaaattaatatccagatctctcaaagctacacaaatacatgaaaatcaaacaatttgctcctgaataattactgggtgtgcataaaaattaatacagaaatcaaaaaatgctttgaaattaatgaaaataaagatacaagttaccaaaatctcagggatgcaactaaatcaatgataagaggaaagtttatggccctaaacatctttatcaagaagttagaaagatctcgaattaacaatctaactttgtacctgaaggaactagaaaaaaaaaaaagaaaagaaaaaaggaaaaaccaatgccaaaggtagcagaaggaaagaaataaccaaaattaaagaagaacttaatgaaattgaaatgaaaaaatttatacaaaagttaataaaactaagagattggttctttgaaaaataacattaatagctcactaggtataccaataaagaaaacaatagaaaatcmaaatacaataaaaaatgacaatgatgacattaaaactgatccaatggaaatacaaaagatcctcagagactactatgaccaagtatatgcacacaaattagaaaatctagaggaaattgatttgaaacacacaaactcccaagattgaatcaggaataaattgttattctgaataggtcaataaccaactctgaaactgaatcactaataaaacaacctactaaccaaaaaaaagctctggacaagatg

SEQ ID NO: 924436 - DNA, 600 bp, Homo sapiens
gcatgatagatctcctggtgctcctctttctcttgcatttttccttcggaggtgaatgggagccatgtgatactctttttctctttactgaggaactcctgggtcttgaatgtatcaaaaggtggccttttgttgaagataaggtaggagacaaacgatacttctcttcaaacgtctcctgagacatacctgcagcctgcttttggtcaggggtgactactttacctgcaatatttmtttgcaagtttatttcttcctttgaaagattactcagaaatttctgaggacttgatttatcgaggtgagtgaaagatggtgatgaatgaatattatttgctttcaatacaagtgaagaaatacacacatcacttttaatgtcattaatggatccttccaacttcctttcctgatttccacatcctgagtttccacaaagatcatcaaaagatgagtgtaagccaccagcaaagtattcatctggaaaacattaacggagagctaacttttaaaagtggtttaaattattctatattcaactttcagttgaccaataaaacaacttttaaagtacagctattagttaagaagactattaaccac

SEQ ID NO: 924437 - DNA, 593 bp, Homo sapiens
  misc_feature 357: n = A,T,C or G
cctcctgccttggcctcccaaagtgctggtatgaaggcatgaaacatcatacctgactgattctgaatatttcaaactgtacatttaaaatccaactcaaatggcatggcacaccctgctgtgaaagcaacacactccaggcagaatcctagaaagctctgagcactcagcataatcctaattgtcatcaggtctgtaaccactgctgtttcttcacaaagtcactatttkagccattttactcaaagttgactgaatttcaagaaaggtgtgagacacaatcactatcacttgtattagttttcatttgaatatcatactgtccataaattgttagccacagggtgggaggaagtntgtgggggccagtttgtgcgcacatagctgccattcgtggttcagttctccatgctaagaaaaggagaacaaactagaactttctgtgctgattcggttaatactttctctgtggatgactcagaaccttcctgatgatatttacttataattttctacaggagcttagaatctgtgtctgttttatgaaaatttccattggtttcataattttcctgcaacctgataaattatct

SEQ ID NO: 924438 - DNA, 609 bp, Homo sapiens
aaattatgcatctgacaaaggcctaatagacacaatctgtaggtaatttaaacaattcaacaagcaaaaaacataacctcattgaaaagtgggcaataaacatgaaaagacatttgtaaaaagaagacatacaagtggccaataaacatatgaaaaatgctcaacaccgttaatcatgagagaaatgcaaatcaaaaccacaataagatatcatctcacgccagtcagaatggctattatttaaaaaaatcaaaaaacagtagatggtagcgaggctgcagagaaaacgtaatactttatacattgctggtgttcgtgtaaattagttgagccattctggaaagcagtttgggagctttcttaaataacttagaactatcatttgactcagctatcccattactggatatataccaaaagtaatatarattgctctaccaaaaagatgcatgcgcttttatgtttatctcagcattactcacaataacaaagacatggattcaacctaggtgcctgtcaatggtggactgcatcaagagaatgtggtccatataccccacggaatactacacagccataaaaagagcaaaaccacgtcctttgcagcaa

SEQ ID NO: 924439 - DNA, 609 bp, Homo sapiens
aaattatgcatctgacaaaggcctaatagacacaatctgtaggtaatttaaacaattcaacaagcaaaaaacataacctcattgaaaagtgggcaataaacatgaaaagacatttgtaaaaagaagacatacaagtggccaataaacatatgaaaaatgctcaacaccgttaatcatgagagaaatgcaaatcaaaaccacaataagatatcatctcacgccagtcagaatggctattatttaaaaaaatcaaaaaacagtagatggtagcgaggctgcagagaaaacgtaatactttatacattgctggtgttcgtgtaaattagttgagccattctggaaagcagtttgggagctttcttaaataacttagaactatcatttgactcagctatcccattactggatatataccaaaagtaatatagattgctctaccaaaaagatgcatgcgcttytatgtttatctcagcattactcacaataacaaagacatggattcaacctaggtgcctgtcaatggtggactgcatcaagagaatgtggtccatataccccacggaatactacacagccataaaaagagcaaaaccacgtcctttgcagcaa

SEQ ID NO: 924440 - DNA, 672 bp, Homo sapiens
aaaactaaaaaacttactcctgaatgacttttgaataaataatgaattaaggcagaaatcaaaaaattatttgaaacaatgaaaagactcacaccatatcaaaacctctgggcttcagtaaaagcactgttatgaggaaactttatactggtaaatgcctacatcaagaagatagaaggatctcaaattaacagcttaatgtcacaactggaggagctagaaaaacaagaacttaacctaaagatagaagaagaaaagaaacaactaaaatcagagcagaactaaattatattgagaccaaaacaatatacaaataatcaatgaaatgaaaaattggcttttgaaaggataaacaagattgataggccactagccagattaacaaagaaaaaaagagagaagrctcaaataagtgaaatcagaagtgacaaaaataacaacaactgattccacagaaatacaaaagattctaagggaccactataaatatctctgtgtacacaaactagaaaaccttgaggaaatggataaattctcagaaacacaccacctcctaagactgaaccaggaagaaattgaaacctcaaaccaaacaataaaaaattatgaaactgaatcagtgatagaaaaactaccaaccataaaaagcactggaccagacagattcacagc

SEQ ID NO: 924441 - DNA, 605 bp, Homo sapiens
gctactttcattcctctgtaatgtgaggttgaagataggtgcaatgtgaggaggaatgtgagaaggagggagtttaacttgtactccagtttccaagtttgagcagttgcaatgtagtgaaaactgtggggcctgtggcaatttatataaataaatccctaaaacagaattttggcttttaaaatgcatagaacatgatgtggtcatagcatcatgaacattgaaagcctgttttctcagccagggactttaaaataagagctccacataagagaatgatgggggaaaaatgtatacatctaatgaagccaaatagcrcagcaagatgatggttaactgaacaacacagaaaatctgcctttcttttcttacaaatatctctttggtgggctcccttgacaggcattcttttgttctctgcttcttagatgagtcttttctttcgctttctggctcccttcctccccagttttaaaccataaatatcctacaaatatctcctcttactttagtgaaaggatgttacttgctagtttcaattattacctctataaaatgatatcacttgtatcttcagccttgccctcatctcacttctcctccct

SEQ ID NO: 924442 - DNA, 687 bp, Homo sapiens
taccactccactccagcctgggtgacagggtgagactccgtctcaaaaaaataaaaatagaattagcatatgatctagcaatcctacttctgggtatatatccaaaaaaattgaaaacagggtctttccacacccttcttcatagcagcrttcttcacaatagccaaacggcagaaacaccctaagtgtcggacggctggatacgcaaaacgtggcacatgcgcaaaacgtggcgcgcgcatacaatggaatatgattcaaccttaaagatgaaggaaatgctgacacgtgctacaccatgggtaaatgggtaagccttgagaacattatgctaaatgaaggcataaaagaacaaatactgtgtgaatccactcatgcggggtacctagaataggcaaattcatagagacagaaagtggaatggtagctgccagaggctggggggagggaaaatgagctgttgttcagtgaatacagagtctccgttttgcaagatgaaaataattatagagatggatggtgatgataacgtgaatatatttaatatcacagaactatacacttaaaatgtaaagaaatggttaagatggtttaaaaaatggttaatattatgtgtattttaccacaattaaaaagagtaataggctgggcatggtggcttattcctgtaatcccagctatttggga

SEQ ID NO: 924443 - DNA, 493 bp, Homo sapiens
tttggcatatcccaattgccagcatcagtacccttgtgctttggggccattattaagtaaaataagggttacttgaacacaaacgctgagattgtgtgacagttgatctgataaccgagatggctacaggctggacacaggggtgattcatgtctgggtgggacagagcgggacagcatgagatttcatcatgcttctcagaactattgtcctgcmcttcagatatgatcaagctgcagtttaaaatttatgaattgtttatttctggaattttccttttaatattttcagactacagtttgcctcagttaactggaatcacagaaagtgaaactgtggataagaaagactactgtatacaaaaaaatgtaccatgttacctttcaaaaaatctgaaaaattctgaattttcaaatacatctggcctcaagagttttggaagagggattgtatctgcatttccttatctagaagaatccagacttgataagtg

SEQ ID NO: 924444 - DNA, 641 bp, Homo sapiens
agactgcagctgttgctggctctgcatcaccgtttactgtaattactgccttcagatttctttctgacccatatcccgttataggatatgctcaggctagatgagcaacttctaaaatcagcagcaatcatagatgtttgcaaaattgttgcattagaaatctctttttctagtaacatgaaaattctttagtataccttcaccctttaacaaaaatcctcacctggctgtttctcgccactcagcrtcctcaccttcacgccaacaaatctcatccagttctgtgaaaaggtcatgaggaatgtgttcctcgtcatcatcctcggttccaagaataaactgtaccctctgtgatggggtgtctaaaaaatcagagacatgtattaccatgaacatgtattaccacgaccctgagcttaaaatgtcccagtcactgccttcagcaccaccccaagctcgcaccaccccaagctcacacctcccctgctccccactgcaacactcatccaaatcaaactcaggaactaaaaccaaattcatcattacatgaagtccagtataattggggaaaataaatatgtaaaatgtatatattaatgtatacatataatacataatagataaaatatgattattatttt

SEQ ID NO: 924445 - DNA, 641 bp, Homo sapiens
agactgcagctgttgctggctctgcatcaccgtttactgtaattactgccttcagatttctttctgacccatatcccgttataggatatgctcaggctagatgagcaacttctaaaatcagcagcaatcatagatgtttgcaaaattgttgcattagaaatctctttttctagtaacatgaaaattctttagtataccttcaccctttaacaaaaatcctcacctggctgtttctcgccactcagcgtcctcaccttcacgccaacaaatctcatccagttctgtgaaaaggtcatgaggaatgtgttcctcgtcatcatcctcggttccaagaataaactgtaccctctgtgatggggtgtctaaaaaatcagagacatgtattaccatgaacatgtattaccaygaccctgagcttaaaatgtcccagtcactgccttcagcaccaccccaagctcgcaccaccccaagctcacacctcccctgctccccactgcaacactcatccaaatcaaactcaggaactaaaaccaaattcatcattacatgaagtccagtataattggggaaaataaatatgtaaaatgtatatattaatgtatacatataatacataatagataaaatatgattattatttt

SEQ ID NO: 924446 - DNA, 650 bp, Homo sapiens
aaagaatgcgttgaagaatgggcaaataaaatcgggaatatttagaggtaggaaggtggtgaaaaggttcacaaagaagtttcaatttcaacaaaaagcttttaattcaaagatttttctttctttttctgagagtgatcagaacatgaagatggctgttgggagacaaatctccatgtatcctttatgttcccaaacatcttttgggcaaaggcactaagtgcctttgtgcctgtctgtctttacaagtatgtttrtatcgtgaacacactaggaagatatagatagtgtctctctctggagcaaagggtaggttttttatctttatacagtaaagataatgtctccttatggggcaacaatcagtgaggattattgtccattatgaaagacctgagttccttaccttggttctcccctgtcacatatcccgctacatgtgcagcatctcctggccctttgcacacccttctgtgggagttggggctcagaatgcaacacaaatgatgatactctaggtactactattctgtgcataataaaccatcttttgtctctgactcaagagtctcatggcttttgctagcatccataaaactggcagggcaaatcctgatacccttcacaattcttggcagttttggcagtga

SEQ ID NO: 924447 - DNA, 650 bp, Homo sapiens
aaagaatgcgttgaagaatgggcaaataaaatcgggaatatttagaggtaggaaggtggtgaaaaggttcacaaagaagtttcaatttcaacaaaaagcttttaattcaaagatttttctttctttttctgagagtgatcagaacatgaagatggctgttgggagacaaatctccatgtatcctttatgttcccaaacatcttttgggcaaaggcactaagtgcctttgtgcctgtctgtctttacaagtatgtttatatcgtgaacacactaggaagatatagatagtgtctctctctggagcaaagggtaggttttttatctttatacagtaaagataatgtctccttatggggcaacaatcagtgaggattattgtccattatgaaagacytgagttccttaccttggttctcccctgtcacatatcccgctacatgtgcagcatctcctggccctttgcacacccttctgtgggagttggggctcagaatgcaacacaaatgatgatactctaggtactactattctgtgcataataaaccatcttttgtctctgactcaagagtctcatggcttttgctagcatccataaaactggcagggcaaatcctgatacccttcacaattcttggcagttttggcagtga

SEQ ID NO: 924448 - DNA, 797 bp, Homo sapiens
gctgctcgggaggctgaggcaggagaatcgcttaagcccgggaggcggaggttgcagtgagtggagatgacaccactacaccccagcctgggtgacagagagacattccatctccaaaacaacaacaacaacaaaagatataaatggaaaatgaacattggatttggtactaggacggtcatgggagaccttgacaacagcagtctcagtagattagtcttgatcaaatctttactggatcaggttgaaggctgggtgagctggctcacacctgtaatcccagcattttgagaggctgaagtgggcggatcccctgagttcaggagtttgagaccagcctggtcaacatggtgaaacccmgtctctactaaaaatacaaaaactagctgggcatggtggtgcatgcctgtgatcccagctactcaggaggctgaggcaggagaatcacttgaacccaggaggtggaggttgaagtgagctgagatcacaccactgcactccagcctgggcaacagagcaagactctgtctccaaaaacaaacaaccaaacagaacaaaaagaatggaagtagtgatgatgaccagaaataattatttcaacttttttttcaggaagtgcagcagagagacaaggtagtaattgaaaaggaattcaggccaaggttagatatttttttgattgtagtttttatgtttttgttacttattgttatttaagaccggattattaaagtgtaattggaaaggttcagtagatagggaaagaaaatgatggcatagaacaaagggtgatcatt

SEQ ID NO: 924449 - DNA, 603 bp, Homo sapiens
attagaaaagatggaaggtataaaatacatttcttctatttatatctaaagaggtagaaaaaaattaaattccaaatataaagaagagtcaatattacgaataagagtggaagtcagtgaaatgtaaagaataaccagaaaaacaatgagaaagttcaacaaagtcagaagttatttctttaaaaatataaatcaaattgggaaacctctagcaagattcacaaaggggaaaagaggacacagcatttrtgatgaagctctctgcacaaattacaaagagcaaacatcattagagatcccacagatgaaaatggtaagagtggatatatagcagtaacttagtggatatataacaacaactaagtcgcttattaatataaataaagcaccttagagaaaattgataatttaaaaaaaactgaaaagaaattgaaaatctaagtagacacatgtccattgagtatgataaattatgaagtaaaaatcttaccacaaagaaaacttcaaaccctgaaagttgtactgcaggagtatccaatcttttggcttccctaggtcacattggaagaacaattgttttgggccacacataaaatatactaa

SEQ ID NO: 924450 - DNA, 603 bp, Homo sapiens
attagaaaagatggaaggtataaaatacatttcttctatttatatctaaagaggtagaaaaaaattaaattccaaatataaagaagagtcaatattacgaataagagtggaagtcagtgaaatgtaaagaataaccagaaaaacaatgagaaagttcaacaaagtcagaagttatttctttaaaaatataaatcaaattgggaaacctctagcaagattcacaaaggggaaaagaggacacagcatttgtgatgaagctctctgcacaaattacaaagagcaaacatcattagagatcccacagatgaaaatggtaagagtggatatatagcagtaacttagtggatatataacaacaactaagtcgcttattaatataaataragcaccttagagaaaattgataatttaaaaaaaactgaaaagaaattgaaaatctaagtagacacatgtccattgagtatgataaattatgaagtaaaaatcttaccacaaagaaaacttcaaaccctgaaagttgtactgcaggagtatccaatcttttggcttccctaggtcacattggaagaacaattgttttgggccacacataaaatatactaa

SEQ ID NO: 924451 - DNA, 721 bp, Homo sapiens
ttgggctgagactatggggttttctagatagaaaatcatgtcatttgcaaacggagatagtttgacttcctctctttctttttggatgccctttatttctttctcttgcctgattgctctggctaggactttcaatactatgttgaatagaagtgatgagagagggcatccttgtcttgtgctggttttcaaggagaatgatgctagtttttgcctattcagtgtactgttggctgtgacctttacagaactcttcacccaaaaacaacacagtatacattctcctcatcaccacatggcatgtactctaaaattaaccacataattggacataaaacaatcctcaacaagtgtaaaaagaaccaaaatcatatcaaacacactctaggaccacagcacaataaaaataawagttgagactatgaaaattgctcaaaaccaaataattacatggaaattaaacaatacaatatgtcctgagtgacttttgggtaaataatgaaattaaggcagaaatcaggaagttctttgaaaataatgagaacaaaaatacaatataaaatacaatatactagcatgcacaaccggttcccccaaacatggagtcctgcagcccagttcttacctgaatcaggatggagggtgtggtgggtccaagtggagctgttggccatgtgcctacttgctgcgtacctgcagatcccactccctcaggtctccc

SEQ ID NO: 924452 - DNA, 748 bp, Homo sapiens
gtcagtggggccctgaagtctcccattattattgtatggctgtctaagtcttttcataggtctaaaataacttgttttatgaatctgggtgctctaattttgggtgtgtgtagacttaaaatagttaagttttcatagtgaattgaaccctttatcattatagcatttctatacaacaatgagcaagctgagagataagtcaagaatgccattcatttacaacagccacaaacagaacacaatacctaagaatacagttaaccaaggaggtgagagawctctacaaggagaactacacttttgaaagacatctaagatgacgtaaataaatggaaaaacattccatgctcatgaattggaagagttaatatcattaaaatggccatgctgcccaaagcaatctgcagattcaatgcaattcctatcaaactgccaatgtcatttttcacaaaattagaaagaaactattccaaaattcaaacaaaacaaaaaaagacacgaaatagtcaaagcaatcctaagtaataagaacaaagctggaggcatcacattacctgacttcaaaccatactacaagatcgcaataaccaaaacagcatggtactggtactaaaacagacacagagaccaatggaacagaatagagagctcagaaataaagctgcatacctacaaccatctgatctttgacacaggcaataaaaaaacaggggaaagactccctattcaataaatggtgctgggacag

SEQ ID NO: 924453 - DNA, 716 bp, Homo sapiens
tgagcatttcttgtaggactggactagtggtgatgaattatctcaatgtttgcttgtctgggaaagattttatttgtccttcatttataaagcttaatctagatgaacataaaattcttgatttacaggttttttagttgttgttgtttgtttgtttcagcactttgaaaaccccacgccattcttttctggcttgtgaagtttctgctgagaagtcttcttttggggtttcctttataggtgactaaatgcttctttcctactgactttagaatgctttccttcatattgtctttagacagtctaatgaccatatggcatggtgaagtcaattttgcaatttattttctggggattgctgagcctcctctatttgaatgtctaaatttcttcctaggctaggaaagtttttgttgattactttattttattcttttttttttttgagatggagtcttgctctgttgcctaggctggagtgcagtggcacgatstcagctcactgcaagctccgcctcctgggttcacaccattctcatgcctcagcctcctgagtagctgggattacaggtacccaccaccacgcccggccaatttttttgtatttttagtagagacggggtttcaccgtgttagccaggatggtcttgacctcctaaccatgtgattcacccgtctcggcctcccaaagtgctgggattacaggcgtgagccac

SEQ ID NO: 924454 - DNA, 692 bp, Homo sapiens
atatgatgacttagaaaacattgacaaattctttgaaagacaaaattgtgacataaagaaatgaaaaatcagagaaagcctatatccatgaaatcaattgaattcataaataaaaacagttccacaatgaacttcaggccatgatagcttcactgactggtgaattctattaaacatgctagaagaaaacaatacccatartacataaacttttgagaaaacagaggaaaagagaacattcaccagttgattgcatggagcccaacataactctaatattaaacctgatcaagacataacaatagaaagaccaatatcttcatgaacacattgtaaacatctttaactaaaaatagattgaatcctaatttgattttgattttgattgtataatatagtggacttgaaagaaaaactaatctaggtatggatatcctgaaaatgtaggtgaatgtttttttctaatatacattgcttgaaaacatgattccaaattataatggatatttgacgctcagagaatgtgtccactgggagttgtgattccccctctctcatcagtgagatgagtttagccagtgaggttatatcaggaggataggtacaaatttactacttctactacacatttaatcaactcttacctgctactattgaagtatttgacttgggaactcttctcttgacagagc

SEQ ID NO: 924455 - DNA, 692 bp, Homo sapiens
atatgatgacttagaaaacattgacaaattctttgaaagacaaaattgtgacataaagaaatgaaaaatcagagaaagcctatatccatgaaatcaattgaattcataaataaaaacagttccacaatgaacttcaggccatgatagcttcactgactggtgaattctattaaacatgctagaagaaaacaatacccatagtacataaacttttgagaaaacagaggaaaagagaacattcaccagttgattgcatggagcccaacataactctaatattaaacctgatcaagacataacaatagaaagaccaatatcttcatgaacacattgtaaacatctttaactaaaaatagattgaatcctaatttgattttgattttgattgtataatayagtggacttgaaagaaaaactaatctaggtatggatatcctgaaaatgtaggtgaatgtttttttctaatatacattgcttgaaaacatgattccaaattataatggatatttgacgctcagagaatgtgtccactgggagttgtgattccccctctctcatcagtgagatgagtttagccagtgaggttatatcaggaggataggtacaaatttactacttctactacacatttaatcaactcttacctgctactattgaagtatttgacttgggaactcttctcttgacagagc

SEQ ID NO: 924456 - DNA, 667 bp, Homo sapiens
cttgaaaacatgattccaaattataatggatatttgacgctcagagaatgtgtccactgggagttgtgattccccctctctcatcagtgagatgagtttagccagtgaggttatatcaggaggataggtacaaatttactacttctactacacatttaatcaactcttacctgctactattgaagtatttgacttgggaactcttctcttgacagagctgagtgtaagtaatgtttgcataggatgatgatttatatctatgtagtatattcctgtagtgacaataacagcgtatacaatatcagcaaaacaatttccctaaagaaagttttgagggtaaaatgtcaaaaagtaaactccacttaaatgaagaacaaagcaggcaaaattgaattgtaatgctaagaagacttggctttctawaagggtaaatttttgtgacttgattattaagttaattcaaaggtccattacggatctgggagctagggttgtcttagctttgttttttcatcatgatgaaagttgaaattatgcttttgttaacatgagagtgataacagaagacaccctcagtgtcccaagagaaatggtcattgttatctaatattcatggttgttacaatttaaactataatattccaataagatacattttaaacatgtt

SEQ ID NO: 924457 - DNA, 667 bp, Homo sapiens
cttgaaaacatgattccaaattataatggatatttgacgctcagagaatgtgtccactgggagttgtgattccccctctctcatcagtgagatgagtttagccagtgaggttatatcaggaggataggtacaaatttactacttctactacacatttaatcaactcttacctgctactattgaagtatttgacttgggaactcttctcttgacagagctgagtgtaagtaatgtttgcataggatgatgatttatatctatgtagtatattcctgtagtgacaataacagcgtatacaatatcagcaaaacaatttccctaaagaaagttttgagggtaaaatgtcaaaaagtaaactccacttaaatgaagaacaaagcaggcaaaattgaattgtaatgctaagaagacttggctttctataagggtaaatttttgtgacttgattattaagttaattcaaaggtccattacggwtctgggagctagggttgtcttagctttgttttttcatcatgatgaaagttgaaattatgcttttgttaacatgagagtgataacagaagacaccctcagtgtcccaagagaaatggtcattgttatctaatattcatggttgttacaatttaaactataatattccaataagatacattttaaacatgtt

SEQ ID NO: 924458 - DNA, 616 bp, Homo sapiens
tattggcaaaataatagacacctagagcaatggaacagattagagagtccaaaaatagatatacaccaatatagtcaactgatctttgaaaaaggaacaaaggcaatttaatggagaaaagattgtctttacgaaaaatggtggagagggacaagacagatgactagactcagccaggaagtgctgctccctctgaaagagcwaattatcaagtaaatcaatgtaatttgggcagatcttcagagagaaaacaccaagaaaggatggagaggtgatggtgacaccaaggctgaagagggaggaagctgggaccctgtgtcaggtatccaactgctaggggtagctcccagccctgaatggtcactgaggaaggggtgagtgagggaactgagggacagcctactctgaccagagacttttgggatgtgagcttcaggggaccctattccccctatggatgtgtgagctggcagagggatctgcctgggcaatagacatagacagggcttcagcaggcacagagcgcaggagattttgtgtatggggtggcttgggcagagcacagccatggatgcccattccccagggctctgcatctccctctgagagactccaa

SEQ ID NO: 924459 - DNA, 772 bp, Homo sapiens
accacagtgtggttccaacacaattctgtggaggggttctgggattccagactaagtgaatatccatggaatgatgaaaattaaaatttacttgattatggaagtctctgattcattccagccaatgtattagatgagccactgagaatcacctcaaagcaattgctctcacggccctcgccagggcagtggggcagcaggaggacaggtggctaggccagcagctctagctcttcacctctgcggcctccttctcagtcttctcctccatcttctcttctttctccaaggtcgctacaatcttggccacctggctggtggaggcatgaacatctttgtccaccaactcaatcacattgatgaggtcattgatgttgaccttgccattcttgtcttcatccagtgctgaggccaggctggtgagcttgctttctggaatgtgcctgacttgcttcatggtgctgatgagctcagtgacactgatgatgttctcccctacgggcgcgccctaggccaggcccagcttgcaggccctggtccatctccaggtgtgagatcaagmcctcgatctgcccgatcatctgctgcaccctctgtcagtctcttggtggctttagatgctttcacatatttttcttcacctaccagtctttgagagttccttcttgatctcttgcatgttctcgctgtagtcctgcacgtcctccttcagcagctccagctcctccttctctttggtgagcgacttctgctccttcagcttagagcaggc

SEQ ID NO: 924460 - DNA, 573 bp, Homo sapiens
acctagacttctaaccatagaattgtgagatgataaatttgtgttgctacatttgtcgtaatttgttatgcatcaatagaaaactaatacaaattccatatgcatattgcccacatggcatttccagtttcaaaagcaattaaaatgaagtttcaagacctaggtatatttattgaagttttgtttatctctttccygaaaggaaaaatatctaatatatcttaaaaacatctaatggggccaggcgcggtggctcatacctgtaatcccagccctttggtaggccaaggcgggtggatcacaaagtcaggagttcaagaccagcctggccaagatggggaaaccccatctctactaaaaatacaaaaaattagccaggttggtggcaggtgcctgtaatcccagctacttgggaggctgaggcagagaattgcttgaacctgggaggtgaaggttgcagtaagccaagatcgtgccactgcactccagcctgggcgacagagcaagactctgtctcaaaacaaaaaacaaacaaacaaaaaacccaaaaaccaaataaacatctaatgatgt

SEQ ID NO: 924461 - DNA, 573 bp, Homo sapiens
acctagacttctaaccatagaattgtgagatgataaatttgtgttgctacatttgtcgtaatttgttatgcatcaatagaaaactaatacaaattccatatgcatattgcccacatggcatttccagtttcaaaagcaattaaaatgaagtttcaagacctaggtatatttattgaagttttgtttatctctttcctgaaaggaaaaatatctaatatatcttaaaaacatctaatggggccaggcgcggtggctcayacctgtaatcccagccctttggtaggccaaggcgggtggatcacaaagtcaggagttcaagaccagcctggccaagatggggaaaccccatctctactaaaaatacaaaaaattagccaggttggtggcaggtgcctgtaatcccagctacttgggaggctgaggcagagaattgcttgaacctgggaggtgaaggttgcagtaagccaagatcgtgccactgcactccagcctgggcgacagagcaagactctgtctcaaaacaaaaaacaaacaaacaaaaaacccaaaaaccaaataaacatctaatgatgt

SEQ ID NO: 924462 - DNA, 779 bp, Homo sapiens
tatatcatttaaactaatcttctctcaaataaaaaaagtacttttgtttaaaatgttttagactttgaagaacttaaatcattcattggatattatatttgattttccataatcaaagcaccattctaaaaaccattcatctttctttatcattaccctgtcctgttccccaaaatatctgtggtttggctctcaaagactgtgactgatactaaaaacaaaaatcatatatgataagtcatgtataattttttaaaaagaagtttgataagagccatataaaacttgctacaaaaagtacagtcccagaccaacagcatctacttcatctgggagctttttagacatgactttcaagccctaccttctagaactattaaatcaccatttgcattttaacaaactccccagggaagcttcaaatgcaraatcaagtttgagaagtgctgctgtaaaataactatttcaattcatttacttaaaagtttaaatctctaaatatattatcactattacagcatggacataaaatcagaaattatatatatttaattcctaactttgaaaagtatcttaagaaacacaaaagtacagctcctgtaaaaagtacatttctgggctgagacgatggggttttctagatatacaatcatgtcatctgcaaacagggacaatttgacttcctcttttcctaattgaataccctttatttccttctcctgcctgattgccctggccagaacttccaacactatgttgaataggagtggtaagagggg

SEQ ID NO: 924463 - DNA, 619 bp, Homo sapiens
  misc_feature 297: n = A,T,C or G
gttagcattatatctaatacttttgtaatttaaaagctttaacaggtcagataaagtttccagtggcaaaatgtaaattaattcataatgtttaataatgtttaaaatggctgttctgtattcccaaaaagttgatgatataaataatgtaatatacaaaaaaattttaagtaaatgattcatagcaataataaaacattcaagtttggggatgcagttaaggaagtgaagggcaaaastgtgattttcaatttgaatttgtattgcttaaatattttaaagtatttttatagtatntttgatttcatatattatttagcatattacatatatgggcaaaggatatgaacagacacttttttaaaagaagacatttatgcagcccacagacatatgaaaaaatgctcatcatcactggccatcagtagaaatgcaaatcaaaaccacgatgagataccatctcacaccagttagaatggcgatcattaaaaagtcaggaaacagcagttgctggagaggatgtggagaagtaggaacacttttacactgttggtgggactgcaaactcgtacagcaattgtggaagacagtgtggcgattcctcggggatctagaacta

SEQ ID NO: 924464 - DNA, 586 bp, Homo sapiens
ttttcatgttagcaagacaggcagtattttcttctaacagtgttggggctcagaaaaacaataccccaaaatgaaggactcagaagtggcctctgatgcaaacgtttttctctgaccttctcctgtccttctgtctcagtcccattctcccatgaagttagccrtaaaaagtagatttcctctttcccaaggtgggttgtagaaaccggaacccctttttctcaaaagccagccataaaacctatgtaaaactggccattaaaaaattatctgacctaccttgtttgattgtaggtcattagacccctgttcccagagagggtcctgttccacactcagaaggaaagaaattgtgctcagggaggccaacaggaatctagacagacaggtctgactgggtttccctattccattttttgtcattagattatatcctttttgtccaatcatatttctgcacaactccccatacttcgttgaacctaagcataaaaatagataatattccctgtgtgtttgggtcttcattgtgaagtctcccgtgtatacaccttaaataaatttgcatgccttttctccaattaat

SEQ ID NO: 924465 - DNA, 586 bp, Homo sapiens
ttttcatgttagcaagacaggcagtattttcttctaacagtgttggggctcagaaaaacaataccccaaaatgaaggactcagaagtggcctctgatgcaaacgtttttctctgaccttctcctgtccttctgtctcagtcccattctcccatgaagttagccgtaaaaagtagatttcctctttcccaaggtggrttgtagaaaccggaacccctttttctcaaaagccagccataaaacctatgtaaaactggccattaaaaaattatctgacctaccttgtttgattgtaggtcattagacccctgttcccagagagggtcctgttccacactcagaaggaaagaaattgtgctcagggaggccaacaggaatctagacagacaggtctgactgggtttccctattccattttttgtcattagattatatcctttttgtccaatcatatttctgcacaactccccatacttcgttgaacctaagcataaaaatagataatattccctgtgtgtttgggtcttcattgtgaagtctcccgtgtatacaccttaaataaatttgcatgccttttctccaattaat

SEQ ID NO: 924466 - DNA, 869 bp, Homo sapiens
caaatcaaaaaaggtaatccatcatataaacagaacgaaagacaaaaaccatatgattatctcaatagatgcagaaaaggcctttgacaaaattcaacagcccttcatgctaaaaactctaaataaagtaggtattgatgggatgcatctcaaaataataagagctatttatgacagacccacagccaatgtcctactgaatgggcaaaaactggaagcattccctttgaaaactggtacaagacaggaatgccctctctcaccactcctattcaacatagtgttggaagctctggccagggcagtcaggcaggagaaagaaataaagggtattcaattaggaaaagaggaagtcaaattgtccctgtttgcagatgacatgattgtatatttagaaaatgctattgtctcagcccaaaatctccttaagctgataaggaacttcagcaaagtctcaggatacaaagtcaatgtgcaaaaatcacaagcattcctgtacaccaataacagactaacagagagccaaatcatgagtgaaytcccattcacaactgcttcaaagagaataaaatacctaggaatccaacttacaaggcatgtgaaggatctcttcaaggagaactacaaaccactgctcaacgaaataaacaaatggaagaacattccatactcatggataggaagaaccaatatcgtgaaaatggcctaaggtaatttatagatactgcccaaggtaatctatagattcaatgccattcccatcaagctaacctatgactttcttcacagaattggaaaaaactactttaaagttcatatggaaacaaaaaagagccctcattgccaagacaatccaaagccaaaagaac

SEQ ID NO: 924467 - DNA, 603 bp, Homo sapiens
gaccaacacagcccctgttttctgtcgacaaaactaaaacttctagtttctactctggccgccctcatgcaggttacctgtgttcacccaatctcagtgtattatttggaaattgccaattatcgggagaacctgccccgatagtcacgtaggttcttttctattttccctaagtgtcggccggtctgagaaataaagggacagagtacaaaagagagaaattttaaagttgggtgtccgggggagacatcacatgttggcaggttccatgatgyccccaagcagtaaaaccatcaagtttttattagtgattttcaaaaggggagggagtgtatgaatagggtgtgggtcacagagatcacgtgcttcacaaggtaatagaatatcacaaggcaaatggaggcagggcaagaccacaggaccacaggactggggcgaaattaaaattgctaatgaagtttcaggcacgcattgtcattgataacatcttatcaggagacagggtttgagagcagacaactggtctgaccaaaatttattaggcagcaatttcccctcctaataagcctgggagtgctactggagactggggcttatttcatt

SEQ ID NO: 924468 - DNA, 775 bp, Homo sapiens
acacttattcactaccacaagaacaacagaagaaagacctgcccccatgattcaattacctcctactgagtccctcccacaacacatggaaattcaagatgagatttgggtggggagagagccagaccatatcattccacccctggtctctcccaaatctcatgccctcacatttcaaaaccaatcataccaccccaacagtcccccaaagtcttaactcatttcatcactaactcaaaagtccacaattcaaagtctcatccaagacagggcaagtctattttgcctatgagcacgtaaaatcaaaagcaagttagttacttcctagattcaatggtggtataggcattgggtaaatatagccatttcaaatgtgagaaattggccaaaacaaagggattacaggccccragcaagtctgaaatccagcagggcaggcaaatcttaaagaacaaatgatttccttttattgcatgtctcacatttgggtcatgctgatgcaagtggtgggttcccattgtcttgggcagctccacctctgtgactttgaaggatatagcccctcctggctgatttcacaagctggcatggagtgtctgtggcttttccaggtgcacggtgcaagctgttggtggatctgccgtattctgggagctggaaaatggtggccctcttctcacagctccactagtcagtgtcccagtagggactctgcatgggggcttcaaccccacatttccctttaacactccctaacaaaggttcttcatgaggg

SEQ ID NO: 924469 - DNA, 646 bp, Homo sapiens
tacattctgtgctgtatttctcatcttttagtatcttattacaataaattataaaatttcttttgatactattttttatttagctatatacaatctgctgctatattgatttcaattactgtattttttagtctagagtacctagttggttaattttctaatatgttgtgctaatttttatcaatttttagtttctcctaaaatattcatgcttaggttttttcttcttgacatgttgtgcatagttactttttatactggaacaattktatttttagtatcttggcttcccattagttgttttaaatgtttgttgttttcacttattcttgcttattttacctaatcttacatgtgtcaggttacctatgaatttaatctggtcatttgcttaaaatatattaatacttgtcatgatttgacgactaagatgaatttactcttatttgcatttttatggcacctcaagtcagccacaatttaagatgccttaatgcaggtgtagaagcactcagattattcattggaggctgggcgcagtggctcactcctgtattcccagcactttggaagtccaaggtgggtggatcatgaggtcaagagattgagaccttcctggccaacatggtgaaaccccatctctact

SEQ ID NO: 924470 - DNA, 568 bp, Homo sapiens
tcgtggatgtcggaggacagtgggacggcgcattcaaaatgctgaaagaaaaccactgtcaaccaagaattctatatctagtaaaactcatctttagagatgaagaaacaaagctgtgctcagataaacaagacacacagaatttgttgccaacagacctgacctacaggacatattaaagggagtccttcaggctgaggtaagaagcactggtgagagtaattacataggtgaattaaaaagacagcacaaacatgttttaaacttttcttctctgaactgatgtaaaaggaaactscataagacacgattgcaaacctgtgctgataacaatgtgcttataacaatttgtgtgacagtagcacaaaggaaggggtggggaaggaagttacagcaaagcaaagtctttacatattattagaactcagtattcatctgaaatagactgttttgactaagatgcttgttgtaatctccagaggaaccactaagaaaatatatatgtgtgtgagtgtgtcacacacacacataaaatgtcaaaaaatgcacttaaatgatacactagaaa

SEQ ID NO: 924471 - DNA, 607 bp, Homo sapiens
tccagcctaggaggcagagcaagactctgtctcccaaaaaaaaaaaaaaaaaaaaaaaacttttgcacagcaaaagaaacaatcagcagagtaagcagagaacccacagagtaggacaaaaatctttgcaatctataacacccaaaaaaggactaatatgcagaatctaccaggaagtcaaacaaatcagcaagaacaaaacaaacaatcccatcaaaaaaactgggcaaaggacatgaatagacaattctcaaaagaagatatacaaatggccaacaaacatattaaaaaatgcttaatatcactaattatcagggaaatgcatatcaaaactgtaatgtgataccactttactcccgcaagaatggccataatcaaaaaataaaaaataatagatgttggtgtggatgtggtgaaaagggaccacttttacacatttgtgggaaggtaaaccagtacaaycactatggaaaacagtgtggagattccttaaagaactaaaagtagagctaccatttgatccagcaatcccactacagggtacctacgcagaggaaatgaagtcattatacaaaaaagatacttgcacatgcatgtttatagcagc

SEQ ID NO: 924472 - DNA, 645 bp, Homo sapiens
gggtagagaataagtcttacttgtctttgcctactgtgtacaaggcattgggccaagttgtggaggacagaatgcttattggttgagtgagtgaatgaatgtatacttataccaatatttattgagcaggtactgtgggccaggcctagttttagatgctgaggttacagcaatgaacagtgtatcctcaaggaccttgcattgtagtgaggggagatagacaataaataagaaacatgtattcgtggaagaatttgtgataagtctggaggtgacatgataatacatggggaggcaggagawaggaaggtcagccaaggcccctttgagaagcaatgtgtggactttgacttgaggaatgtcaaggaagtagctttccttagggccagaggaagaacactcaaggcagagaggaaagccagtgcaaagtcccaaagccagaaaggaggcccgtgtggttagagcccagtgatggcatgaaatgaggaagcagaggtaggcagggggatccgtgatgctaggcattgtagaccatagaaaggagatgggcttattctaaatgcaatggggcatctactgaagggctgtaaacagggcatagacatgacacgatggttactgcatggagaagatatgcggggagtc

SEQ ID NO: 924473 - DNA, 579 bp, Homo sapiens
ggaagcagcaactctacaaagaattctcgatgtacttgtgaccgatattttatccacatattcagccatttatccaataagcatttcttgaattctattgcacactggcctaggtgctggatgtacagttagacacatctatgtcctcaaaaaaaagaagtccacagggacttacgtggacaagtgaagcaggtagttacagtgcagagtgacaagtgccaaacaaagcacatctacacttgggtgccctgaaaatgcagaggactctgaaaccacttctatttaaaattatcttccctgaaagggtttgatgtgtagtggcttacagacggctgcccattctgtgctatcctcccatctacagggggacmgttgagtcctggctggcactcagacttgtttgggccaatccagtgtggatgaagggatcctgtgtgatttgagactgggcctcatgggatctgcaacttctgttttcgtgtgcttgggactctttctcttggaaatcaacagccaagtaagaagtccaccctgccggaggaaaggccgcatagagggaggcctgaaccagtgtttgat

SEQ ID NO: 924474 - DNA, 697 bp, Homo sapiens
actgaaacctggaattagaattaggcagtgggtggctagatcagtcctcaagcgctggcacaggtgattttcctttatctgtaacttgtggccaagcctaaattatcgccttgttcagggttgttgtatctcctttactgttgcctctggcatgcaaagcatttgcagttcgcctccttgaagctatcatgtaaatacggtcaggcatagtgtacatttttaaccaagtctgtttatsaagcttctgtggtttgcatgtaacctcaccacatattcaggtcataaacaattaggtctccaatactattacctaagaacaccctagaaatataatgaactaattggtaaggcaaaaaaaaaattctagttttggtaaaggccaagttaggtactcaggttgtcctctccattggagctgtgtatcttgctcttaaaaaaaagaaaaagaaaaaaaagaaaaagaaaaaaaaaaaaaggccaggtgcggtggctcacgcctctaattccagcactttgggaggccgagacaggcagatcacctgaggtcaggagttctagaccagcctgacaaacatggagaaaccccatctctactaaaaatacaaaattagccaggcatggtggcgcatgcctgtaatcccagctactcaggaggctgaggcaggagaatcacttgaacctgggaggcagaggttgc

SEQ ID NO: 924475 - DNA, 695 bp, Homo sapiens
agaatatttctcagtagaaactgcactccaagaaagagtgagctgctatatccaatgtggtgaaaaaaaaaaaaaaaactgacaaacaagaatactatgcttggcaaagctgttcttcagaaatggaggaaagataaagattgtctctaaaagaaatgctgaggaagtttgacatcactagaccttccttacaaaaagtgctgaaggaagttcttcaaggtataataaaagatgctaattattagtgtaaaaacctatgggagtattargttcactgatacaagtatatagtcatactcagaataatcatcaggatattgtaatcctgtaatgatattgtaaggatggtgtgtaaaccacttttaactatagtatacaagttaaaagacaaaagtatttttaaaagactatagcaacaataatatattacatgacacacaatataaatagatgtaaattgtgacattaataagataaagtttttggagggggagaattaaaagtgtagagttttttatgtgattgaaaagaagcttattttcaaattaaaacagatatttataactacaatatgttttatgtaagcctcatagtaaccaaaaaataattttttagcagatggcaagatggccaaatagtaacagctcccatctgcagctcccagtgagatcaacacagaaagtgggtgatttctg

SEQ ID NO: 924476 - DNA, 695 bp, Homo sapiens
agaatatttctcagtagaaactgcactccaagaaagagtgagctgctatatccaatgtggtgaaaaaaaaaaaaaaaactgacaaacaagaatactatgcttggcaaagctgttcttcagaaatggaggaaagataaagattgtctctaaaagaaatgctgaggaagtttgacatcactagaccttccttacaaaaagtgctgaaggaagttcttcaaggtataataaaagatgctaattattagtgtaaaaacctatgggagtattaggttcactgatacaagtatatagtcatactcagaataatcatcaggatattgtaatcctgtaatgatattgtaaggatggtgtgtaaaccacttttaactatagtatacaagttaaaagacaaaagtatttttaaaagactatagcaacaatawtatattacatgacacacaatataaatagatgtaaattgtgacattaataagataaagtttttggagggggagaattaaaagtgtagagttttttatgtgattgaaaagaagcttattttcaaattaaaacagatatttataactacaatatgttttatgtaagcctcatagtaaccaaaaaataattttttagcagatggcaagatggccaaatagtaacagctcccatctgcagctcccagtgagatcaacacagaaagtgggtgatttctg

SEQ ID NO: 924477 - DNA, 695 bp, Homo sapiens
agaatatttctcagtagaaactgcactccaagaaagagtgagctgctatatccaatgtggtgaaaaaaaaaaaaaaaactgacaaacaagaatactatgcttggcaaagctgttcttcagaaatggaggaaagataaagattgtctctaaaagaaatgctgaggaagtttgacatcactagaccttccttacaaaaagtgctgaaggaagttcttcaaggtataataaaagatgctaattattagtgtaaaaacctatgggagtattaggttcactgatacaagtatatagtcatactcagaataatcatcaggatattgtaatcctgtaatgatattgtaaggatggtgtgtaaaccacttttaactatagtatacaagttaaaagacaaaagtatttttaaaagactatagcaacaataatatattacatgacacacartataaatagatgtaaattgtgacattaataagataaagtttttggagggggagaattaaaagtgtagagttttttatgtgattgaaaagaagcttattttcaaattaaaacagatatttataactacaatatgttttatgtaagcctcatagtaaccaaaaaataattttttagcagatggcaagatggccaaatagtaacagctcccatctgcagctcccagtgagatcaacacagaaagtgggtgatttctg

SEQ ID NO: 924478 - DNA, 561 bp, Homo sapiens
gctgaagccagggagcaaagtggtctagctcagtggatcccaccaacatggagcccagcaagctaagattcactgacttgaaattctcgctgccagcaaagcagtctgaagtaacctgggatgcttgagcttggtagggaaaggtttgtccaccattactgaggcttgagtaggcagttttcccctctaactgtaaacaaagccattgggaagtttgaactgggaggagcccaccacagcttggcaaaactgctgtagccagactgcctctctagattcctcctctcttggcagggcatctctgaaagaaaggcagcagccccagtcaggggcttatagataaaactcccatctytcagggacagagcacctgggggaaggggaagctgtgggcacaccttcaacagactaaaacattcctgcctgctggctctgaagagagcagtggatctcccagcatagcgctcatgctctgctaagggacagactgcctcctcaagtgggtccctgacctccatgcctcctgactgggagacacctcccagcaggtgttgacagata

SEQ ID NO: 924479 - DNA, 561 bp, Homo sapiens
gctgaagccagggagcaaagtggtctagctcagtggatcccaccaacatggagcccagcaagctaagattcactgacttgaaattctcgctgccagcaaagcagtctgaagtaacctgggatgcttgagcttggtagggaaaggtttgtccaccattactgaggcttgagtaggcagttttcccctctaactgtaaacaaagccattgggaagtttgaactgggaggagcccaccacagcttggcaaaactgctgtagccagactgcctctctagattcctcctctcttggcagggcatctctgaaagaaaggcagcagccccagtcaggggcttatagataaaactcccatctttcagggacagagcacctgggggaaggggaagctgtgggcacaccttcaacagactaaaacattcctgcctsctggctctgaagagagcagtggatctcccagcatagcgctcatgctctgctaagggacagactgcctcctcaagtgggtccctgacctccatgcctcctgactgggagacacctcccagcaggtgttgacagata

SEQ ID NO: 924480 - DNA, 670 bp, Homo sapiens
acttatgcaaatgtctgcaacaggcttgaatttctttccagaaaataggtttttcttttctatcccatcttcaggctgcaaattttccaaacttttatgttctgcttcctcttgaatgctttgctgcttggaaacttcttctgccagataccctaaatcatctctctcaagttcctagttccacagatctctagtgaaggggcaaaattctaccagtctctttgctaaagcataacaagaatcacctttattccagttcccaataattttctcatctccatctgagatcacctcagcttggactttattgtccatatcactatcaacattttggtcaaagttattcaacaagattttaggaagttccraactttcccacgttttcctatcttcttctgagccctccaaactgttctaacctctccctgttacccagctccaaagtcacttctacattttcaggcatctttatagcagcaccccactctctgtggtaccaatttactgtattagtccattctcatgctgctataaagaaatacctgaggatgggcatgatggctcatgcctataatcccagcattttgggaggccgaggtgagtggattacttgaggccaggagtttgagaccagcctggccaacatagccagtttctactaaaaacacac

SEQ ID NO: 924481 - DNA, 618 bp, Homo sapiens
ccttgaagttatctactgttttctgttttcaagaagctcaaagtttaactgcatttaattaaaaaaaaaaaaaaagaaggaagaaaggaaacaaaaaggcaaagaaggaaacagaatgctcatattacctttattccactgtttgttttcccacatcaaaaggaatagttggtaaaaaataatacgaactttaatttaaaaaacatatacataggtaaaaacacattaaatcctctgatgaaatcctttagggcatcaactgtgttacctctaagatactgaaatctctcctccttgtttaatcagaggtcarttccttttgaatgaatatgtcctaaatatatgctgaaattttttagtttttgttcattgctattccaaatactgtttcctatgtggttggttagtctctggaactcaaatacaagaaagttcaaataagagagctcaaataagatgttattaattaagcaaattaagtagatgatctcaaactaatagctgacattctcatcagtggattctcttgtaagtggaatatataatagaaatgttcaattagaacctttatgagaaaatctggctggatttctccagataatggctggaaagatgagg

SEQ ID NO: 924482 - DNA, 840 bp, Homo sapiens
tatttactgagagttcattttttgaaatagatttatggagatacaatttacatatctcaaaattcacttatttaacacataatgtttttcagtatatttacaaagttgtacaaccattataataatctaatttttagaacattttcatcatccgcaaagaaaaccttgtacccgtagtagtcaccttctatttcccctacagccagctttctgtgtctacagatctgcccattctagacatttcacatgaataggtatcatataatgtgtaatatttcgtgacttcaactaagagaatttttttttttttttttgasatggagtctcactctgtcgcccaggctggagtgcagtggcgcgatctcagctcattgcaagctccgcctcccgggtttccgccattctcctgcctcagcctcccaagtagctgggactacaggcgcccgccagcacgcccggctaattttctttgtattttttagtacagacggggtttcacagtgttagccaggatggtctcgatatcctgacttcgtgatccgcccgccttggcctcccaaagtgctgggattacaggcgtgagccaccgtgcctggccaagaataatttctttatccaaaaaaatatagcttcacctgaaaaaaaaaagtaaatatggttaaaaacaataaatttcacttaaaagaatgtccagaagtttctggaaaagaacatccaataaatgttaataaaataaaaaatctaataaatgttaataaagagaagtgtaatgattaataaaatgtctaccaaaccagtacctagaaacatagtccataaaatatttatactttccctaaa

SEQ ID NO: 924483 - DNA, 679 bp, Homo sapiens
attattttaaagtttttagagtgtaagtcttgcatttctttttaaaaaaatttttcctgagcactttttcatgctattatgaattgaattgttttcttaattttacgttttcctgtctcaaagacaaaacataccagaatctctgaaaagcagtgttcagagggaaatttatagcactaaatgcccacaggagaaagcgggaaagatctaaaatcaatgccctaacaccaaaattaaaagaactagagaagcaagagcaaacaaattcaaaagctagcagaagacaagaaataactaagatcagagcagaattgaaggagacagagacatgaaaaatccttcaaaaaatcaatgaatctgggagccgattttttgaaaagattaacaaaatagatygctagccagaataataaagaagaaaagagagaagaatcaaatagacacaataaaaaatgataaaggggatatcaccactgatcctacagaaacacaaactaccatgagagaatactataaacacctctacacaaataaactagaacatctagaagaaatagataaatcctggttgcatacaccctcccaagactaaaccaggaagaagttgaatccctgaatcggccaataaattctgaaattgggcagtaattaatagtctgccagccaaaaaaaccccagg

SEQ ID NO: 924484 - DNA, 584 bp, Homo sapiens
gctgaattacagacatgtttatagaaaactgtctcacttattaagaactaaagggtaacagaaaaatttaaataacttgctagacttaggggagataagaatttcagcagtgctgactccatgttagacgtgagggtgggggcaagatctgaagaggtaaactggggtgagaagtacagccgccccctcatttcccacagtcagccccagaccaccaaaggcagcagactcatgggtgtgcaggtgtgtgggattgagcagtgcttccaggtgagggtgccatcttcttccgcagcagacccattatccctcytgcacccttatcccaaaatggggcatctctacctcctttctggagagggatggacctccagcaattgtaacctacaaggccatgacagtcatgggaagcatatctagaggaagatccttagtacagatttgcaacctgggggcatctacttacctaaggtgggacaatcattttttgtttttgagacagggtctccgctgtcgcccaggctagactacagttgcctgatcactgcagcctcaacctcccaggcccaagcgatccttccacc

SEQ ID NO: 924485 - DNA, 586 bp, Homo sapiens
tgggttaaatgcctggggttgaaattgctgagttgtatggtagtcgtatatttaatttttttagaaaattgccaaactgatttccagcatggttgtgccattttacattccctccagcaatggatgagtgatccagtttctttgctgcaccagagtagatcttctgccctatgaaggctgagcaggggaagggacacctggtcccctctgacgcacttgtctgtcacagagcctctgcaacaagggctggggagggagagagaaacactggcagcctcccctcctggggttaaactgggagaccagactgggcgctccaggagagggggccccggtctccttgtctgttacttgcatggcgttatcattcctgaggtagaacttccagaacatgaagctggggcaagkggtaaagaaggttgttcctgtctcacatgccatagactctccttgttcttgctaagatttagtagatttccttgaatgaatgtctctttgtttgctgtgtccccttgggacaattctcagaaatttttagtttttttttttttttataattttcatcaaattgttgtttgctgcggag

SEQ ID NO: 924486 - DNA, 729 bp, Homo sapiens
tatgagagaaagggaggagtaagggacaagcgataggttagagaagtcagcagaagttagatcacaaacaattttgtgggaaataattagcaattttaacttttctctgaatgaatgggaaatcaatcatttaaatacttcagagaataacagggtaagtttacatttcataattagtctggctggagagtagaaaatggataaaagactagaaaagctgggggaaagaacaccagggaaaagaataccataataatctagaaatagcatgatagtcacttgaaataggaaagaagcagggatatgcgaggcaagtgaatcccctttaagaggtaacgctgataagatctgggaacaatgtgaggtcaaagataacagacactagatttttggcctgatcsaagctaaatggatagtggaaacaatcactgaatctaaaaccaaaggaaatgaagcagatttggagcaataggggaaaaaagaatgtagttgtagatatgttatcattaagtatctgcagtacatccaagtagagatgcccagtaggtagctggatatgtgagccagaagctcaaatgcaagctctcagatggataaaatggaaggcatcaacatacaaatgataaagtcctggaaaagatacaaaaccaagatggcaaatgcatttaaaaaaaaaaaagtaaggaacatttccatttggcagaagaagagaaggcagcaaaggagcct

SEQ ID NO: 924487 - DNA, 656 bp, Homo sapiens
ttcctcatcctgtaacagtcttcccccaggtacccacgtgacttgatctatcacctcctcagatctttgcttaaatgtaaacttttcagtgatgacttccctaagcatcctacttagaactgcaacttttatcctcatcttggctctccttagcaatctttcccgctcatttttctccaaagaatttgtcaatatcagacacacaacatattttaattatttgctttgyctctttcactagaaatatacctttctggagaggtaaatatttgtttgtttctttatatcactattgcaccttcagggcctatagaacctcataagaactcaataaatatttatttagggaggagccaagatggccgaataggaatagctcctgtctacagctcccagcgtgagcgacgcagaagatgggtgatttctgcatttccatctgaggtactgggttcatctcactagggagtgccagacagtgggcgcaggtcagtgggtgtgtgcaccgtgcgcgagccgaagcagggcaaggcattgcctcacttgggaagcgcaaggggtcagggagttccctttcccagtcaaagaaaggggtgacggacacacctggaaaatcgggtcactcccacccgattactgcgcttttccgaccagcttaa

SEQ ID NO: 924488 - DNA, 723 bp, Homo sapiens
atttctactcagaaaatgtgattttcttttttattgtattgtcaggctgcaaattttctgaacttttatgctcgtttcccttttaaaactgaatgcctttaataacatccaagtcacctctcgaatgctttgctgtctagaaatttcttacgccagataccttaaatcatctctctcaagttctaagttcctcaaatctctagggcaggggcaaaatgctgccagtctttttgctaaaacataacaagagttctasttttcaacaagttcctcatttccatctgagtccacctcagcctggaccttattgtccatatcattatcagcattttggtcaaaaccattcaacaagtctctaggaagttcaaaacttttctgcattttcctgccttcttctgagctctccaaactgttccagcctctgcctgttacccagttccaaagtcacttccacattttggggtaccttttcagtagcactccactcccagtaccaatttactgtattagtccattttcacactgctgataaagacacccaagactgggcaatttacaaaagagaggggtttaatggacttacagttccacatggttggggagacctcacaatcaaggcagaaggcaaggaggagcaagtcacatcttacatggatggcagcaggcaaagagagagagagcttgtgaagggaaaccagtttttaaaactatcagatctcatga

SEQ ID NO: 924489 - DNA, 723 bp, Homo sapiens
atttctactcagaaaatgtgattttcttttttattgtattgtcaggctgcaaattttctgaacttttatgctcgtttcccttttaaaactgaatgcctttaataacatccaagtcacctctcgaatgctttgctgtctagaaatttcttacgccagataccttaaatcatctctctcaagttctaagttcctcaaatctctagggcaggggcaaaatgctgccagtctttttgctaaaacataacaagagttctacttttcaacaarttcctcatttccatctgagtccacctcagcctggaccttattgtccatatcattatcagcattttggtcaaaaccattcaacaagtctctaggaagttcaaaacttttctgcattttcctgccttcttctgagctctccaaactgttccagcctctgcctgttacccagttccaaagtcacttccacattttggggtaccttttcagtagcactccactcccagtaccaatttactgtattagtccattttcacactgctgataaagacacccaagactgggcaatttacaaaagagaggggtttaatggacttacagttccacatggttggggagacctcacaatcaaggcagaaggcaaggaggagcaagtcacatcttacatggatggcagcaggcaaagagagagagagcttgtgaagggaaaccagtttttaaaactatcagatctcatga

SEQ ID NO: 924490 - DNA, 606 bp, Homo sapiens
tctctacctaggaaatcagaattattacaggagaagtgtgggaactatattttaaaaaaatggctggctaggcacggtggttcacacctgtaaccccagcactttgggaagccaaggggtgggggggtggatcacctgaggtcaggagttcaagaccagcctgggcaacatggtgaaacactgtctctactaaaaatacaaaaattagctgggcacagtggcgtgtgcctgtaatcctagctacttgggaggctgaggcaggagaattgcttgaaactgggagatgcaggttgcagtgagccaagattacgccattacatccagtctgggcaacagagcaagactccgtctcaaacaaacaaacaaacaaacaaacaaaatggcccacagtgattctgargcagccaggtcctggtgcacagactggcattttctaaaaactaatggctatttcaagttgctccacaaagttttggggctcccttttgtggtacagcaccctgtcacttgctagagcactcaagcaggcacttgtacaggtgctgcagggagctccttactcaagggtggggctgccagtgatctcacagatgtcctctgactttg

SEQ ID NO: 924491 - DNA, 765 bp, Homo sapiens
cccagttttgggtatgtctttatcagcagcgttaaaatgaactaataccataaattagtaccaggagtaggtgttgctgaaaagatacccaaaaatgtggaagcgactttggaactgggtaacaggcagaggctggaacactttggagggctcagaagaagacagaaaaatgtgagaaagtttggagcctcctagagacttgttgaatggctttgacaaaaatgctgatagtgatatgaacaataaggtccaggctgaggtggtctcagatgaggacaaggaacttgttgggaactggagcaaaggtgactcttattatgttttagcaaagagactggtggcatacttcccctgccctagagatttgtggaactttgaacttgagagagatgatttagggtatctgggggaagaaacttctaagcagcaaagcactcaaaaggtgacttgggtgctattaagagcattctgttttaaaagggaaacggagcataaawgttcagaaaatttacagcctgatgatgcagtagaaaagaaaaacccatttttttgagaagaaattcaagctggctgccagaatttgcataagtagcaaggagcctaatgttaatccccaagaccacggggaaaatgtctccagaccatgtcagagaccttcacggcagcccctcccatcacaggcctggaagcccaggaggaaaaagtggttttgtgggtcaggcccagggtccccatgctgcgtgcagcctaggaacttggtgacct

SEQ ID NO: 924492 - DNA, 738 bp, Homo sapiens
gctgcacacacaaactcctctcttcctggtaacttatgggaaattcacttatatggcacatgaacttatcagtgcatcagccttgttaggtgactggtacaggattatatgtgaaaatagtggggagtaaaaacaaacaaaaaaggaaagtagtggggaggagggaaggaagaaaagaggaagccagggaaagaaaagtcagttgtaggcaaagcaccgttctaagaaaacataaatccagtccctatattcaaggaacttatctcctagaatgggaaactaagcatttcagcaagctaacaatcaacagaggacaaatcaaataatcaggaggtaacaatagaaaccactgacaaaatatctagtctgtgctagacagcagacctgatgctttaaataggtcatgtatactcctcacaaaaaccccatgagacaggtatgatgaccccactttacagatggtaccgatgtaccataaagtgtggccatttgttcrcagtgatacagctagaaaaaggcagagccagaggtaaaacccagctttatgtgactcctaagtccatttatttatttttcttttttatttatgttattatttttagaaacagagtcctgctctgtcccccaggctggagtgcagtggcacagcatggcttactgtcatctaaaactactgggctctagtgatcctcctgcctcagcctcctgggtagctgggactacaggtgtgtgccatta

SEQ ID NO: 924493 - DNA, 616 bp, Homo sapiens
tattattatttgagatggagccttgctctgttgcccaggctggagtttagtggcgtgatcttggctcactgcagcctccgcctcccaggttcaagagattctcctgcctcagcctcccgagcatttgggattacaggcacctgccaccacgtccagctagtttttgtatttttagtagagatggggtttcgccatgttggctaggctggtcttgaacttctggcctcaaatgatctgacggtctcggcctcccaaagtgctgggattataggtgtgarccactgtgcctggccagctttctgtgaatttcttctacaaatttacctattctgaatagttcatataaattgaatcatataatgtgtggtcttttgtgcctggcttctttcactcaggatagtgttttctttttcttttatttatttacttatttcattgcttttttttttttttttttttgagatggagtcttgccctgtcacccagactggagtgcactggtgcaatctcagttcactgcagcctccgccacctgggttccagtgattctcctgcctcagcctcctgagtagctgggattacaggcatgagtcaccacatctggctaatttttgta

SEQ ID NO: 924494 - DNA, 621 bp, Homo sapiens
gtgaatttcttctacaaatttacctattctgaatagttcatataaattgaatcatataatgtgtggtcttttgtgcctggcttctttcactcaggatagtgttttctttttcttttatttatttacttatttcattgcttttttttttttttttttttgagatggagtcttgccctgtcacccagactggagtgcactggtgcaatctcagttcactgcagcctccgccacctgggttccagtgattctcctgcctcagcctcctgagtagctgggattacaggcatgagtcaccacatctggctaatttttgtatttttagtaagatgggatttcaccatgttgtctaggctggtctcgaactcctgacctcaggtgatccacccacttcggccttccaaagtgctgggattacagacgtgagtcaccacgcctggcctttcttgctctttttttctwcccccaaatcagaggtcaagcacagagttttcaaggttcacctatgttgtagcatacattagtattttgtttgttttagagtcaggatttcattctgttgctcaggctggagtcagaggcaggatcatagctcactgtggcctgaaactcctggactcaagt

SEQ ID NO: 924495 - DNA, 721 bp, Homo sapiens
gggttataaatctcatttgattcttcataacctacggattgggagccattatctctcttttatagatggtaaaactgaggctcaaataatttgagatttacccttggttagtgatgattcattcagcaaatcctttgagtacctgtgatgtgccagacactgctctaggggcaggggatacatttgtgaagaagaacagtcctgcccacttctcctactgtaattggtatgggagtaggcaggggagattaatatcataaagtaaatttagaaagaatttcaaggggccgggcgctgtggctcacgcctgtaatcctagcactttgggaggccgaggcgggtggatcacaaggtcgggagatcgagaccatcctggctaacacggtgaaaccccgtctctactaaaaatgcaaaaaatgagccaggcatggtggtgggcgcctktagtcccacctactcaggaggctgaggcaggagaatggcgtgaacccagaaggtggagcttgcagtgagccgagatcgcgccactgcactccagcctgggtgatggagcgagactccatctcagaaaaaaaaaaaaaaaaaagacaaaaaagaaaggatttcagattatggcaatagaaacagctaagtcctttgagttctcactgtattcccataacaggtataagtgcttaacacacacgcgatcatctaatccttgcaagaactttgtccagta

SEQ ID NO: 924496 - DNA, 721 bp, Homo sapiens
gggttataaatctcatttgattcttcataacctacggattgggagccattatctctcttttatagatggtaaaactgaggctcaaataatttgagatttacccttggttagtgatgattcattcagcaaatcctttgagtacctgtgatgtgccagacactgctctaggggcaggggatacatttgtgaagaagaacagtcctgcccacttctcctactgtaattggtatgggagtaggcaggggagattaatatcataaagtaaatttagaaagaatttcaaggggccgggcgctgtggctcacgcctgtaatcctagcactttgggaggccgaggcgggtggatcacaaggtcgggagatcgagaccatcctggctaacacggtgaaaccccgtctctactaaaaatgcaaaaaatgagccaggcatggtggtgggcgcctgtagtcccacctactcaggaggctgaggcaggagaatggcgtgaacccagaaggtggagcttgcagtgagccgagatcgcgccactgcactccagcctgggtgwtggagcgagactccatctcagaaaaaaaaaaaaaaaaaagacaaaaaagaaaggatttcagattatggcaatagaaacagctaagtcctttgagttctcactgtattcccataacaggtataagtgcttaacacacacgcgatcatctaatccttgcaagaactttgtccagta

SEQ ID NO: 924497 - DNA, 555 bp, Homo sapiens
tgcgtccgtcacccctttctttcactcggaaagggaactccctgaccccttgcgcttcccaggtgaggcaatgcctcgccctgcttccgctcgcgcacggtgcacgcacccactggcctgcgcccactgtctggcgctccctagtgagatgaacccggtacctcagatggaaatgcagaaatcamccgtcttctgcgtcgctcacgctgggagctgtagaccggagctgttcctattcggccatcttggctcctcctccgagagctttttttttaatttaaaaatcacaacacttgagaatttcaattaatcccataattaagaaatgcctactccatgtaggtgctcaataggtattcttgtaaaccaggacactggttttcatgattgcattttgctatgttcataatcaatccctgtattccacaggaccctgggaaattatttgataactaggtcactttttctttttgtaaagggttgaattgtgtccccctgccagattgatgaagtcctaaccccctatccctcagtaattcagaacatggccttgtg

SEQ ID NO: 924498 - DNA, 573 bp, Homo sapiens
aaagggttgaattgtgtccccctgccagattgatgaagtcctaaccccctatccctcagtaattcagaacatggccttgtggccttatttgcagattgacaaactggttgttgcagatgtaattaatcaagttaaaatgagatcattatggtgggccctaaaccaatgtaagtggtatccttataaaaaggggaaatttggctgggtgtggtgcctcgcacctgtaatcctagctcctacggaggctgaggtgggaggatcgcttgaggccaggggtcagaaaccagcctgggcgacacagtgagaccctgtctctaaaaaagttttctgaaaacccagctggacacrgtggcgtgcacctgtagtcccagctacttaggaagctgggtcgggaggatctcttgagcccaggagttcaagactgcagtgagctatgattttgctactgcactccagcctaggagcctgggtgacagagtgagagactccatccctttaaaaaataaaataaaaagataaatttagacacagagacacataggaggaataccatgtgaagatgaaggcagaaat

SEQ ID NO: 924499 - DNA, 615 bp, Homo sapiens
tgcacctgtagtcccagctacttaggaagctgggtcgggaggatctcttgagcccaggagttcaagactgcagtgagctatgattttgctactgcactccagcctaggagcctgggtgacagagtgagagactccatccctttaaaaaataaaataaaaagataaatttagacacagagacacataggaggaataccatgtgaagatgaaggcagaaattgggatgttatgttgtctacaagccaaggaacagcaaagattgccagctaaaccaccagaagcttccagagaggcctggaacagaytctacctcacagctttcagaaggaaccaaccttgccaacatcttgaccttggacttagcctccagaactttgaggcaatatatttaagccacccagtctgcagtactttgttacagcagctctagcaaactaatacacttggtgaccctgacctggtaatcaatgccttgagcaattataatatcctataaaaaagagaaaaaattataatattctatacaaagaaaagaaatcacagggttactcttgtgtatatgtcagaaccatgactgctatggtttgaatgtttgtgtccctccaaaattcatgt

SEQ ID NO: 924500 - DNA, 679 bp, Homo sapiens
ttttcattgaatgaagtttaatttaaagaaacatttttaacattctgtatataagttggagaccagtaattccccaacccagtgtgcattaaaatcatctgtgcaggtttttttgtttttttgttttttgtttttgtatttttagtagagacagggtttcaccatgttggacggttggacaggctggtcttaaactcctatcctcaagtgatcacccgcctagacctggcaaaatgctaggaatacaggcatgagccactgcacctgtccccttggtgcagtttttaaaaaacacaaatataaatatgttttttttttttttctttttttttaacctacaaatgttactcmataggtttgtggtagttcttgggacttgggaattagtgattctaagtgccgagtctcccgggcgcaggcatcagagctgggccttggaggccgctccttgtgcctgctgtgcgggctgctagcctggctctcctctgctttctgctgtccatgttttggcatcagtgacttgcttggtttccccctttgctcttatgtctttatttttttactgatgactcacatgtttttgcggttctttttcacccgttcattctcatccaactggaatgggtagaggtggaactgtttgggggagccccggtcatgctgtccctgcctctgctgt

SEQ ID NO: 924501 - DNA, 611 bp, Homo sapiens
gtcctgactgttagaaggaaaaataagaaacagaaaggacatccacaccaaaaccccatctgtacgtcaccatcatcaaagaccaaaggtaaataaaaccacaaagatggggagaaaccagagcagagaagctgaaattctaaaaatcagaatgcctcttctcctccaaaggaacgtagctcctcaccagcaayggaacaaagctggatggagaatgactttgttgagttgagagaagaagactttagatgactggtaataagaaacttctctgaactaaaggaggatgtacgaatccattgcaaagaagctaaaaaccttgaaaaaatattagacgaatggctaactagaataaacagtgtagagaagaccttaaatgaactcatggagctgaaaaccatggcacgagaactacgtgaagcatgcacaagctttagtagctgatttgatcaagtggaagaaggagtatcagtgattgaagatcaaatgaatgaaatgaagtgagaagagaagtttagagaaaaaagagtaaaaagaaacaaacaaagcctccaagaaatatgggactatgtgaaaagaccaaatctatgtctgattgatgtacctgaaag

SEQ ID NO: 924502 - DNA, 611 bp, Homo sapiens
gtcctgactgttagaaggaaaaataagaaacagaaaggacatccacaccaaaaccccatctgtacgtcaccatcatcaaagaccaaaggtaaataaaaccacaaagatggggagaaaccagagcagagaagctgaaattctaaaaatcagaatgcctcttctcctccaaaggaacgtagctcctcaccagcaacggaacaaagctggatggagaatgactttgttgagttgagagaagaagactttagatgactggtaataagaaacttctcygaactaaaggaggatgtacgaatccattgcaaagaagctaaaaaccttgaaaaaatattagacgaatggctaactagaataaacagtgtagagaagaccttaaatgaactcatggagctgaaaaccatggcacgagaactacgtgaagcatgcacaagctttagtagctgatttgatcaagtggaagaaggagtatcagtgattgaagatcaaatgaatgaaatgaagtgagaagagaagtttagagaaaaaagagtaaaaagaaacaaacaaagcctccaagaaatatgggactatgtgaaaagaccaaatctatgtctgattgatgtacctgaaag

SEQ ID NO: 924503 - DNA, 611 bp, Homo sapiens
gtcctgactgttagaaggaaaaataagaaacagaaaggacatccacaccaaaaccccatctgtacgtcaccatcatcaaagaccaaaggtaaataaaaccacaaagatggggagaaaccagagcagagaagctgaaattctaaaaatcagaatgcctcttctcctccaaaggaacgtagctcctcaccagcaacggaacaaagctggatggagaatgactttgttgagttgagagaagaagactttagatgactggtaataagaaacttctctgaactaaaggaggatgtacgaatccattgcaaagaagctaaaaaccttgaaaaaatattagacgaatggctaactagaataaacagtgtagagaagaccttaaatgaactcatggagctgaaaaccatggcacgagaactacgtgamgcatgcacaagctttagtagctgatttgatcaagtggaagaaggagtatcagtgattgaagatcaaatgaatgaaatgaagtgagaagagaagtttagagaaaaaagagtaaaaagaaacaaacaaagcctccaagaaatatgggactatgtgaaaagaccaaatctatgtctgattgatgtacctgaaag

SEQ ID NO: 924504 - DNA, 572 bp, Homo sapiens
ggaaaaataaaggtgatgtacgtgtgaggatacaggcttcatagtctttggaagcaagcaatatacatcaataggaatgttgttgtattttagacattatttatgagaagtttacagagagtacaccataacttccttattcacagttgaattcctagattctagcattgtggtgttcaataaatgttgaactgagtgatgatttctcattcacttgatagcatttgaccactgtgttcagacaatgctgacatacttcaaatcctgaaaacgattcaggtgttttctaaacaatggcagacttgcattctattaaagaactscattgatcatttttgtaaccaaggtgtttacagaatgcaactggctatgattcacaccacttctggtgtaaatatcataatgtataagtatttttctaaatttcaccatcattttctttctttttttttttttttttttttttttgagacagagtctcactctgtcccaggctagagtgcagtggtgtgatctcggctcactgcaacctctgcctcccaggttgaagccattctcctgcctcagcctcc

SEQ ID NO: 924505 - DNA, 623 bp, Homo sapiens
gtcccagaaacgatctttgcttggccaggcgtggtggctcatgcctgtaatcccaacactttgggaggccaaggtgggcagatcatttgaggtcaggagttcgagaccagactgaccaatatggtgaaaccctgtctctagtaaaaatatgaaaattagctgggcatggtggcaggcacctgtaattccagctactccagaggctgaggcaggagaatcacttgaatccgggaggtggaggctgcagtgagtcgagatcctgtcactgcactccagcctgggcaacagagcgagattccatctcaaaaaaaaaaaaaaaaaaaaaaaaaggctttgctttagggcagctccgagtttaaactgtggatcccgcttctcatcatgaatttggcccaatctctcacctttctaaatctcagtgtgttccaatcagatccgcagccaaaccttyccttcacccttctggtctgagccgctatggaccatctctctctggattcctgcagaagcctcccccataccaaataccctcagcacagcagccgaagggagcctttgactgggaaaccctgttcatctgatgatgtcagcccttgactcaaaacgctgcagtggctaccatt

SEQ ID NO: 924506 - DNA, 707 bp, Homo sapiens
tgttggagtttgctggaggtccactccaaatcctctttgtctgggtatcaccagtggaggcggcagaacagcaaatattgcagaacagcaaatgttgctgtctgatccttcctctggaagctttgtctcagagggctacctgcctgtatgaggtgtcagttggcccctactgggagttgtctccaagttaggctacttgggggtcagggacccacttgaggaggcagtctgtctgttctcagatctcaaactccatgctgggagaaccactactctcttcaaagctgtcagacagggatgtttaagtctgcagaagtttctgctgccttttgttcagctatgccccgcctccagagatggagtctacagaggctggcaggccttcttgagctgtggtgggctccacccagttcaagcttcctggctgctttgtttgcctactcaagcctcagcaatggcagacgcmcctcctccagccttgctgccgccttgccgtttgatctcagactgctgtgctagcagtgagtgaggctccgtgggtgtgggaccccctgagccaggcgtgggatataatctctggtgtgccatttgctaagactgatggaaaagtgcagtgttatggtgggagtgccccgattttccaggtaccgtctgtcatggcttcccttggctaggaaagggaattccccaatcccttgcacttccca

SEQ ID NO: 924507 - DNA, 793 bp, Homo sapiens
attttttgggaactggaataaatatgactcttgctatgctttagcaaagagactggtagctcttcataaattacccagtctcactgccctagagatgtgtggaactttgaacttgagagagataacttagggtatctggcaraagaaatttctaagcagcaaagcattgaagagttgacttgggtgctgttaaaagcattcagctttatgcattcacaaagttatggtttggaattggaagttatgtttataaaggaagcagaccataaaaggttggaaaatttgcagcctaatgatgcaacagaaaagaaaaaaaaaacaattttctgaggagaaattcaagctggctatagatatttgtatatgtaatgaggatccaaatgttaatcgccaagacaatggggaaaatgtctccagggcatgtcagggttcttcatgttagcccctcccatcacaagcctggaggcctaggaggaaaaaatgatttcatgggactggcccagggccttgctgctttgtacagtctcgggacttgttgccctgtgtcccaccatggctaaaaggggccaacgtacatctcaggctattgcttcagagggtgcaggcctcaagccttggtggcttaaatgtgttcttgggcctgcaggtacacagaagccaagacttaaggtttgggaacctccacctagatttcaggagatgtatggaaatgtctggatgtccaggcagaagtttgctgcaggggaagagccctcaggagaacttctgctaggggagtgcagaagggaaatgc

SEQ ID NO: 924508 - DNA, 746 bp, Homo sapiens
aaaacagaccaatcagttctctataaaacagaccaattggctctctgtaaaatggaccaatcagcaggatgtggatggggccagataagagaataaaagcaggctgcctgagccagcagtggcaccccgctctcaggtccccttccacagcgtggaagctttgttctttcgctctttgcaataaatcttgctgctgctcactgcttgggtccacactgcctttatgagttgtaacactcaccacgaaggtctgcagctccactcctgaagacagcaagaccacgaacctaccgggaggaaagaacaactccagatgcgccacgttaagagctgtaacactcactgcgaaggtctgcagcttcactcctgagccagtgagaccatgaacccaccagaaggaagaaactccgaacacatccgaacatcagaaggaacaaactcaggacacgccgcctttaagaactgtaacactcaccgygagggtccccggcttcattcttgaagtcagtgaggccaagaacccaccaattctggacacattatggtgacgtgtaatatgagatcttcgatgttactattgcgattgttttggggtaccatgaatcatgcctaaataagacagcaaacttaataaatgtgtgtgttttgactgctccaccaattggctgttccaactctctccttctctgtcactgtagatcaaaagctagatgtgactaagcttttctcaggaaggcatgtctaca

SEQ ID NO: 924509 - DNA, 652 bp, Homo sapiens
ccccctcccttctctacacatcaagctcgaggatttgcccccacccaggactggcaaattagctttactcaacatgccctgagtcagaaaactaaaatacctcttagtctaggtagatactttcactggataggtacaggcctttcctacagggtctgagaaggccaccacagtcatttcttcccttctgtcagacataattcctcagtttagtcttcccacctctatacagtctgataacagaccagcgtttattagtcaaatcagccaagcagtttttcaggctcttagtattcagtgaaacctttatatcccttacgatcctccatcttcaggaaaagtagaacagactaatggtcttttaaaaacacacctcaccaagctcagccaccaacttaaaaaggactagacaatamtttcaccactttcccttctcagaagtcagacctgtcctcagaatgctacagggtacaatccatttgagctcctttttattaggccccagtctcattcctgacaccagaccaacttagactgtgccgctaaaaaacttgtcatccctactatcttctgtctagtcatactcctattcaccattctcaactactcatacatgccctgctcttgtttacactgccggtttacactgttt

SEQ ID NO: 924510 - DNA, 652 bp, Homo sapiens
ccccctcccttctctacacatcaagctcgaggatttgcccccacccaggactggcaaattagctttactcaacatgccctgagtcagaaaactaaaatacctcttagtctaggtagatactttcactggataggtacaggcctttcctacagggtctgagaaggccaccacagtcatttcttcccttctgtcagacataattcctcagtttagtcttcccacctctatacagtctgataacagaccagcgtttattagtcaaatcagccaagcagtttttcaggctcttagtattcagtgaaacctttatatcccttacgatcctccatcttcaggaaaagtagaacagactaatggtcttttaaaaacacacctcaccaagctcagccaccaacttaaaaaggactagacaatactttcaccactttcccttctcagaagtcagacctgtcctcagaatgctacagggtacaatccatttgagctcctttttattaggccccagtctcattccwgacaccagaccaacttagactgtgccgctaaaaaacttgtcatccctactatcttctgtctagtcatactcctattcaccattctcaactactcatacatgccctgctcttgtttacactgccggtttacactgttt

SEQ ID NO: 924511 - DNA, 602 bp, Homo sapiens
gctgaggcaggaggatctcttgagccagggaggttgaggctgcagtgagttatgatcgtactactgcactccagcctgggagacagggtgagacctcgtctcaattttaaaaataaaatatatatatatatataaaatatatattatatataatatatattatatataatatatattttatatatgtayacacacatatatatactgtgcaaagaacttcatacttattaactcagttaatcttattattcccacttgacagatgagaaaatgaaggcatagagagctaacatgcccagggtcacacttttaataagtcagcagagatttgtgctgttctcagcctttctctctcatccctttcctctctgatcctcagctcagggatctgaacccaggcacctggttcctgcctctgtcccctcacccaccatgctgtgctgcttctctttgtccacgtatgtgtccgggcaggggctcctcacagtccccagcataacacttgtggaatggattaatactgcacccttttcgacaagccaccctcgttgggagcagctctggaagaggagtttcccatctacctatgaccacagtttctt

SEQ ID NO: 924512 - DNA, 602 bp, Homo sapiens
gctgaggcaggaggatctcttgagccagggaggttgaggctgcagtgagttatgatcgtactactgcactccagcctgggagacagggtgagacctcgtctcaattttaaaaataaaatatatatatatatataaaatatatattatatataatatatattatatataatatatattttatatatgtacacayacatatatatactgtgcaaagaacttcatacttattaactcagttaatcttattattcccacttgacagatgagaaaatgaaggcatagagagctaacatgcccagggtcacacttttaataagtcagcagagatttgtgctgttctcagcctttctctctcatccctttcctctctgatcctcagctcagggatctgaacccaggcacctggttcctgcctctgtcccctcacccaccatgctgtgctgcttctctttgtccacgtatgtgtccgggcaggggctcctcacagtccccagcataacacttgtggaatggattaatactgcacccttttcgacaagccaccctcgttgggagcagctctggaagaggagtttcccatctacctatgaccacagtttctt

SEQ ID NO: 924513 - DNA, 570 bp, Homo sapiens
ttcgagtttgctggtaggtgtactccagaccctgttttcctgagtatcaccagtggaggctacacaacagcaaatattgcggagcagcgaatattgctgtctgatcctttctctggaagcttcctcccagaaaggcacccacctgtrtgaggtgtgtgtcagcccttactgtgaggtcaggctacatggggtcagggagccacttgaggaggcagtctgtctgttctcagagctctaacaccacgctgggagaaccactgctctcttcagagctgtcagacagggatgtttaagtctgcagaagttgtctgctgccttttgttcagctatgccctgcccacagaggtggagtttatataggcagtaggccttgctgagctgcagtgggctccacccagttcaagcttcccagccactttgtttacctactcaagcctcagcgatggtggacacccctatccccaccaggcttcagccttgcaggtcgatctcagactgctgcactatcagtgagcaaggctctgtgggcatgggacccgccaagccaggaacacgagggaatctcctggt

SEQ ID NO: 924514 - DNA, 570 bp, Homo sapiens
ttcgagtttgctggtaggtgtactccagaccctgttttcctgagtatcaccagtggaggctacacaacagcaaatattgcggagcagcgaatattgctgtctgatcctttctctggaagcttcctcccagaaaggcacccacctgtgtgaggtgtgtgtcagcccttactgkgaggtcaggctacatggggtcagggagccacttgaggaggcagtctgtctgttctcagagctctaacaccacgctgggagaaccactgctctcttcagagctgtcagacagggatgtttaagtctgcagaagttgtctgctgccttttgttcagctatgccctgcccacagaggtggagtttatataggcagtaggccttgctgagctgcagtgggctccacccagttcaagcttcccagccactttgtttacctactcaagcctcagcgatggtggacacccctatccccaccaggcttcagccttgcaggtcgatctcagactgctgcactatcagtgagcaaggctctgtgggcatgggacccgccaagccaggaacacgagggaatctcctggt

SEQ ID NO: 924515 - DNA, 641 bp, Homo sapiens
cttggctgctgcttccagctccagggagccccacaggagagaaaattatagtcctttgtatttaatcaaggccccatagcacatggcacactcccctgtagtagactctaacacagagaaccttgttccaacaccataaatgtgcttattttgtgacctctatcagattccaagtctctggagggccaggcccttgcccagtttttctttttaattcctcaatgttctgacgcaaggtctggcatatggtgggtgtttaatatacattaggaagaatggattaggctgggcatgatggctcatacctataatcccagcactttgggaggccaaggtgggaggattgcttgagctcaggagtttgagatcagcctgggcaacayagtaagacactatttctacaaaaagtacaaaaacttactggctgtagtggcacccacttggagtcccagctacttgggaggctgaggtgggaggatcacttgagtccaggaggtcaaggctgcagtgagtcatgttagcaccactgcactccagccaggcaacagagcaagaccccgtctagaaaaaaaaaaaagaagaatagattaactccataatttgaaaacaaatgattcttatgtcagaatctaatgaattta

SEQ ID NO: 924516 - DNA, 662 bp, Homo sapiens
ggctgctgcttccagctccagggagccccacaggagagaaaattatagtcctttgtatttaatcaaggccccatagcacatggcacactcccctgtagtagactctaacacagagaaccttgttccaacaccataaatgtgcttattttgtgacctctatcagattccaagtctctggagggccaggcccttgcccagtttttctttttaattcctcaatgttctgacgcaaggtctggcatatggtgggtgtttaatatacattaggaagaatggattaggctgggcatgatggctcatacctataatcccagcactttgggaggccaaggtgggaggattgcttgagctcaggagtttgagatcagcctgggcaacacagtaagacactatttctacaaaaagtacaaaaacttactggctgtagtggcacccacttggagtcccagctacttgggaggctgaggtgggaggatcacttgagtccaggaggtcaaggstgcagtgagtcatgttagcaccactgcactccagccaggcaacagagcaagaccccgtctagaaaaaaaaaaaagaagaatagattaactccataatttgaaaacaaatgattcttatgtcagaatctaatgaatttaaacagataatgtgttaaacactta

SEQ ID NO: 924517 - DNA, 610 bp, Homo sapiens
taaatttccctcagaaaatgggtttttcttttctattgcatcataatgctgcaaattttcctaacttttatgctctgtttcccttttgaaactgaatactttcaatagcacccaagtcacctcttgaatgctttgctgcttagaaatttcttctgccagatactccaaatcatctccctcaagttcaaagttccacagatctctagggtaggggcaaaatgcctccagtctctttgctaaaacatagcaagagtcacctttactccagttctcaacaagttcctcatctccatctgagaccacctcagcctggatttcattgtccatgtcattatcggcattttgatcaaagccattcaacaagtttctgggaagttccaaactttcccacatcttcctgtcttctgaaccctctgaactgttccaatctctrcgtgttacccagttccaaagtcacttccacatttttgggtatgtgtatagcagcaccccactctactggtaccaatttactgtattagtctgttctcacgctgctaataaagatggaccaaagactgagtaatttataaagaaaagagatttaatggacttacagttccacatgact

SEQ ID NO: 924518 - DNA, 608 bp, Homo sapiens
cttttccaatggtcttagcaaacaacacaccagaagattatatcctgcgcctggctcagagggtcccatgcccatggagcctcgctcactgctagcacagcagtctgagatcgaactgcaagacagcagcgaggctgggggaggggctcccgccattgctggggcttgagtaggtaaacaaagcagcctggaagctcgaacttggtggagcccaccgcagctcaagaggcctgcctgcctctgtagactccacctctgggggcagggcatagccgaacaaaaggcaacagaaacttctgcagacttaaatgtccctgtctgactgctttgaagaaggtaatggttctcccagcatggagtttgagatctgagaaaggacagactgcctcctcaagtgggtctctgaccctyaagtagcctaactgggaagcaccctccagtaggggcagactgacacctcatacggccaggtacccctctgagacaaagcttccagaggaacaatcaggcagcaacatttgctgttcagcaatattcgctgttctgcagcctccgctgctgatacccaggcaaacagcatctggagtggacctccaggaaactccaac

SEQ ID NO: 924519 - DNA, 610 bp, Homo sapiens
gtgggcaggcgcagtggttcacacctgtaatcccaacatcttgagaggcggaggcaggaggattgcttgagcccagtagttcaagactagcctgggcaacatagtgagaccctgcctctacagaaagtgaaaacattagctggatgtggtagtgcatgcccacagtaccagctaattgggtggctgaggctggaggacaacttgagcctggaaggctgaggctgcagtsagctatgattgtgccactgcactccagcttgggtgccagagtgagactcagtctcaaaaaacaaaaaaaaatgtgatacatctacagaagtataatttatgtttacttctgcattctcagttgtaaaaaaagggtgagaagaaatctgctatgcaaatggatggtagaaagtacgctggaaatgtaatataaactgctgaataataataacaataatagttccatctactattaattgagcacttatgagctaggcattatattaaatattcatgtttcatggttaaaacaatcaggaaatgtcaagaattattatctctctctgtagctgtcattagtgcaaatcaagaaatatcctcggtcttcttccttctaggcact

SEQ ID NO: 924520 - DNA, 588 bp, Homo sapiens
aacttctcagtggcttcctttacactgtgaggggaaaactgcctactcacgcctcagtaatggtggacgcccttcccccaccaagctctagcatcccaggttgacttcagactgctgtgctggcagtgagaatttcaagtcaatggttttagcttcctgggctccatgtgggtgggacccactgagcaagaccacttggctttgtggtcagcaccytttcaaggggagtgaatgcttctgtcttgctggggttccaggcaccactggggtatgaaaaaacaaaacaaaacaaaaaaactcctgcagctagctcggtgtctgcctgaacagcctcccagttttgtgcctgaaacccttggccttggtggtgtaggcacacaagggaatctccttgtctgtgggttgcaaaaactgtgggaaaggtataatgtctgggccagatagcacagtccctcacggcttcccttggctggggtgagggaggtccctggcccattgcacttcccgggtgaggcaacacatcaccctgcttctgtttgccctccttgggctgcacccactctctaaccagtcccagtgagatgaatc

SEQ ID NO: 924521 - DNA, 588 bp, Homo sapiens
aacttctcagtggcttcctttacactgtgaggggaaaactgcctactcacgcctcagtaatggtggacgcccttcccccaccaagctctagcatcccaggttgacttcagactgctgtgctggcagtgagaatttcaagtcaatggttttagcttcctgggctccatgtgggtgggacccactgagcaagaccacttggctttgtggtcagcaccctttcaaggggagtgaatgcttctgtcttgctggggttccaggcaccactggggtatgaaaaaacaaaacaaaacaaaaaaactcctgcagctasctcggtgtctgcctgaacagcctcccagttttgtgcctgaaacccttggccttggtggtgtaggcacacaagggaatctccttgtctgtgggttgcaaaaactgtgggaaaggtataatgtctgggccagatagcacagtccctcacggcttcccttggctggggtgagggaggtccctggcccattgcacttcccgggtgaggcaacacatcaccctgcttctgtttgccctccttgggctgcacccactctctaaccagtcccagtgagatgaatc

SEQ ID NO: 924522 - DNA, 554 bp, Homo sapiens
cagagtgttttgaatagcttgttaaacagacttttaagaggtacacccaattagcactactgagtagtatttagatgttgactagattcatgggactatgctggaaaataaattgcaaactcaagtgtgacattttaaaccagcttttggtccttaaaaccactttgcctgagctggagacagccagtttctcccttgtttttctagcctgatcaccaggcttttgagctctaggctggccttcccaactctcaracatattccttttatagaaataaaagtacctggcctctatgatgcataactgtgagtcatccagtggatattaaagaactccaaaaacatgcttcaagatagtttttccactttgttccagagcacggtctaaatttggactcattggaaatggaagtgaaaggccccgatggaacctttctggttgctgccttctttgagttgctgtggtgggtgggcagggacagacagccttacctgcacagaggcatggggtttcttgcattcatttctgaatgagtcggcctgtcgtttgcaca

SEQ ID NO: 924523 - DNA, 446 bp, Homo sapiens
atctggtacattgggagacataaaactccaaactcctgcacagaagtacttggctgttggccgggggcggtggctcacacctgtaatcctagcactttgggaggccaaggtgggtggatcacctggggtcaggagtttgagaccagcctggccaacatgatgaaaccccgtctctactaaaaatacaaaaactagctgggtgtggtggygggcacctgtaatcccagctacttgggaggctgagacaggagaatcgcttgaacccggaaggcagaggttgcggtgagccgagatcatgccattgcactccagcctgggctgcaagagcgaaactccatatcaaaataataataataataaaaataagaagtacttgctgtttatagtactgccacagttttgtgccctacacaccctggaattctgataaattctatttcatgtgg

SEQ ID NO: 924524 - DNA, 591 bp, Homo sapiens
gatgcctccgagcaggacactgggacctatagctgtcagggctcaccccatgcatgcagtgccctttcattgtctatgtgacaggtgagtgcttttttttcttttgagacatggtctcactctgtcactcaggctggagtgcaggggcacagtcatggctcactgaagccttgacctactgggctcaagtgatccttccacctaagccttctagctgggactacaggcatgtaccaccatggacagctaattttttttttttttttttgagacagagtctcgctctgtcgtcttggctggagtgcagtggtgtgatctcggatcactgcaagctccgcctccctggttcacgccattctcctgcctcagcctcctgagtagctgggactrcaagtgcccaccaccacgcctggctaatttttttgtatttttaatagagacggggtttcaccgtattagccaggatggtctcaatctcctgacctcgtgatccgcccgcctcggcctcccaaagtgctgggattacaggcatgagccaccacgcctggctatggccagctaattttaataaattttttgcagagagagggt

SEQ ID NO: 924525 - DNA, 778 bp, Homo sapiens
atctgtgaaccaatcattatggccagagggagggattgacctgctttgggtcccagagcctgttaggtgtttggataagactgctttgaaccccttgggctgaaatggagagggtacattctcaaaaggaaaaccaaggttcccatcaaaaggagggatggattctgggtagacaaagacaacrttgcttacttcccaaccttagaacttgttccagtttacccttgtctcatccactaggtgtgattgagcatcttgttccttgttttgccccatgctgaacgctacacatgtgtgattcccatgaactgggggttgcaggggggtgaggtattcagaaccctgccagaatttcttggaaaaagagggagaaggccttttctagtgctaccataaccatcttatacaaagattgaaagtgctctgcatgcttcttgccccttacccactttgtggctcatcatgaagttgagaaggtgtaggtcgaagaagttctgggaagggtaggagcactgagctggatgttgggaggctggaacgctggttctagctctgtcagcagttagctgtgaggccttgagccagtcatttgatctttgtttcttggtttcctggtctagaggagggaattgagttggatagtccctgaggtatattcttctagttcttaatatttaatgataattgtgctttgacagagaacttaagaattttatctgtccaaacaagtgaaaggtggatagatcttggactctgcggagaccaagatacgacaaga

SEQ ID NO: 924526 - DNA, 843 bp, Homo sapiens
agctgagggcagacaaggacactgaggctcagacatggaactttacacttagaactacctttctgagctctgtccctcagcctactaacttgaacaaatatcttaaatagtatgagttcaataaaatgaaaaaagacaaagttacctcatttactaccactagttctagaaaggcaaatgttatcaagaataatattttatataaaggcacggatttacaaagtagataaatttgagagcagtgtattggactgcaagagaaacccaactccaaaccaccacaccttttaaaaaaaaacagtcacccccctcaaattttatccagttaaggraaaaaaaatcttagtttacttacaacttatgagcacatttgttatgcgaattgaaatatatctgctggggccgggcacggtggctcatgcctgtaatcccagaactttgggaggtggatcacgaggtcaggagtttaagaccagcctgaccaacatggtgaaattccgtctctactaaaaatacaaaaattagccgggcgtggtggcgcgcatgtaatcccagttactcaggaggctgaggcaggagaatcatttgaacctgggaggcaaatgttgcagtgagccaagatcgtgccactgcattccagcctgggccacagagcaagactccatcaaaaaaaaaaaaaaaaaaagaaagaaaggaaagaaatatatctgctggggtttaaagaaataaaaaattattttttaaaaaatatattgagtaccttttacatagcagagcctgtgttaggttttttggttaatgagaaaataagtcacagtcccacctgggagacttcacgaccca

SEQ ID NO: 924527 - DNA, 575 bp, Homo sapiens
tgcctacaccttgatcttgaaattctagcccccacaactgtgagaaaataaatttctgttgtttaagtgccacgcagttggtgatattttgttgtggcagccctagcaaattaatatagttcattttccaccatatttgattgaaatttggatataacaaagaagatcataaaaatagtaagaataagatgcttctaaaagccaacttttgctaacagttgaaaaatcaggtattagatcatggttaagaaacwtgacacatatggaatcacattggccccatcacctgtgagctgaaggtctaaggtgttgagttgagctgaggtggggcttgcagagttggaacatggagccttagactctctgtccccttagggcttgtcctcagtctgtcatctttcaatctggcagggggaggaccctgaaatagaaggtcttaaagggcaagggaagagtagattgagggggtttcctggtggcaagtgttcctgatgggaagtgaatcaggggtccattctgccctctcaaacaccaatcagcatggacagcagcagtctgggttgtggaatgctgca

SEQ ID NO: 924528 - DNA, 591 bp, Homo sapiens
ttctgttttaacatacaaaataagatttccataaaccttttataacctcttacagtttttttaattctttttctttttcttctttttttttttttgagacagagcctcactgtcacccaggctggagtgcagtggcgtgatctcatctcactgyaacctcagcctcccaggctcaagtgattctcctgcctcagcctcccaagtagccgggactacacgtgtgtgccaccactcctgactaattttgtatttttgatagagacgggggtttcaccatgttggccaggctggtctcagactcctgacctcaggtgatctgtccaccttggcctccctaagtatgggattacaggtgtgagccactgtgcctggcctcattctttttcttaactttttgtataactttagttttatttgtcatttttcccttcaatttacaacttataaaatcctctaaattagacaaaattactttctttttaacaaaaaatcacatttattgggggaaactgcccccaatatttcaatgtaggttctttctattttccataagtgttggctggctgagaaataaagagaaagagtacaaag

SEQ ID NO: 924529 - DNA, 585 bp, Homo sapiens
aggctcggtctacccacttagcagttctgacaaggaaaaaaggaccacagaacacagaaaagatgggaagagtcaacttggaggtggaaagaggaagacaaacagcaagtccactgtgggagaataaggaggagcccccacagccttctccagctcttctcaggttccatttagagagttccaaatcccagcagcacccaacatctccccacaggaagttacactccccamaattacagagcagagcttcttactgcaaaaatcttttaacatggcaataatacaattgtgatatattgccttgtctaccatgctaaatgatggtggtcttgcctaccattctaaattcactgtatggttttacaacttagaaatttttgaagctatgaaaaaactcagttatgtaaatgacatccataggccccagggtaaatggacaacacctatagagcagccttgccaattttatcatcccacacttgttatgcacagaaagccctttgcttgtttattttctataacacttgatattgtttgtggacctctaccccaccaagagaggaaaaaatacaaatttattctaat

SEQ ID NO: 924530 - DNA, 709 bp, Homo sapiens
agagggggtctcactctgttgcccagggtggccttgaactcctgggcttaagagatctatccacctcagccacccaaaatgctagattacaggcataagttaccatgcctagcctatttttatgttatttgacataagatatattttgtttaccatgagtaacactacttctgctcacctttgctcttcatttgcatggaatatctgtttgtatttctttactttctatttctgtgtcttcacaggtaaagtgagtttcttgtaggcaacatatakttgggtcttgttattttttattcattcagccagtctatatcttttgattggggaatttaagtcatttacattcaaggttattattgataggtgaggacttactcctgtaattttgttgttttctggttgttttgtgtatagtcatttctttattcctctcttattgcttatctttgaggtttggtggttttctgtagtgatagtttgattcctttccctttgtcatttgtgcattacacctaccagtgagtttttagttttgtgtgtttcatggtggtagatatcgtctcttcatttctaaatgttactcttttagcatttcttctagggctggtctagtggtgatgaattttcttagtatttgcttgtctgggaaggactttatttcttctttatttctgaaggataactatggtgggtatagtatttttgt

SEQ ID NO: 924531 - DNA, 709 bp, Homo sapiens
agagggggtctcactctgttgcccagggtggccttgaactcctgggcttaagagatctatccacctcagccacccaaaatgctagattacaggcataagttaccatgcctagcctatttttatgttatttgacataagatatattttgtttaccatgagtaacactacttctgctcacctttgctcttcatttgcatggaatatctgtttgtatttctttactttctatttctgtgtcttcacaggtaaagtgagtttcttgtaggcaacatatagttgggtcttgttattttttattcattcagccagtctatatcttttgattggggaatttaagtcatttacattcaaggttattattgataggtgaggacttactcctgtaattttgttgttttctggttgttttgtgtatagtcatttctttattcctctcttattgcttatctttgaggtttggtggttttctgtagtgatagtttgattcctttccctttgtcatttgtgcattacacctaccagtgagtttttagttttgtgtgtttcatggtggtagataycgtctcttcatttctaaatgttactcttttagcatttcttctagggctggtctagtggtgatgaattttcttagtatttgcttgtctgggaaggactttatttcttctttatttctgaaggataactatggtgggtatagtatttttgt

SEQ ID NO: 924532 - DNA, 711 bp, Homo sapiens
gaatatatgatttcattctcgactgccctgtaaggtttctgctaatataactgctattagtctgataggataacttatgtatgactttacactttgctattgctgtttttagagttctctgtttgtcttttgacaatttgactgtaatgtacaagttttctaagttgaatccacaagagagtctttgagtttcttgtatctggatgtctgtatctctcccaacctacttgggaatctttgagtttcttgcatctggatgtccatatttctcccaagatttgggaatttttcagctattgttttattaaacaggtttttttttttgctttttaataacctttccttttgtaattctcataatgtgaatatttgttcacttaatggtattccatatgtcctgaaggctttcttttcattctcttttttcttttgtctgactgggttatttcaaaagacctgtttttatgttcrgaagttcttttttctgcttgatctagtttattgtcaaagctctcaattgtatttttaaatttcattcactgaatttttcagctacactctttctgtttggttctttttttttaaatgatgtctacgtctgctgaatttctagttcaggctataaagtgtttttctgattttgttgcattgcctgcattctcttgtatcttgctgagtttccttaagtttattattttgaattccttttca

SEQ ID NO: 924533 - DNA, 640 bp, Homo sapiens
gaatagattgcataatgtgctttttgtgcttgtattgaacccaaacagtgaacgtagtacccaaaaggtagttttacaactcttgcccccctccctccttctcttcttttgaagtctcctgtgtctattttttctctctttatgtctgtgtataccccttgtttagctcccacagataagtgagaacatgtartatttgattttctgttcctgcattaattcatttaggataatggcctccagctacattcatgttactgcaaaggacataatttcattactttttacggcttcgtagttttccatggtgcataggtaccacatcttctttatccagtccaccattgatgggtatctaggttgattctataactttgccattgtgaatggtgctgcaataaatacatgagtgcatgtgtctttttggtagaatgattcattttccttcgggtacatacccagtaatgggattgctggatcaaatggcagttctatttttaggtctttgagaatactccaatctattccacagagactgaactcatttacattcccaccaacaatgtgtaaacattctcttttctccttatcctgaccaacatctgtcattttttgagtttttaataatagccattccaat

SEQ ID NO: 924534 - DNA, 525 bp, Homo sapiens
ctcattactagcacagcagtctgagatcaaactgcaaggtggcagcgaggctgggggaggggcgcccaccattgccgagttagttgtttgattaggtaaacaaagcagcctggaagctggaactgggtggagcccaccacagctcaaggaggccagtctgcctctgtaggctccacctctgtgggcagggcacagacaaacaaaaagacagcagtaacctctgcagacttaaatgtccctgtcggacagctttgaagagagtagtggttctcccagcacacagtttgagatctkagaactggcagactgcctcctcaagtgggtccctgacctccaagtagcctaactgggaggcaccccccagtaggggtggactgacacctcacacagccgggtactcctccgagacaaaacttccagaggaacgatcaggcagcagcatttgcggttcaccaatatccgctgttctgcagccactgctgctgatacccaggcaaacagggtctggagtagacctctagcaaa

SEQ ID NO: 924535 - DNA, 578 bp, Homo sapiens
agattttctcccatgcctggctcgtcgggtcccatgcccacagagccttgctcactgctagcacagtagtctgagatcaacttgcgaggctgcagcctggctgggggaggggcatccgccattgttgatgcttaaataggtgaacaaaatggccaggaagctcaaactgggcagagcccaccacagctcagcaaggcttactgcttctatagactccacctgtgtgggcagggcatagctgaacaaaaggcakcgcagaaacttctgtagacttaaatatccctgtctgacagctctaaagagggcagtggttctcccagcacagtgtttgagttctgagaacagagagacagcctcctcaagtgggtccctgaaccccgtctagcctaactgggagacacttcccagcagaggcctacagacacctcatacaggtgggtgcccctctgggacaaagcttccagaggaaggatcaggcagcaatatttgctgttctgcaatatttgctgttctgcagcctctgctggtgatacccaggcaaacagggtctggaatggacctccagcacactccaaaag

SEQ ID NO: 924536 - DNA, 544 bp, Homo sapiens
ttgtgacttaaaacaagacatcttaggcgggccacagtggctgagaccagtaatcccagtgctttgggaggctgaggcgggaggatctcttgaggccaggagtttgagaccagcctgtgtgagaccctgtctctacaaaataaagaattatctgggcatggtggtgtgcccctgtagttccagctactcgaaagtttgaggtaggagggtcacttgagtctaggagttcaaggttgcagtgagctatgattgcatcactgcaccccctgggtgacagaggaagaccctgtcttaaaaaagcaarcaaacaagaatcagatctttcttttcttttcatttctgtgtgtcaggaatttggggggtggctttgctctggttctctcaggaggttgcagtcaagcttttggctagggctatgtcatctgaaggcttgcctggggctggaggacctatgtctaagacggcttgttcaacatggctgttggcaggaggctttagttcttggcacctatacctctccatagggctgcttgagtaccctcaa

SEQ ID NO: 924537 - DNA, 772 bp, Homo sapiens
cagagttgctgccaccaggggtgggaatggggtggcatccatgattcaggactgttttttctatcctttcattgcctttttcagtgctatgaagttaaaaccaggtacaatgagtgcttacttgatttttggttcttatgagggtgtttttttttctgtgtagatagttgttaacttgatgtccttgcagggggtctgagggtggggggcaatcaatggatccttctattctgccatctttctctgcctcttgcttcccattgggtgattgtgtcgttgtgtgaacaccacagagtgtacttaaacaaatctagatgctatagcctactctacccctaggctatgtggcatagcctactgcttctatactacaaacctgtacagcatattactgcactgaatatagtaggtagctataatacttggtgtttgtatatctaaacatattgaaatataaacatgatacaataaaatatagtataaaarataaaaaatgttagatctatatggggcacttaccatgaatacagcttgcaggactggaagttgctctgggtgagtcagtgagtgagtggtgagtgaatgtggaggcctaggacattactacacactactgtggactttgtaaacactgtacatttagactactaaatttataaaaagtctttcttcaataataaattaaccatagcttgctgtaggtttttacttcataaagttttaattttttaaactttttgactcttttgtaataatacttagcttaaaacac

SEQ ID NO: 924538 - DNA, 583 bp, Homo sapiens
gattaatctagttacacatatgccctttgtatttataacaacatccttacaattcatcatcataaagctattggatacttaattcttatctgttcctgtgacctgagtttaattttctcttggccttttttaacttgctaaaaaataattgtaatctactagcaaatcttgaccaaaaagtgaaaactgaaaatatataattttaatctattgataacgacttacatatatttttaatgtctatacatacacacaggttttgacagaagctgctattttcccactcagtaccaatttcctgctgctcccatattggagagtgcytatattgctagaaatagcaatatatctggctaaaaattatatttccaaccctcctctccagacagaggtagccagtgatgtgtaaataatagctactgtgtagagcttcctgaaatgggctcttttttgttttttaaatttttttgagatggagctttgctgtcacccaggctggaatgcagtggcatgatctcggctcattgcaacttacgcctcccaggttcaggtgattctcctgcctcagcctcccgagtagctg

SEQ ID NO: 924539 - DNA, 769 bp, Homo sapiens
ggacctgggcatccttgcgcttcggggacccaggaagcccccttgactcccacaggtttggaagtgccagctcctgctgcctggcctctccctgttcccagcacctgctccgatttcagaacaaagttgtggcggaggcccggtgctgtcacaacccagccggatgtatgcgcactcagggtggtgctgacatgccagccccctgccacctcggcccaatctggactttgggtgccaacaagcatagaagggaggccaagggggtgctgagggtggctcattggctcattgtgggcctgaaggcaccccttggcacaaacagtctgggcaccatggatgacacatagatggtggcaggaggcagataggctcctgggcagaaaggggctggtccccagtgaaaccrcacgttccagccagggatggcctgaaacatgggggctgggctgtcagttcctggtggagtccatggcctggagtgagaacttatggtgctttttctggacccacctatggccgaccatggactaatcagcatgcacttcctcccttctgaagcccataaaaaccccagacttagccagactcatggagatgttggaacaacctgcctgtggataggagctatccactccaggtctcttctctgctgagggctgcaaactcaatgggatgacctgcctgcggttaggagctacccacttgcagtctcctgagagctgtactgtcactcaataaagcacctccttgccttgctcaccctccactt

SEQ ID NO: 924540 - DNA, 815 bp, Homo sapiens
ctgccaggaagagggctgtaccctgcaaagtcacagggtcagagctgcccaacatcatgggagtccacctcttgcatcagtgtgatctggatttgagacatggagtcaaaggatattattttggagcttaaggatttaattactgccctattgaattttggacttgcctggggcctgtagctcctttgttttggccaatytctcccatttgcagtggctgtatttacccaatgcctgtactctcattgtatcaaggaagtaactaacttgcttttgattttacaggctcatagacagaagggacttgcctttggatgagattttggacttggacttttgagctaattatgggatgagttaaaattttgggggacttttgggaaggtatgattgtgttttaaaatgtgaggacatgagatttgggaggggccagggcagaatgatatggttttgctgtgtccccacccaaatcacattttgaattgtagttcccataatccccacataatgagagggacccagtgggaggtaattgaattgtggggggtggtttcccccatgctgttctcatgatagtgagttctcacgagatctgatggttttataagggacttttccccgcttttgctctgcatttctccttgctgctgccatgtgaagagggatgtgtttgcatctccttctgtcatgattgtaagtttcctgagggctccccagccatgctgaactgtgagttaatcaagtctcttttctttttaaattacctagtctcaggtatgtctttattagcagtgtgagaacagactaatacagtc

SEQ ID NO: 924541 - DNA, 627 bp, Homo sapiens
atcttgttgttttaatttgcaattccctaatgacatatgatgttgagcatcttttcatattcttatttgccatcatctttggtgaggtgtctgttcagggttttttgcccattttttattgtgtggttcattttcttattgttgagtttaagagttctttgtgtatttggcttaatagtcctttaccagatatatcttttgcaaatattttctcccagtgtgttgtcttctcattctcttgatgtgccttttgcagagcagaagtttttaattttaatgaagtccagattatcaattatttcttttgtggatcatgccttttgtgttatatctgaaaartaatcatatagctgggctcggtggctcacacctgtaatcccagcactttggaaggctgaggcaagaggatcacttgagcccaagagtttggctgcagtgagccataatcacaccatgatcatgcccaaggaatgcttcagtgagccatgatcatgccctccaacaagtaaataaaataattaatttatttagagactctgtctctaaattaaaattggtattgcattgaatctttagatcaataaataaaataaataaaaagtcatcaccaaacccaaggtcatctag

SEQ ID NO: 924542 - DNA, 627 bp, Homo sapiens
atcttgttgttttaatttgcaattccctaatgacatatgatgttgagcatcttttcatattcttatttgccatcatctttggtgaggtgtctgttcagggttttttgcccattttttattgtgtggttcattttcttattgttgagtttaagagttctttgtgtatttggcttaatagtcctttaccagatatatcttttgcaaatattttctcccagtgtgttgtcttctcattctcttgatgtgccttttgcagagcagaagtttttaattttaatgaagtccagattatcaattatttcttttgtggatcatgccttttgtgttatatctgaaaaataatcatatagctgggctyggtggctcacacctgtaatcccagcactttggaaggctgaggcaagaggatcacttgagcccaagagtttggctgcagtgagccataatcacaccatgatcatgcccaaggaatgcttcagtgagccatgatcatgccctccaacaagtaaataaaataattaatttatttagagactctgtctctaaattaaaattggtattgcattgaatctttagatcaataaataaaataaataaaaagtcatcaccaaacccaaggtcatctag

SEQ ID NO: 924543 - DNA, 627 bp, Homo sapiens
atcttgttgttttaatttgcaattccctaatgacatatgatgttgagcatcttttcatattcttatttgccatcatctttggtgaggtgtctgttcagggttttttgcccattttttattgtgtggttcattttcttattgttgagtttaagagttctttgtgtatttggcttaatagtcctttaccagatatatcttttgcaaatattttctcccagtgtgttgtcttctcattctcttgatgtgccttttgcagagcagaagtttttaattttaatgaagtccagattatcaattatttcttttgtggatcatgccttttgtgttatatctgaaaaataatcatatagctgggctcggtggctcacacctgtaatcccagcactttggaaggctgaggcaagaggatcacttgagcccaagagtttggctgcagtgagccataatcacaccatgatcaygcccaaggaatgcttcagtgagccatgatcatgccctccaacaagtaaataaaataattaatttatttagagactctgtctctaaattaaaattggtattgcattgaatctttagatcaataaataaaataaataaaaagtcatcaccaaacccaaggtcatctag

SEQ ID NO: 924544 - DNA, 609 bp, Homo sapiens
tccccccatctccactgccaaccagcatgcaccaaaaacctgacctccacggagtagccatgtcagcaagtgaaactgaactgtctcttgatattgtcacttgtctaggcttgtttgccaatcatcataaaggagaaaagtgctgcacacygataacatatttataatacagaggagataacctggtgaactccctatcctgtgtgatgtctcactaccttgacacatgaaagagagagcagagacaaaaattaccaaatagattttttaaaacacaaagcagaacccctgataaagcctcaaaagcctttggagatcaagaattaacaatagaagactggagtagaggttaggcttgtaattattcacaatagcgaagacacggaatcaacctaaatgcccatcaatgataaactggataaagtgtggtgcatatacaccatagaatactatggagccataaaaaaagaataagatcatgtcctttgcagggacatggatggagctggaagccattattcttagcaaactaaagcaagaaaagaaaactaaacattgagtattttcacatatatgcaggagctaaatgatgagaatatatggaaatag

SEQ ID NO: 924545 - DNA, 778 bp, Homo sapiens
ccaccttgttgccagtatctgagaccatggaatgacatggaaatgtataccataactattaacaacgagctgcagatcaactaaatgaaatggggaagttggaaagaggatgaaaatgactcaaaataaacaataattattaaagattagcagcaaagtcagaatattagaatgagaatgtatctaggctgaccaccatttccatcacgccatttagttatttatattcctcttcacaccagaaattgctatatacaataacaattacccactgtagcttcaagaagttggatatcggttttgataaccaaaatcattgaaaaccaagtaattagtgttttggttctttttttttttttttyttttctttttgagatagggtctggctctgtcacccaagctggagtgcggtggcatgaatgtggctcactgaagcctcaacctccctggcttcaagcaatcctcccacctcagtctcctgagtagctgggactacaagagtgagtcaccacacccagctaatttttgtattttttgtagagaaggggtttcaccatattgcccaggctggtcttgaactcctgagctcgagcaattggcccaccttggcctcccaaagtgctgggagtgcaggcgtgagccaccgcaccaggtcatgtgttggtttttaattttaaaaatggccactaagtctaggggctggatatttcttatttcctccccagatccactttccactcttctccacctgcctgggaagctgacatgtatgggccac

SEQ ID NO: 924546 - DNA, 778 bp, Homo sapiens
ccaccttgttgccagtatctgagaccatggaatgacatggaaatgtataccataactattaacaacgagctgcagatcaactaaatgaaatggggaagttggaaagaggatgaaaatgactcaaaataaacaataattattaaagattagcagcaaagtcagaatattagaatgagaatgtatctaggctgaccaccatttccatcacgccatttagttatttatattcctcttcacaccagaaattgctatatacaataacaattacccactgtagcttcaagaagttggatatcggttttgataaccaaaatcattgaaaaccaagtaattagtgttttggttcttttttttttttttttttttctttttgagatagggtctggctctgtcacccaagctggagtgcggtggcatgaatgtggctcactgaagcctcaacctccctggcttcaagcaatcctcccacctcagtctcctgagtagctgggactacaagagtgagtcaccacacccagctaatttttgtattttttgtagagaaggggtttcaccwtattgcccaggctggtcttgaactcctgagctcgagcaattggcccaccttggcctcccaaagtgctgggagtgcaggcgtgagccaccgcaccaggtcatgtgttggtttttaattttaaaaatggccactaagtctaggggctggatatttcttatttcctccccagatccactttccactcttctccacctgcctgggaagctgacatgtatgggccac

SEQ ID NO: 924547 - DNA, 650 bp, Homo sapiens
gccatgctgaactgtgagccaattaaacctctttcctttataaattacccagtcttgggcagttctttatagccatatgaaaacagactagtacagtaaattggtactgcagagagtggggtactgctataaagataccccaaaatgtggaagcaactttggaactgggtaataggcagaggttgggaaagtttagaggactgagaagaagagaggaaaatgtgggaaggtttggaactccctagagacttgttgaatggctttgaccaaaatgctgatagtgatatggacaatcaggctgaggtggtttcagatgaagatgaggaacttgttgggaactgtaataaaggtgattcttgctgtgctttarcaaagagactggtggcattttgcccctgccctacagatctgcagaactttgaacttaagagagatgatttagcgtatctgggagaagaaatttctaagcagcaaagtgttccagaggtgacttggatgcttgtaaaagcattcggttttatgcattcacaaagagatgatttgaaattagaacatctgtttaaaagggaagcagggcataaaagtttagaaaaattgcaggctaatttctaacgcaatgtgttagaaaataaaaacccattttctgaaga

SEQ ID NO: 924548 - DNA, 582 bp, Homo sapiens
aaagtaatgtaggcctggtgcagtggctcacacctgtaatcccagcactttgggaggccaaggtgggtggatcatgaggtcaagagatcaagaccatcctggccaacatggtgaaaccccgtctctactaaaaatagaaaaattagctgggcatggtggcatgcacctgtagtcccagctacttgggaggctgaggcaggagaatcgcttgaacctgggaggcagaggttgcagtgagctgagatctygctactacattccagcctggtgacagagcaagactccatctcaaaaaagaagtaaagtaaaatacctgggaatatacttagccaaggaagtgaaagatctctccaaggaaaactacaaaacactgctgaaagaaatcataggtgacataaacaaatggaaatgcatcccgcgctcatagattggaagaatcaatattatgaaaatgaccatattgcccaaagcagtctacagattcaatgcaattcccatcaaaataccaacagcatttttcacagaactagaaaaaacaattctaaaatttatatggaatcaaaaaagaacccaaatagccat

SEQ ID NO: 924549 - DNA, 580 bp, Homo sapiens
gaagccgcggaccttcgcggtgcttgctacagtttttaaaggaggggtgtccggagtttgttcctcctgatgtttggatgtgttcgcagttttttccttctggtgggtttgcggtcttgctggcttcaggagtgaagctgcagatcttcgcgatgagtcttacagctcacaaaggcagtgtggacccaaagagtgagcagcagcaagacttattgcaaagagcgaaagaacaaaccctccacaacgtggaagaggactccwgcaggctaccactgccagcgccagcagcctgcttttttatactcttatctggccccacccacatcctgctgattgatccattttacagagagctgattggtctgtttcacagagagctgattggtccgttttgacagggtgctgatgggtgcctttacagtccctcagctagacacaaaagttctccaggtccccactagattagctagagggctgattggtgtatttacaaaccctgagctagacacagagtgctgattggtgcattcacaatcccttagctagacataaaggttctccaagtccccactaaactcag

SEQ ID NO: 924550 - DNA, 616 bp, Homo sapiens
ccacagctgttcatcatggagtagaggaaagccaatgtgaaagctcattttatgtgtcaatttgactgggtcatggggtacacagattaaacattatttctgggtgtgcctatgagggcgtttccagatgagatcagcatttgaatcagttggctcagtaaagttcatggctctccccagtgtgggcgggcatcatctaatccattaagggcttgaatggaacaaaaagcagagggagggaggatttgtccccttcctacctgccttgttgagccaggacaatggtgttctcctgctctgggactgggacttccactrtcagcttctctggttctcaggccttcagactcaactgcagctacaccactgactctcctgggtctccagctaccagatggcagattgtcagacttctcagcctccatcattatatgatccattttctcataacaaatcagagaggagagagagagagagaaagaaagagaaccagagaaatagagccaattggattatatcagtttgttctcatgctgctaataaagacatagcagagactgggtaatttataaaggaaagcagtttaatggacttacagttccgcgtggctggggat

SEQ ID NO: 924551 - DNA, 661 bp, Homo sapiens
catggagtagaggaaagccaatgtgaaagctcattttatgtgtcaatttgactgggtcatggggtacacagattaaacattatttctgggtgtgcctatgagggcgtttccagatgagatcagcatttgaatcagttggctcagtaaagttcatggctctccccagtgtgggcgggcatcatctaatccattaagggcttgaatggaacaaaaagcagagggagggaggatttgtccccttcctacctgccttgttgagccaggacaatggtgttctcctgctctgggactgggacttccactgtcagcttctctggttctcaggccttcagactcaactgcagctayaccactgactctcctgggtctccagctaccagatggcagattgtcagacttctcagcctccatcattatatgatccattttctcataacaaatcagagaggagagagagagagagaaagaaagagaaccagagaaatagagccaattggattatatcagtttgttctcatgctgctaataaagacatagcagagactgggtaatttataaaggaaagcagtttaatggacttacagttccgcgtggctggggatgcctcacaatgatggtggaaggcaaaggagaagcaaaggcacttcttagatggcggcag

SEQ ID NO: 924552 - DNA, 573 bp, Homo sapiens
gttcctatctatacaatgagagcatgaccttgaggtctttttcagcaatacaaatctgggataaaatatatccagacttttgaaaaacattagaactggtgagagagagagagagagagagaagatatgaatttaattattagttaaaagttatgatccattgatagctactaagtgtcagatatattacatgctagctcctgtctacccaataatcacaaaaaaggcatcagtccaatcttatagatgagaaattaagaaatgtacttaggccgggtgtggtggctcacacctgtaatcccagtgctttggaaggccaaggcaagtggatcgcttgargccagaagtttgagatcagcctgggcaacatagcgagaccctgtctctataaaaaattttaaaaaattaaccaggagtggtggcacatgcctgtagtcccagctactcaaggcagaaggatcaattgagctgaggagttcaagttcaattgagctgaggagttcaagatcatagtgagctatgatcataccatgtactccagcctgagcaataaagcgagaccatgtcttaaaa

SEQ ID NO: 924553 - DNA, 583 bp, Homo sapiens
aacaaaaagatcccaaaatcatgtgagcactcacagcacctggtttaaatatcatatcactgaatgaggcactagacaaggagaggaaagacagttttgaatcaccaatggcacccctccccatcccctggtagcagccctgacattcgagagtctgggcatttggcagagccctcgccagaggggaatcacccctccaagcagttgtaacttgtgtttcttggcaagtcttgctactgcaggccaaagttctccggggtcctaggtaaacttgaaaggcagtctgggacacaaggacccaatttctaggcaacttctagctctggrgttggctcagagccagtggactagggtagcatgggacctagggagacattggctagggtggctgagggagtgcttgtgccacgaatcccccaactgcaggctgcagaacttgcagcaacaaaaatgactccttccttctgcttaaggagaggagagggaagagaagagggaactttgtcttgcatcttggatatcagctcagccacagtaggacagggccataggcagagtcatgaggcccctttttcaggtccta

SEQ ID NO: 924554 - DNA, 604 bp, Homo sapiens
gctgtagaatttattacgagcttgttggtggggagaaatccccacatatttggtcacagaagttttcagtgttgattgttgtagtatgagagcagaggaaaaatagtttgtgctttttccactcagaatcactaattattaggaaaatgcaaatcaaaaccacaatgagattccttctcacacctatcagaataacgactattaacaaaaactggaaaataacaagtgttagcaaggatgtagagaaattggaacccttgcatactgttggtagaaatgtaaagccactgtaaaaaacagtatgacaattccttwaaaaattaaaaatagaattaccatgtgatccagcaagtctacatctggatgtatacccccaaaattgaaagcagggtctcaaagagatatttgtacacccatgtttatagcaagttattcacaatagctaaaacatggaagcaactcaagcatccatggacagatgcatagataagcaaaatgtagtatatagatgcaatgaattattattactcagtattaaaaagaaggaaattctgacatatgctacaacacagatgaaccttgaggacatgatgctaagtaaaat

SEQ ID NO: 924555 - DNA, 587 bp, Homo sapiens
atgtgccagtaccatgctaacccctttcatttaaccttttaaaacatccgctggctgggtacagtggctcaggcctccaatcccagcactttgggaggccaaggcaggtggatcacctgaggtcaggagttcgagatcagcctggccaacatggtgaaaccccatctctactaaaaatacaaaaattagctgggcatggtggcatgtgcctgtaatcccagctactcggggggctgaggcaggagaatcgcttgaacttgggaggcagaggttgcagtgagctgagattgtgccactgcactccagccygggcaacatagcgagactctgtctcaaaacaaaaaacaaacaaacaaacaaacaaaaaaaaaacttgcgaagtcaagtatacagttatccacactttactattgagaaaaactgaagttaggagaggtaaataatatgcccaagctagcaagtggccaagttagagcctggggtttaccatctcactcttctttgtgatgcagatgtctaacactgcttctctacagtaagatgtgtcatatcagttccacaatctaaatgtgaaatggagtttgata

SEQ ID NO: 924556 - DNA, 595 bp, Homo sapiens
gcttttggggtgagattatggggttttctagatatagaattatgtcatctgtgaacagagatagtttgacttcctcccttcctatttggatgccctttgtttctttctcttgcctgattgccctgactaggacttctaatactatgttgaacagaagtggtgagagggcatccttgtcttgtgccagctttcaaggggaatgtttccagcttttgcccattcaatataatgtcggctataggtttgcgatagayaacttatattttgaggtatgctcctttactaccaagttattgagagtatttaacatagggggatgttgaattttatcaaaagctttttctgcatctattgagataatcatgtagtttttgtctttagttctgtttatgattaatcacatttattgatttgcatatgttgaatcaaccttccatcccagggatgaagcctacttgatcatggtggattagctttttgttgtgctgctagattcagtttgcaagtattttgttgaggattttgcactgatgttcatcaaggatattggcgtgaagtctctgccaggttttgtatcaagatgatgctggcctta

SEQ ID NO: 924557 - DNA, 697 bp, Homo sapiens
agctttagctggagagatatgcatgagatagattatggatgttatggtgttcttttgtaagatatggatcagtgaggtcactttcaataccccttttaaaatacagtgtatttgtttgttctcacactgctgtgaagaaatactcaagactaggtaatttataaaggaaagaggtgtaattgactcacagttctgcatggctggggggcctcaggaaacttataatcatcatggaaggcacctcttcacaggacagcaggagacagaacaagtgccagcaagggaaatgccagacatttataaaaccatcagctctcgtgagaactcactatcacaagaacagcatgagggtaaccacccccatgattcaattaccccccgctgggtccctcccacaacctgtggggattatraggattacagttcaagatgagaattaggtggggtcacagtcaaaccatattatagagactgtctacattgtcactgcattctccctaacagtgtttagaacaatgcagaagctcaatgaatatttgtttaatgaatgcataaataaatgaaataacagaaatcttgagccatctggcttaagcaagcaaagaaatgtattcgattgcacaagctgaaatcacagggtaaggctggcttcaggattactgaggtcacagatcaaataaagtaatcaggattcagg

SEQ ID NO: 924558 - DNA, 579 bp, Homo sapiens
agacggtagcaatggaaatgaagaaaagtggacagatttaaaatttgtggagagttttaaaatttggaatcatctgcacttagaaataaggataagggaagcgagagcaaggagttaataaaatggcacttagatttctaatctgygcaactgaatggatggggcagttactcacagtaggagagaaggtttaggagaaaaataataagcttgtttatggacactgagtttgagatgattgtgggatatcaacatgcagatgtccagttagttgctggatatgtggattggaagctcaggagagagtttgtagctggaaacgtgcatttgggagccatcagcataaaaatggcagctgaaatcttgaagtggatgaggtcactctggtacagttcagtgttcaaaagaagactcttggcagcaatagcctaggaagtatgaacatttaaggatgaccaaagaccaggagccatcacaggtgaccagaagaatacaccgaggggcagaggattaggagcctagtctaaacggatgttggaaagaaatattagaagatgaatatgggaattataatactta

SEQ ID NO: 924559 - DNA, 601 bp, Homo sapiens
attatttaatttgaaagaaaatgatgctaaagaccaataagaaatcatctgaaggtacaaaattaactggtaacagtaagcacacagaaaaacacagaatttaacactgtaattttgatgtgcaaactactcttatttaagtagagagactaaatgatgaaccaattgaaaataataactacaacttgtcaagacatagacagtaccacaagacataaaaagaaacaacaaaaagttaaaaagtggggaaattgtgttaaagaagtgtagagtttttattggttttctttttgcttgtttrtttgtttttgcaatcaatgttaagttgtcatcagttcaaaataatgggttataagacagcatttgcaagcttaacggtaacctggaattgaaaacatacaatggatacaaaaaaagaacagcaagaaatgaagtcataccaccagagaaaatcatcttcacttaaaggaagacaggaaggaaggaaagaaggaagagaagaccacaaaacaaccagaaaacaaaaaaacacagtgaacaaagtaagtccttacttatcaataataatgttgaatgtaaatggactaaactctccaatcaa

SEQ ID NO: 924560 - DNA, 601 bp, Homo sapiens
attatttaatttgaaagaaaatgatgctaaagaccaataagaaatcatctgaaggtacaaaattaactggtaacagtaagcacacagaaaaacacagaatttaacactgtaattttgatgtgcaaactactcttatttaagtagagagactaaatgatgaaccaattgaaaataataactacaacttgtcaagacatagacagtaccacaagacataaaaagaaacaacaaaaagttaaaaagtggggaaattgtgttaaagaagtgtagagtttttattggttttctttttgcttgtttgtttgtttttgcaatcaatgttaagttgtcatcagttcaaaataatgggttataagacagcatttgcaagcttaayggtaacctggaattgaaaacatacaatggatacaaaaaaagaacagcaagaaatgaagtcataccaccagagaaaatcatcttcacttaaaggaagacaggaaggaaggaaagaaggaagagaagaccacaaaacaaccagaaaacaaaaaaacacagtgaacaaagtaagtccttacttatcaataataatgttgaatgtaaatggactaaactctccaatcaa

SEQ ID NO: 924561 - DNA, 616 bp, Homo sapiens
acaaatggtcataaatgacatgattaatacgttattgtaattcaatgttgtggaatattatgtggctgatatggtttgactgtgtccccaccaaatctcaacttgaattgtatctcccggaatttccacgtgttatgggagggacccagggggaggtaattgaaccatgggggcaggtctttcccatgctattctcatgatagtgaataagtctcatgagatctaatgggcttatcaggggtttccacatttgcttcttcctcattttctcttgccacttccaygtaagatgtgccttttgcctcttgccatgattctgaggcctcaccagccatgtggaactgtaagtccaattaaatctctttttcttcttagtctcagatatgtctttatcagcaaagtgagaacagactaatacagtaaattggtatcaagtgagtggggcattgctgaaaagatacacaaaaatatggaagccactttggaactgggtaacaggcagaggttggaacagtttggagggctcagaagacaggaaaatgtgggacagtttggaacttcctagagacttgtggaatggctttgcccaaaatgctgatagtgatatggacaataa

SEQ ID NO: 924562 - DNA, 616 bp, Homo sapiens
acaaatggtcataaatgacatgattaatacgttattgtaattcaatgttgtggaatattatgtggctgatatggtttgactgtgtccccaccaaatctcaacttgaattgtatctcccggaatttccacgtgttatgggagggacccagggggaggtaattgaaccatgggggcaggtctttcccatgctattctcatgatagtgaataagtctcatgagatctaatgggcttatcaggggtttccacatttgcttcttcctcattttctcttgccacttccacgtaagatgtgccttttgcctcttgccatgattctgaggcctcaccagccatgtggaactgtaagtccaattaaatctctttktcttcttagtctcagatatgtctttatcagcaaagtgagaacagactaatacagtaaattggtatcaagtgagtggggcattgctgaaaagatacacaaaaatatggaagccactttggaactgggtaacaggcagaggttggaacagtttggagggctcagaagacaggaaaatgtgggacagtttggaacttcctagagacttgtggaatggctttgcccaaaatgctgatagtgatatggacaataa

SEQ ID NO: 924563 - DNA, 615 bp, Homo sapiens
ggggcactgctacagcagtgttaagagggaaattcatagcactaaatgcccacatcaaaaagttagaaagatctcaaattaacaacctaacttcaaaaccaaaagaattccagaagcaagaacaaatcaaccccaaagctagcagaagatgagaaataagaaaagtcaatgaagaaccgaaggaaatagagacacacaaaaaaaatgcaaaagatcaatgaatccagaagttgtttttttgaaaaaattaataaaacaggccactatctagatgaataaagaagaaagagagaagatcaaaataaacacaattataaatgatgaagggaatgttaccactagccccacagaataaaaataaycatcagaaagtacgaacaactctattcactcaaactagaagagatggctaaattcctggacaaatacaccctcccaagactaagccaggaagaaactgattccctgaacagaccaataacaatggctaaattcctggacatatacatgctcccaagactgagccaggaagaaactgattcccagagcagaccaataaaaagctccaaaattgaatcagtaataaataatctaccaataaagaaagctcaggac

SEQ ID NO: 924564 - DNA, 813 bp, Homo sapiens
ccagatgtacaaagaagagctggtaccattactacagaaactattccaaaaaaattgaggaggaaagactcctcctcaaatcattctgaggccagcatcaccttgataccaaaacctggaagagacacaacaaaaaaagaaaacctcaggccaatatccttgatgaacattgatgcaaaaagtctcagcaaaatacttgcaaaccaaatccagcagcacctcaaaaagctaatcaaccatgattcagtaggcttcatctctgggatgcagggttggttcaatatatgcaaatcaataaatgtgattcatcacataaacagaacaaaaaccacatgattttctcaatagacacagaaaaggcttttgataaaattcaacataccttcatgttagaaactctcaataaactagatattgaagaaacatacctcaaaataataagtgacatttctgacaaacccacagccaacatatactgaaygggcaaagctggaagcatttctcttgaaaaccagtacaagacaaggatgccctctctcgtgactcctattcaacataatattggaagtcctagccagagcaatcaggcaagagagagaaataaagtgcatccaagtaggaagtgaggaagtcaaactacctctttttgcagatggcatgtttctatatctagaaaaccccatagtctcaacgcaaaagctccttctgttggtaaacaacttcagcaaagctgcaggatacaaaatcaatgtacaaaaatcactaccattcctatacaccaacaacagccaagtcaagagccaaatcagaaat

SEQ ID NO: 924565 - DNA, 605 bp, Homo sapiens
ttttgtattttggtaaagatggggtttcatcatgttgcccaggctggtctcaaactcctgagctcaggcaatccgcccacctcaacctcccaaagtgctaggattacaggcatgagccactgcacccacccaagttgtcatacaatcttgatttaatgtttttaggcctgttactgtgtctgttatttgaggattagaaagccaacaaaattaaaatgctgaaataaaggcaggctaacaacaacaacaaaaagaggaatacttttaaaagctacaatacagtagtagcctttaagatgttaaataatgatgttaaagatgttaaataatgattattctgactaaagtatattggtggagartatttgaccagtcaccaaaaatctagtgaggtagagattccagcattctgcagaaaatttgtagaatatcttaactattaaagactaaaaaagttaggaaaatcagcataaaatcatttacatattacaatctaaggaaataaactttccaacctcatgtaatgtaatatatatataaaagaaaccttttttattatgttttataccctatagatctgggcagaagttgaacctggtaagagg

SEQ ID NO: 924566 - DNA, 731 bp, Homo sapiens
agaggtgggggaatcacttgagcccagaaggttgaggctgtaatgagctgtgatcctgccactgaactccagcctcagggacagaatgagaccctgtctcaaaataatagcaataataataataatatattacttggtacaataatcaggaagtggcaagtttcttaactatagtaaaatactctaacgatgaatggaagtaaaataccagaagaaaagaaatcaacctgagaagattcagggacctacagcataggtgatgttttaaagcattcagtgtccctagaccacacgttgaaacaatcttttttacagtatatggcatgttgctctctctataaatttcctatcactacaaaagagacccagtattttgggggcctattgggattttggagacaacatattccacatttgagaatatwgctctgactcattaatgaagtttcccaggctactggtctcaagcagaatccagaacaaaagtgggctctacagaagatatggactctgctccaagctgctctggccactgtgccagatgatccagcaggattcaaagatgctagaaacatacatagtggtcattataggactctgtgcatgtctctgacaagcctgtaggagacaggagagcaaatccctatggaattagtgcaagaacattccctcttcagcagaggagtatcctctgtgtgaaaaacaaaacagcaagtggagaacattaatcc

SEQ ID NO: 924567 - DNA, 731 bp, Homo sapiens
agaggtgggggaatcacttgagcccagaaggttgaggctgtaatgagctgtgatcctgccactgaactccagcctcagggacagaatgagaccctgtctcaaaataatagcaataataataataatatattacttggtacaataatcaggaagtggcaagtttcttaactatagtaaaatactctaacgatgaatggaagtaaaataccagaagaaaagaaatcaacctgagaagattcagggacctacagcataggtgatgttttaaagcattcagtgtccctagaccacacgttgaaacaatcttttttacagtatatggcatgttgctctctctataaatttcctatcactacaaaagagacccagtattttgggggcctattgggattttggagacaacatattccacatttgagaatatagctctgactcattaatgaagtttcccaggctrctggtctcaagcagaatccagaacaaaagtgggctctacagaagatatggactctgctccaagctgctctggccactgtgccagatgatccagcaggattcaaagatgctagaaacatacatagtggtcattataggactctgtgcatgtctctgacaagcctgtaggagacaggagagcaaatccctatggaattagtgcaagaacattccctcttcagcagaggagtatcctctgtgtgaaaaacaaaacagcaagtggagaacattaatcc

SEQ ID NO: 924568 - DNA, 731 bp, Homo sapiens
agaggtgggggaatcacttgagcccagaaggttgaggctgtaatgagctgtgatcctgccactgaactccagcctcagggacagaatgagaccctgtctcaaaataatagcaataataataataatatattacttggtacaataatcaggaagtggcaagtttcttaactatagtaaaatactctaacgatgaatggaagtaaaataccagaagaaaagaaatcaacctgagaagattcagggacctacagcataggtgatgttttaaagcattcagtgtccctagaccacacgttgaaacaatcttttttacagtatatggcatgttgctctctctataaatttcctatcactacaaaagagacccagtattttgggggcctattgggattttggagacaacatattccacatttgagaatatagctctgactcattaatgaagtttcccaggctactggtctcaagyagaatccagaacaaaagtgggctctacagaagatatggactctgctccaagctgctctggccactgtgccagatgatccagcaggattcaaagatgctagaaacatacatagtggtcattataggactctgtgcatgtctctgacaagcctgtaggagacaggagagcaaatccctatggaattagtgcaagaacattccctcttcagcagaggagtatcctctgtgtgaaaaacaaaacagcaagtggagaacattaatcc

SEQ ID NO: 924569 - DNA, 731 bp, Homo sapiens
agaggtgggggaatcacttgagcccagaaggttgaggctgtaatgagctgtgatcctgccactgaactccagcctcagggacagaatgagaccctgtctcaaaataatagcaataataataataatatattacttggtacaataatcaggaagtggcaagtttcttaactatagtaaaatactctaacgatgaatggaagtaaaataccagaagaaaagaaatcaacctgagaagattcagggacctacagcataggtgatgttttaaagcattcagtgtccctagaccacacgttgaaacaatcttttttacagtatatggcatgttgctctctctataaatttcctatcactacaaaagagacccagtattttgggggcctattgggattttggagacaacatattccacatttgagaatatagctctgactcattaatgaagtttcccaggctactggtctcaagcrgaatccagaacaaaagtgggctctacagaagatatggactctgctccaagctgctctggccactgtgccagatgatccagcaggattcaaagatgctagaaacatacatagtggtcattataggactctgtgcatgtctctgacaagcctgtaggagacaggagagcaaatccctatggaattagtgcaagaacattccctcttcagcagaggagtatcctctgtgtgaaaaacaaaacagcaagtggagaacattaatcc

SEQ ID NO: 924570 - DNA, 700 bp, Homo sapiens
caatgcagaggtgggggaatcacttgagcccagaaggttgaggctgtaatgagctgtgatcctgccactgaactccagcctcagggacagaatgagaccctgtctcaaaataatagcaataataataataatatattacttggtacaataatcaggaagtggcaagtttcttaactatagtaaaatactctaacgatgaatggaagtaaaataccagaagaaaagaaatcaacctgagaagattcagggacctacagcataggtgatgttttaaagcattcagtgtccctagaccacacgttgaaacaatcttttttacagtatatggcatgttgctctctctataaatttcctatcactacaaaagagacacaatgttttgggggcctattgggattttggagacaacatattccacatttgagaatattgctctgactcattaatgaagtttcccaggctgctggtctcaagtggaatccagaacaaatgagggctctacagaagatatagactctgctccaagctgctctggccactgwgccagatgatccagcaggattcaaagatgctagaacatacatagtggtcattataggactctgtgcatgtctctgacaagcctgttggagaggggagagcaaatccctatggaattagtgtaagaccattctctcttcagcagacaagtatcctctgt

SEQ ID NO: 924571 - DNA, 598 bp, Homo sapiens
ccagggaggtgaaatatcgctacaaagagtattacaaaacattgctcacagaaatcaaatatgacacagacaagtggaaaaagattccgagctcatggatagaaagaatcaatactgctaaaatgcccatgctgcctaaagcaatttacagattcagtgctatttctgacaaactaccagtgacattcttcaccaaagtagaaaaaaactattttaaagttcatatggaataaaaaaaaaaaaaagaaagagcccaaatagccatggcaatcccaaggaaaaagaacaagctggaggcacmttacctaactttgaaccacactgcaaggcaacagtaaccaaagcagcatggcaatggtacaaaaacaggcacatagaccaaggaaatggaatagagagcccagaaataatgccacccacctacagccatctgatcttcaacaaagttaagaaaaacaagcaatggggacagaccccctattcaacaaataatgctgagataactggctagtcacatgcagaagattcaaactggatactttcctaatacatatacaaaaatcaaagcaagctggattaaatactaaaatgtaaaacc

SEQ ID NO: 924572 - DNA, 598 bp, Homo sapiens
ccagggaggtgaaatatcgctacaaagagtattacaaaacattgctcacagaaatcaaatatgacacagacaagtggaaaaagattccgagctcatggatagaaagaatcaatactgctaaaatgcccatgctgcctaaagcaatttacagattcagtgctatttctgacaaactaccagtgacattcttcaccaaagtagaaaaaaactattttaaagttcatatggaataaaaaaaaaaaaaagaaagagcccaaatagccatggcaatcccaaggaaaaagaacaagctggaggcacattacctaactttgaaccayactgcaaggcaacagtaaccaaagcagcatggcaatggtacaaaaacaggcacatagaccaaggaaatggaatagagagcccagaaataatgccacccacctacagccatctgatcttcaacaaagttaagaaaaacaagcaatggggacagaccccctattcaacaaataatgctgagataactggctagtcacatgcagaagattcaaactggatactttcctaatacatatacaaaaatcaaagcaagctggattaaatactaaaatgtaaaacc

SEQ ID NO: 924573 - DNA, 710 bp, Homo sapiens
tagttttaatcctcagtcaaaactaaactaattgtgtaggtttaagctttggagagaaaaaccatgtgccttaaattcaagttaaactatgtttttaaagattaacattcagagaacatgtttccatattgctgatgccctaataaatagcatataccagaagtcttaccacctgaagattgatatacatcaatctcatataaataaatcctcccttttctgtagatagctgagccagcaattggactaccttttcctaatgcaagtaagataaaagagaaagcaaaacatacatacttgcatcccatagtacacagcttcttactcaactcaagcaacagtctctgagcacatcaaaaatcaagattttaggctgctgaggtggaaatcctttggcatgaaggatcagagcaggggagacctttcagattgtggtgcccaatgttttctcctgggttccactaatgctgcagaggggaacagggagttagaaggaagaggaaatgttagaagacatttctsaagctggaagatgctagcacaccttcccccagttctgttaacttcctggagcagaaacaaaccaagtgttatactggaaaaatttcggcccaaactgtctactagcaacaacaacaacaaaccacactccacacaactaagggcggagtgggagtgatttatacaacgtgaccctcctgttctgacat

SEQ ID NO: 924574 - DNA, 892 bp, Homo sapiens
tgtgtcgaagttcaagttctccctctgcctggtctgctttcctcactcccttcggatgcttctcccgagtcctccccagtcatctcctgcacttaaatgcacctcacagcatttgccaagaacctgcccaaggttgaggaacctgacctccaccaagaggctgagctctgactgggagtgtagtggttggacagcctctgcaacagtcagagcctccacagtgggcagggtttgggaggctggaggctggagtctgagggagacatctgggcctgtgatggagtcagcagagtaaggggatcgggaggctgaggtgaaaaccacgtgaacatttactcaaacaatctgctaatggttttttttttgtttggttggtttttttgtttgtttgttttttgagacagagtctcactttgttgcccaggctggagtgcagtggtgtcatctcggctcactgcarcctccgcctcctgggttcaagcaattctcctgcctcagccttccaagtagctggggttacaggttcccactgccacacccagcttatttttgtatttttagtagagacagggtttcaccatgttggccaggctggtctcaaactcctgacctcaagtgatcctcccactttggcctcccaaagtgctgggaatacagatgtgagccatgcacccagccgaaatccgctaatgttaatcatccgattgtttccaattttcattattataaacgttaatacatggcctgatacctaaattctttcattcacagttctgatcatttttttttctcatatttttagagactatgtctcactaggtcttgctaggctggtcttgagctcctagactcaagcaatcctcctgcctaagcctcctgagtagctggaatt

SEQ ID NO: 924575 - DNA, 758 bp, Homo sapiens
ctctgaaagttttcactcagctagggccttgaacattctttttaggttgttactcaaaacactaaaagaaacttgcggccgggcgcggtggctcaggcctgtaatcccagcactttgggaggccaaggccggcggatcatgaggtcaggaaatcaagacgatcctagctaacacggtgaaaccccgtctctactaaaaatacaaaaaattagccgggcgtggtggcgggcgcctgtagtcccagctactcaggaggctgaggcagaagaatggcgtgaaccyaggaggcggagcttgtagtgaggcgccgagatcatgccactgcactccagcctgggcgacagagtgagactccgtctcaaaaaaaaaaaaaaaaaaaagaaaagaaacttgccccaccctgagccaaattccttaaaccctcatataacctgcataactcgagcaggaggtcaatgcaagagaagcagcaatgctcaattgagacctgggcattttcacttcacccggtttccgcagtagcaatcaaacgtagatataattatctatcagtgtggaacccgggacatagaaaggttaaatgacttgtgtgttaagaaaatgctgtagccaatagaataaaaaacctacgaatacagctaaccagggtcataaaatgacaatgacaatgacaattacaaaacactgctcaaagaaatcagagtaacacaaacaaatggaaaaacattccatgctcatggataggaagaataaatatc

SEQ ID NO: 924576 - DNA, 828 bp, Homo sapiens
caaagtggttttatcattttacattcccaccaacagtgtatgagagttctagttcctctgcactcttattaacacatggttttaatcagacatctaataggtatgcagtagtttctgattgtgattttaatttatatttccttaatgtgaataatgttgaacatcttttcatgtgcttatttgccatccatttttttggtgaaataactgtttagatctgttgcctactttttgaaaaaaagttgaattctttgctcttatttgatttccaaagttctttatatattctggatacacatcctttatcagatatgggctttgcaaatattttctcccagtcagtggctggtcttttcattcttctcatggcatcttttcaggaaaagaagtttttaattttgatgaagtccaatttatcaaatttatttcctattgactgtgcttttagtgtaatatctaagacatattatctaattaaaggtcacaaagattttacttctatgttttctagaagttttatagttttagattttacacttaggtgcataatcgattttgacttaatttttatacgtggtatraggtatgaattgaagttctttttttctttttttgcatatagctatccaactgttctagcccaactcactgaaactattcattagaaattatcctttctcattgcctttgggtctttttaaaaatcaattgtatatgtgtgtgtatgtgtgtctgaactttctattctgttccatttgatctgttctatttgagctgtctatcatgatgttaatagcacctcatcttgatgactattattttttatga

SEQ ID NO: 924577 - DNA, 756 bp, Homo sapiens
tgatatttattcttcctatccatgagcatggaatgtttttccatttgtttgtgttactctgatttctttgagcagtgttttgtaattgtcattgtcattgtcattttatgaccctggttagctgtattcgtaggttttttattctattggctacagcattttcttaacacacaagtcatttaacctttctatgtcccgggttccacactgatagataattatatctacgtttgattgctactgcggaaaccgggtgaagtgaaaatgcccaggtctcaattgagcattgctgcttctcttgcattgacctcctgctcgagttatgcaggttatatgagggtttaaggaatttggctcagggtggggcaagtttcttttcttttttttttttttttttttgagacggagtctcactctgtcgcccaggctggagtgcagtggcatgatctcggcgcctcactacaagctccgcctcctrggttcacgccattcttctgcctcagcctcctgagtagctgggactacaggcgcccgccaccacgcccggctaattttttgtatttttagtagagacggggtttcaccgtgttagctaggatcgtcttgatttcctgacctcatgatccgccggccttggcctcccaaagtgctgggattacaggcctgagccaccgcgcccggccgcaagtttcttttagtgttttgagtaacaacctaaaaagaatgttcaaggccctagctgagtgaaaactttca

SEQ ID NO: 924578 - DNA, 575 bp, Homo sapiens
ggtgtgataatagcttactgcagcctcaaactcctagactcaggccatcctcctgcctcaacctcccaagtagctgggactacaggcacacgtcaccatgcccagttttttttattattattatttttggaagagatgggagtcttgctatgttgcccaggctggtctcaaactcctggcctcaagtgatcagcctaccttggcctcccaaagctccaggattacagatgtgagtcaccatgcctggccaagaaaacaaatattcttcaatgacacctctgagccaggcattgctcaaaagtgaacaagataaagtcccwgagctcatgaagttaacattctagttggaaagccagtgaactgtaacagatgtgaaactagaatatgcaatatgacataaccccaggtaacagtaagtactaatgataaattaaacagtgtaaagggataaagaaaacagggagggggtgctggagaggccagacggggtcagaggccttttttcatgagagtttgccagaggcttaaatgaaatgaagtgaatttatttgaagatgtggggaaaagcttccagc

SEQ ID NO: 924579 - DNA, 575 bp, Homo sapiens
ggtgtgataatagcttactgcagcctcaaactcctagactcaggccatcctcctgcctcaacctcccaagtagctgggactacaggcacacgtcaccatgcccagttttttttattattattatttttggaagagatgggagtcttgctatgttgcccaggctggtctcaaactcctggcctcaagtgatcagcctaccttggcctcccaaagctccaggattacagatgtgagtcaccatgcctggccaagaaaacaaatattcttcaatgacacctctgagccaggcattgctcaaaagtgaacaagataaagtcccagagctcatgaagttaacattctagttggaaagccagtgaactstaacagatgtgaaactagaatatgcaatatgacataaccccaggtaacagtaagtactaatgataaattaaacagtgtaaagggataaagaaaacagggagggggtgctggagaggccagacggggtcagaggccttttttcatgagagtttgccagaggcttaaatgaaatgaagtgaatttatttgaagatgtggggaaaagcttccagc

SEQ ID NO: 924580 - DNA, 779 bp, Homo sapiens
cctggtcaatacagaaaagtgatttctagaattatgtctttcaaattggactacgcaattaaattcatttacagacgtactgtgctacatagtatataaatagtgcaattatctgaagtggaacttggtggatctttttatggtaataagatgattttcgggcttgtcatggagcaaaaggcaaggaagtaagctgatcaagattgttctcaagtgccttttttttttaaaagctttatataaaacgtatacrtatagattttggatgtatcttatcctgagcccccacattgacaaagaacataactgccaatacaccagatccttgtcccagagaagaattcagcataaatgatgtcaacccatccaacctcacttgaaggcaaccagagctggggggaagtctggtaacaggcctccaagtaaggacagcatcaaagcaaacctctagggcactcagtgcagggttttccaaactgcaggttgcaaacaaaattgtgaaatcaatttaggaggccacaaccagaattttaaaaattgaaattcagcgccatagaaaatatcagagttgtctatcaccatagtaaaggtgttttatgacacttttttttttttgccaggtgttttatgtgtttactgggtcatgatattgtaacatgtatacttctaattatggatcttggtcaataaaactttgaaagccacatatctaaggagtactaagtacatataattttctaagcactacatttaataaaacaggattcctcataacaagc

SEQ ID NO: 924581 - DNA, 582 bp, Homo sapiens
ctaaagatctcaaattaacaatctaactttgtacttagaggaactagaataagaaagaacaaacgaaacccaaagctagcatgctaaataactaaaattggagaataacttaatgaaattgagaaacaaaaatccatataaaagatcagtgaaactgttagtttttctaatgggtaaacaagattgatagacagctagctagattawgaaagaaaaagagaagatccaaataaatacaatcagaaatgacaaagattacaacatcctacaagaatgcaaaagacctccagagacattctgagcacctctttgcacacaaattagaaaatctaagggaaattgctaaatttctagatatacacaacctcccaagattgaaccaagaagaaagtaaaaccctgaacagaccaaaaacaaatagtgcaattgaatcagtaacttaaaaaacctaccaacaacaacaacaaaaatccctagaccagatggattcacagctgcactttactagatttacaaagaaaaactggtaccaatcctactgaaacgattccaaaaaatcaaggatgaggggctccccactaa

SEQ ID NO: 924582 - DNA, 646 bp, Homo sapiens
gaaactatcaacagagtaaacagacaacctacagaatggagaaaatattcacaaactatgcatccaacaaaggtctaatacccagaatgtataaggaacttaaatcaacaagcaataaacaagtaacttcatttaaaaatggacacaggacatgaatagacacttctcaaaagaagatatataagtggccagcaaacatgagaaaatgcacagcatcastaatcatcagagaaatacaaatcaaaattatagtgagataccatctcacaccagtcagaatggccattattagaagtcaaaaaatagcagatgctgatgaggctatggagaaaagagaatgcttatgcactgttgatgggaatgtaaattagttcagccagcttggagatttctcaaagaacttaaaacagagctatcatttgacccagcaatcatattaatgggtatatacccagagaaaataaattgttctcccacaaaggcacctgcactgatatgttcatcacagcaccattcataatagcaaatatacagagtcaacctaggtgcccaccaatggtgtactggataaacaaaatgttgtacatatacaacatggaatactacacagccatgaaaagaatgaaatcattttctttgcagtaac

SEQ ID NO: 924583 - DNA, 646 bp, Homo sapiens
gaaactatcaacagagtaaacagacaacctacagaatggagaaaatattcacaaactatgcatccaacaaaggtctaatacccagaatgtataaggaacttaaatcaacaagcaataaacaagtaacttcatttaaaaatggacacaggacatgaatagacacttctcaaaagaagatatataagtggccagcaaacatgagaaaatgcacagcatcagtaatcatcagagaaatacaaatcaaaattatagtgagataccatctcacaccagtcagaatggccattattagaagtcaaaaaatagcagatgctgatgargctatggagaaaagagaatgcttatgcactgttgatgggaatgtaaattagttcagccagcttggagatttctcaaagaacttaaaacagagctatcatttgacccagcaatcatattaatgggtatatacccagagaaaataaattgttctcccacaaaggcacctgcactgatatgttcatcacagcaccattcataatagcaaatatacagagtcaacctaggtgcccaccaatggtgtactggataaacaaaatgttgtacatatacaacatggaatactacacagccatgaaaagaatgaaatcattttctttgcagtaac

SEQ ID NO: 924584 - DNA, 598 bp, Homo sapiens
ctcactttcctcaaagaaaaggcaaactattacaaaagacaaatatgttaaagttattaaaataaaatgtgatgaaaactagagtagaaacattatttgaaacaattcataatggcatggaaataactgttaattgcttgttatatctcccttaaattttatcagaaattgtaatattaatttatacctacttgtgtattacagttttaagaaagtaataaagacatttggacaatggaatcttcatcgccttccaccatttcatttacacaactctaagtgcaaggttcctttcaatcaagaaacgtctgtaataaatgtctccaccttccactcagttttacctctcagggtgacacagaaaaaaacttcactcagtggattataaatatcagagtcttctatagkttttcctgttatgaattagctctactcagccttctgaatttgggagataatgtaaacagaataaaacgtaaagaagagaaggtggaaaatgtctattttcctaacacaaccatctttatggctgcctagttgcctgaagccccatagagatgaccttttatttattcattcattcattcaacaactatat

SEQ ID NO: 924585 - DNA, 605 bp, Homo sapiens
tgtactcaaatttgccatagttaaaggaacataagcccacacagatgagaaagaatcagtgcaagaactctggcaactcaaaaggccagagtgtcttcttacctccaaataactacactagttccctagcaagggttcttaaccaggctgaaatgacagaaacagaattcagaatatggataggaatgaagattattgagattcaggagaaagtagaaattgaatccagggaatctaaggattgcaataaggtgatgcaggagcttataggccaaacgaccattataaggaagaaccaactgatctgaaagagctcaagcacacactacaagaatttcataatgcaatcacaagtattaacagcagaatagacaaagctgaggaaagaatctcaaagcgcaaagactggttctctgaactaggtcagaaaaaatcaggaaaaaggaacaaaaaagaatgwacaaaacctccaagacatcgaggattatgtaaagagaccaaatctatgattcactggcatccctgagtgtattaggccattcttgcattgctacaaggaaataattgagactggataatttaaaaagaaaagaggtttaaattgg

SEQ ID NO: 924586 - DNA, 642 bp, Homo sapiens
tcttggaaggactgctgactccatgactgttatctttgtttaagttgttcttttgagagtactaaggcaaacacatgagcctctgggattcatttcaatgcaagttagcacacagatgctgagaacattcctgtacaacacaggagaaatggaagacagagtctacaacatactctaaaagctacaaataagatcaagtccaacaaatactgtgagggccgagcaggatggctcatgcctctaattccagcactttgggaggtcgagatggggtgatcgcttgagctcaggagttcaagaccagcccaggcaacatggcaaaaccctgtttctmccaaaaaatacaaaaatctcaagacgtgatggtgcatgcctatagtcccagctattctggaggctgaggtgggaggattgcttgagcctgggaggtggaaactgcagtgacctgagatcgtgccactgaactccaacctgggcaacatagtaagaaactgtctcaaaaagaaaaaaaaaaggattatatatatatatatatatatatatatatatatatatatatatatatatatatatatataattataccttcaagcatacacttagtaacagatatccttaaaacatgaggctaggcttatattt

SEQ ID NO: 924587 - DNA, 642 bp, Homo sapiens
tcttggaaggactgctgactccatgactgttatctttgtttaagttgttcttttgagagtactaaggcaaacacatgagcctctgggattcatttcaatgcaagttagcacacagatgctgagaacattcctgtacaacacaggagaaatggaagacagagtctacaacatactctaaaagctacaaataagatcaagtccaacaaatactgtgagggccgagcaggatggctcatgcctctaattccagcactttgggaggtcgagatggggtgatcgcttgagctcaggagttcaagaccagcccaggcaacatggcaaaaccctgtttctcccaaaaaatacaaaaatcwcaagacgtgatggtgcatgcctatagtcccagctattctggaggctgaggtgggaggattgcttgagcctgggaggtggaaactgcagtgacctgagatcgtgccactgaactccaacctgggcaacatagtaagaaactgtctcaaaaagaaaaaaaaaaggattatatatatatatatatatatatatatatatatatatatatatatatatatatatatataattataccttcaagcatacacttagtaacagatatccttaaaacatgaggctaggcttatattt

SEQ ID NO: 924588 - DNA, 753 bp, Homo sapiens
atgccagctcatgaaagccacagagaccataccctgcagagccacaggggtgaaactgcccaaggccctgggagcccacccctttcatcagtgtgccctggatgtgagacatggagtcaaatgagattttggagctttaagatttagtgactgcctggccaggtttcagacttgcatggggcctgtgacccctttattttggccaatttctcccatttggaatggggacatgtatccaatgcctgtatccccattgtatcttggaagtaaggaacttgcttttgattttacaggctgataggcagaaggaacttgacttatctcagatgggcctttggactcggactttggggttaatgctggaaagagttaagactttgggggactgttgggaaggcatgattcattttgaaatgtgaaagggacatgagatttgagaggggttggagcagaattatatcaatttggctctgtgtccccaaccaaatctcatctcaaaytgtggtccccacatgtcaagggagggacctggtgggagatgattggatcatggaagcagtttcccccatgctgttatcatgatagtgagtttgcacaagatctggctgtttgataagtgtctggcccatcccccttctccctttctttctcctgcctccatgtaagacgtgccttgtttccccttcactttcccccatgattgtaagtttcctgaggtctcctcagctgtgtggaactgagtcagttaaacct

SEQ ID NO: 924589 - DNA, 593 bp, Homo sapiens
gaagtatcgtaggttttttttttttttttcttttcagagatggagccttgctctgtcgcccaggctggactgcagtggcgctatctcagcttactgcaaactccacctcccaggttcaagccattctcctgcctcagcctcccaaggagctgggattacaggcatgtgccaccacgcttggctaattttttgtattcttagtaaagatggggtttcaccatattggccaggctggcctcaaactctggacctcgtgatccacccgccttggcctcccaaaatgctgggattacaggcrtgagccaccacaccctgcccatgttgtaggtttttaattcagtggtgttcagattaattgggtcattcttttaatcattatgaatgatacacataagttttcatagtcttttttccatgatttgtcctgttaatgtcttcctgaggctttaggataaagtctcactctcaggaaatatatagtttatagaaatttgtttatttgttgaactcataccactggctaggtcatagctatagggcagtgattgttatagaatatatctgaaaatattctttctcaggctctttaaagc

SEQ ID NO: 924590 - DNA, 578 bp, Homo sapiens
tacaccaccatgcttgactagtttttttgtaaattttttaggagagacacagtcttgctatcttgcctagactggtttcaaactcctctcctcagtgatcttaccacctcagcctcccagagtacctaggaagacagacacaagctaccatgcccagcatcttttcttacagggacatgaatcccatcatgagggtgccaccctcataacctcatctaaacccagtgacctcctgaaggccccatctccaaataccatcacagtgaggagtagggttttagcacatgagttttggggagacacaattgagcccatagaaatagtastcaaaagtgagatgcatagacttacgatttcagagatagaacatttacaggtgatgccaatacaaggacatggccacaggtagattaagtgtcatgatactctctggagatcaggatcaaggaaggaagagaataggggtaggactgattatccatataaatgtaggaggcactcaggataatggtgggacatggagtcaaaggaaggatcatgaacctcatgctgaaggctttaatgagtaaggaatgact

SEQ ID NO: 924591 - DNA, 578 bp, Homo sapiens
tacaccaccatgcttgactagtttttttgtaaattttttaggagagacacagtcttgctatcttgcctagactggtttcaaactcctctcctcagtgatcttaccacctcagcctcccagagtacctaggaagacagacacaagctaccatgcccagcatcttttcttacagggacatgaatcccatcatgagggtgccaccctcataacctcatctaaacccagtgacctcctgaaggccccatctccaaataccatcacagtgaggagtagggttttagcacatgagttttggggagacacaattgagcccatagaaatagtactcaaaagtgagatgcatagacttacgatttcagagatagaacatttacaggtgatgccaatacaaggacatggccacaggtrgattaagtgtcatgatactctctggagatcaggatcaaggaaggaagagaataggggtaggactgattatccatataaatgtaggaggcactcaggataatggtgggacatggagtcaaaggaaggatcatgaacctcatgctgaaggctttaatgagtaaggaatgact

SEQ ID NO: 924592 - DNA, 582 bp, Homo sapiens
tgtggctttatttggaaatagggtctttgcagatgtaagaatcttaggatgagatcatccttaatttagggtggaccctaagcccaaggacaagtgtccctatcagagaaaggagagggagatttgatacatatcgagaaagccatgtgaacatgggaacagagattggagtgatgcaggcatgagccaagaatgcctggggccatcagaagctggaaraagcaaggaaggattcctccctggagccttcggagggagtgtggctttgatgacaccttgattctagacttctggcctctaggactgtggaagaatacatttctctcattttaagccacctgttggtggtcatttgttgggggcagctctaggagatgaatgcaatcactaaacctgtttccaatgtagcattcatcagcctaatcccgtattttttcctctacgtcctcttttaccagaggtcaggagttgccctttcagaagaagttcccccttcccataagagatctcccttccccttgcaaagaattgtcattggtttatcctaagaagcagggaaggtaaagacattgaataggcctg

SEQ ID NO: 924593 - DNA, 576 bp, Homo sapiens
tcctgccactattattgtgtgggagtctaaatctctttgaaggtctctaagaacttgctttttgaatctgggtgctcctgtgttgggaacatatatatttaggatagtgagattttcttgctgaattccaccctttaccattacataatgcccttctttgtcttttttgatctttgttggcttaaactctgttttgtcagaaactaggattgcaactcctgcttttttctgttttccatttgctkggtaggtttttctctatctctttattttgagcctgtgtgtgtctgcatgtgagatgggtgtcttgaagacagcataataatggggcttggttcttcatccagcttgccacactgtgtcttttaattgggtcattcagcccatttacatttaaggttagtactgatatgtgtagatttaatcctgtcatcattatgttagctggttattttgcaaacttgtttatgtagtttctttacagtgacactggtctgggtacttcagtgtgtttttacagaggctggtaatggtctttcctttgcaaattaagtacttccttcaggagctcttgta

SEQ ID NO: 924594 - DNA, 717 bp, Homo sapiens
caccgtccggagcttagtctccttgttcctctaccagtccctccctccgcaggtctctggggacttctgaccgcctgttcttactctccccctgcccccatacttcccgcccttgtctcaggaacggtgatacagtcaycggattgctctccatctcctgttagtctacactgcacacaactcaataatccgcgcccttccatccgggtgacagagacacagataatctgagctagtggtgctcaaagtaccggtcccagaacagcagcatcagcatctcttgggaacttgttaaaaatgagaatttgggccgggcgcggtggctcacgcctgtaatcccagcactttgggaggccgaggcgggcggatcacgaggtcaggagatcgagaccatcccggctaaaacggtgaaaccccgtctctactaaaaatacaaaaaattagccgggcatagtggcgggcgcctgtagtcccagctacttgggaggctgaggcaggagaatggcgtgaacccgggaggcggagcttgcagtgagccgagatcccgccactgcactccagcctgggcgacagagcgagactccgtctcaaaaaaaaaaaaaatgcgaatttgggggccccaccccagatctactgaacagaaactctgtggagcccagcagatgattcccatgcacactaaagtttgcgagccactgatctaaacattctttcatc

SEQ ID NO: 924595 - DNA, 793 bp, Homo sapiens
acattttcagaagcaagtgcataaccttctcaccaaaaccaggttatctgcttctgtccctggcttgagtcctgggcttaactgtcatttcagaatctgagaatcagtcaggtatggtggctcatgcctgtaatcccagcactttgggaggcagaggtgggcagatcactcaaggtcaggagttccagatcagcctggccaacatggtgaaaccctgtctctactaaaaatacaaaaattagccaggtgtggtggtgcacacctgtaatcccagctacttgggaggccgaggcaggagaatctcttgaacctcggaggcggaggttgcagtgagccaagatcatgccactgyactccagcctgggcggcagagcaagactctgtatcagaaaaaaaaaaaaaaaaaagaatgtgaggatcaggtgggcatggtggctcatgcctgtaatcccagcactttgagagactgagacaggaggatcactttagcccaggaattcgagaccagcctgggcaagatggcaagaccttgtttctgtttaaaaactttttaaagttaaaaataaaaatgtgagaatccccttgacactcccaccatcttcacccccacctcaggtccttctccagctctccttctggcttcatcctgtcttccacggctctcctgtcccacctattctccctgccggtgcccaagttttagccttcactgccttcccctagaacacgccagggatattgcattctgtcctcactgtcttgaggatcttcctccccggctcatcactcccca

SEQ ID NO: 924596 - DNA, 617 bp, Homo sapiens
ttcaataagggctttttaatgaggccagggaggagactgggctggaggtgaggcctgggcccctgagggcagagggacaggcgggacaggcctgagttgccttgctttgcttgccttccttccttcctttctttctctctctctctccttccttccttccttctttccttccttccttctttgcttccttccttctttccttccttccttctctctctcttctttctctctcccttctctttctcgctttctttcrctctctccctccctccctccttccttccttctttttctttttcagagtttcactcttgtagcccagcctggagtgcagtgagctgagattgcgccactgcactcactgcaacctccacctctcgggttcaagcgattctcctgcctcagcctcccaagtagctgggactacaggtgtgcaccaccacgcaaggttaatttttttatttttagtagggatgggatttcaccgcgttggtcaggctgatctcgaactcctgacctcaggtgattctccccgcctcagcctccgaaagtgctgggattacaggcgtgagccaccatgcccagcctcctgagctgcctttctgatagttcccctc

SEQ ID NO: 924597 - DNA, 617 bp, Homo sapiens
ttcaataagggctttttaatgaggccagggaggagactgggctggaggtgaggcctgggcccctgagggcagagggacaggcgggacaggcctgagttgccttgctttgcttgccttccttccttcctttctttctctctctctctccttccttccttccttctttccttccttccttctttgcttccttccttctttccttccttccttctctctctcttctttctctctcccttctctttctcgctttctttcgctctctccctccctccctccttccttccttctttttctttttcagagtttcactcttgtagcccagcctggagtgcagtgagctgagattgcgccactgcactcactgcaacctccacctctcgggttcaagcgattctcctgcctcagcctcccaagtagctgggactacaggtgtgcaccaccacgcamggttaatttttttatttttagtagggatgggatttcaccgcgttggtcaggctgatctcgaactcctgacctcaggtgattctccccgcctcagcctccgaaagtgctgggattacaggcgtgagccaccatgcccagcctcctgagctgcctttctgatagttcccctc

SEQ ID NO: 924598 - DNA, 617 bp, Homo sapiens
ttcaataagggctttttaatgaggccagggaggagactgggctggaggtgaggcctgggcccctgagggcagagggacaggcgggacaggcctgagttgccttgctttgcttgccttccttccttcctttctttctctctctctctccttccttccttccttctttccttccttccttctttgcttccttccttctttccttccttccttctctctctcttctttctctctcccttctctttctcgctttctttcgctctctccctccctccctccttccttccttctttttctttttcagagtttcactcttgtagcccagcctggagtgcagtgagctgagattgcgccactgcactcactgcaacctccacctctcgggttcaagcgattctcctgcctcagcctcccaagtagctgggactacaggtgtgcaccaccacgcaaggttaatttttttatttttagtagrgatgggatttcaccgcgttggtcaggctgatctcgaactcctgacctcaggtgattctccccgcctcagcctccgaaagtgctgggattacaggcgtgagccaccatgcccagcctcctgagctgcctttctgatagttcccctc

SEQ ID NO: 924599 - DNA, 642 bp, Homo sapiens
cccagctcacctccagtcgctctgtgagcatctcactcacccagggcccttcctaagctgcttccatgcaccttcagagcagaagtgtgggacagagaatggggttctcccagggagggatggggcggccacacccggcagcacgatgcctcctggctgtgtttttgagggcccctcgcccacatacctggagcacctggtcaaactcaggcttggtctgcttgaggtgtcgcaggatggggaagacggtgagcaccgtggagaagtcgtgtcgcacaatggccttccgggcagcagacacgatgttctccccttcaagcatcagcccatccagggcatcctgagggrgcagggagacagttcagggaagggtggggcggtgggagctagttctgggctagtgggggatccttgcagtatgtaggggggccagtgtgcaggaagaggggtgacggggaggtggtgagcgtccacccaggaccggtccccagggcacgaggtggtggtggtgggtggagttgagggctgcaagagtctgttgtgacagctcttgctggggctggctgcagagcccccggggcggggcgggacctgtatcagggagtcgaaggtcttcttctggtggtgctcggggatgatgtc

SEQ ID NO: 924600 - DNA, 534 bp, Homo sapiens
cactcatcacaaattagtttctcagaatgtttcagagtagtttttatgtgaaattgtttccttttccacaataggcctcaaagcgctgcaaatatcctcttggagagtctacaaaaacagtgtttcaagactcctcaatcaaaagaaagtttcaacactgtgagatgaatgcacacatcacaaagaagtttctcakaatgcctctgtgtggtttttatgtgaagatatgtgtttctccacagtaggcctcaaagggctccaaatgtccacttgcagattctacaaaaactgagtttcaaaactgctcaatcaaaagaaagtttcaactatgtcaaatgaatgcacacatcacaaagaagtttcttagaatccttctgtgtagtacttatttgaagatatttccttttcctccataggctgcaaaggtatccaaatatcctcttgcagattctacaaaaagagagattcaaaactgctctatgaaaagataggttcaactctgtgtgttgaatgctcacatgacaaagaagtttc

SEQ ID NO: 924601 - DNA, 562 bp, Homo sapiens
gtctgggcccccagaagcgttgctgctcttcacccttgcagtccaggagcgtgtcaccacccaaaatttgctgagctggccaggaacgtgtaacggttcctttagttcctgccgtttggcaggtcccgagttcttgtccggagtccaggaaaaatgaggttacatagacaactggagggtgagcaaggcagaaagragctttactgactgacagaacagctcccagcagagactagacctgcaattggtagtttgtatccacaggcaggtcgctccaaggagagtatgagtgtggttaagtctggggtttttaagggctcagaaaggaggaagtgcatgctgattggtccatgggtggccctgggtggtcctgataaaagcactactcaattggctgaaagatatccagaaagttgtcactctgggtcacagacttcaccctgaattttctgcccagtctccatgcttcaggtctccctggcttgaaggctgggtttcaccagggacctgctccttccctcctgctccttccctcctaggctgcctcccacagccattatca

SEQ ID NO: 924602 - DNA, 784 bp, Homo sapiens
atctcgaagtctgggcccccagaagcgttgctgctcttcacccttgcagtccaggagcgtgtcaccacccaaaatttgctgagctggccaggaacgtgtaacggttcctttagttcctgccgtttggcaggtcccgagttcttgtccggagtccaggaaaaatgaggttacatagacaactggagggtgagcaaggcagaaaggagctttactgactgacagaacagctcccagcagagactagacctgcaattggtagtttgtatccacaggcaggtcgctccaaggagagtatgagtgtggttaagtctggggtttttaagggctcagaaaggaggaagtgcatgctgattggtccatgggtggccctgggtggtcctgataaaagcactactcaattggctgaaagatatccagaaagttgtcactctgggtcacagacttcaccctgaattttcwgcccagtctccatgcttcaggtctccctggcttgaaggctgggtttcaccagggacctgctccttccctcctgctccttccctcctaggctgcctcccacagccattatcatgctgtccacaatgcccaggttgtcagcaccaaggggcatctgcaggcccacactgagctgccttcagccccctggcctccctcctgtgctcaatgatgcccaaagtctggaggggaccaaggcagcatggatggggctggcatgtcagcaccaccccaagtatgcgcacaccggtccaggttgcaacagcacccgggctcgaccacaaccttg

SEQ ID NO: 924603 - DNA, 569 bp, Homo sapiens
ctgagctgccaaatattagaatagccaatcaaagcaacaagccaattaatgacttactgcaatgtgacaggcaagaatttaaaactgaaaaaatgccaactccgctgtcccatttccttcctggaatgtgaggctggtccagggtcaggtgggtcagcacagacacggaggctgcctcacttttgaggaagtctcaacaaaagactccagcagttctatggaatctgagttgagggtagagtaagagggagatataggagtagaaaagtactaagtactggggaaagtgtcctcaaggtttcctccctcctcctcctattaacagactttgggagatacctgaaaatatttttgtgcaaggcctcagataaagagacctagaaatgaargaggcatgtaaatatgtgaaagagcatgacctaccagggggttcagagtccttgactgcaactcctttcagagattatagtgcactggctgtttatcccagctggttagggagggcagggtttcctgaggagagaccctgcagtaaagccttcatcattgcctaatgtcaggcctgaaaa

SEQ ID NO: 924604 - DNA, 634 bp, Homo sapiens
agaaggcagctttctggtctaggttgcttgcctggtggaataaccctgaaatttacctctgaggatctgaacttctggtggccatgtttttgtcaggctccgattgcctctggtgattgtgcctaaagtttcaggaataggaagcatgaattccctaactcagtcagtggaagtaatgatgaaatgacccactcttcccatctgttcaaagtatctaaagtatactgtgtatctggaaagatgactgggcctttttgggggtttttggatactctcaagctggcagcctccagcttgtgcagcatataaaaagtacaatgggtcctgcaggtatagccactgttgcactcccttgccatagagtgggtccctgggtctgaagcaatgttatgagtgatgtgaacaagtcagaagctctgagagcactcagatggtgggcctggcccaggcatggtgggcaggggaggtaaaatccaggcccagaacgtatatcwatcttaataaggacaaattactgccccagctcttgtcctaggtggacgggatctgatataatcaacttgcaccaagtgtttgtttggtctcctccaggcatggtatcttatccagccctggggtttgtttctgctgctga

SEQ ID NO: 924605 - DNA, 621 bp, Homo sapiens
ctgagagtgaagcctttgctgagttttagctttaagcagaggtttctccagtcttacttccatcctacaaaggcccaaggctttatggtccattcctctgagtgcagcagcctgtgaaaacagtagctctaggccattggtgtttagttgaaattccgagggctgtcagcttaagcacttactagtttcctgatattgttttgtttctaatctcagagtatttcttagtttcttgcaagctcatcagtttttaataggtatcatgcgtgagtgaatataaatttttacatatatataagagaggatttattttgttgtttacaagagttttggggggatctctaagtctcttcttgccttttaatggaaacgttctcgtcattttttttaatcaaaaaatcacattttgtttytcctgtgacttcttcctgtaggtgagcagtaggtcatccagtcccagtgtcagaatgattactacctcaggaccaacctcagaaaagccaactcgaagtcatccatggacccctgatgattccacaggtgaccagtctgtttcttcatacttatgaagttgaatcagtcatgtttatattcatttggccatgtcattactctaatgtt

SEQ ID NO: 924606 - DNA, 809 bp, Homo sapiens
ctcttctgagtttcacctaggatgtgaaacatccctttgtccaatgtattcacctcatcacaaggagaaggtgagtatattaaaatgttttgagagactaccttcccataacttttattagttatatttttcttattcttctatattattatgttattgctgttaatctcttactgtgcctaatttatacatttaacttgtcataggtatgtatgtacagaaaaaaccccagtgtatatacagttcagtattatccatggtttcaagcatccactagggatgttggaatgtatctccatgagtaagagggggctctgtatttttatggatagttgtamggaagtatgtctggaggacaaaaggctacggtctaatggtaatagactgcgggagtggggggtggaatttagcaaggcctgtttgttcagtcttctcttgtcttctttcctttcttccgggtatagggagggcccttctgaaatgagagttttacgaccgattttcaggggaaggtcagtgaggtttaatggcccatttcaggggaaagagggtgagggaagatcagagcgtgaccttctgtttttacggttttctcaatttccttcaagtctaaaatatatagtatgacaagatgacgtattctggggtagcgtgttctgaactccgtcagtatcctcatttgtaaactggggataataatgttacctaactcagaaagatcttgtgatcacgaagttcatacttgtaatacactcagaacagtggctggtaattgcatcagcaagaaatcccatctgaggaaggggaaa

SEQ ID NO: 924607 - DNA, 645 bp, Homo sapiens
tactgtgcctaatttatacatttaacttgtcataggtatgtatgtacagaaaaaaccccagtgtatatacagttcagtattatccatggtttcaagcatccactagggatgttggaatgtatctccatgagtaagagggggctctgtatttttatggatagttgtaaggaagtatgtctggaggacaaaaggctacggtctaatggtaatagactgcgggagtggggggtggaatttagcaaggcctgtttgttcagtcttctcttgtcttctttcctttcttccgggtatagggagggcccttctgaaatgagagttttacgaccgattttcaggggaaggtcagtgaggtttaatggcccatttcaggggaaagagggtgagggaagatcagagcgtgaccttctgyttttacggttttctcaatttccttcaagtctaaaatatatagtatgacaagatgacgtattctggggtagcgtgttctgaactccgtcagtatcctcatttgtaaactggggataataatgttacctaactcagaaagatcttgtgatcacgaagttcatacttgtaatacactcagaacagtggctggtaattgcatcagcaagaaatcccatctgaggaaggggaaacaacagg

SEQ ID NO: 924608 - DNA, 573 bp, Homo sapiens
aatagtatttggtcatgatgtattattattttatgtattgttgaatttgatatagtaaaagtttgttaagaatgcaatcatctgtgtctatgagagatattggtctgtaattctttctttgttatgtctttttctgtcttttgtttgtttttatcaagatagtgctagcttcataaagtaaattgggaaagctttttacccctccagtttcttgaaagagtttgtggatttagtaatattccattattaattattctgtataattcactactgaaaccataaagacttggagcgttatttgygtgcatatttttacttaaaaattcaccttctttaatggatttaggaatattcaggttacctacttcttttctgagtgagctttggttaatatgggcccttcaagatatgtgtttgcttcttctaagttattaaatgtacgaacataaagtttgcgtggtatttctttatggtcttttgatttctataaggtgtgtagagactaccatgttttcatttttgatcttggcaatttttatctttttttttctttcctgatcattctggctagag

SEQ ID NO: 924609 - DNA, 573 bp, Homo sapiens
aatagtatttggtcatgatgtattattattttatgtattgttgaatttgatatagtaaaagtttgttaagaatgcaatcatctgtgtctatgagagatattggtctgtaattctttctttgttatgtctttttctgtcttttgtttgtttttatcaagatagtgctagcttcataaagtaaattgggaaagctttttacccctccagtttcttgaaagagtttgtggatttagtaatattccattattaattattctgtataattcactactgaaaccataaagacttggagcgttatttgtgtgcatatttttacttaaaaattcaccttctttaatggatttaggamtattcaggttacctacttcttttctgagtgagctttggttaatatgggcccttcaagatatgtgtttgcttcttctaagttattaaatgtacgaacataaagtttgcgtggtatttctttatggtcttttgatttctataaggtgtgtagagactaccatgttttcatttttgatcttggcaatttttatctttttttttctttcctgatcattctggctagag

SEQ ID NO: 924610 - DNA, 588 bp, Homo sapiens
agagcatgctttaacatcttttgagataacatataggctgagaattttccaaatcattatgttctgattcttttttgcttaacagtttcttcaatttgtctttctcacattttgctctaagtagccagaagaaaccaggctacacattcaacagttggcttgaaactatcatcagttaaatatctaagtcctttgcttacaagttcttcttttcacaaagtagtaatgcacaatttagccaaggtwttttttcttttgaccctttataacacagttctcagaaattattccttctcagaaatttcccatgtccttctgtaaatgccacaacaaatctaccataaactgggtggctggacacgaattttggagtgacactattcaacccattattgttattaagtactctttttaataacagtacttaataactgttttgcctttccttctgaagccttaacagaagtacctacaatgtccatattttcaccaagagtctcttccagggaaagtagactttttttttttttaatcatgagctgctattttgcatcttctgcccattacttgatttcaaaagaactttca

SEQ ID NO: 924611 - DNA, 559 bp, Homo sapiens
acctaagcagttcccagtttaaattttcccttcagcttagtgatttgggggtccccaagatttattttcctttcacacctattgtattagtcagctcaggcttcataacaaaataccacaaactgggtggtttgcacaacagaatttattcctcaaagttctgaaggaaccaagattagggtgttggcaggttagtttcccttgcctctctctttggcttatagatgggcatcttctccttgtgttgcctcatggcttttgyctgtgcttgtgtccccctggtgtctctctcttcttataagcacatcagtcctgttggattaggtcacacacttaggactccatttaacctaaattgtctccttagaggtcctgttcctaaatgcaatcaaattgtgatttaaggcttcagtgtgtgattttttgcggggacacaagtcagtccataacacctactgtaggacaaagctgaactgatctaaattacactcctgaagcttcctgtttagcatgtttgagtatgttgaattcacttttgaatatctccctatatgagttt

SEQ ID NO: 924612 - DNA, 565 bp, Homo sapiens
atccttagcagacaaacacaggaacagaaaaccatataccccatgttctcacttataagtgggatctaaatgattagaacacatggatgcatagaggggaacaacagccagtggggtctacaggatggtggagggtgggagaagggagaagatgaggaaaaataaataatgggtactaggcttaacatctaartgataaaataatctgtacaacaaatccccatgacacaagtctacctatataacaaacctgcacatatacccctgaacttaaagttaaattaataaaatacttgcaaaccaaattcaacagcacattaaaattatcataccccatgaccaagtgaaatatatccctataatgcaagtatggttcaacaaacaaaaatcaattaatgtgatatgtcacattaacagaatgaaagattaaagaaaaccacaatcatctcaatagatgcagaaaaagcattttacaaagttcaacaccctttcatgataaaaacttttaacaaattaggaatagaagaaatagacctcaacataataaatgccatatatgaaaagc

SEQ ID NO: 924613 - DNA, 647 bp, Homo sapiens
ttctttcctttttgtaggacagtttttccaaatatagtattcttgattagcagggtttttttttcagccctttgaatatatcatcttactctttcctgtactacaagatatctactgagaaatccactgttagtcttatagaagctcccttatatktgatggctcttttctctttctgtctttgacttttgacaatttgattataatgtgtcttgataaggacttttttgggtttatcttagttggagtccgttagacttcttgaatctggatagacatttccctccccagatttgagaagttttggccattatttctttaaaaactttctatccttttttcccagccttcttttgagactcccataatgcatatattggtctgcttgatgatgtcctgtaagtctcttaggctttctttactctttctcattcttcttttctttttgctcctttgactggataatttcaaatgttatatcttcaagctcactgatcttttcctgttgaactcctctagtgaattttttcagatcagttattgtattcttcagctccaaaatttgtttggttctttttcatattttctatatctcttttgatattctcattttgttcatacatcattttcctgggcttgttgagcat

SEQ ID NO: 924614 - DNA, 718 bp, Homo sapiens
tcaagccagggatggcctgaagcctgggggctaagctttcacttctgtgatccagagtgagaagttatggtgctttctctcgcctgcctatggctgcccacagtccactcaacacacactttcttcctttggaagcccataaaaaccctggactcagccagactggggagacaacaggacttcctgcctgcaaataggagctacccactctgggtctattctccactaagggcttcagatattgggacaacatgcctgcagataggagctacacactctgggtctcctctcctgagagctgcactcactgggatgatctacctgcagaaaggagctacccactttgggtctccttaaagctatactgttactcaataaagcaccccttaaccttgctcattctacagttgtccatgtacctcattcttcctgagcatgagataagaacttctgacactgagtggtgagagtggaagagmtgtaacaaacagggctaaaacacgcctctcaactacactcaccatattgctggcaatgagaaggagagaagagtggcaaccctttggggagcccagacctatgggtgctccgagtcaggaatgtgacaccctctttggggctttgcagtttctggcatttccaagtttccaggcatcaccacattcccctcatccagacatggtgcccacagtgaaagctacttgcaatgcatctgatt

SEQ ID NO: 924615 - DNA, 563 bp, Homo sapiens
cccaaaagactccctgcccctgtaggctcagacgtgcctgctcctgctgcctggcctctcgctgctactggtgccagctctgatttcaaagcaaagttgaggataagcttgggcactgttaaaaccttgctggtgtgtgtgcattcggggcagtgctgacacaccaaccccctgctacctagataytgattagggtcctagttcccttttctctacaggacttaaggctaattaaggggaatattgtaaagtattcagatgacctgacagttatatagaagccttccagaatttaactcaagtatttgaactcacctggaaggacattacgttacttttgaatcagaccctgactaccactgaaaagcaggccaccctgcaagcagtgcagaattttcggtacgacctttgtatctcatatagtttcagagaaggggatgagccttatcccgttggaagaacagcagtaccactggaggaccctaaatgcgacaccagtgatgaaatggaagaatgaaagaggaagcactttcatgtgtgtatactggaagggttacgaagga

SEQ ID NO: 924616 - DNA, 538 bp, Homo sapiens
cacccaactgtggatgtagatctgggcatccctgtgctttggggaaccccaaaagactccctgcccctgtaggctcagacgtgcctgctcctgctgcctggcctctcgctgctactggtgccagctctgatttcaaagcaaagttgaggataagcttgggcactgttaaaaccttgctggtgtgtgtgcattcggggcagtgctgacacaccaaccccctgctacctagatattgattagggtcctagttcccttttctctacaggacttaaggctaattaaggggaatattgtaaagtattcagrtgacctgacagttatatagaagccttccagaatttaactcaagtatttgaactcacctggaaggacattacgttacttttgaatcagaccctgactaccactgaaaagcaggccaccctgcaagcagtgcagaattttcggtacgacctttgtatctcatatagtttcagagaaggggatgagccttatcccgttggaagaacagcagtaccactggaggaccctaaatgcg

SEQ ID NO: 924617 - DNA, 533 bp, Homo sapiens
caagacttaatttttttgaccaggatgaaacagctctagtcacaacattctttttcaaaatagtctacgttttagatttctagtttttttttttccttttagctcctctttgtataatactcacacttgatccatgcacacttaacctccttgtaaaatgtgtttcttcttgtcttgaggccatcaaactcccagcagtcatgcaacgggagcctcagatgatggctcctttcttaccakggacccttagataggcctctgagagagatctgactgctgttttccccagaaaaatgccccctatcatatgaagcagttaagagtagtcattgtccctatcctaatggcagttagatgtacctcttcagaggggggactgatggcagtggtggcctgtctggagaagcagttgcaaagaagctggctgtagtggaggaggcatggcctgggctgtgtgctccatgaaatgagcatgagccaggacaaggtagaagcctcaccaccccccttccaagttggcaggggaggagccc

SEQ ID NO: 924618 - DNA, 582 bp, Homo sapiens
tcaaggggatggggcacagtacagcacagtgcaataatcaggaagcgaaagcccaagtagttctcatttttactatttttgctttaactaatttatctgattgtaagtttctgtaatttaatttttagtaatgactacattaaaagaacagctcaaggctgggcacagtggctcatgcttgtaattccagcactttgggaggctgaggtgtgtggatcacctgaggtgaggagttcaagaccagcctgascaacatggtgaaacccccgtctctactaaaaatacaaaaattagctgggcatggtggcgtgtgccagtaaacccagctactcgggaggctgaggcaggagaatcatttgagcccaggaggcagagattacagtgagccaagattgtgccattttactccagcctgggcaacatgagcgagactctctctaaaaaaagaaagaacagctcacaaaaatgtctgaaaatttaacaatcagttctcatgcgctggtacaaaccatcttcagcatgttgtaccattattgaaaatcttggcccaaatgctccatatgtatctcactaaaccctctg

SEQ ID NO: 924619 - DNA, 609 bp, Homo sapiens
ctccagctcacacccattcctgctctgtctacctcacatccggcctgagtgtcaaataggcttttccacgtcgcccgtccggaactgaaggtacgatcttccccctgtgaagtgcttcttccacagctcccttaaggtccttcttgtggcttttctttttttttcttttttctttttttttttttgagacagagtcttgctctgtcacccaggctggagtgcagtggcgtgatctcggctcactccaagctctgctcccgggttcacgccattctcctgcctcagcctcccaagtagctgagactacaggtgmccaccaccaagcctggctaatttcttttgtatttttttagtagagacggggtttcaccatgttggccaggatggtcttgatctcctgatccatctgtctcggcctcccaaagtgctgggattacaggcgtgagccaccacgcccagccttctcatggcttttctgtctgcctcgaattcttcccccagagcctgttggattctttcccccatccttgcaagctttccctcaaacacttccttctcaataggggtgacgtggccaccctcgctgactctgcttatcccccacgctca

SEQ ID NO: 924620 - DNA, 609 bp, Homo sapiens
ctccagctcacacccattcctgctctgtctacctcacatccggcctgagtgtcaaataggcttttccacgtcgcccgtccggaactgaaggtacgatcttccccctgtgaagtgcttcttccacagctcccttaaggtccttcttgtggcttttctttttttttcttttttctttttttttttttgagacagagtcttgctctgtcacccaggctggagtgcagtggcgtgatctcggctcactccaagctctgctcccgggttcacgccattctcctgcctcagcctcccaagtagctgagactacaggtgaccaccaccaagccyggctaatttcttttgtatttttttagtagagacggggtttcaccatgttggccaggatggtcttgatctcctgatccatctgtctcggcctcccaaagtgctgggattacaggcgtgagccaccacgcccagccttctcatggcttttctgtctgcctcgaattcttcccccagagcctgttggattctttcccccatccttgcaagctttccctcaaacacttccttctcaataggggtgacgtggccaccctcgctgactctgcttatcccccacgctca

SEQ ID NO: 924621 - DNA, 609 bp, Homo sapiens
ctccagctcacacccattcctgctctgtctacctcacatccggcctgagtgtcaaataggcttttccacgtcgcccgtccggaactgaaggtacgatcttccccctgtgaagtgcttcttccacagctcccttaaggtccttcttgtggcttttctttttttttcttttttctttttttttttttgagacagagtcttgctctgtcacccaggctggagtgcagtggcgtgatctcggctcactccaagctctgctcccgggttcacgccattctcctgcctcagcctcccaagtagctgagactacaggtgaccaccaccaagcctggctaatttyttttgtatttttttagtagagacggggtttcaccatgttggccaggatggtcttgatctcctgatccatctgtctcggcctcccaaagtgctgggattacaggcgtgagccaccacgcccagccttctcatggcttttctgtctgcctcgaattcttcccccagagcctgttggattctttcccccatccttgcaagctttccctcaaacacttccttctcaataggggtgacgtggccaccctcgctgactctgcttatcccccacgctca

SEQ ID NO: 924622 - DNA, 649 bp, Homo sapiens
cctcctatgccctcctcatctgtgaaatggtgatagtagtagcactacctcggaggatggttattaatgagaagcaaaagtgaacacaacacaggttaactacttatattttcatgcatattattatttgtatgtttagctgcatcccacttctttttttttttgtttttttttttttggagatgaagtctcactctgtcacccaggctggagtgcagtggcatgatctcggctcactgcaagctccgcctcccaggttcatgccattctcctgcctcagcctcccgagtagctgggactacaggcgcctgccaccacgcctggctaattttttgtatttttagtagagacggggtttcaccatgttaaccagaatggtctcgatctcctgacctcgtgatcttcccgcctcagcctcccaaagtgctgggattacaggcgtgagccactgtgcccggcatcacacttcttaaagtagttacacacagagaggcacatagaragaaatcaaagtaaaaaacacacaacacacacatacataatggtaccatgaccttctgcctgggggcacattttagacgatggtgcaggaatgaggaacccagcgagggcagtggtcttgctttggacacagagatcatggtcaggg

SEQ ID NO: 924623 - DNA, 361 bp, Homo sapiens
cctaatctgtggtgctttgttatggcagcctgagcagactaatacagtggtgtaggctagggcctgtgtcctaaagccagtgagacatgacgtagtcaaatccaggatatgttttggaggagagtcagcagttctttcaaatgaatcggatgtgggatgtgagagaaagagggtaataaaggctactcctaggcccgagcatttggtgggtggyattgccattacagtgatggcagagaaatttcaagttctgttttggccaggttaggttgagacacttctttttggagacctcagagaaatctcatgtgcaccacacctatacactttcaagggttacaagtttcctctcctctatcat

SEQ ID NO: 924624 - DNA, 734 bp, Homo sapiens
aatgctatttccagaggtgggtagaggtcccagccttgacagagatggctggcagaactgtcagtaaaacacactgatgtattatcagggggaagggcaagatacactttagctcccctggcaggccagcaggaaagtcatccacctcccagacacacttctgacccagtgttctagctattcagatcagacaggcacctctttttatccacaggaatgttgatgttccaggtagagagaaactgtgactacttctcatgcaagcctgaacctacagggtgctccacctgtgggaatgcagtcaccctgaagtgtcttgaagtgcttcagaaaggctatgtgtagttctaccatgctgagctcccatggaagaagccccagttggttctgctstgtggaaaagggggaagtctccttctctaagaccctttatgagcaccagagctgcctgtctgttgagctgtagactatccctgctgagcccagcactgcaactgggtctctgttgaagtaaacttcccactagtggaaaaacctgagactcaaggcctgccatctatcatcttttgtcctatgggatgttcgcttgatgcggttcacttccttttaccttaggattaggagttcctgataaccagactagtgtgaatgttgctggtcctctcggtctagctgcccagtggggctgccacaacccaagctggtgttggggaatgtcttcaagggagccagtg

SEQ ID NO: 924625 - DNA, 752 bp, Homo sapiens
ttgaagtgcttcagaaaggctatgtgtagttctaccatgctgagctcccatggaagaagccccagttggttctgctctgtggaaaagggggaagtctccttctctaagaccctttatgagcaccagagctgcctgtctgttgagctgtagactatccctgctgagcccagcactgcaactgggtctctgttgaagtaaacttcccactagtggaaaaacctgagactcaaggcctgccatctatcatcttttgtcctatgggatgttcrcttgatgcggttcacttccttttaccttaggattaggagttcctgataaccagactagtgtgaatgttgctggtcctctcggtctagctgcccagtggggctgccacaacccaagctggtgttggggaatgtcttcaagggagccagtgatataaactaccctcaagtctcctagcagtgggtaccagcactcactctgatgagggtggcggggaagtgacagagtctgtaaagttccttgggtataaatagccttagtgtgtaggctttctcaaatgctgattgcagtagtaatgaactggtcatagggtcacactcaagagttccttgttggccgggtttgtgcaggcagtggtgatagctgaggtcacacacaagttttctccttcctggatgcagtgttagttttcctggagatgctgtaatggactgtgtcagttggcttccagccaagaggtggaacttgcaaaggagaaccagctg

SEQ ID NO: 924626 - DNA, 741 bp, Homo sapiens
tggatgtccttcaattcaattctgaaattaaatacctggggataatgtcagattgtacagatagagggttcagtccccaagactgcccccgttaccacatactattcacaaatccaggcatccagaacttctgattgactgacttctatttggggttcccaagatcccctctttgggttcaattaacttgctggagtagttcacagaactcagaaaaacacttacgtttgtcaatgtatcatgaaggatattgcaaaggatccagatgaagaggcgtgtagggtaaggtgtggtgaaaggggcacagagtttccataccctccctggtgcaacaccctccaggaacctccatgtggccagctctctagaagctcccagaatcaatcctcttgaatttttatggaagcttcatgatgccagcattccttccyctcgggtgtagggcagggccacctctggcgagggtcttatgactcacaatcagaaggcaaggtgggagatcagagtccttccctggggcaggaaaaaaaaggaaggaggaagccagaaagattctgtttcctgaggcctgttcttgaggcacaacatgcccaacattataacaaatgcctgtaatgggggttatgggagttatgagccataaaagaaaacgtgcatgttgtgtgtgtgtgtaacaacaccacagatgtcaaaaattaaaaagaggacaaaactagcttaaagctggtgctctctctctca

SEQ ID NO: 924627 - DNA, 617 bp, Homo sapiens
cctcagctgggcatttccagagggagcaagtctctgagaggcaggtctagcgctaagctttcaacaagtcgcaggctatacttccgaacacaaagaaatgagaatgacttcacatctcagcagagccaaaagcagtagacaaataagcaaygatgagatttggttttttttcttccctctttccggacactcactcctgcctcccatcgtaccgtcctggaaacaggaagaaggtgtgtatcttggtacaagcatcaactatgcacaggtccactttaatggggtaaaggacagggagtgagataaataaatatgatgcgatgtctccaaaagaggaacattacactgggaacatccatacacggttcaaaattgcatccatatttagttattacttagaaatcatcaaggaaagaaatgctttctttttttttttctaggacttcttttaagagaggttagggaaagctttcagttatattttctgtcaccttccgcaattttaaattggatgaaatagtgggagactttgtttttatggctttctcctttcaactattgtaacaaacacagctacctatgcttagcatgctttaaggctgtatgggaccatctct

SEQ ID NO: 924628 - DNA, 482 bp, Homo sapiens
ggaaaaaaattgtaaatttgaaagtgcatagaaaaaataatagttaaaaaaactgagagcattagtggggctaatcacagaatgtgagactactccaagtagtccaatatacatggaattaaaatcctcaaagatggaaaaagcagaagtattaaacccacagatcccagaagtttagccccaagcacaagaaccaagaagaaaacracaccaagacatgtgaaaaccaaattgcccaaaccagaaataaaaagaagatgctgaaagccaggagacgtgggagaggggaagtcatgtgtgtatatatatataaaaaaaaatttttttttttttttttttttttttttttttgaggagtcttgctctgtcgccaagatgggagtgcagtggtgcaatctcctctcactgcaacctctgcctcccaggttgaagcaattctcctgcctcagcctcccaagtagctagcactacaggcacctgcc

SEQ ID NO: 924629 - DNA, 482 bp, Homo sapiens
ggaaaaaaattgtaaatttgaaagtgcatagaaaaaataatagttaaaaaaactgagagcattagtggggctaatcacagaatgtgagactactccaagtagtccaatatacatggaattaaaatcctcaaagatggaaaaagcagaagtattaaacccacagatcccagaagtttagccccaagcacaagaaccaagaagaaaacgacaccaagacatgtgaaaaccaaattgcycaaaccagaaataaaaagaagatgctgaaagccaggagacgtgggagaggggaagtcatgtgtgtatatatatataaaaaaaaatttttttttttttttttttttttttttttttgaggagtcttgctctgtcgccaagatgggagtgcagtggtgcaatctcctctcactgcaacctctgcctcccaggttgaagcaattctcctgcctcagcctcccaagtagctagcactacaggcacctgcc

SEQ ID NO: 924630 - DNA, 482 bp, Homo sapiens
ggaaaaaaattgtaaatttgaaagtgcatagaaaaaataatagttaaaaaaactgagagcattagtggggctaatcacagaatgtgagactactccaagtagtccaatatacatggaattaaaatcctcaaagatggaaaaagcagaagtattaaacccacagatcccagaagtttagccccaagcacaagaaccaagaagaaaacgacaccaagacatgtgaaaaccaaattgcccaaaccagaaataaaaagaagaygctgaaagccaggagacgtgggagaggggaagtcatgtgtgtatatatatataaaaaaaaatttttttttttttttttttttttttttttttgaggagtcttgctctgtcgccaagatgggagtgcagtggtgcaatctcctctcactgcaacctctgcctcccaggttgaagcaattctcctgcctcagcctcccaagtagctagcactacaggcacctgcc

SEQ ID NO: 924631 - DNA, 482 bp, Homo sapiens
ggaaaaaaattgtaaatttgaaagtgcatagaaaaaataatagttaaaaaaactgagagcattagtggggctaatcacagaatgtgagactactccaagtagtccaatatacatggaattaaaatcctcaaagatggaaaaagcagaagtattaaacccacagatcccagaagtttagccccaagcacaagaaccaagaagaaaacgacaccaagacatgtgaaaaccaaattgcccaaaccagaaataaaaagaagatgctgaaagccaggagaygtgggagaggggaagtcatgtgtgtatatatatataaaaaaaaatttttttttttttttttttttttttttttttgaggagtcttgctctgtcgccaagatgggagtgcagtggtgcaatctcctctcactgcaacctctgcctcccaggttgaagcaattctcctgcctcagcctcccaagtagctagcactacaggcacctgcc

SEQ ID NO: 924632 - DNA, 611 bp, Homo sapiens
cttagtgaacacattcgaccaactcaatgcagaaattgctgtttgcaacatggccccaaaatatgctttgcataggggaatgctgactttacataatatccactaaataaatgttagctctcacagtacaattttcattacacagcctgaggctctgttttcctgctggagaaatttctaccactgacatagatttgtaaatacttctagttcttgtttcttgtctgttctgcctcaagaagaacttacttgtgagaaagatactcaattctacttcctcacaaacactttaaatgaggtgcattgttctggattttgtagtggtggtggttgtttcagtttagtttttattatttcttgtcattttttgacaagcatactagccacttaataccaaagccatttttttcttaggccctttratgtttcccgctgaaagattctttccatttaaaatcaaaaaccgttaaaagttgtatgctaggtagcttggtacctgcatgttggaagtacgtccctgctgctcctctaagttttctctctgtaggctgttaaggagtgaaggcctgataaagcatgtgtatgcatgcatggatatagatatgcatggg

SEQ ID NO: 924633 - DNA, 596 bp, Homo sapiens
acgttggttcctggaggcaccaatccatgttgaggattggcataatgggaacggaatgatcttgggtcataggttttgcttttttttttttttttttttgcttctattcagaaaaaaattatactttagaattctgattaaaaatctgagaaatgaaataaagagtatgccttttaaaaaatgtttcacaagaacattgcagttttattctagaagttgtagcagggagattttggcttcatgtaatagaaagyccaatgagaataagattaaacactaagggaaatgggtttgctgcatgtaaggaaatctacaagtgggcatggcctggactggctaacccaggggattagccaactctcttacctggggaaagttgtggatattttccatgtaaattctcctgagtcctgcagcctcagtgagaaagtgtgcatgtgtgtactcacgtgtgtgtgtgtgtgtgtgtgtgtgtaatgtgatgtgggggctttggacaatccattctcttctgtgcagaggtgaactttcactttggagaaactgaacaactgtctgagtgagagcatgcccttatcatcctgtgtgatcagtgg

SEQ ID NO: 924634 - DNA, 596 bp, Homo sapiens
acgttggttcctggaggcaccaatccatgttgaggattggcataatgggaacggaatgatcttgggtcataggttttgcttttttttttttttttttttgcttctattcagaaaaaaattatactttagaattctgattaaaaatctgagaaatgaaataaagagtatgccttttaaaaaatgtttcacaagaacattgcagttttattctagaagttgtagcagggagattttggcttcatgtaatagaaagtccaatgagaataagattaaacactaagggaaatgggtttgctgcatgtaaggaaatctasaagtgggcatggcctggactggctaacccaggggattagccaactctcttacctggggaaagttgtggatattttccatgtaaattctcctgagtcctgcagcctcagtgagaaagtgtgcatgtgtgtactcacgtgtgtgtgtgtgtgtgtgtgtgtgtaatgtgatgtgggggctttggacaatccattctcttctgtgcagaggtgaactttcactttggagaaactgaacaactgtctgagtgagagcatgcccttatcatcctgtgtgatcagtgg

SEQ ID NO: 924635 - DNA, 547 bp, Homo sapiens
gaacggaatgatcttgggtcataggttttgcttttttttttttttttttttgcttctattcagaaaaaaattatactttagaattctgattaaaaatctgagaaatgaaataaagagtatgccttttaaaaaatgtttcacaagaacattgcagttttattctagaagttgtagcagggagattttggcttcatgtaatagaaagtccaatgagaataagattaaacactaagggaaatgggtttgctgcatgtaaggaaatctacaagtgggcatggcctggactggctaayccaggggattagccaactctcttacctggggaaagttgtggatattttccatgtaaattctcctgagtcctgcagcctcagtgagaaagtgtgcatgtgtgtactcacgtgtgtgtgtgtgtgtgtgtgtgtgtaatgtgatgtgggggctttggacaatccattctcttctgtgcagaggtgaactttcactttggagaaactgaacaactgtctgagtgagagcatgcccttatcatcctgtgtgatcagtg

SEQ ID NO: 924636 - DNA, 596 bp, Homo sapiens
acgttggttcctggaggcaccaatccatgttgaggattggcataatgggaacggaatgatcttgggtcataggttttgcttttttttttttttttttttgcttctattcagaaaaaaattatactttagaattctgattaaaaatctgagaaatgaaataaagagtatgccttttaaaaaatgtttcacaagaacattgcagttttattctagaagttgtagcagggagattttggcttcatgtaatagaaagtccaatgagaataagattaaacactaagggaaatgggtttgctgcatgtaaggaaatctacaagtgggcatggcctggactggctaacccaggggattagccaactctcttacctggggaaagttgyggatattttccatgtaaattctcctgagtcctgcagcctcagtgagaaagtgtgcatgtgtgtactcacgtgtgtgtgtgtgtgtgtgtgtgtgtaatgtgatgtgggggctttggacaatccattctcttctgtgcagaggtgaactttcactttggagaaactgaacaactgtctgagtgagagcatgcccttatcatcctgtgtgatcagtgg

SEQ ID NO: 924637 - DNA, 567 bp, Homo sapiens
tctggccactaaaaactctatatcactccctactctccgtgatttcctcttgcattgtgagacaatttgctctttcattgcattgtgcaatgattgaaagatttctgagaccccccagaagcagaagcactgtgcttcctgtccaccctgcagaaccatgagccaattaaacctctttttcaaaataaatcataccaaaaatggcaaatgaggactggagctttgctataaagatacctaaaaatgtggaagcggcttcggaactgggtaatggttagcggttggaagagtttggaaggctcaaaagaagacagacagatgagaacatttttgggccatcttagagactggttaaatggttgtgacaagaatgytgacagaaacatggacagtgaaggccaggctgagggggcctagataaaaataagaagatttctggaaaatgtcttccttttggatatggaaagcttacacaatgcctgtaccatcattttactttagacgcagtgaacttgctttttatttcagagactcgtaggaaaaagagaatgtagccttgacccagat

SEQ ID NO: 924638 - DNA, 651 bp, Homo sapiens
agagagactggcgaggatctcactgaggtctatgagtttgtaggtgtttctggggtgtgggagaccgactcccgctgaaatctgggagtagttggagagtagctgggacagacaggatagtcattgatggctgggggtgagctgctagatgatggcagtaagaacatatgatatattattgatgaatgaggtgactgtgaagaatctccagaggaggacacaggagagcacaatgacatgagtgattgtcctgcttggttaggaaagggaaatgtaaagttgtgaaattctgttgatgagggatgtgagagtggtgaagtcctgcgggatgatatagagtacttccacatccctggtgaggagctgccccttgggtctgaatttctgggaggggagagggagaagctgggtgagacaggcatgaatcttgaggagtcagggctgggggaccgctcatawtctcccgagacctgtgagtctctgggggactcctgggtgcatggggctgactcccgcacaaacctctggatggctggagagtaactgggagacacaggcgagtccctgaggcctgggggtgaagagatgaaagacataggggaggagcactgtgaggctcgtgagtttgtaggtgattccttggtgtggggg

SEQ ID NO: 924639 - DNA, 608 bp, Homo sapiens
actccagcctgggcaacaagagcaaaactctgtctcaaaaaaaaaaagtgatttcacagttttgaatccatttaaaacagggctgtcaactctattgtcttatccccttgagacaggaagacagagtgtgtccagaattggttccttccggtgggttcttggtctggctgacttcaagaatgaagccgcggacgcttatggtaggtattacagttcttaaagacggtgtgtccagagtttgtttcttcagatgttcagatgtgtccagagtttcttccttctggtgggttcgtggtcttgctgacttcaggagtgaagccacagaccttcacagtgagtgttagagctcttaaaggtagtgckgacccaaagagtgagcagcagcaagatttattgtgaagagcgaaagaacaaagcttccatagtatggaaggggacctgagcaggttgctcctgctggtggccagcttttattcccttatttggccccgcccacatcctgctgattggtccattttacagagtgctgattggtgcatttacaaatctttagctagacacagagcattgattggcatgtttacaattctttagctagacagaaaagt

SEQ ID NO: 924640 - DNA, 662 bp, Homo sapiens
atggcaaacagaggcaggtgtcagtctccccctactgtgctatgttcgattcaaaggttactgttttttgtttttttatttgtttgtttgttacccaggctggaatgcaatggcgtggtcttgggtcactgcaacctccacctcctgggttcaagctattctcttgcctcagcctcccaagtagctgggactacaggtgcgccacaacgcccagctaatttttgtatttttagtagaaacggcgtttcactatattggccaggctggtctcaaactcctgaccttgtgatccgcccacctcagcctcccaaagtgctcggattacaggcatgagccaccatgcctggcctatattttagttttyaggtgagaagaaacatcagaagcagttgagggaccaggaagtgggttctttaggaatgaggaggcgttctactgggtggctttttaaaatgtttcctccagagtcatctgcctcattaacagcttttgtcttagatgtctccctttgattttataaactgcatgatgatttcttgttctgttatgaatctgcactgctctagtcctttaataagcccagtgcatgttttcatcatctcatcaacaggcactttttctgcagtgttaacaatgtcatcttcctcatcactgttaccacg

SEQ ID NO: 924641 - DNA, 631 bp, Homo sapiens
aaactgcatgatgatttcttgttctgttatgaatctgcactgctctagtcctttaataagcccagtgcatgttttcatcatctcatcaacaggcactttttctgcagtgttaacaatgtcatcttcctcatcactgttaccacgatcacctggattcagaaccatttcaacaatttcaccattggtcaatgaatgagtgatggaagcctcattatttatgttaaaaactccttcaatatccacttcttccagcttaygaaaggggtctgaagatatatatttttttcacctgtaaggagattagacatcattttttctcacttgacatacagaatccttcaaagtcaccaccttgttcatcaccatcactgaacatagtctcaggctagaggtttcctgccaggtgtgcacaactgtgtctaagttgctgggttccaggcattggaagcagcttatacagcatccccatgctaaactcgttttgaagaccttccgtacccacacctctagtcactgctgccagcatgctgttcaaggaagtgttgttatatttattcttcattgacctaaggataacctggtcacacggctgaattaattaagtcacatttggggaaaagtacacagcata

SEQ ID NO: 924642 - DNA, 603 bp, Homo sapiens
atcccgggacgttgaggctgcggtgagcagagatcaaaccactgcactccagcctgggtgacagagtgagaccctgtctcaaaaaaaaaaaaaacaaaaaaaacaaaaaacaggccaggcgcagtggctcatgcccgtaatcccaatactttgggggtctgaggtgggcggatcacctaaggtcaggagttcaagaccagcctggccaacatgatgaaaccccatctctactaaaaatacaaaaattagctgggcctggtggcaggcacctataatcccagctactcgggaggctgaggctggagaattgcttgaacccaggaggcagagattgcagtgagccgagatcaygccactgcattctagcctgggcaacagagcaagactctgtctcccacccaccccctaccccaaaaaagagaagatagtatcaaaaagatcaaacagacttgaaaaaagaaacacagtacttctaaaaataaaataaaataaataatggaaattaaaaactcaatcgataggttaaaaaaacaactgaaagaattaggcaatcatttcctaggcctggaaaattcaggtttttgccttcgagaatgtttatgc

SEQ ID NO: 924643 - DNA, 826 bp, Homo sapiens
agttgaatgaatttcttgtcttctccatccttcggtgtcctcatctgaaaagtaaggatatttatcagcagccacctcattggattgtctgttgagttaaatgagataggctctagtacctgggacgtgataactgcttgctcactattattctggcagtcttctcctctctagccatccatttgcatctttcccctttacgtgcttgtaccttcacttaggttaggaaaaatggtttatgtctcctaaatgggcaaccctcttcacaaacttttaaaaaactttttgtttttaaatgattacagactcacaggaagttwaaaaagtagtacggagaggtcctgtttaccctctactcagttttccccaaaaacccagaaaattgccataaatctgagtcacccacagagcttattcccagatttccctgttttacatgcactcattggtgaagcgtgtccatagttctgtacaatttgatcacgtgtagatttgtgttaccactaccacaatcaagatacagaattggctgggcatagtggttcacacctgtaatcccagccttttgggaggctgaggcaggaggatcgcttgagcccaggagtttgagaccagtctgggcaacatggcaaaaccccatctctacaaaaagtacaaaaatcagccaggtgtgatggcatgcatctgtagtcccagctactcaggaggctgaggtgggagcatcacttgagcccaggaggttgaggctgcagtgagcgatgatggtgccattgtactgtagcctgggcagcagagggagaccctgtctcaagaagaaaaaaaatac

SEQ ID NO: 924644 - DNA, 591 bp, Homo sapiens
acttcaagaatgaagctgcggaccctcatggtgagtgtcacagttcttaaagatggtgtgtctggagttttttccttcagttgttcagatgtgtcgagtttcttccttccagtgcgtttgtggtctcactgacttcaggagtgaagctgcagaccttcccagtgagcgttacagcttttaaaggtggcacatccagagttgtttgttcctcccrgtagtttcgtggtctcactgacttcaggagtgaagccacagacctttgcagtgagtgttacagctcttaaaggtaatgcagacccaaagagtgagcagcagcaagatttattgtgaagagcaaaagaacaaagcttccacagcatgaaaggggacccaagcaggttgccactgctggctcgggtggccagtttttattcccttatttggccccacccacatcgtgctgattggtccattttacagggcgctgattggtctattttacagagtgctgattggtgcatttacaaacctttagctagacacacagtgctgattggtgggtttacaatcctttagctagacaaaaaagttctccaagtccccacctgaccc

SEQ ID NO: 924645 - DNA, 591 bp, Homo sapiens
acttcaagaatgaagctgcggaccctcatggtgagtgtcacagttcttaaagatggtgtgtctggagttttttccttcagttgttcagatgtgtcgagtttcttccttccagtgcgtttgtggtctcactgacttcaggagtgaagctgcagaccttcccagtgagcgttacagcttttaaaggtggcacatccagagttgtttgttcctcccagtagtttcgtggtctcactgacttcaggagtgaagccacagacctttgcagtgagtgttacagctcttaaaggtaatgcagacccaaagagtgagcagcagcaagatttrttgtgaagagcaaaagaacaaagcttccacagcatgaaaggggacccaagcaggttgccactgctggctcgggtggccagtttttattcccttatttggccccacccacatcgtgctgattggtccattttacagggcgctgattggtctattttacagagtgctgattggtgcatttacaaacctttagctagacacacagtgctgattggtgggtttacaatcctttagctagacaaaaaagttctccaagtccccacctgaccc

SEQ ID NO: 924646 - DNA, 591 bp, Homo sapiens
acttcaagaatgaagctgcggaccctcatggtgagtgtcacagttcttaaagatggtgtgtctggagttttttccttcagttgttcagatgtgtcgagtttcttccttccagtgcgtttgtggtctcactgacttcaggagtgaagctgcagaccttcccagtgagcgttacagcttttaaaggtggcacatccagagttgtttgttcctcccagtagtttcgtggtctcactgacttcaggagtgaagccacagacctttgcagtgagtgttacagctcttaaaggtaatgcagacccaaagagtgagcagcagcaagatttattgtgaagagcaaaagaacaaagctyccacagcatgaaaggggacccaagcaggttgccactgctggctcgggtggccagtttttattcccttatttggccccacccacatcgtgctgattggtccattttacagggcgctgattggtctattttacagagtgctgattggtgcatttacaaacctttagctagacacacagtgctgattggtgggtttacaatcctttagctagacaaaaaagttctccaagtccccacctgaccc

SEQ ID NO: 924647 - DNA, 778 bp, Homo sapiens
tgcctacaaggcggggagagagacctcaccagaaaccgaattctccttcacctagtacttcccagcctctagaactgtaagaaataaatacttgttaagccacccagcctgtggcaatttgttatggcagcccaagctgactagcccagttcccaggaggagagaggggcacagcgtgccacgcaggccacacagggaagcaccggctcagccgggaggcagagggagtgaggggaaaggtaggtgaggacctttagtgtggaytccaagggaaggaacaggagaggaagggtaagcaggctatttgaataatttccctgagctctggggtgtaggggctgtcccgagttttctggtgtgtggccctggagtgattagggtagagaacagcggttctaagtgagagagcctggattggcagtgtgggctctggttggtttgcatatgaaagtgtgccccagtgagtaatttgctatctctaggaattggctagccctgggagggacagggtctcctggaccagcaaggcaccaagaggtcaaagcataagaattgcagaaaatagaaagtcatgattaatacaagacggagaagaaaagatgcagagagactaaataatatactggaaagaggagaacacagcaacagattggttaaagccacgaagaatgcaagacccactgttgatcctgtgtgagcaggcaacccgcttgctgtcactcaagagcacattttctgcctacctgctgtgggtcttggcactcagatcctttagaaa

SEQ ID NO: 924648 - DNA, 596 bp, Homo sapiens
gattcatgaccctctccttgctctaatcccaaatcccaataagctgaagatagtcaacaaatggcctcacctcagtatctatccgaggccttaaatgcacctggccgggagggtggggggcgggagtcctcatggttgatttctagttggttggggtgctctgcctgcagcagatggagcagactgtgccaaggaggtggaagggataggggtgggacgcagtgggtggggcccagactgggacttaggagaaggacagagtgggagctgagatcaggccacttgaggcacagaaagccctggcccctcccaggcctctttctctcaggcctttcaacgccagctcctgattctaaaaagtactgatcgagcagtaaaagactgaggaatattgtaaatttatacaagtcagtaaactggaagygagaaaaaaccctgaaggaaggaagaaaccatcttctccagattccttgtagccagccaatactgctcttccagcagatgcgttctgtttcactcttctcctggtctgatgcatgaccttgtgggagacacatttaaacggcttccacttagcaggcctattatttatccga

SEQ ID NO: 924649 - DNA, 627 bp, Homo sapiens
cctttcaccatgattgtgaggccttcccagccacgtggaactgtaagttgattaaacctccttcttttgtaaattgcccagtctcaggtctgtctatcagcagcatgaaaatggaataatacagtaaattggtaccagtagagtgggctctactgaaaagtgcctgaaaatgtggaagcaactttagaactgggtaacaggcagaggttgaaacagcttggaacactcagaaggagataggaaaatgtggcaacgtttagaaccacctagagacttgttgaatggctttgcctaaaatgatgttaatgatacggacaatgaaatccaggatgaggtggtctccaatggagatgaggatcttggcgactagaacaaaggtgacttttgttatgttttagcaaagagactggtggcattktgctccaggcctagagatttgtggaactttgaacttgagaaagatgatttagggtatctcatggaagaaatttctaagcagcaaagcattcaagatgtgacctgggtactgttaaagtcactcagttttataaaggaagtagagcataaaagttcaaaaagtttgtggcttgacaatctgatagaaaagaaaatcccattttctgagga

SEQ ID NO: 924650 - DNA, 631 bp, Homo sapiens
tgttgtagacaagaagcacatacaacagtacatactgtacaattacattgacttaagcttaagaaatggtaaaactggttgggtgtggtgctcatgcctgtaatcccagcactttgggaggccgaggtgggcagatcacgaggtcaggagctcgagaccagcctggccaacatagtgaaaccccgtctctactaaaactacaagaaaattaaccgagtgtggtggtacgtgcctgtagtcccaactactcgggaggctgaggtgggaattgcttgaactcgggaggcagagtttgcagtgagccgagatcaygccactgaactccatcctgttgacagagtgagactccatcttaaaaaaaaaaaaaaggaactggtaaaacaatactatggtcttagaggctcagagtagtagctacccctgtttggggtagtgacgggaagggcaccaggaaggttttgggggtgcagtaatgctctctgtttcttgatccaggtgctgactagatggctgtgtttgttttgtgcaagtttgttgagctgtaccacttataatccgtccacatctctggatgcatattatactaagtaaaaagtttacgttcataaaataaaccatgggacataaagga

SEQ ID NO: 924651 - DNA, 631 bp, Homo sapiens
tgttgtagacaagaagcacatacaacagtacatactgtacaattacattgacttaagcttaagaaatggtaaaactggttgggtgtggtgctcatgcctgtaatcccagcactttgggaggccgaggtgggcagatcacgaggtcaggagctcgagaccagcctggccaacatagtgaaaccccgtctctactaaaactacaagaaaattaaccgagtgtggtggtacgtgcctgtagtcccaactactcgggaggctgaggtgggaattgcttgaactcgggaggcagagtttgcagtgagccgagatcatgccactgaactccatcctgttgacagagtgagactccatcttaaaaaaaaaaaaaaggaactggtaaaacaatactatggtcttagaggctcagagtagtagctacccctgtttgggktagtgacgggaagggcaccaggaaggttttgggggtgcagtaatgctctctgtttcttgatccaggtgctgactagatggctgtgtttgttttgtgcaagtttgttgagctgtaccacttataatccgtccacatctctggatgcatattatactaagtaaaaagtttacgttcataaaataaaccatgggacataaagga

SEQ ID NO: 924652 - DNA, 667 bp, Homo sapiens
aagtaaatcctttttaaaattttgttttcttttatcttcttttgtttcttttctattatttagtcctttattacctgcactacacagatgtaaaagtagctaacttttgaattaaactatacagtgtgtgatccacggaaaacttacatcatgctacattcacctgcaagtttttggcaaatgtgaatttattagtcattgaaataagccagaaagaatgaaacatactggttttgtcttaagcttccctagcccttctctctccttggttcaaatgagtcactgacctgctctagtacacatcttggaatcttcgtaacttcataactttatcttttgtgagttctttcatgcctggtttgaaactaaggaagtggaagcagggaagatagaagtggaaaataatggaattgctggaagaaaagaaaactaagagaagagtcacttaccaggacccatcattccttttacattactgtctcstacatgaacagatctggactcttgggctgcagagaaaggaaagcattcattcagcgttcattccactaacatggactaagcaccttccacgagcctggcactgggggcagactcagagattgtagtttcatgggggaggcagagcagtaaaaaaagaaattacagtatagtgtggcaagtgcta

SEQ ID NO: 924653 - DNA, 589 bp, Homo sapiens
tgcacactgtacccaatgtttagtcttttatcactcctctcccaagagtccattgtatcattcttatgcctttgcatcctcatagcttagctcccacttataagcgagtacatatgatgtttggttttccattccctagttacttcacttagaataatggtctcctgttccatccaggttgctgcatatgccattattttgttcctttttatgactgggtagtattccatatatatatatttacacacatacacacacacatattttctatttccactcactaattaatgggcatttgagatggttccatatttttgcaatcgtgaattgtgctgctatgaacacrtgtgtgcaagtgtctttttcatataatgacttcttttcttcttggtagatactcagtagtaggattgctggattgaatggtagttttacttttagttctgtaagtatctccatactgttttccatagtgattgtattcatttaaatttccaccagcagtgtaaaagtgttcccttttcactgcatccatgccaacatctattatcttttgacttttttattatggccaatcttgcaggagtaa

SEQ ID NO: 924654 - DNA, 589 bp, Homo sapiens
tgcacactgtacccaatgtttagtcttttatcactcctctcccaagagtccattgtatcattcttatgcctttgcatcctcatagcttagctcccacttataagcgagtacatatgatgtttggttttccattccctagttacttcacttagaataatggtctcctgttccatccaggttgctgcatatgccattattttgttcctttttatgactgggtagtattccatatatatatatttacacacatacacacacacatattttctatttccactcactaattaatgggcatttgagatggttccatatttttgcaatcgtgaattgtgctgctatgaacacatgtgtgcaagtgtctttttcatataatgacttcttttcttcttggtagatactcagtagtaggattgctggatygaatggtagttttacttttagttctgtaagtatctccatactgttttccatagtgattgtattcatttaaatttccaccagcagtgtaaaagtgttcccttttcactgcatccatgccaacatctattatcttttgacttttttattatggccaatcttgcaggagtaa

SEQ ID NO: 924655 - DNA, 761 bp, Homo sapiens
agaaaactgcaagaggcggcaatggtctcaagcagataaatgagtgaaggggttagcggaaaggaaaccgccgcagagcaagctccaggttggtgagaggaggcgcaagggcctcccacatgctgcacagaagcgacttaccatgatgagcgcagtgtcgctgaagccctcggcgattctggaggccacmttctctgcaacctggtttggactgtcaaagaaataggctaccacattccagttaatgccattcaacactgtttacaaaaggcacagtcaacaccactgagacttaacaagcaatgacagaaagactggcagagccaacaggctgcacgtgctcgcttcgctggtttacttattatttaattttttggtagagatagggtcttgctctgctgccctagctggagtgtagtgacgcaatcatagcccactgtaacctcaaattcctaggctcaagcaatcccacctctgcctcctgagtagctgggactataggcacaggccaccacacccagttactttttagtgtttttttttgctttttttttttttttttggtagagaggaggtattgctatgttgcccacactggtcttcaactcctggcctcaagcaatcttactgccctggcctcccaaagtgcttacaggcatgggccactgtgcccagcctacttatttatttgtattgctggggagagtgtgagtgcagttccccacatatgaagaaatcgcaggggtcagcacatctggagt

SEQ ID NO: 924656 - DNA, 577 bp, Homo sapiens
agccagtgaaatttttgacgacaaatattgcagactgcaagagacgcttcttgttcgtggaaatagaaataaagcatggtgtctgcgcccggctttccgctgtaagctgaagtacttcacggcagcaggaattgggcaacccaccgtttacactccaccctttgaaactgggctgaatggggtgggggcccgcctttggggagaaaagcaaattttatttaagcccctgaaagaggagagggttggccaggctcggtggctcacgcctgtaatcccagcactttgggaggctgaggtgggtggatcacttgaggtcaggagttcgagaccagcctggccagcacgatgaaacccagtctctactgaaaatacaaaatgaaccaggcgtggtggcacatgcctgtaatcccagctactggggaggctgaggcaggagarccgcttgaacccgggaggcggagtttgcagtgagccaagatcattccattgcactccagcctgggtgacaagagcgaaactctgtctcaaaaaaaaaaaaaaaaaaaaaatgcgtattccccagccaccggaaaatgag

SEQ ID NO: 924657 - DNA, 598 bp, Homo sapiens
agggagatggctgatgcagcacaaatttctttcacaggagtatcttgcagaatacggtatgagacacacaaaggctgcattgagtctttttaagggcctgggcctttgtggcattggggtaggagctctccagatagcatctaatgagtagaaacattcaggttgckttttttttccttactggcaaaactgtgtgtgcatcatgaatgaagccggtctcccttatccatatcaaaactaaaccccaattaattggctaaattgggactcaacacctccaggagccatgcggaagaaagccccaccacactttaaagtagcttacctcatatttgatgaaagcaaaacgcttatgaccagtgtgctgctaatacaagtcaacagataatgctgtatgaaaaattatttttcccaatcatagctagcatagtccacattttgcattatactttcccccccctttttttaaattttaaacactggtccttttctttcctttttttaaatattaatttaattatacaagacagagtctcagtatgttgccaaggctggtcttcaactcctgagctcaagcgatacatccgtctctgcctcc

SEQ ID NO: 924658 - DNA, 576 bp, Homo sapiens
atgtacaacgccttagaatggaattcagcagtccttattgaatccccaatctgtctttctcatttatctcctccaaccacaaccctcgactccaggtaccaaactgaagctgcttcaaagctgtgtctttgctggcgggcttttctctgcttggaatgtcacttccactgccactcattcaacccagcaaacccccrcttatcctccaaagataagttcaagtgctgccacttctctagtttttcatgaccctccaaggcagaattaattgttcctgtctctttgtccccgtgtccacgtacacacaacagaaattttaaatttatgcatccatcttttcaactaaatagtgagatatggaagaataggaatgctttcttgaaaaatagctttatctctaatgtctagaaatatgacctattgcctacccatgaagatcctcaacacattcttcaattgaattgttaaattgtttatcttttattttattttattttattttatttttttaaaattttttttattattatactttaagttttagggtacatgtgcacattgtgcaggttagttaca

SEQ ID NO: 924659 - DNA, 576 bp, Homo sapiens
atgtacaacgccttagaatggaattcagcagtccttattgaatccccaatctgtctttctcatttatctcctccaaccacaaccctcgactccaggtaccaaactgaagctgcttcaaagctgtgtctttgctggcgggcttttctctgcttggaatgtcacttccactgccactcattcaacccagcaaacccccacttatcctccaaagataagttcaagtgctgccacttctctagtttttcatgaccctccaaggcagaattaattgttcctgtctctttgtccccgtgtccacrtacacacaacagaaattttaaatttatgcatccatcttttcaactaaatagtgagatatggaagaataggaatgctttcttgaaaaatagctttatctctaatgtctagaaatatgacctattgcctacccatgaagatcctcaacacattcttcaattgaattgttaaattgtttatcttttattttattttattttattttatttttttaaaattttttttattattatactttaagttttagggtacatgtgcacattgtgcaggttagttaca

SEQ ID NO: 924660 - DNA, 621 bp, Homo sapiens
tcaggttggaatgcaatgtcatgatcttggctcactgcaacctccacctcatgggttcaagcgattctcctgcctcatcctcctgagtagctgggattacaggtgcccgtcaccaggcccagctaattttttttatttttagtagagatggggtttcatcatgttggccagactgatctcgaaatcctgacctcaggtgattcacccacctcggcttcccaaagtgttgggattacaagcgtgagccaccatgcccagccgttgcaattgsatttagtgttttagtcgttgaagtcttttcccatgcctatgtcttcaataatattgcctaggttttcttctagggtttttatggttttgggttttacatttaagtctttaatctatcttgagttaatttttgtacaaggtgtaagaaagggatccagtttcagttttttgcatatggctagccagttttcccagcaccgtttattacatagggaatcctttccccattgcttgatttttgtcgggtttgtcgaaggtcagatggctgtagatgtgtatgtatggtgttaattctaaggtctctgttctgttccattggtctatatatctgttttggtaccagtaccatgc

SEQ ID NO: 924661 - DNA, 586 bp, Homo sapiens
agagccatcagaaataacgccgcatatctacaactatctgatctttgacaaacctgagaaaaacaagcaatggggaaaggattccctatttaataaatggtgctgggaaaactggctagccatatgtagaaagctgaacctggatcccttccttacaccttatacaaaaattaattcaagatggattaaagacttaaacgttagacctaaaaccataaaaaccctagaagaaaacctaggcattaccatccaggaaagagatcaaataagaataaatgactattccagggctcaggccacaaaatacatccttaaaatcactatggaatacaaaactgttaagttttgttaatattgttatttagagaagggtagcacggtttaaaaagagaatctgtgtacatactaagcactccataaacattccttaaactaaattggctgatgcmtgaataaatctgtaaattaattagctgtggctatgaattacaacattaccacaatggttggtcaatttaaagggatcctagacaggagttggagcttccataggtggttgtctcagtgttatttcatgatagtctga

SEQ ID NO: 924662 - DNA, 598 bp, Homo sapiens
agaaacaaaatcaaattttattttctttgaggaagatggaaggaccaaattaatatgcctctgttggaattttgccctaaagaccaaaattccagaacattctgctgatagaagccacagatgtgggccaattgtaggtatcggatcagagaggagaatcacttttttgccgtagactgccccatgcaccggcaccgtaccagccctggaggtgtgtggcgagccatggtccctttcctcatggcatggttcttggtggggaagacaggtatgttcccatctccacgccatttgatgagaacaatgcatatatacatgggtagagggcgcaaataaacttcytagaggggatttggaaagcctgttgctgagagagaacacaggagctgtgtcaggggatatccaggcaggtacttctgggcatggtgcctttcttgttggagggaagagggctgcagcgtacagagatcagaaaagcacaggacattccaggaaatgcaccttgtttgttgtctttaactggcagccaaaggattgtaaagctggagagagtctgggccctcataggagaggggttggagcctgagccttgtctcac

SEQ ID NO: 924663 - DNA, 604 bp, Homo sapiens
ctggcggtgccatgtggaacttcgctgaagaagctaaatttactgaccatctgtgcctagagcgggtttctccaaggaaaggctctgtaaatctcgtccttttgaaatctaggggaaaacagcctccttcactgaggattaatttaaagaaagggggaaataggaaaattccatgcgttgkaagtccatttagatttctacatgaaccatcatatatgtgcactacataattcttatttttttatttttaaaaaagggataatttatattccagtgacaagtttgggaaaggccaaggcaagcaattgagttgaacattatgtagcgtttatatagaccttgcagacgtctgtgcaatatccaccactgaacacgtgaggtcgtactcaagtctctctggcccctggtaatgtgactcccttcctttatttgcatgaatcgcctggattgggtgtcaggtttttaaaacgtcaaggtttacgcctattgttgtcaaccaatcagcatcctactttgacgtgattggcttctactgtaggtgtcaatcatccaaaatttgcatactactcctcaggccgccgggagcctgtcagtcggctgtggc

SEQ ID NO: 924664 - DNA, 791 bp, Homo sapiens
tttgtttaaaaatcctgtattgtggtgattgatattgatgcatctctttgcagactaacctatgaatcactttttcagtgattaaaaatgttttggaagctgtcggaaattaagaatgagttcgttagcacatcaatagactcattaagatgattggcaaaaatcactggagtgattgacttcctagaaatttgattttatttttagtgtaattcctttctgctaagcaaaatagtagtttatttggtaatttttattgtgctaatgatagtaatcattaatatttcatcaagcctggcctccagaaaaatcacgacttakgcaaagattgtttagatccatttaccactttgtaattttatttgtatttattttattaatttatgcaccaaatatttattgtccatgtaaggttgttggcgaccttgacaagtgcggttttggaggagtagaggaagtgaaagacagattgaagtggacttgagggagagtgggatgagaaaattggaaataactttgagaagctttgctacaaaggatgacaaagaaatggagtattaaatgcgatggaattgagtgcaagggaaggtgttttaaacagaagaaataacaacatatttatgtgctgatggggtgactcagtggatattgaagacgtggtgatggaggagagaggggacaattgctggcgtgtcgtccttcagtagggaagagaggttgaggtaatgaacaagtagagaagtcgacatgattcatgactgttacctaaggcagaccatttgcgtatttgg

SEQ ID NO: 924665 - DNA, 713 bp, Homo sapiens
cacgacttaggcaaagattgtttagatccatttaccactttgtaattttatttgtatttattttattaatttatgcaccaaatatttattgtccatgtaaggttgttggcgaccttgacaagtgcggttttggaggagtagaggaagtgaaagacagattgaagtggacttgagggagagtgggatgagaaaattggaaataactttgagaagctttgctacaaaggatgacaaagaaatggagtattaaatgcgatggaattgagtgcaagggaaggtgttttaaacagaagaaataacaacatatttatgtgctgatggggtgactcagtggatattgaagacgtggtgatggaggagagaggggacaattgctggcrtgtcgtccttcagtagggaagagaggttgaggtaatgaacaagtagagaagtcgacatgattcatgactgttacctaaggcagaccatttgcgtatttgggtagccaggttagaattgtgatggtgagagagtgaggacaccatcttctgaggataacttttgttttctcattgaaataaaaagcaactgcgagaattgtggaggcatttgggggatttgaggaggatgaaggtgggcagttgggagagtgagaggactaaggaagtgcagaaatgcctcctggtagtacacatggttcccttgaggtacagggtcatgaatttactgtgtgg

SEQ ID NO: 924666 - DNA, 713 bp, Homo sapiens
cacgacttaggcaaagattgtttagatccatttaccactttgtaattttatttgtatttattttattaatttatgcaccaaatatttattgtccatgtaaggttgttggcgaccttgacaagtgcggttttggaggagtagaggaagtgaaagacagattgaagtggacttgagggagagtgggatgagaaaattggaaataactttgagaagctttgctacaaaggatgacaaagaaatggagtattaaatgcgatggaattgagtgcaagggaaggtgttttaaacagaagaaataacaacatatttatgtgctgatggggtgactcagtggatattgaagacgtggtgatggaggagagaggggacaattgctggcgtgtygtccttcagtagggaagagaggttgaggtaatgaacaagtagagaagtcgacatgattcatgactgttacctaaggcagaccatttgcgtatttgggtagccaggttagaattgtgatggtgagagagtgaggacaccatcttctgaggataacttttgttttctcattgaaataaaaagcaactgcgagaattgtggaggcatttgggggatttgaggaggatgaaggtgggcagttgggagagtgagaggactaaggaagtgcagaaatgcctcctggtagtacacatggttcccttgaggtacagggtcatgaatttactgtgtgg

SEQ ID NO: 924667 - DNA, 713 bp, Homo sapiens
cacgacttaggcaaagattgtttagatccatttaccactttgtaattttatttgtatttattttattaatttatgcaccaaatatttattgtccatgtaaggttgttggcgaccttgacaagtgcggttttggaggagtagaggaagtgaaagacagattgaagtggacttgagggagagtgggatgagaaaattggaaataactttgagaagctttgctacaaaggatgacaaagaaatggagtattaaatgcgatggaattgagtgcaagggaaggtgttttaaacagaagaaataacaacatatttatgtgctgatggggtgactcagtggatattgaagacgtggtgatggaggagagaggggacaattgctggcgtgtcgtccttcagtagggaagagaggttgaggtaatgaacaagtagagaagtcgacatgattcatgactgttacctaaggcagaccatttgcgtatttgggtagccaggttagaattgtgatggtgagwgagtgaggacaccatcttctgaggataacttttgttttctcattgaaataaaaagcaactgcgagaattgtggaggcatttgggggatttgaggaggatgaaggtgggcagttgggagagtgagaggactaaggaagtgcagaaatgcctcctggtagtacacatggttcccttgaggtacagggtcatgaatttactgtgtgg

SEQ ID NO: 924668 - DNA, 604 bp, Homo sapiens
gggagaattactgagtcacaaaatgaaacagatcacagcactgattgggccctacttcttatcaaaagaggctcttcatacacttaactcagcaagtcactgttgagcactggaaatcgtggagctaggtccatcctcactcccctccctgtccaaatgagaggaggaaatgcccaaactattatctttccaaacctgagcygtctttttgtcgcctccatcacatgatcagattttttgtgtgctcactgtactcattcttccccctttttctatcatggatacatcccagccttttacatcagaaatgtgctcagtttttttccctccccaatcttctaccaccctttgctttcatttattccttaaacgactatcccttttcttttccctcgttcatcaacaacgttttgagaaagtccaacgtgaacttcaaagcccaactgattataaatgcttccctctctcaatgcttccctggccaccattcagaatcggtgcgccacctaggaaactatcttttagacagtcgttactgagggattgtttttgaagttagtaaaataaaatacactccctggttctcctgataatcacggaaatc

SEQ ID NO: 924669 - DNA, 639 bp, Homo sapiens
aatttcatagaaatcttcaacagcaggtttagtcaatcagaagagagaatcggtgagttcagaaacagatcatttgagattacctagtaagagggacaaaaataacaactaaaagaaatgaaatcaaatgaaggaggcctataggaagtatggggcaccatcaagtgaccaaacatatgcattatgagagtcaaaaaataatcagaaaaataaaataacaggaagcttatttaaaatgatgggaaacttcacaaatctggagagaaaaatgaatatcagatccagaaagtcaaaataaccctaaataagttaatataaatagatctttattgagattataatctgatatatatcatatataatatatatcgtatataatrtataatatcagatatatactgatattataatcaaattcttaaaagccaaggaaaaagagagacttttgaaagcaacaagaaaaaacaactcatcacgtacaaaggaatctttatgacactgttagctgacctttcagcagaaacattgaaggctgggagagtatggaatgatctattcaaaatgctgaaggaaaaaaaactgcctgccaagaacagaatgtcaagcaaggatgtccttcagaaatgaaaataatatact

SEQ ID NO: 924670 - DNA, 598 bp, Homo sapiens
ttctatttctatcacatctatagttatctcctttattgaagtcttaaatccctcaaagtcatccatgaaggttggactcaacacccaaactcctgttcatgttgatattttgacctcctcccatgaatcactaacgttcttaatggcacctagaatagtgaatcctttccagaaggttttctatttactttgcccagatatatcacaggaatcactatctatagcagctacagccttayaaaatgtatttctcaaataagacttgagagtcaaagttactcctgaatccatggactgcagaatggatgttgtgttagcaggcatgaaaatcatgttaatctccttgtacatctcccttagagcccttgagtgactaggtgcactgtcaatcagtagtaatattttgaaagaactatttttttctgagcagtagatctcaacagtgggcttaaaatattcagttaaccatgatataaacagatgtgctgtcatctgagcattgttgttttacttataaagcacaagcagaagagatttagcataatttttaagggccctaggattttcagaataatatgtgagccttggcttcaactta

SEQ ID NO: 924671 - DNA, 598 bp, Homo sapiens
ttctatttctatcacatctatagttatctcctttattgaagtcttaaatccctcaaagtcatccatgaaggttggactcaacacccaaactcctgttcatgttgatattttgacctcctcccatgaatcactaacgttcttaatggcacctagaatagtgaatcctttccagaaggttttctatttactttgcccagatatatcacaggaatcactatctatagcagctacagccttacaaaatgtatttctcaaataagacttgagagtcaaagttactcctgaatccatggactgcagaatggatgttgtgttagcaggcatgaaaatcatgttaatctccttgtacatctcccttagagcccttgagtgactaggtgcactgtcartcagtagtaatattttgaaagaactatttttttctgagcagtagatctcaacagtgggcttaaaatattcagttaaccatgatataaacagatgtgctgtcatctgagcattgttgttttacttataaagcacaagcagaagagatttagcataatttttaagggccctaggattttcagaataatatgtgagccttggcttcaactta

SEQ ID NO: 924672 - DNA, 604 bp, Homo sapiens
cctctctttcaatgctcacttttttggtattctcccatctcatggctttaagtgtcatctatgtattaatgatccccaaatgtatatctccagctcagacctctctcccaaactccagaagcatatatccaatttcacacttaacatctagaattgaatgtctaataggtatctcaaactcaacatgtccaaaattgaactccccctcttatctacagccttccgcgtcataacagatgacccacagtcctccaaatgacccagcccaaaatgcttagaattatccttgactcttctttcccatacacttccacattcaattcataagcatgtcctattggttctacctccaaaatgtatcctactgcttctcattatcttcactgctgttcccctgatccaagccaccatcagctttcacctagattackgaaatagcttccttatagctctcccttcttccaccattgtcccccttcccccagcatcttttcaacgttgcagtcatagtgatcttttgaaaatgtaagccagattatatcattcctctgttcaaaaactttcatggctcctatttcactcagagtaaaacccaagatcttta

SEQ ID NO: 924673 - DNA, 557 bp, Homo sapiens
tgagctaggaggtagttgatggccagtctattttggtagatggcatttctcatttgtgtagcttgccaggctagctgatttaagacccttgcagcatcattagtaattagctcaagtactgcctgtaaccttatgatgcggttgagcatatatataggggtgcagtatccccatgttccatattctgcccaggtggctgggccatagtattggattattctttcagggggcaattcattgtctttccacttccctatggttatgccatctcctgtggttatgcccctcttgcttttccttttagttacatcatagwtggggtaccgtaagacttccccttgccttagcaggattagaaagaaagagggcctaattgttccaagtacacaggcccctgaccatttagctggcagttgtcaatatgcctgtggccacagttccagtagaggccagagggtgcctgccaggtattggagcttcaagctggtaccaggagtggtttaaagaagggaaacgggagaatgggcctgggtgcggtgatttggagtcattctttt

SEQ ID NO: 924674 - DNA, 706 bp, Homo sapiens
ctctttcataagcagtcacacacttcccagttgctttctggaccaactttgcaaaccactttcacatcctgggtcgggtggggtgtaagtttccccaactttgcgagccagtctcgcatcctgtgtcgagctactagttacaccctgggaagtggtcaggctccccttccatccttatgggatgggtcctgccttgggccccaaatcttaccatggtcctgaagcacactgtcccaagaatcgtcctacagccccttagatttcgttgcactatcagggaagggcactgagttgcaggacagccaatctcctctctgcgttgaagttcttctgatggcaccaggggtcatgggtctccccttgcctggggttcaagtcccacaggcaaaggagacagtaaacctgtcatctccaatcccacaggagcccccagaaaaatactgcaggaatcagaggactggagagaccaaacaggtgaaatagggtgatttattgagtgcactcaggcccagcagattcacattgaaaaagctgagccctgaacaaagayagggcttgacttttatacatgcaaccaagggggtaggccatctagtggcgcaaaacttacagggcaggcaaacgggcttacagaagcagaacaaaggcagttaatcatactgtgacaggttttgcaacttgaggaaaaacaggaacttatcaagct

SEQ ID NO: 924675 - DNA, 626 bp, Homo sapiens
cagtggccaagatgagcctgtctttatttgtaaattcaatctggggttttccagccatgctagattggattacggtttagcaaacatttactccccacctcttcccactctggtcggggtacattccctgcactgttgaagatgggcttgaccatgtgcattgctttgagcaagaaatattagctgacaagacagggcagaggattgagctgtgtttgtgtggatggacccactgatcccttgtgctccggtgataacastaagaggttcccctgcatggctgttgcccttcagctgggtggtacaatgaacttatacagtgtgagcccaacctgcagcctgcagcagagccgcccagctgagcccagcggagactaagagaatctggatcgatcttcaggcccacagatgggaaaacaggtgcttgttgatataagccactgagattttggatggtttgtttctcatttttgtggcaatagctgactgatacacagatctaaagctgaagcagaggaaggggccaagagctggtgttggaaagaagtaggctctccatatccctcccactgccacagccctgcaagggaaggatagatggagaagatgctgtgggtgttctcagt

SEQ ID NO: 924676 - DNA, 554 bp, Homo sapiens
gatagattcccattccaaaagggagaaataggcaagaagaaaggggcaacttcttccaagtaagttcaaaacccaacagggcaaacaatattaaatcttaagactctcgaataatcttccttgacatcatgtcccacactttggacacattggggtgagggttgggcccccaaggccttggacaacaccaccctcatgactttactggacttagcccacataacagctatcacaagttggagtcttgtgcctatagctctcccaggctggggctgcatgtttatggctctgtagttctggggtcccagggcaatctatccctgtggctccactaggcattgccctaacgtgactctctctggcagctctgcctctgcagcaggtttyggcatgggccacctagctggtcaataacttcttagaaatctagatgtaggtagccattcctccacagctcacaaatgctgtgcgcctgcagaattaacactatgtgggcactgccaaggtttacagcttgtgccctctggagcagcaacctgagctgcactcaaggc

SEQ ID NO: 924677 - DNA, 649 bp, Homo sapiens
acctcaaatttaccagggctggggtttcccaatcctagtaagcctgagggtactgcaggagaccagggcgtatttcagtccttatctcaatcgcataagacagacactcccagagtggccatttatagacctcccccsaggaatgcaattcttttcctagggtcttaatattccttgctaggaaaagaatttagtgatatctctcctacttgcatgtctgtttataggctctctgcaagaagaaaaatatggctctattctgcctgaccccgcaggcagtcagaccttatggttgtcttcccttcttccctaaaatcactgttattctgttctttttcaaggtgcactgatttcatattgttcgaacacacatgttttacaatcaatttgtatggttaacacaatagtggtcctaaggtgacgtacatcctcagcttaggaagataacaggattaagagattaaagtaagacaggcataagaaattataaaagtattaattttgggaactgatagatgtccatattaaaatgaaatcttcacaatttatgttcagagactgaagtaaagacaggcataagaaattataaaagtattaattgggaactgatatatgtccatattaaaatgaaatcttcacaatttatgtt

SEQ ID NO: 924678 - DNA, 649 bp, Homo sapiens
acctcaaatttaccagggctggggtttcccaatcctagtaagcctgagggtactgcaggagaccagggcgtatttcagtccttatctcaatcgcataagacagacactcccagagtggccatttatagacctcccccgaggaatgcaattcttttcctagggtcttaatattccttgctaggaaaagaatttagtgatatctctcctacttgcatgtctgtttataggctstctgcaagaagaaaaatatggctctattctgcctgaccccgcaggcagtcagaccttatggttgtcttcccttcttccctaaaatcactgttattctgttctttttcaaggtgcactgatttcatattgttcgaacacacatgttttacaatcaatttgtatggttaacacaatagtggtcctaaggtgacgtacatcctcagcttaggaagataacaggattaagagattaaagtaagacaggcataagaaattataaaagtattaattttgggaactgatagatgtccatattaaaatgaaatcttcacaatttatgttcagagactgaagtaaagacaggcataagaaattataaaagtattaattgggaactgatatatgtccatattaaaatgaaatcttcacaatttatgtt

SEQ ID NO: 924679 - DNA, 646 bp, Homo sapiens
ccctccctgactgttcccctacaaacagtcaaccatgggggccatgtattgaatacccaaggagtgacatgcaagtcatactgtaggccccccgcaccggagctacagtggccaaccaccagcaatgtggtggttggacagcccatggccacagccaggttttctgttcccctgcctttaaggggcattggggcaggcaacaacaggttaccattcatccccacacctggttggagtaggtcatccttagtgtgtatctgcaactgaatggggrtggtggcctggtgtaacaaagcctccaccagggcctggccacctttctgtgaccgttcattcaaggtttggagcatcaggtccagacttgaactctagccttgcaaagatgggggtgtgacatgcaagtgtaacccgttcttcaagagcccaatcatacgcgcagcttgcaggttgtatggcaaatagaattcccactttatgtccatttgttatgcccattgttgtacctgttatacagtgaaatgtctcaacactatcactctcaacagccagagggcaaccatacagggcacataagtgttgcagggcccagatggtgtgctgttgatcagccatcctccaagggtaggtgaagaacagtcctgtggcc

SEQ ID NO: 924680 - DNA, 664 bp, Homo sapiens
caaacagacattatatatgtcccccggagaagggtaccctccctgactgttcccctacaaacagtcaaccatgggggccatgtattgaatacccaaggagtgacatgcaagtcatactgtaggccccccgcaccggagctacagtggccaaccaccagcaatgtggtggttggacagcccatggccacagccaggttttctgttcccctgcctttaaggggcattggggcaggcaacaacaggttaccattcatccccacacctggttggagtaggtcatccttagtgtgtatctgcaactgaatgggggtggtggcctggtgtaacaaagcctccaccagggcctggccacctttctgtgaccgttcattcaaggtttggagcaycaggtccagacttgaactctagccttgcaaagatgggggtgtgacatgcaagtgtaacccgttcttcaagagcccaatcatacgcgcagcttgcaggttgtatggcaaatagaattcccactttatgtccatttgttatgcccattgttgtacctgttatacagtgaaatgtctcaacactatcactctcaacagccagagggcaaccatacagggcacataagtgttgcagggcccagatggtgtgctgttgatcagccatcctccaagggtaggtg

SEQ ID NO: 924681 - DNA, 576 bp, Homo sapiens
acacaaactcgtacttccagctatttacccaaaagaaatttttacttatttctacaaaagtttgtacagaaccgtttatagcaactttatttataacaggccaaactggaaatagccaaaatgcctttttacaagcaaaaggttagcaaactgatacactcatgccataagaagaaacaaatcactgacacaggcaacatggatgaatctcaaaatcgtgttgaaagaaaaaagcccaacaaaaagtatgattccatttacctaaagtttcagaagaggcaaaacaaaaatctgatgatagaaatcagaatagtagttgcgtggggtgaytggaagggagaatggagagtgatgggaaacgaatcacaagggagcttgctggggtgatggaaatgatctaaatcttaattgagttgttattatatgggtacacattcatcagtctttgaactctatcattagtatctgtcaggcctctgagcccaagccaagccatcgcatcccctgtgacttgcacctatatgcccagatggcctgaagtaactgaagaatcacaaaagaagtgaaaatgccctg

SEQ ID NO: 924682 - DNA, 633 bp, Homo sapiens
gctccctgagcaccacgaggccttcaacaggctgcttggtaggaggacaccccagagagcacctccaatcctgttctttccaaaaacaggaaacttccaataaccacacttttccaatgggaaaaatatgccccagtgggtgagctctccatgtgggaggaatgtgaagtgatcactcatgagggacacttaggagatgataaaggattaggtcaacttgataaaggtcagcgcttgggataagaaagcttggtttcrggccaggtgcagtggctcctgcctgagatcccagcacgttgggaggctgaggcaagaggattgcttgaactcaggactttgaggctgcagtgagctatgactacaccactgcactccagcctgggtgacagagcaaaacactgtctcaaaagaaaaaccaaggctgggcacagtagctcatgcatgtaatcccagctactcgggaggctgagacaggagaatcgcttaaacccgggaggcagaggttgcagcgagccaagatcaggccactgcattccagcctggcccacagagcaagactctgtctcaaaataaattaataaataaataaaaataaaaatcaaataaagaaaaacaaaatcaataaacaaagaa

SEQ ID NO: 924683 - DNA, 748 bp, Homo sapiens
cccgccaccacacccggctaattttttgtatttttagtagaaactggatttcaccatgttggccaggctggtcttgaactcccgacctcaggcctcctaaaagtgctgggattacaggagtgagccatcgtgcccggcctgattcaaatttgaacactaataaagaggggttgtagaatctcacagccaagccaggtaacctgttcatgatgccaacctattccttattcgagtgtttcttgaatgccaggactgctaatcggaagttggcattgctgggactctctaaggccacttgtaacagatgtgaggaaagccgcgagggacatgtgtggcacacctgggtacagactgggtacagacrttccttgctgtcacatgaaaggcctctaaggccaggtgtggtggctcacgcctgtaatcccagcactttgggaggctgaggtgggtggatcacaaggtcaggagatcgaggccatcctggctaacgcggtgaaaccccgtctccactaaaaatacaaaaaattagctgggcgtggtggcacgtgtctgtagtcccagctactcgggaggctgagtcaggagaatcacttgaacccgggaggcagaggttgcagtgagctgagatcacgccactgcactccagcctgggtgacagagcaaggctctgtctccaaaaaaaaaaaaaaaaagcctctgtaagaggatagtatgggacccttaacagggtgaatttttatttggaatc

SEQ ID NO: 924684 - DNA, 566 bp, Homo sapiens
gctgggcgtggtggctcacacctgtaatcccagcacttcgggaggccaaggcgggcggatcacctgaggtcaggagttcaagaccagcctggccaatgtggcgaagccccatctctactaaacacacacacacacacacacacacacacacacacacacacacacacacacaaattagcccgcatggtggtgtatgcctgtagtaccagctactgaggaggctgaggtggaggatcacttgagcccaggaattcgaggctgcmgtgagtgatgatcatgccactgcactccagcgtgggcaacagtgaggccatgtctctaaaaaataaaaaaagagagagaaacaagagagagctggcttccccctcctctgccatgtaagcaacgtaatcaggatgaagcgcctcaccaggcaccgaatctgtcaacaccttgactttgaactccctggcctcgagaactgaaagacactctctatgggttaagccacccagtgcatggtatcttgttataactgcccgagctgactgagacggacgttcaggacagagagcgtgaatgcatag

SEQ ID NO: 924685 - DNA, 566 bp, Homo sapiens
gctgggcgtggtggctcacacctgtaatcccagcacttcgggaggccaaggcgggcggatcacctgaggtcaggagttcaagaccagcctggccaatgtggcgaagccccatctctactaaacacacacacacacacacacacacacacacacacacacacacacacacacaaattagcccgcatggtggtgtatgcctgtagtaccagctactgaggaggctgaggtggaggatcacttgagcccaggaattcgaggctgccgtgagtgatgatcatgccactgcactccagcgtgggcaacagtgaggccatgtctctaaaaaataaaaaaagagagagaaacaagagagagctggyttccccctcctctgccatgtaagcaacgtaatcaggatgaagcgcctcaccaggcaccgaatctgtcaacaccttgactttgaactccctggcctcgagaactgaaagacactctctatgggttaagccacccagtgcatggtatcttgttataactgcccgagctgactgagacggacgttcaggacagagagcgtgaatgcatag

SEQ ID NO: 924686 - DNA, 628 bp, Homo sapiens
  misc_feature 105, 107: n = A,T,C or G
tcatatatagcctcctgtgtccaaaaaagtgatggcaaaacagacactgtgatgctgtagtgaccaagggattaaaatttccctaatctcttgatgtttctgcangntcaatttttaaattcctgaaacatctatttttttttcatggtctgataataagcagatggttgtgacaagtttgattggggggcacatctcatacttgagcatggaaactgaatcatcaccacttatcacccacaaaaggatctcctcaaacatctttttagcaatgtatgaagtgaagttatgctagctgctataacaagtaactcctatgtctcagtggcataatacaataatttttgtacctatcaatcacagaccaaygtgattggggggtactttctccatattgtcttgtagaatcctggctgaaaagggggtccatcatcttcaatgtatggcttccagaacatactggaaattgatatacaaccagcacgcacagaagaaataataaagaaccagacagaacacatgaaagtggcacttttctctccctatgccattgactagaactcaatcatgtgatgccacctaactgctggggaggttgggaaatgtaatttaactgtgtatctacaaa

SEQ ID NO: 924687 - DNA, 706 bp, Homo sapiens
caacccagaccttcaaacctatattttttctctttggttctggtgttttttccacttcaccatgttgaaaatgccccaaagggggaaagggaggaatgtgtatgtgttagaggtggatggggaagaggagaaacagtaggtccagaggaataggttttaattaaaagtcaggyggccaggctccatatgaaccagggagtagggtgcataaatgcccatctgagcaaggccagtgttgaaggggaaggagtgatcggagttcttgtgaaggccgtgggaagatgggtgggacacaggcaaacacatgagaacaaaacaatgagctttgccaataaacgacacacaggccaattgtgggttggcatcgagagggttgtttttttgtttgttttgttttgttttttttgagacagagtcttgctctgtcgcccaggctggagtgcagtggcacgatcttggctcactgcaacctccccatcccaggttcaagtgattctcatgcctcagcctcctaagtagctgggattacaggtgtgcaccaccacacctggctaatttttatatttttagtagagatggggttttgccatgttggccaggctggtttcaaactcttggcctcaagcgatccacccacctcagcctccccaagtgctgggattattacaggcatgagcatggcgcccagccttcatcgggagattaa

SEQ ID NO: 924688 - DNA, 706 bp, Homo sapiens
caacccagaccttcaaacctatattttttctctttggttctggtgttttttccacttcaccatgttgaaaatgccccaaagggggaaagggaggaatgtgtatgtgttagaggtggatggggaagaggagaaacagtaggtccagaggaataggttttaattaaaagtcaggcggccaggctccatatgaaccagggagtagggtgcataaatgyccatctgagcaaggccagtgttgaaggggaaggagtgatcggagttcttgtgaaggccgtgggaagatgggtgggacacaggcaaacacatgagaacaaaacaatgagctttgccaataaacgacacacaggccaattgtgggttggcatcgagagggttgtttttttgtttgttttgttttgttttttttgagacagagtcttgctctgtcgcccaggctggagtgcagtggcacgatcttggctcactgcaacctccccatcccaggttcaagtgattctcatgcctcagcctcctaagtagctgggattacaggtgtgcaccaccacacctggctaatttttatatttttagtagagatggggttttgccatgttggccaggctggtttcaaactcttggcctcaagcgatccacccacctcagcctccccaagtgctgggattattacaggcatgagcatggcgcccagccttcatcgggagattaa

SEQ ID NO: 924689 - DNA, 775 bp, Homo sapiens
ttacaggttagttcaggatctgcaccttatcaaccaaattgttttgcctatccaccctgtggtgcccaacccatacactcttttgtcctcaataccttcctccacaactcactattccgttcttgatcttaaagatgtttttttcactcttcccctacacccctcatcccagcctctctttgcttttacctggactgaccctgacacccatcagtcccagcagcttacctgggctgtactgctgcaagcctccagggacagccctcattacttcagccaagctttttctcatgatttactttctttccactcctctgcttctcaccttattcaatatattgatgaccttctactttgtagcccctcctttgaatcttctcaacaagataccctcctgctccttcaacatttattctccaagggatatcaggtatccccctccaaagctcaaatttcttctctgttacctacctaagtatagttcttcataaaaacacatgtgctctccctgccaattgggtctgactgatctctcaaaccccaactccttctataaaacaacaactcctttccttcctgggcatggttggatactttcgcctttggatacctggttttgcatcctaacaaraccattacataaactcacaaaaggaaacctagctgacctcataaatcctaaatcctttccccactcctgtttccattccttgaaaacagctttacagactgctcccacactagctctccctgactcatcccaacccttttcatt

SEQ ID NO: 924690 - DNA, 689 bp, Homo sapiens
ataagaaaagtgccattttcttcttatctttcatcatatgcttcaaggatgcatattatcaatatgtattagtgtttatgtcaacctttgtcacctgagagacagaattcctcattgtaacattaccctttccctcyatttcctctttttttgtactatgcttgttggaagaaagtcacgatgcatagctcatatttaaggagtaaggagttatgcttcacctccttaaaggcaaaaatttttactttatgaagttatatttaagttatggatttcttctgcatggaagattagtacactctcttgcatgtattttttattcaataattcatatcagtatggactcatgcatatgtattttatacccaatacattttacttcctttgttgctaagattttttccagttttggccatgggagctcttccattgccttttgtagctctttgatataccacaatcattgtgggtatattgatgtattcatttattggctgaacttttctgagcacttctttattgtttagcacaagacactccaggatcatcttctatatttcctgttccagtcctaaaatcagccagttctccaagtagctttggtttcttcttattagagaaagttattagaaaccaaaatttaggcattaggtagactcattccactggagtgtgattgcttctagggc

SEQ ID NO: 924691 - DNA, 590 bp, Homo sapiens
agctttgcaaaagcatggctctgggatgtgatagggcagaatcagaaatcatgaaaaagccctttataatgtgactgcaactcttcatacagatgtagcctttgcgagtggaatacccacagccaagggtaccctggatgcctgggaacgttttcccactcagaaatcaaattaaatcaaatatattcattcttttagaacygagattgtcctctattccttagtttttcacaagaatggttttcctcagtttcagtcagtggtggtctgtataatattcagattcatggttgcccacttaactattggtaattttaaaaaacagccaagctaacctttgctgagactattttggcccctgacttttcaaagatgtgttttgcaaaatattctgttgtgttagaatattttgtctatgagagttctaaatctccttccccaggatggcaagaatccaaactttcccaacttataatcggtaagtcagggagagcatcaaagttctacttgcattggaaattatgcttgtatgtaattagagtctcaatccaaccaatgatgggtggggagagtggcgaataaaaattctt

SEQ ID NO: 924692 - DNA, 613 bp, Homo sapiens
ttggtacataaaaaaaaattttaagtgaacagaaatttcatggaaaagacagaagacaccatcattctgttcaggttacattctacacaaagctcaacgttaagaagacatttaagccacttaaacatggtgtctccttattactcatgtctccttttccttgcataagcaatgaagaagcacacaatgatattaggaaaatgtttaaatatcattcttgtagcacataagaacaaatggataatttacactataaaaattaaagataggccgggcgcggtggctcacgcctgtaatcccagcactttgggaggccgaggcgggtggatcatgaggtcaggagaccgagaccatcctggctaacaaggtgaaaccccgtctctactaaaaatacaaaaaattagccgggcgcggtggcgggcgcctgtagtcccagctactcgggaggctgaggcaggagaatggcrtgaacccgggaagcggagcttgcagtgagccgagattgcgccactgcagtccgcagtccggcctgggcgacagagcgagactccgtctcaaaaaaataaaataaaataaataaaattaaagataaaaataaacaggatttaagctg

SEQ ID NO: 924693 - DNA, 754 bp, Homo sapiens
agcagggtttcaaaatttgctccagacctgattcgaagctgttctgaatttgtgtgcagacagtgcatgagtcaagagcaagtcgaagatgaagccagaacacagcatggtaaatatgatctcatgggtggaaccaagatgctgtgatgagactaaagattggatatggtcttaggaggatatttgaaagaggcagacttattaggaagggtgttttgctttgttgtttgttttgtttgagatggggcctctgttgcctgggctgctgtgcagtagtgcaaaaatcctggcttgctgcagcctggacctcctgtgctcaaggggtcctcccacctcagcctcccacctcagcctcccaagtagctgagactacaggtgtgtgccaccatgcccggctaatttttttttttttttttttttttagagatggcggggactctctctatgttgcccaggctggtcktgaactcctggcctcaagtgattcacccatctctgcctcccaaagtgcttggattacaggtttgagccactgtgcccagccttaggaagggtgttaagaagctacatgcctgcttcagaaatcctcaaatccgagggcttgcatgttgagggtataatttgaagagcagttgtcatttaggagagaatgagagaaagtcctggcctggatcataaaggcactatctctaggacacagcaggaatggggtgggaaggacttatctacaggggtatcctaattgcccaccacc

SEQ ID NO: 924694 - DNA, 687 bp, Homo sapiens
taaaagaagtcagggataaaaggatacgtattctatgactccattaacttaatatattcaaaataggtaaatccataaacacagaaagcagattagaggataccaagagctagggcataggaatggggagtgatggtttagtctgtactgggtctcctttggcagtgatgaaaatattttagaattagataaggtgattattgaataacactgtgattgtcctaaatgccagttaaattgtatactttaaagtggttaattaattttatggaatgttcaaggaagggaaagatatctacaaggagaactacaaaatgctgatgaaagaaattgtagatgacacaaacaaatggaaaaacaccytatgttcatggattaaaagaataaatatcacaaaaatgaccataatgtccaaagcaagctacatattcaatgtattccctatcaaatcaccaacgtcatttttcacagaattagaaaacaagcttaacattcatatggaacccaaaaagagcccaaatagccaaaccaaccttaagcaaaagaacaaagctggaggtgtcacattacctgacttaaaattatactacaaggttatggtacctaaaacagcatggtactggtacaaaaatgaacacatagattaacagagcaggatagagagccctaaaatagaatcacatacct

SEQ ID NO: 924695 - DNA, 538 bp, Homo sapiens
catccccaaagtcttaatccttctcagcatcaagacaagaatataaagttcattgtctcatctaaatatcatccaaatcagatatgagtgacaccccatgtctaattcatcctaaggtgaaattcttctcctgctgtgaacctgtgaaatcaaacaagttatgtgcttccaaaacaagcaaagcgtagacattcccttttcaaatrgaagatataggaaagaagaaaagggtgataaatctcaagtaagtccacatgctagcaagacaagttctatgagaactgaaggcttgagaataatcctttttggcttcatgccctgccttcaggtggtggtactgcacgtgcagccctgccaggcaggagtctcaaatctagagctctgtctgccaggtggcctactcctagggcattggagagcatccacctggccttttgtaagaaagacaatggtcccacctttcaaaaccaaggaagtagacttgatgacctctgaatcaccttggtggtcattctttctttgtcttgaagaatagtgc

SEQ ID NO: 924696 - DNA, 786 bp, Homo sapiens
tcctggctctgaagttccatgcatgctataaccacaagaaaatgaattctgtcaacaacctgagagaatatggaagagggtgccaagggtcaggtgagactgcagccctggctgacaatttgtttttatttttatttttatttttgcaatggattcttgctctgtcacccaggctggagtggagtggtgtgatctaggctcactgcaatctccacctcctgggttcaagcgattctcctgtctcagcctcccaagtagctgggattacaggtgtgcaccaccacacccagctaatttttgtatttgtattagagacatggtttcatcatgttgaccaggtggatcttgaactcctgacctcaagtgatctgcccacctcagcctcccaaagtgctgggattacaggtcctagccactgtgacaggcttgttattgtttttttccccatttttcattgacacagagtaattgtatatatttatgggatacacagcgatgttattatakgtgtataccatgtattctgatcaaatcagggtaataagtatattcatcttcttttatctttgtgagagtacccagttatgctgttcccagaatcctgaattatggaaactgtgtgataataaatgagtgttgttttatgctgctaagttgtggtaatttgttacataacaataaaaaacttacataagcattgtggatgggtcatctgtctttggcagccaggaggcaaaaagacatagaggattactcctcagaagaatactgaaagaggaggcatac

SEQ ID NO: 924697 - DNA, 784 bp, Homo sapiens
tcctcctggctctgaagttccatgcatgctataaccacaagaaaatgaattctgtcaacaacctgagagaatatggaagagggtgccaagggtcaggtgagactgcagccctggctgacaatttgtttttatttttatttttatttttgcaatggattcttgctctgtcacccaggctggagtggagtggtgtgatctaggctcactgcaatctccacctcctgggttcaagcgattctcctgtctcagcctcccaagtagctgggattacaggtgtgcaccaccacacccagctaatttttgtatttgtattagagacatggtttcatcatgttgaccaggtggatcttgaactcctgacctcaagtgatctgcccacctcagcctcccaaagtgctgggattacaggtcctagccactgtgacaggcttgttattgtttttttccccatttttcattgacacagagtaattgtatatatttatgggatacacagcgatgttattatatgtgtataccatgtattctgatcaaatcagggtaatwagtatattcatcttcttttatctttgtgagagtacccagttatgctgttcccagaatcctgaattatggaaactgtgtgataataaatgagtgttgttttatgctgctaagttgtggtaatttgttacataacaataaaaaacttacataagcattgtggatgggtcatctgtctttggcagccaggaggcaaaaagacatagaggattactcctcagaagaatactgaaagaggagg

SEQ ID NO: 924698 - DNA, 784 bp, Homo sapiens
tcctcctggctctgaagttccatgcatgctataaccacaagaaaatgaattctgtcaacaacctgagagaatatggaagagggtgccaagggtcaggtgagactgcagccctggctgacaatttgtttttatttttatttttatttttgcaatggattcttgctctgtcacccaggctggagtggagtggtgtgatctaggctcactgcaatctccacctcctgggttcaagcgattctcctgtctcagcctcccaagtagctgggattacaggtgtgcaccaccacacccagctaatttttgtatttgtattagagacatggtttcatcatgttgaccaggtggatcttgaactcctgacctcaagtgatctgcccacctcagcctcccaaagtgctgggattacaggtcctagccactgtgacaggcttgttattgtttttttccccatttttcattgacacagagtaattgtatatatttatgggatacacagcgatgttattatatgtgtataccatgtattctgatcaaatcagggtaataagtatattcatcttcttttawctttgtgagagtacccagttatgctgttcccagaatcctgaattatggaaactgtgtgataataaatgagtgttgttttatgctgctaagttgtggtaatttgttacataacaataaaaaacttacataagcattgtggatgggtcatctgtctttggcagccaggaggcaaaaagacatagaggattactcctcagaagaatactgaaagaggagg

SEQ ID NO: 924699 - DNA, 576 bp, Homo sapiens
gaaaaatggttaaaacgatacattgtatgttacgtttattttactacttttttttttttttctagccttgctttgtcacccaggctggagtgcagtggcgtgatcttggctcacggcaacctccgtctcctgggttcaagcgattctcctgcctcagcctcctgagtagctgggattagaggcccccaccaccatgccgggctaatttctgtatttttagtrgagatggggtttcaccatgttggccaaactggtctcgaacttctgacctcacacttgaggtccgcccacctcagccccccaaaagtgtggagattacaagcgtgagccactgcgccgggaccacaatgtttttaagaagaaaacaaagttttttctcaaggaggcagatgctcagtgagtgtgcagcagttcccatgaggagagcaggcaggagccatgggcaggggcaggcacagggcaggccactgtcagtgctgaggttggctgggcataagtgtgccggggccagcctcattgttcctggaccctgctcagacagggcgtcctggccctcgggagagcctgccctgcgac

SEQ ID NO: 924700 - DNA, 576 bp, Homo sapiens
gaaaaatggttaaaacgatacattgtatgttacgtttattttactacttttttttttttttctagccttgctttgtcacccaggctggagtgcagtggcgtgatcttggctcacggcaacctccgtctcctgggttcaagcgattctcctgcctcagcctcctgagtagctgggattagaggcccccaccaccatgccgggctaatttctgtatttttagtagagatggggtttcaccatgttggccaaactggtctcgaacttctgacctcacacttgaggtccgcccacctcagccccccaaaagtgtggagattacaagcgtgagccactgcgccgggaccacaatgtttttaagaagaaaacaaagttttttctcaaggaggcagatgctcagtgagtgygcagcagttcccatgaggagagcaggcaggagccatgggcaggggcaggcacagggcaggccactgtcagtgctgaggttggctgggcataagtgtgccggggccagcctcattgttcctggaccctgctcagacagggcgtcctggccctcgggagagcctgccctgcgac

SEQ ID NO: 924701 - DNA, 776 bp, Homo sapiens
tacagtttccatactatgcttcacatcaaaatattcccaaataatagtatagcatcactacactttttacctcgtgtgtattgttcaactctataatctagcttgcttcctcatccctccactgacactatgcttgtccgtgtcagcagcaaaaaagggcctcttctctgtcctcatcaggcagtaagcagcatctaacacagcattcaacataattgatcacttcctctttttgcaagcacttktctctctcaggtcactatagtatcgcacttctctggattttctattacttcactggctgctcctttccagtctctgttggttcctcatctacttttggacctttagatactgaagttgcggccgggcatggtggcatgcctgtaattctggcactttgggaggctgaggcgggtggatcacctgaggtcaggagtttgagaccagcctaaccaacatggcgaaacccttctctactaaagatatgaaaattagccaggtgtggtggtgcatgcccgtaatcccagctacttgggggggctgaggaaggagaattgcttgaacccaggaggcagaagttgcagtgagccgagatcatgccactgcactccagcccaggcaacagagtaagactccatctcaaagaaaaaaaaataagtagacgcaactggaataagaccatagagaaaacaaagaagaaataaagagggagaagttactttcaattaggtgatcagaaaagtcatatctgaggatactttaagatgaataga

SEQ ID NO: 924702 - DNA, 776 bp, Homo sapiens
tacagtttccatactatgcttcacatcaaaatattcccaaataatagtatagcatcactacactttttacctcgtgtgtattgttcaactctataatctagcttgcttcctcatccctccactgacactatgcttgtccgtgtcagcagcaaaaaagggcctcttctctgtcctcatcaggcagtaagcagcatctaacacagcattcaacataattgatcacttcctctttttgcaagcacttttctctctcaggtcactatagtatcgcacttctctggattttctattacttcactggctgctcctttccagtctctgttggttcctcatctacttttggacctttagatactgaagttgcggccrggcatggtggcatgcctgtaattctggcactttgggaggctgaggcgggtggatcacctgaggtcaggagtttgagaccagcctaaccaacatggcgaaacccttctctactaaagatatgaaaattagccaggtgtggtggtgcatgcccgtaatcccagctacttgggggggctgaggaaggagaattgcttgaacccaggaggcagaagttgcagtgagccgagatcatgccactgcactccagcccaggcaacagagtaagactccatctcaaagaaaaaaaaataagtagacgcaactggaataagaccatagagaaaacaaagaagaaataaagagggagaagttactttcaattaggtgatcagaaaagtcatatctgaggatactttaagatgaataga

SEQ ID NO: 924703 - DNA, 627 bp, Homo sapiens
atcttgaaagatttatagttaaagtcaacaaaattatacactggggaaataacatcctattcaataaatagtgctgggaaaattgcagccatatgcagaagaataaaagtggactcataactttcaccatatacaaaaattaactcaagatggattamagacctaaatgtgagaccttaaactacaaaaactcttgaagaaaaactaggaaactcttctggacattggcctgggcaaagaatttatgatcaagtcttcataagaaaatgcaacaaaaagaaaaatagtttaatagacttaattaaactataaagcttctgcacagcaaatgaaacaatcaacagagtgaacagacaacctaaagaatgttaagaaatatttgcaaactacgtatttgacaaagagctaacatcctgaatctataaggaactgaaacaactcaacaggaaaaaacctaataacctcattaaaaagtgggcaaaggacatgaacagacatttttcaaaataagatatacaagtggccaacaaacataataaaatgctcaacatcactaatcatcagagaagtggaaattataaccacaatgagatatcatcttatacatgtcataatgactattattaa

SEQ ID NO: 924704 - DNA, 627 bp, Homo sapiens
atcttgaaagatttatagttaaagtcaacaaaattatacactggggaaataacatcctattcaataaatagtgctgggaaaattgcagccatatgcagaagaataaaagtggactcataactttcaccatatacaaaaattaactcaagatggattaaagacctaaatgtgagaccttaaactacaaaarctcttgaagaaaaactaggaaactcttctggacattggcctgggcaaagaatttatgatcaagtcttcataagaaaatgcaacaaaaagaaaaatagtttaatagacttaattaaactataaagcttctgcacagcaaatgaaacaatcaacagagtgaacagacaacctaaagaatgttaagaaatatttgcaaactacgtatttgacaaagagctaacatcctgaatctataaggaactgaaacaactcaacaggaaaaaacctaataacctcattaaaaagtgggcaaaggacatgaacagacatttttcaaaataagatatacaagtggccaacaaacataataaaatgctcaacatcactaatcatcagagaagtggaaattataaccacaatgagatatcatcttatacatgtcataatgactattattaa

SEQ ID NO: 924705 - DNA, 627 bp, Homo sapiens
atcttgaaagatttatagttaaagtcaacaaaattatacactggggaaataacatcctattcaataaatagtgctgggaaaattgcagccatatgcagaagaataaaagtggactcataactttcaccatatacaaaaattaactcaagatggattaaagacctaaatgtgagaccttaaactacaaaaactcttgaagaaaaactaggaaactcttctggacattggcctgggcaaagaawttatgatcaagtcttcataagaaaatgcaacaaaaagaaaaatagtttaatagacttaattaaactataaagcttctgcacagcaaatgaaacaatcaacagagtgaacagacaacctaaagaatgttaagaaatatttgcaaactacgtatttgacaaagagctaacatcctgaatctataaggaactgaaacaactcaacaggaaaaaacctaataacctcattaaaaagtgggcaaaggacatgaacagacatttttcaaaataagatatacaagtggccaacaaacataataaaatgctcaacatcactaatcatcagagaagtggaaattataaccacaatgagatatcatcttatacatgtcataatgactattattaa

SEQ ID NO: 924706 - DNA, 729 bp, Homo sapiens
tggactggcgggaaagttgtttactgaaactagaggcaaggagttgaagagaactaggaagttaaactttaaaatgaagaatcaaagaataagagagctggacatactgacatactgattctttgaagagaaacttagggttcactatatttaacaggaggccgagacaggaggatcgcrtgagcccaggagtttgagaccagcatgggcaaaatagtaaaaccccatcttattaaaaaaaatttttttttttgaaatggggtctctctctgttgcctgggctggagtgcattggtgctatctccactccctcaacctctcagccaatcctcccacctcagcttcatgagtagctgggactacaggcgtgcaccaccctgcccagctaattttcgtatttttttgtagagacaggttttcatcatgttgcccagcctggtctcgaactcctgagctcaggcaatcctctcacctcggcctcccaaagtgctgggattacaggcatgagccaccacacccgaccttaaaaaaaattttttttaatatgtggaaagcagacacgagtagaagccagcacaactagctaacttcccctagtgatagaggcaggagacaggcaaatgccatctatgtcattatatatagggagcttgcctaaacatgcccacagtggaaaattccatcccttaacacatgcacagtaagagaaataaatcaatgcagagtggc

SEQ ID NO: 924707 - DNA, 631 bp, Homo sapiens
caaaaatttgtggtacacagctaagagcagtgcccagagggaaagttaacagcactaaaatgcatccattagaaaagtgggaaaatcttaataatctaagctccatctcaagaacctagaagagtaaaataaaaccaaaacgagcagaaagaagaaaataataaagagcagacggccgggtgcggtggctcacacctgtaatcccagcacgttgggaggccgaggcgggcagatcacgrggtcaggagatcgagaccatcctggctaacaaggtgaaaccctgtctctactaaaaatacaaaaaattagttgggtgcagtggcgagcgcctgtagtcccagctactcaggaggctgaggcaggagaatggcgtgaacccgggaggcagagcttgcagtgagccgagattgcgccactgcactccagcctgggcgacagagcgagactctgtctcaaaaaaaaaagaaaataataaagagtagaaattgatggaattgaaacagaatcgggcatggtggcttatgcctgtaatcccagcactttgggaggctgaggtgggtgggtcacctgaggtcaggagttcaaggccggcccgggcaacatggtgaaaccccatctctactaaaaatac

SEQ ID NO: 924708 - DNA, 552 bp, Homo sapiens
aaatgcaatgtccctgtttacttccaattcaggtagaattgtatatacttcccttatacagcttcccacactgagctgtctcaccatctctgtggacagatgagtaattcgtgcccgctctcccttctcagtttgtcttctgtgtggagaactgccaacatggtctctcctttttagaaactcacatactgtaagtgcaaccttttggaagtcagtgtacataaacatgtgaaatgtgcatcccagctactgtagataatgaggcagctctayatgtaatcacgaggaaaaatcgccaagataaattcagtggacaaaccagcacggaagaggctgaggagcacgctgccatatgtctacacatagtgtagctctagcagaattcgtgaggagcaagtgacagcaggtgcctctgcagaaaggaactggggacaacagtggggaagaagttaacatgtcattattttattttttagatattctacaatgtgaatttactatttattaaaaactaaataaaattgtaagctggggatagtggctcatgcctgt

SEQ ID NO: 924709 - DNA, 552 bp, Homo sapiens
aaatgcaatgtccctgtttacttccaattcaggtagaattgtatatacttcccttatacagcttcccacactgagctgtctcaccatctctgtggacagatgagtaattcgtgcccgctctcccttctcagtttgtcttctgtgtggagaactgccaacatggtctctcctttttagaaactcacatactgtaagtgcaaccttttggaagtcagtgtacataaacatgtgaaatgtgcatcccagctactgtagataatgaggcagctctacatgtaatcacgaggaaaaatcgccaagataaattcagtggacaaaccagcacggaagaggctgaggagcacgytgccatatgtctacacatagtgtagctctagcagaattcgtgaggagcaagtgacagcaggtgcctctgcagaaaggaactggggacaacagtggggaagaagttaacatgtcattattttattttttagatattctacaatgtgaatttactatttattaaaaactaaataaaattgtaagctggggatagtggctcatgcctgt

SEQ ID NO: 924710 - DNA, 583 bp, Homo sapiens
attctcctccctcagcctcccgagtagctgggattacaggcgcctgccaccatgccctgctaatttttttgtatttttagtagagatgggattttaccaggttgcccaggctgttcttgaactcctgacctcaggtgatccacccgcctcagcctcccaaattgctgggattacaggcatgaaccactgcacctggcctgttgttgttgttttagagatggtctcaatctgtctcccaggctggagtgtggtggtgcgatcatacctcactgcagcctcaaacwcctgggctcaagggatagtcccgcctcagcctcccaattaattgagactacaggcatgtgccaccacacccagctaattttggggtatactttttgtagagatggggtcttgctatgctgcctaggctggtcttgagttcctggcctcaagtgatcctctcacctcagcctctgaatgtgttgggattacgggtgtgagcctctgcacccagccggtgtttcagagctttatggtgatgaggcatgcttctggatagtcctgggagcctgtgtccttctcacattcaggagtccagtgg

SEQ ID NO: 924711 - DNA, 583 bp, Homo sapiens
attctcctccctcagcctcccgagtagctgggattacaggcgcctgccaccatgccctgctaatttttttgtatttttagtagagatgggattttaccaggttgcccaggctgttcttgaactcctgacctcaggtgatccacccgcctcagcctcccaaattgctgggattacaggcatgaaccactgcacctggcctgttgttgttgttttagagatggtctcaatctgtctcccaggctggagtgtggtggtgcgatcatacctcactgcagcctcaaactcctgggctcaagggatagtccygcctcagcctcccaattaattgagactacaggcatgtgccaccacacccagctaattttggggtatactttttgtagagatggggtcttgctatgctgcctaggctggtcttgagttcctggcctcaagtgatcctctcacctcagcctctgaatgtgttgggattacgggtgtgagcctctgcacccagccggtgtttcagagctttatggtgatgaggcatgcttctggatagtcctgggagcctgtgtccttctcacattcaggagtccagtgg

SEQ ID NO: 924712 - DNA, 620 bp, Homo sapiens
catgcaaataatttcccccctttacacatattttctttaaattagccagttcacaacccctgctggaaagccttaagaggtaatgcctgtggaccttaataaaggcagagttccacagattcactcttatctgtgattaacaaaatgctgcttttatttcatgtgttttgttttgctgcctctgtgtctcacctgactgacatacacatacctaactttcctcccagtcagcactcctggagagtggctatcttggcaggaataaactggacacaggtyggacaagaaccacgagggcatctgctagtataaacaagtttcctgtgagacatacacttggccacaggtcaggcaagaaggcattgtcccattcaccaagataaagaagtatcctcttttgatttactgtaaacatcagtgaccacctcctctagagccttgtcggggcagagctagagttcctggccactctccagagagagacccgaagaccaagttagaagaaaacaaaatcttttaatatgctgaatttggtttattagtatttcattgaggatatttgcatcagtattgcaagggatattgatctgtaattttcttatagtgtcttcatatagctt

SEQ ID NO: 924713 - DNA, 751 bp, Homo sapiens; identical to SEQ ID NO: 923802

SEQ ID NO: 924714 - DNA, 688 bp, Homo sapiens
aatttttgcacttttttgtagacacaggttctcaccatgttgcccaggctggtctcaaactcctgggttcaagagatcctcctgcctcagcctcccaaagtgctgggactacagacataagccaccactccgtcataaatgttgatacatctgtataattaaatactaagctagcatcaaaaactatactttcaagccaggcatggtgatggtgtgtgcctgaaatckcagctactcaggaggctgaggtggaaggactgcttcagcgcaggagttcaagaccagcctgggcaacatagtgagaccctgtctcaaataaaaaaaaaaagaaaagaacaaagaaaaactatactttcagagaattctgaatcacacggggaaaaaagctctcatcacaaccaagtgaataaatagatccacagagtgttacctgtcaacacttcacagtgttcacagtgttatctcaatcatgttactacaaataagttcacaaaaaattagcatatttacagtggttatcttggatagtgggactgtggtaaaattttctttttctaaaataaggctgaaatttcctaaaaattcattttcaggccaggtgcagtggctcatgcctgcacttggaggggtagggggtggtctaccccattccaggcagtgacagcagtacctgacaactagagctgcc

SEQ ID NO: 924715 - DNA, 654 bp, Homo sapiens
ccctggttttccacctgtcctttgggagccccaggatcctgtctggtctacactatgcctacggtctttggtcccttccctccactgccctgcaagtcggtcagtgggagcctcccccactccaggcagtcctgggtgccccctgctcagaacaatcccaggggctctcctgggcctgtagccgtggatctcagccctctgcttttaagcagcagacccctctttgcagacagggtcttgatgcacaaagcagataaacggggtttgctctggttaaggcgttgggtgggggttgaaggcaccaaggggctccacctacttggctttaggcaagcaaggcagccccaggtgccagggggtgatgaggtcaccacggagaccatggtggtggtagcrgcagaggtggcagcagggttggtggcaggcatggggaggtcaaccggtcccacaagaggttgggttctggtttcttctgtcttggcttctttctcgtcttcttggtgtctgcaacaaaaggtgccagtgagtgcctaccttgcagctggagcaggtagagtgggagccagacacagtggtatggggtcttcacgcagtccctccaacaggaaagggagggggccccaaagaacaccatgaacaatacctagagccact

SEQ ID NO: 924716 - DNA, 633 bp, Homo sapiens
gcccaccactactcccagctaatttttgtttttgttttcagacggagtttctctcctgtcacccaggctggaatgcaatggtgtgatctcggctcactgtgacttccgcctcccaggttcaagtgattctcctgcctcactctccagagtagctgggattacaggcgmccgccagcaagcccagctaattttttgtgtttttagtagagacggggttttaccatgttggccaggctggtctcaaatgcctgacctcaggtgatccacccgcctcggcctcccaaagtggtgggattacaggcgtgagccaccgtgcctggccactcccagcgaatttttgtatttttagtagagacaaggtttcaccacgttggccaggctggtctcgaactcctgccctcaggtgatccgcctgcctctgcctcccaaaggcatgagccaccatgcccagcctcaggtagtatctttatagcagtgtgagaacggatgaatacataggatgtagtctaccctgttggtgccccacccatatccccttggcacttacctctacagaaaggatgctcatcgccagcacctgaggctcagcctgggggccttattctggcttcaggagtcccttacccagtgtac

SEQ ID NO: 924717 - DNA, 666 bp, Homo sapiens
cctcgcatgcgcctggtggtcaccgcggacgactttggttactgcccgcgacgcgatgagggtatcgtggaggcctttctggccggggccgtgaccagcgtgtccctgctggtcaacggtgcggccacggagagcgcggcggagctggcccgcaggtgaggggagggcctctagcagggcggcgatcggcttggggcgcgcggctccgcggccgctagtgctccagctcgcgctccgccctcaggcacagcatccccacgggcctccacgccaacctgtccgagggccgccccgtgggtccggcccgccgtggcgcctcatcgctgctcggcccggaaggcttcttccttggcaagatgggattccgggaggcggtggcggccggagacgtggatttgcctcaggtgcggagccgcagctacaggaggatgctcgcgaggayccccagagctccgcccggagggtactgtgaggccgttaggagctggcggtggatgacttccgcattcaaacactggagccatcacacggaagcacgaggagggtatcctcggcagctactcccggtcgctcaaggtgtctctcgctcgccctctaggtgcgggaggagctcgaggcccaactaagctgcttccgggagctgctgggcagggcccccacgcacgc

SEQ ID NO: 924718 - DNA, 745 bp, Homo sapiens
gacagaaaaaaactcgacatgaggcagtttcatctttgggtgctatattcatttgctagggctgccataacaaagtaccacagactgagtggcttacacagcagaatttttttctctcactattttggtggccagaagtctgagaacaaggtttcagcagggttggtttcttgtaaggcttcctccttgacttgtaatggccatcttctccctatgccttcatagggccttcccccatgtgtatctgtgtcctaatcccctcttyttataaggacaccaatcacattagattagggcctaccctgatgacctcattttaactcagttacctctttaaaggccccatctccaaatacagtcatattctgaggtaactggcagtgggattggggggtgcagtggagtcaggacttcaacatatgatttttttttttttttttgagacagagtcttgctctgttgcccaggctggagttcagtggcatgatctcagctcactgcaacttacgcttctcgggttcaagcaattcatctgcctcagcctcccaagtagctgggattacaggcatgcgccaccacacccggctactttttgtatttttagtagagatggagtttcaccatgttggccaggctggtctcgaactcctgactcaggtgatccacccacctcggcctcccaaagtgctgggattacaggcgtgagccaccgcgcccggccaacatatgaactttagaaaggaga

SEQ ID NO: 924719 - DNA, 838 bp, Homo sapiens
gcccaggcagctgagcagacagaaaaaaactcgacatgaggcagtttcatctttgggtgctatattcatttgctagggctgccataacaaagtaccacagactgagtggcttacacagcagaatttttttctctcactattttggtggccagaagtctgagaacaaggtttcagcagggttggtttcttgtaaggcttcctccttgacttgtaatggccatcttctccctatgccttcatagggccttcccccatgtgtatctgtgtcctaatcccctcttcttataaggacaccaatcacattagattagggcctaccctgatgacctcattttaactcagttacctctttaaaggccccatctccaaatacagtcatattctgaggtaactggcagtgggattgggkggtgcagtggagtcaggacttcaacatatgatttttttttttttttttgagacagagtcttgctctgttgcccaggctggagttcagtggcatgatctcagctcactgcaacttacgcttctcgggttcaagcaattcatctgcctcagcctcccaagtagctgggattacaggcatgcgccaccacacccggctactttttgtatttttagtagagatggagtttcaccatgttggccaggctggtctcgaactcctgactcaggtgatccacccacctcggcctcccaaagtgctgggattacaggcgtgagccaccgcgcccggccaacatatgaactttagaaaggagatgatgattcagcccataacaaggtcactctctgaggcagcgtgatttccactcattctcacctgggctgctctctg

SEQ ID NO: 924720 - DNA, 582 bp, Homo sapiens
gatataacctctcccctagccactgtgttccacttcccctcagctactctgcgtcagaccctgaagctgccaaaagcctccctgtgagacttgatctcaatttcagagttcacaacccttccatgacttttgggaaagatcctgacatgtgcccctcccttataacaagaccctctgtgacagccatsaacataaagtcaattaccaggcctggtggcatgtgcctatagtcctaactgttctgaaggctaaggtgggaggattgcttgagcctaggagttcaagatcagcctgggcaatgtaatgagaccctgtctctacaaaaaatttacaaatgaggattaataaccagaatacgtaaggagctcaaacaactctaggacaaaatctaataatccaaccaaaaactgggcaaaagatctcaacagatatttctcaatagaagacatacaaatggcaaacaggtatatgaaaaggtacttggcatcattgataatcagagaaatacaaatcaaaattacaatgagatgtcatctcatcccagttaaaatggcttatatccaaaagacaggcaataacaaa

SEQ ID NO: 924721 - DNA, 582 bp, Homo sapiens
gatataacctctcccctagccactgtgttccacttcccctcagctactctgcgtcagaccctgaagctgccaaaagcctccctgtgagacttgatctcaatttcagagttcacaacccttccatgacttttgggaaagatcctgacatgtgcccctcccttataacaagaccctctgtgacagccatcaacataaagtcaattaccaggcctggtggcatgtgcctatagtcctaactgttctgaaggctaaggtgggaggattgcttgagcctaggagttcaagatcagcctgggcaatgtaatgagaccctgtctctacaaaaaatttacaaatgaggattaataaccagaataygtaaggagctcaaacaactctaggacaaaatctaataatccaaccaaaaactgggcaaaagatctcaacagatatttctcaatagaagacatacaaatggcaaacaggtatatgaaaaggtacttggcatcattgataatcagagaaatacaaatcaaaattacaatgagatgtcatctcatcccagttaaaatggcttatatccaaaagacaggcaataacaaa

SEQ ID NO: 924722 - DNA, 637 bp, Homo sapiens
tgccctctatcaccatagattagtttgtattttctagagttttatacaaatggaatcatacggtatgtactctttaaaaaaaaaaaaacttccttttttcagtgaccatgattattttgagattcattcatgtagcatgtatcaatagtttgttccctttttattgggaaataatattcctttgtgtggttataccatggtttacttttccatttacctgttgatggacatgtgggttgtttctagttttgtgctattacaaagttaccgtgaaattcatgtacaagtctttctgtgaccatatgcttttatttctcttgggtaaatacccaggagtagaatggctggattatgtgtatatttaactgtggtggcaccattttacattcccagcagcagtatatgagaatttcagtttccccacatcctcaccaacacttagtatgatcagtcttttaaattttagcctttctaatatgtatgtggtgatatcttaaygtggttttaatcttaatgtgttctctaatgaacaatgatactgagcatctttttgcatgcttatttccctctgtacatcttttttttgttatgtgtctgttaatacctttgaccatttgaaaaatttggttgttggttt

SEQ ID NO: 924723 - DNA, 753 bp, Homo sapiens
caacatgccctgcaggtgcttccgatgaggcccaaggttgaaaatcgcagctgtaatgaataggtgggaggttgtgcagagaggatgctcaggcgtgggtgtggaaggacagagtaaatgggcaggttggttggcaggttggccaacaagttccaataccttcacccggctttcaaggctctrtatctttggtccacccttggcagttcgtttctgttccattttttccagcatggtttttagaacaaacctgaccaatgaccagatcatgtatgaatgaatgaatgaatgaatgaatgaattaggtaattaatgtttgtttggggtttcaacagtcacagaaagaaaaattcacaagcccccagggcagaaaagtgaatgcattgcggccagttgtcagcagcatccacatagggagtccagcgggtatggagagggtaggaggtgataggtgggagcaggtggcagagggcctgattgcaagccaagggtgacccctttgttctgcagacaatacaagtgctgttagggatctttgaggaagaccatgatagggtgggtccagaccttaggaaaacacagtctctgtggaactctcagatctgcctagttctgacccaaccccaggttccattttgggttctgccatttatgcactgggcaaccctggggaaagtgttaattaaacctcggtttcctcatgtgtaaagggtgtgatcatgcctccctcgctgggttgctgtgagattgctg

SEQ ID NO: 924724 - DNA, 553 bp, Homo sapiens
gttgtgcagagaggatgctcaggcgtgggtgtggaaggacagagtaaatgggcaggttggttggcaggttggccaacaagttccaataccttcacccggctttcaaggctctgtatctttggtccacccttggcagttcrtttctgttccattttttccagcatggtttttagaacaaacctgaccaatgaccagatcatgtatgaatgaatgaatgaatgaatgaatgaattaggtaattaatgtttgtttggggtttcaacagtcacagaaagaaaaattcacaagcccccagggcagaaaagtgaatgcattgcggccagttgtcagcagcatccacatagggagtccagcgggtatggagagggtaggaggtgataggtgggagcaggtggcagagggcctgattgcaagccaagggtgacccctttgttctgcagacaatacaagtgctgttagggatctttgaggaagaccatgatagggtgggtccagaccttaggaaaacacagtctctgtggaactctcagatctgcctagttctgacccaacc

SEQ ID NO: 924725 - DNA, 636 bp, Homo sapiens
agatacaatgagggtacaggcattgggtaaatactgccactccataaaggagaaatcagccaaaagaaagaggatacaggccccatgcaagtctgaaatccagcagggcagtcattaaatcttaaagctccaaaataacctcctttgaatccatgtctcacatccaaggcacactggtgtgaaggtgggctcccaagaccttaggcatctctgcccccatggatctacagagctcagcccccatggctgctctcaagggctggtattgagtgcctgtggcttttccaggtacacagtacaagctgttggtggatctaccattctgggctctggaggatagtgaccctcttctcacagctccagyaggtagtgccccagtgggcactctgtgggggttccaatcccacattttccctctgtacggccctcatagaggttctccatgagggctctgcccctgcagcaggcttcttggacatctaggcttttccatacatcctctgaaatctaggaggaggctcccaagcctcaactcttgcactgtgcgcactggcaggcttaacaccacatggaagccaccaaggcttacagtttgcaccctctgaagcagcagcccaagctgtatctggggccctt

SEQ ID NO: 924726 - DNA, 609 bp, Homo sapiens
agagccagaaaagggttggatttttattgcgcttggccctttaccagctgtgtgggttgaagcagtcacttttcactcagcctcagttttcttatctgtaaaaggggaataataaatgtctacctcatgggattatcgtaaggattgtaaatgacagatacccatctaatggcatgttaagcaaaaaactaaactaaactaaaaatcaatgaagtgggtatttattggtccaaagtgttactgaaaagtttaagrgcagatataatttcagacacacctgaaactacatgttcaaacatcatcagaaatctctctctctctctctgtctcagttggctccattttcttataagccttcgaatattgtttggacatttgccccccaccacccaatctcatgttgaaatttgattcctaaagtttgaggtggggcctagtggcaggtgtttaggtcattagggtagacccccatgaatggctcagtgtcatccccatgataatgaatgagttcttactctattagttcacatgagagcttggtgcttaaaagagcctggcacctttcccctctctctcttgcttcctcctctctcaccacgtgacgtgcct

SEQ ID NO: 924727 - DNA, 600 bp, Homo sapiens
gcaataagaaatctttttaacctcatgaagtttagtgactaaagcagataactgaacaacatagtgcaataattcatgcaagcaattgcaaaaaattaaaacaaaaataccaaattcctcagaattcatccgatattgtgtcaacaattatacaaaacagttctggaaaagcaagggtttttggtgatgagggactcttcaagcagtgtaatttctaagaaagagaaaaacacacatttccttttggagtttaatgagccctggcatccaaaggctacacctagaactgctggggcatagaagaggagacacagaaagatgacagacrgcacagcaagtaggcagaggacggataccaagatggcccaccacccccaccaaccttgcactaccgagattataaagttcccccagtgaaatgaaggcaggcttcatggagccctaggttttttctgaggtcaaagaggaaggtgcaggcatggccacgctagccaccccaaaaaagtttctagctgaacaaagtcacacattcaggagatctggagactgctttttaacccaccctcacctatatattaataccagtgttccacatttgaa

SEQ ID NO: 924728 - DNA, 855 bp, Homo sapiens
atcccatgtccatggattggaagaatcaatattcttaaaatgtccatactacacaagtactttacagattcaatacaatccttatcaagataccaataacattcttcacagaaatagaaaaaataatcctaaagttatatggaaccacaaaagacccagaatagccaaagccattctgagcaaaacgaataaaactggaggaatcacattacatagcttcaaattatactacagagttatagtaaccaaaacagcatggcactgccataaaaacagacacacagaccaatggaacataagagagcatccagaaataagttcatatatatacagtgaactcattttcaacaaaggtgcaaagaacatacactggggaaaagacaatcacttcaataaatcttgctagtaaaactggatattcaaatacagaagaataaaagcaggcttatatttctcaacatataaaaaaatcaaatcaaaacagattaaagacttaaatctaagacctctaaccatgaaactactacaagraaacattggggaaactctccaggatactggcctgggcaaagatttcttgagtaatacctcaaaagcacagttaaccaaagcaaaaatggacaaatgtgatcacaggaagttaaaaagcttctgcacagcaaaggaaacaatcaacaaagtgaatagacatattcccatagaatgggaaaaatgtttgcaaactacccatctgacaaaggattaataaccataatatataagaagctcgaacaactctatagaaaaaaatgaataatctgattttaaaacagataaaagatctgaatagacattcttcaaaagaagacatacaaa

SEQ ID NO: 924729 - DNA, 855 bp, Homo sapiens
atcccatgtccatggattggaagaatcaatattcttaaaatgtccatactacacaagtactttacagattcaatacaatccttatcaagataccaataacattcttcacagaaatagaaaaaataatcctaaagttatatggaaccacaaaagacccagaatagccaaagccattctgagcaaaacgaataaaactggaggaatcacattacatagcttcaaattatactacagagttatagtaaccaaaacagcatggcactgccataaaaacagacacacagaccaatggaacataagagagcatccagaaataagttcatatatatacagtgaactcattttcaacaaaggtgcaaagaacatacactggggaaaagacaatcacttcaataaatcttgctagtaaaactggatattcaaatacagaagaataaaagcaggcttatatttctcaacatataaaaaaatcaaatcaaaacagattaaagacttaaatctaagacctctaaccatgaaactactacaaggaaacattggggaaastctccaggatactggcctgggcaaagatttcttgagtaatacctcaaaagcacagttaaccaaagcaaaaatggacaaatgtgatcacaggaagttaaaaagcttctgcacagcaaaggaaacaatcaacaaagtgaatagacatattcccatagaatgggaaaaatgtttgcaaactacccatctgacaaaggattaataaccataatatataagaagctcgaacaactctatagaaaaaaatgaataatctgattttaaaacagataaaagatctgaatagacattcttcaaaagaagacatacaaa

SEQ ID NO: 924730 - DNA, 855 bp, Homo sapiens
atcccatgtccatggattggaagaatcaatattcttaaaatgtccatactacacaagtactttacagattcaatacaatccttatcaagataccaataacattcttcacagaaatagaaaaaataatcctaaagttatatggaaccacaaaagacccagaatagccaaagccattctgagcaaaacgaataaaactggaggaatcacattacatagcttcaaattatactacagagttatagtaaccaaaacagcatggcactgccataaaaacagacacacagaccaatggaacataagagagcatccagaaataagttcatatatatacagtgaactcattttcaacaaaggtgcaaagaacatacactggggaaaagacaatcacttcaataaatcttgctagtaaaactggatattcaaatacagaagaataaaagcaggcttatatttctcaacatataaaaaaatcaaatcaaaacagattaaagacttaaatctaagacctctaaccatgaaactactacaaggaaacattggggaaactctccaggatactggcctgggcaaagatttcttgagtaatacctcaaaagcacagttaaccaaagcaaaaatggacaaatgtgatcacakgaagttaaaaagcttctgcacagcaaaggaaacaatcaacaaagtgaatagacatattcccatagaatgggaaaaatgtttgcaaactacccatctgacaaaggattaataaccataatatataagaagctcgaacaactctatagaaaaaaatgaataatctgattttaaaacagataaaagatctgaatagacattcttcaaaagaagacatacaaa

SEQ ID NO: 924731 - DNA, 615 bp, Homo sapiens; identical to SEQ ID NO: 921599

SEQ ID NO: 924732 - DNA, 607 bp, Homo sapiens
ccagattaagggtggatctgacttccccaggccactgactatcaaatgtgaatctcctttggcagcaccctcacagacacacccaggatcaatactttgtgtcgttcaatccaatcaagttggcattcagtattaaccatcacaagcccaccccttgttaactygaacccatacacatctcttgtgctcagacatcattttcaagtgaagacaataataattacacctaacataatacaactatccttcgcacaaccagaagcgcaccaaccctcaacccaaatactattacataaaattaacaatacttaaatgttgctgtgaagtcaataaatcttatgtcacatgataaagagagaggagataaaatgaagatattttcttagtataagtgtgtgcatgcaaaaacatgtttttaacaaaaggaggaaatactcatgaaaacttcagtcctcatttctgcagccggtcacgtggtcatagctggtactgatgactaccttcttctactacccattctgtattccctttgccttcagtaagcacctcagcaggtcatggtgttttccctggaggagtgacccaaaccttcctgaagggtctgggt

SEQ ID NO: 924733 - DNA, 818 bp, Homo sapiens
tcgattgtgctcacccagattaagggtggatctgacttccccaggccactgactatcaaatgtgaatctcctttggcagcaccctcacagacacacccaggatcaatactttgtgtcgttcaatccaatcaagttggcattcagtattaaccatcacaagcccaccccttgttaactcgaacccatacacatctcttgtgctcagacatcattttcaagtraagacaataataattacacctaacataatacaactatccttcgcacaaccagaagcgcaccaaccctcaacccaaatactattacataaaattaacaatacttaaatgttgctgtgaagtcaataaatcttatgtcacatgataaagagagaggagataaaatgaagatattttcttagtataagtgtgtgcatgcaaaaacatgtttttaacaaaaggaggaaatactcatgaaaacttcagtcctcatttctgcagccggtcacgtggtcatagctggtactgatgactaccttcttctactacccattctgtattccctttgccttcagtaagcacctcagcaggtcatggtgttttccctggaggagtgacccaaaccttcctgaagggtctgggtcatttgtagccctgcctggattgggtttttgtagttttccattgactttaaatacagggcgtggtaatactaacagacaccctaatggatctcctgtattccatgtgtaatcttccttacctccactgtgaattagtagactgatttcatcttgatagtctgggtaaatcaccccagccaacactgtaactcccttc

SEQ ID NO: 924734 - DNA, 566 bp, Homo sapiens
agtctggtggggacttggagaatctttatgtctagctaagggattgtaaatacaccaatcggcactctgtatctagctcaaggtttgtatacacaccaatcagcaccctgtgtctagctcagggtttgcgaatgcaccagtggacactctgtatctagctaatctagtggggaggtggagaacgtttgtgtctagctcagggattgcaaacgcaccaatcagcacattgtcaaaacagaccaatcrgctctctgtaaaacagaccaatcggctctctgtaaaatggaccaatcagcaggatgtgggtggggccagataagagaataaaagcaggtctgcccaagaccacagtggaaatccccttgggtcctctttggcgctgtggaagctttgctcttttggtttttgcaataaatcttgctattgctcactccttcggtccacgctgcatttatgagctgcaacaccgcgaaggtctgcagcttcactcctgaagctagcgaggccaggaacccaccaaaaggaggaaactccgaacatcagaatgaacaactccaaatgtgccg

SEQ ID NO: 924735 - DNA, 625 bp, Homo sapiens
ttcctctcatcccctctctctgtgcctgcctcttcctgcctcttgttctctctctctctggtgtcttttgaaccttctaaaatgaacctttgacaaaagtttgcttttagctcagaagcagccttccttaaggtctctttaataacagcaaacacccaaagactctcacacctttattaacagagcttgttttgctgttcttttttctctccttggataccagaagcttaagaagaaattacctcatcaccactacaggcaggtcccaattgtaaaaacagtccttttgacagacacttcatcgccagttctccctatgaatggcagctttgcagaacagcctctggcatgggaggaaggaragagcttcgatttatattaatacttgatttctgaacagaagtcaagagaagagtgggctcggtggagaatttcttcatctttggagggatgattaaaccagaacttattattctccatgtaaatcaccaggacttaaagcaagaatcctgctttttctgatgagaatggtagccaggcaagggaaggcatgcaaggctgcagggagataatggtctgagccctggccctaggcacacccaaaacgcaggctttccccagcaac

SEQ ID NO: 924736 - DNA, 707 bp, Homo sapiens
gcctcccacaagaagctggtggagtagagtgttccctgactcctccaaggaaaggaagactctctttcacggtctgctaagtacgggtgcctaccaaggcactggtgttaccacttgaccaaggagccctcaagcggcccttatgcgggcatgacagagggttcacctcttgccttctaggtcacttctcacaatgtcccttcagcacctaaccctatacccgctggttattccttggttatattagtaatacaacaaagagtaatattaaaaactaatgattaataatgtttatgctaattattgataatgtccacgatcatctctatatctaatttgtattataactgttcttattctaactattttattatactgaaacagtttttgccttcagtctcttgcctcggcacctaggtaatccttcacccacagcattctcaccagcaaaccagtttggcaatttcttatcaagtttcttgtaaagttaaacatacagttaccatacaatccctcaatctcactcctaggtgtttgcccaaaagaaataaaaacgtgtcggyggggcacggtggctcacacctgtaatcccagcactttgggaggccaagacgggtggatcatgaggtcaggagatcgagatcatcctggctaacacggtgaaactccgtctctactaaaaatacaaaaaattagctgggcgtgtt

SEQ ID NO: 924737 - DNA, 584 bp, Homo sapiens
tatctcaaaagaaaaaaaaaagttactaaagggatacttttagacagaaaacacaggcctgagtgtggcggttgctctccttggtaagggaggtgagggagaagccgcagcccggtgccagtggagcactgggcartggcagcacccaggaggccaaaggaagtgtccgccatgtccagtgctgttgggccgagtgaagccgtcactggtgactgtgatgggagagtgtgtgacgtgatggagcaaagctctgactggaggagttccagtgagatggaggagaggacatggagacagcgagtgtagacaactgtgacaaagcggggaaatgaagaaggaggctgggtgctagtggctcacacctgtaatcccagcactttgggaggctgaagcagaaggatctcttgagcccaggagtttgagaccagcttgggcaacatggcgaaactcgatctctacaaaaagtacaaaagttagccgggtgtggtggtgcatgcctgtggtcccagctactcaggaggctgaggcaagaggatcggttgagccctggaggtcgaagcttcagtgagctgtgatggcgccac

SEQ ID NO: 924738 - DNA, 584 bp, Homo sapiens
tatctcaaaagaaaaaaaaaagttactaaagggatacttttagacagaaaacacaggcctgagtgtggcggttgctctccttggtaagggaggtgagggagaagccgcagcccggtgccagtggagcactgggcaatggcagcacccaggaggccaaaggaagtgtcygccatgtccagtgctgttgggccgagtgaagccgtcactggtgactgtgatgggagagtgtgtgacgtgatggagcaaagctctgactggaggagttccagtgagatggaggagaggacatggagacagcgagtgtagacaactgtgacaaagcggggaaatgaagaaggaggctgggtgctagtggctcacacctgtaatcccagcactttgggaggctgaagcagaaggatctcttgagcccaggagtttgagaccagcttgggcaacatggcgaaactcgatctctacaaaaagtacaaaagttagccgggtgtggtggtgcatgcctgtggtcccagctactcaggaggctgaggcaagaggatcggttgagccctggaggtcgaagcttcagtgagctgtgatggcgccac

SEQ ID NO: 924739 - DNA, 548 bp, Homo sapiens
ggctttatttatgagttctctattttgttacatttggtctaagtgcctatttttataccagtaccatgatgttttggtaactatagccttgtagtataatttgaggtccaataatgtgatgtctccagattagttatttttgcttactattgctctgtctatgtgggctcttttttggttccatataaatttcagggatttttcctagctctgtgaaaaatgatagtattttgctgggaattacattgaatttgtagattgatttgggcagtatggtcattttcacaatattgattcttcctatccakgagaatgggatgtgtttccatttgtagtttttattgtagagatcttttacctccttggttaagtatattctcaggtattttattttttatttttgcagccattgtaaaagggattgagttcttgatttgattcccatatttgttgttgttggtgtacacagcagtgctaccgatttttctacattgattttgtaacctaaaactttactgaattcattgatcagatctagtagccttttg

SEQ ID NO: 924740 - DNA, 694 bp, Homo sapiens
ctgtaaacctattctccattttgatgtggtgttaaggcataaaacaagaggagtgttctacaaaattctaattaaatctaattcttttactggccttgcttctctgaactgtgatcttcagaagttcagaagtatttcttcttttagggccaacctctccaacctcccacttttggtgtgaaatacaggctagaggggactggagttggaggaatgttctttccttattccttgggacaargttctggtaaattcttattccctgggtctttattatagggaaggctctgggcatatttcaaaaggattaccctttaactcctcctactagtgccaggaaagtatctttctctggtcttcagcatgtgaagattcctggatgttgctggaggtaaatcctacagaagtgtgggagcctccctaggactatagccccagaatgaagtatgagcttcattcaaactagtacacacaccctctccagcaattcatcaaaattattatttaagtgtttctatcattttatatccttagtggtttctgctctacataaacagatttcacctgtaactctgaatttatatggttcttcagatttcaggctggaggttaggcttgaaaactcattcctctgatgggtataagaaaagtcattagtgtttaacttacctagattttttttgttgtaaaatgg

SEQ ID NO: 924741 - DNA, 798 bp, Homo sapiens
ccactcactcccacacccctgtccaacagaacttcttgcaatgatagccatgttctgtgcctatacggtctagtatggtagccactcgccacatgtgactagtgcaaactgaggaaaggaactttttttttttttttttgagatgcagtctgtctctcgcccaggctggagtgcagtggtgcgatctcggctcactgcaacctctgcctccggggttcaagcgattctcctgtctcagccttctgagtagctcggattacaagygcatgccaccatgcctggctaatttttgtatttttagtagagatgggatttcaccgtgttagccaggatagtctcgatctcctgacctcgttcgtgatccacccgccttggcctcccaaagtgctgggattacaggcgtcgccactgcgcccggctgattgtttttaaaaagtattttagaggcagtctcgctctgtcacccaggctggagtgcaatggtgcaatcatagcttactgtaatctcaaattcctgggttcaagccatcctcctgcctcagcctcctgggcagctaggactacaggcatgtgccaccatgcctagctgatcttttaatttttttgcagagacagtgtctatattacctgggctggtcaagaactcctggcctcaagccatccttctgccttggcctcccaaagcactgggattacaggcatcagccaccacacccggcctgaatttttatttgtatttaaatttacatagccacatgtggtgaatggctatcacactggacagcacagccgtagagc

SEQ ID NO: 924742 - DNA, 687 bp, Homo sapiens
tacgagtaggcagtgtgatggaaaaagcgccgtgagtaggggtacctaaattctcttttgttaccagctctgcagcctgggccgcacttgcagctccttaaccttagcctatccagccacaaaagaaaggtgatcagaccaatgcccaccactcaggattgttgtagagacaatttgcatgctgtaaagtactcgcacagttaattgttcctttttaatttttaaattttttgatacataatatttgtagttatggggtacatgagatattttgatacacacaacaaatgtgtcatgagcaagtcaaggtattaaggatatccatcaccttgagcacatcaattgttcttatttttaaacaccactggccaaacggaggtagtgttactggaaaggggtcctgatccagaccccaagagagggttcttggatcttatgcaagaagtagaggtgaatctggccgggcgcrgtggctcacacctgtaatcccagcactttgggaggccaaggcgagcagatcatgaggtcaggagatcaagaccatcctggctgacgaggtgaaaccctgtctctactaaaaatataaaaaattagccaggcgtggtggtgggcgcctgtagtcccagctactcgggaggctgaggcaggagaatggcgtgaacccaggaggcggagcttgcagtgagc

SEQ ID NO: 924743 - DNA, 731 bp, Homo sapiens
atcctccccaggagcagggcagcagcacagtcactactgcccccacccaagcattccaccagtggtctggatatcatcctatgcctgcctaccacagccagctcccacatgcaccactagaggggtctgaggacaggcctgccctggctctacactcccactcagtgcctgagcaaatggtctggaagcctggggatgaccctgccccatccaccactgttggtacctcagcactcctcccaggagcctgaggacaggcccactaaacctgcagctactaccacagctaacatctgcctgcatgtgccacctacgggcctggggactagtgtgcccagcctgttgcagccactgtcaacaccaatgcagacttcttggaaaccagaggattgtcctgccactgctactgccatttccyatgccatacctgctgtccaggggcctgaagacccagccatccagaccagtggtctaccactgccactgccagcacccaagcaggccagtcacctggaggcccaagattcatcatgcttggactcactaacaccagtgccagcatatactgcactgaagcccaaggacaggcacactcagcctgctgctgccaccagtgaagtccaaggactggccttcttgatgaccccatccccagcaaaacttcactacagcctccactaacaactataccctaagccactgaggaaatcacaaacaccactgatgctgtt

SEQ ID NO: 924744 - DNA, 722 bp, Homo sapiens
caccacccagactggtaatctggctcaaccagttctgccatcccactcaggaaagaagacagcaagaaaaccttacttcgttccccctatgattccatctccaacctgatcaatcagcactccccactttgcaagcccctacccaccagattatctttaaaaactctgatcccacccagcatggtggctcacgcctgtaatcccagcactctgggaggctgaggcgggtggatcacaaggtcaggagatcaagaccatccccactaacacagtgaaaccccatctctaccaaaaatacaaaaaataagccaggcgtggtgtcgaacacctgtagtaccagctactcgggaggctaaggcaggagaatcacttgaacctgggaggyggaggttgcagtgagccaagatcgcgccactgcactccagcctgggtaacagagcaaaactctatctcgaaaaaaaaaaaccaaaaaatttgatcccaaatgctgaacgtctggggagactgatttgagtaataataaaactctggtttctcacacagccagctctgcctgaattactctttctccgttgcaattcccctgtcttgataaatcagctctgtctaggcagcaggcaaggtgaatttattgggcggttataatcccacctcagcctccgaatacttgggactacaggcatataccaccacacatggctaattttttttattttttgtag

SEQ ID NO: 924745 - DNA, 613 bp, Homo sapiens
tcttaacctttcattatctcttcaagatgcaggacctacttggaattggatggactggttagaatagtacaatcagtgtgtcctgtctgactgtcccttttcttgtctcttctcctttatgaagttctttaaggacctcaaaatgcagaactgcagcaggaacccgacaatggggtgggagacaaagccagcttcagagatgccagtgtttacgctgaagggacgtgggcagaatccgccgacaaataatcacaccacagtccattgagcccgagcgaggtcccagtgggagtggtgaatgagtaactagtgtccccagcagccctcttcattctgcatgatagcacagaataaaccatgccggggcggcgaggatcccaccctccagttactgtttcctcaacccggctgccccrgtgctcactcctctggccagcatgcaggcacaagcttggagaatcgggcaggaagacgcagctaagcattaactttcaaattcagctctgcccaaattaaagagagggacggggtatatagagttctcagaactgtgtctggatggtcagcatattccatgttgatttcttttttgcaaggtcaccatgctattagt

SEQ ID NO: 924746 - DNA, 640 bp, Homo sapiens
atatgcttgcatgcattgagtgtggagaacttagtgtggagaacttctgtggttttggcaaatgcataatgtcatgtatccaccaccacagaatcatgcagaatagtttcactgcctttaaaaaaatcccaggctgggcgcagtggctcatgcttgtgatcccagcactttgtgaggccagggcaggaggatcgcttgagcccagaagttcaagatcagcctgggcaacacaatgagaccctgtctctacaaaaagaaaaagaaaattagcccggcatgatcacactcacctgtagtcccagctactccggaggctcagtggggaggattgcttgatcccaggagtttgaggctgcagggagctgtgattgtgccactgcattccagcctgggtgacacagtgagcccctttctctgttaaaaaaaaaaaawatatatatatatatatatatatatatcccctgtactccacctattcaagccttcccctcttccccagaacctctggcaatcactgatctgcttactgtttctctagttttgcatcatttcgaatgtcatataaatggaatcatacagtttgcaggcttctcaacctggtttctttcactttgcagtgtgcagttcagatttgtccatg

SEQ ID NO: 924747 - DNA, 550 bp, Homo sapiens
taggccatttttctggatttttgtatcgtgtgatgctgtcatgggccacgctcctctctgccccagcccaggtgcaatgccagggagatcacctgagatgacaagcctgcatcctgccatgcacatggtcctgtctgatggctcattttggggctgaagatacaggcttatttaaggtggtagctaacatctttacccygaagaggtccaggttcttccttttggagcctgagaaaataaacagagttttaagagtaagcatgtgggcagggatgcctaaaattgagtcaagaaaattaagctggaagaaagcttattcatatgcaaggagtatcattaggtccattggtaataaactaataaaatgttctataaatactccatgagaagtatccactgggcatcatcaggtggtcggtctgtggtagctcctgggaagctaaaggactaatggatttcatacatgttcccataaaacccggagctcatttccaggatgaggaagagccaacagaaagactgaatgaggccaggcacagggacaggcgct

SEQ ID NO: 924748 - DNA, 461 bp, Homo sapiens
tatatgctgaccagaagagactcacttcacctataaagacacacagagactgatagtgaagtgatggaaaaaaatattccatgcaaatggaaaccaaagcatgcaggagaagctatatttatatcagacaaaatagactaagtaaaagaacaacaacataaaaggagacaacaaaggttattatataatgataaaaaartaaattcagcaagaggatatgacaattgtaaatatatatgcacccaacgccagagcacccagatatataaaacaaatattattagagctagagagagagagagagagagagagaaagatcccaatacaataatcgctggggacttcaacatcccactttcagcattggacaggtcatctggacagaaaaccaacacagaattatcagatttaatctgtcctataggccaaatggacctaacagacaattacagaatagttca

SEQ ID NO: 924749 - DNA, 810 bp, Homo sapiens
atcaatgaacatttgggtgacttttacctactggctgttgtgaatagtgttgctatgaacatgggtatacaaatgcttgagatcctgctttcaattttgtatatatacccagaagtggagctgctggatcagacagtaattctatttttaactcttccgggaaccaccatactgtcttccacagtggctgcactgttacacattcccaccaatggtgcacaaaggttccaatttctccacattggcagacacatggcaatttgtttcttattagactgagtctcgctctgtcacccaggctggagtgcagtggcacattcttagctcacttcaccctctgcctaccgggttcaagtgagtctcgaacctcagcctcccaagtagctgagagtacaggygcccgccacaacacccagctaatttttgtacttttagtagagacggggttttgccatgttggtcagactgggctcaagctatccacctgcctcggcctcccaaagtgttgggattataggcgtgagccaccacgcccggccattttttttttttctagtaaccatcctaatgggtatggtatctcattgtagtttgatttgcatttctctaatgattagtgatgttgggcatcttttcatgtactccttggtcatttgtatatctttggagaaatgtcgattcaagtcctttgccaatattttcttcttttttgagagacagggtctccctctcccgctcaggcaggagagaagtggcatgatcacagctcactgtaacctctgttcgagaccaacctggccaacatggtga

SEQ ID NO: 924750 - DNA, 431 bp, Homo sapiens
agttctgccgacagctgggaaaatcagaggaggccactggccccttctccccaggagggtgaatccttctgtattagccccaggcaccctaaaaaataccactgactgagtggcttaaacagcagggttttattttctcacagttctggaggctaaaagccccagaggcctctcttcctggtttgcacacagccaccttctcaccatgtcctcccacggggaggtagcayccaagcgctctggtctcttataaggacatgaatcctgttggatcagggcccacccttatgacctcacttaaccttcatcatctccttataggccctgtccccaactacagtcacattggggattagagcttcagcgtctaatattggcggggggggacaccattcagtccatagccccccttcctcagggctccaaccaca

SEQ ID NO: 924751 - DNA, 563 bp, Homo sapiens
tttgtgcgtaggcagagatgaagcaagctcagctcaagctgctcactgtcagccgactacggtggcttgcctgtaatcccagcactttggtgaggctgaggtgggcggatcacctgaggtggagtttgagattagcctggccaacacggtgaaaccccatctctactaaaaaaaatacaaaaactagccgggcgaggtggtgtgtgcctgtaatcccagctaaactggaggctgaggcataagaatcgcttgaacccaggaggtagaggttgcagtgagctgagatcacaccactgcattccagcctgggcgacagagcaagaatcttgtcaaaaaaaaaaagtcctctccttagtgtcaaagccraggtgccaggcacaggaggttcattactctctcttcttctgttcttctgtgtgtgtctgaaattgtccatttaaaaaatgaatcagtgttctacagaaatcagaagtacttgttttcacaaatcagtaccctttcttgaaatcttatctcaaaatatcaacttaaatttgaatttgaacttgttttattactaacca

SEQ ID NO: 924752 - DNA, 659 bp, Homo sapiens
aattaaacccagtcttgtgtgaatccaaagcctagctcttttctctttatcacccacgtacggcttgtcttcattaaaggaaaagtgtatccacttaaaactatcttcactccctctctccataccaattaaaaataaaaacatcaaaatacactggaaaaacaaaaggaaaaaagctgttgaacccacagtatgtgggaacagcaattaattgttatgtagggataagctaacactaatattcttcaaagaaagcaacttaaagcaaagtcattaaaaagacaaaaggattttcaacccctatttatgtttaatacagcakatttaatggaaaagcatgtaagacacaggttaaaaactattagaaagggttaagaagttcaatactgagtcataaagtaaactaaaagttaaagttcaaacttcataaaattaatatgaaatcctttaagctaacataagatcatgtaaccaaaaatgtcacataacaaataacatcagtcaatataataagagaagatgaatcctactaaaactgttctttatgttgcccagcccaagtaattgtttttctacctaactgatttgtgttgatactgatcactacatcccagtaagtatacattaatcttattaatttaatatttatgacttgagtg

SEQ ID NO: 924753 - DNA, 473 bp, Homo sapiens
agagtagacgagggcagggaagtaggggtgctgagggcaggaccctgagtctgagtggacatgctcgcctctccacacttgtcccctagccctttgggccgtaacacatctgtgctgctgaggctggtgcagggcccrgcctccaggtatatcctggtatgctgtagaccccgcacggccactgcccatatcgctacccactcaagtctccccgtcaggaaactgtccccacaggtccaagtgacacaccccagagataagtggctgagtctgaagatggagctatggggtgggaggcattttcttttttttgagacagggtctcactctgtcacccgcgctgtagtgtcgtggtctcggctcactgcagcctctgcctccagggcttaagggatcctcccatctcagcctcccgggtagctgggaacacaggcgcacacaccaccacaccaggctaatttttgtatttgtag

SEQ ID NO: 924754 - DNA, 544 bp, Homo sapiens
accaatcacaaatggaaaatattttttaaaaataaaaaataggcccagtgtggtgattcatgcctgtaatcccagcactttgggaggctgaggcaggtggatcatttgaggccaggagtttgagaccccgtctctactaaaaaatataaaaattagcaaggcgtggtggcgagcgcttatagtcccagctactrtggaggctgaggcaggagaattgcttgaacctgggaggtggaggttgcagtgagccgagattgcgccactgcaccccagcctgggtgacagagcaagactccatctcaaaaaaaaaaaaaccagtacaacaataaaaaaaaaaacaaaatttaaaaatacaatataacaactatttacatagcatttacattgtactaggtattttaagtaatctagagatgattcaaagtatacaggagggtgtaggtaggttatatgcagttactatgccaatttatatagaagatgggaacatatgcagattttggtatcaagggaggtcctggaaccagtctcccacagttgccaa

SEQ ID NO: 924755 - DNA, 544 bp, Homo sapiens
accaatcacaaatggaaaatattttttaaaaataaaaaataggcccagtgtggtgattcatgcctgtaatcccagcactttgggaggctgaggcaggtggatcatttgaggccaggagtttgagaccccgtctctactaaaaaatataaaaattagcaaggcgtggtggcgagcgcttatagtcccagctactgtggaggctgaggcaggagaattgcttgaacctgggaggtggaggttgcagtgagccgagattgcgccactgcaccccagcctgggtgacagagcaagactccatctcaaaaaaaaaaaaaccagtacaacaataaaaaaaaaaacaaaatttaaaaayacaatataacaactatttacatagcatttacattgtactaggtattttaagtaatctagagatgattcaaagtatacaggagggtgtaggtaggttatatgcagttactatgccaatttatatagaagatgggaacatatgcagattttggtatcaagggaggtcctggaaccagtctcccacagttgccaa

SEQ ID NO: 924756 - DNA, 584 bp, Homo sapiens
gaaaccattgcctactccagtgtcaagaagatttccacctttgatttgttctaagaatttttgcattttagttcttaaagtttttgatcaactttgagtttttttttaatatcttgtgaggaaagagtccaagtataattctttgtatgttgatatttagtgtctcagcaacattttttgagaagactaatattttccctgttaacttttcatggaaccctcatcaaaaatcagttgaaatacaagaaactccatagcaaaaaaaaaaaaaaaaaaamcccaaataatcagattttaaaataggcacaggatctgaataggcatttctcaaaagaagttatacaaatgcccaataagtatatgaaaacatgctcaacaccactagtcatcagggaaatgcaaatcaaaatcacaatgaggtagcttctaatcccagttaggatggctattattaaaaagacaaaaaataccaaatgctatcaaagatgcacagaaaagagaactcttacatactgttggtgggaatataagttagtacaatcatgatagaaaacagtattcagctttctaaaaagaaaaactga

SEQ ID NO: 924757 - DNA, 576 bp, Homo sapiens
atgccaccatacctgactaattttttttaatagagacaaggtctcactgtgttgcctaagctggactcaaacccccaaactcaagcgattttcctgcctcggtctcccaaagtggtgggattgcagatgtgagccacagccactttcaccttttctccctgagctctggcctcaacgagtgtctccagccttagggttcttgcatatgccgttcctgctatgctctccctcccrgatccacaccctcttccctagttacctcttactgatgtttcagacattacttcccaagggaaggtcctgtgcctttcttccccagacaggtcaggtcctccaattagaggctcatagcaccatggacttcctctttagaacattgatcatttatgttatatactggcacgtttatgtaatcaatgtctgctttccccattagaactgtaggttctgggagagggtggggcacatctgttttgttcaccattgtctgtcctccatacctaacgctgtacttcaatatggcaaccgtttgaaaaagatgcgatgaagggtaaattaacttacgttacatctcca

SEQ ID NO: 924758 - DNA, 713 bp, Homo sapiens
agggcagaagagcccctggagttctccttccatactggcttcctgggaaaagagcaggaaaggcaggagacctaaaataaaatcctatgtctcttcaactgactgaacagactccccctgggccaagggaaacctgaaacatgaaatttctggccatcgccaaaagggaggtcagacacacctccttatgccctttccctttttgagtttaggcacaactgacttcagcattagcattcaaatagaaatcattagactgacaaaacagactctttgggaataagatacccaattccaacctgactctgatatagcatcgcatgacagatagcagactctgaaggaaatcaaaatattgtatcccaaaatgtttctttgacatattttgaaatgaccctgcaaagctgtcttttctgaatctatgaagaacctccatgaatgcagccaggacttccctggatctagcacrgattcggtgggagacggacaccttttaagatctgaaaacaagacatctaccatctattccctctgaagcctgctatctgaaagcttaacctacgtaacaagatgttggtttccacaacgccccttatcttttttttttttttttttttttttttttttttttttttttttctggaaacacaatcttgctctgtcgcccaggctgcagtataatgatgtgatctcgggtcaacacaacctttgcc

SEQ ID NO: 924759 - DNA, 716 bp, Homo sapiens
ctgagaaaagcttagtcacatctagcttttgatctacagtgacagagaaggagagagttggaacagccaattggtggagcagtcaaaacacacacatttattaagtttgctgtcttatttaggcatgattcatggtaccccaaaacaatcgcaatagtaacatcgaagatctcatattacacgtcaccataatgtgtccagaattggtgggttcttggcctcactgacttcaagaatgaagccggggaccctcrcggtgagtgttacagttcttaaaggcggcgtgtcctgagtttgttccttctgatgttcggatgtgttcggagtttcttccttctggtgggttcatggtctcactggctcaggagtgaagctgcagaccttcgcagtgagtgttacagctcttaacgtggcgcatctggagttgttctttcctcccggtaggttcgtggtcttgctgtcttcaggagtggagctgcagaccttcgtggtgagtgttacaactcataaaggcagtgtggacccaagcagtgagcagcagcaagatttattgcaaagagcgaaagaacaaagcttccacgctgtggaaggggacctgagagcggggtgccactgctggctcaggcagcctgcttttattctcttatctggccccatccacatcctgctgattggtccattttacagagagccaattggtctgttttatagagaac

SEQ ID NO: 924760 - DNA, 680 bp, Homo sapiens
tcaggagtggagctgcagaccttcgtggtgagtgttacaactcataaaggcagtgtggacccaagcagtgagcagcagcaagatttattgcaaagagcgaaagaacaaagcttccacgctgtggaaggggacctgagagcggggtgccactgctggctcaggcagcctgcttttattctcttatctggccccatccacatcctgctgattggtccattttacagagagccaattggtctgttttatagagaactgattggtctgttttgacagggtgctgattggtgcatttacaatccctgggctagacacaaaagttctccacgtccccactagattagctagatacagagtgtcgattggtgtatttacaaaccctgagctagacacagagtgctgatttaatatattctttttcataatgtmatatatatcagtactttctgagcaaattttctaatacattcatttaaaataaaattagttcattgaagtgaaataaagactactcccttacaaattgattctccataatatctaagtgtgaattcccagcacagtgcacacagatttgagagggaggagctcaagcaaccattatagaaccttcgggatcatttttatttcaaatgctaagtgagaattgcaatttcaatatttatcaatacagaaagcaaatc

SEQ ID NO: 924761 - DNA, 692 bp, Homo sapiens
aaacagtgtaaaccggcagtgtaaacaagagcagggcatgtatgagtagttgagaatggtgaataggagtatgactagacagaagatagtagggatgacaagttttttagcggcacagtctaagttggtctggtgtcwggaatgagactggggcctaataaaaaggagctcaaatggattgtaccctgtagcattctgaggacaggtctgacttctgagaagggaaagtggtgaaagtattgtctagtcctttttaagttggtggctgagcttggtgaggtgtgtttttaaaagaccattagtctgttctacttttcctgaagatggaggatcgtaagggatataaaggtttcactgaatactaagagcctgaaaaactgcttggctgatttgactaataaacgctggtctgttatcagactgtatagaggtgggaagactaaactgaggaattatgtctgacagaagggaagaaatgactgtggtggccttctcagaccctgtaggaaaggcctgtacctatccagtgaaagtatctacctagactaagaggtattttagttttctgactcagggcatgttgagtaaagctaatttgccagtcctgggtgggggcaaatcctcgagcttgatgtgtagagaagggagggggcctgaataatccctgaggagtagtagaatagcagatggaa

SEQ ID NO: 924762 - DNA, 692 bp, Homo sapiens
aaacagtgtaaaccggcagtgtaaacaagagcagggcatgtatgagtagttgagaatggtgaataggagtatgactagacagaagatagtagggatgacaagttttttagcggcacagtctaagttggtctggtgtcaggaatgagactggggcctaataaaaaggagctcaaatggattgtaccctgtagcattctgaggacaggtctgacttctgagaagggaaagtggtgaaaktattgtctagtcctttttaagttggtggctgagcttggtgaggtgtgtttttaaaagaccattagtctgttctacttttcctgaagatggaggatcgtaagggatataaaggtttcactgaatactaagagcctgaaaaactgcttggctgatttgactaataaacgctggtctgttatcagactgtatagaggtgggaagactaaactgaggaattatgtctgacagaagggaagaaatgactgtggtggccttctcagaccctgtaggaaaggcctgtacctatccagtgaaagtatctacctagactaagaggtattttagttttctgactcagggcatgttgagtaaagctaatttgccagtcctgggtgggggcaaatcctcgagcttgatgtgtagagaagggagggggcctgaataatccctgaggagtagtagaatagcagatggaa

SEQ ID NO: 924763 - DNA, 657 bp, Homo sapiens
ttggagtttgctagaggtccactccagaccttgtttgcctgtgtatcagcagcggtggctgcagaacagcggattttcgtgaaccgcgaatgctgctgtctgatcattcctctggaagttttgtctcagaggagtacctggccgtgtgaggtgtcagttttgtggtgggaatgtggagccctggagtctctcactaacctctttcctaagtccaggaacttatcttgactcccagccctgcctggccaagctggctacctaaattcmttcttttttgcttttggtgctttctgttgcttttctgttcaacccagtgctgttagatgttctgttcaaagtgtgaatatctgcttgttatttattttgattcctccctgtgacagaggcacgtactagctgtatccactaagctatcttgaacccccctttattataatcttatgggaccaccatcatatatgtggtctgtcattgacctaaacattattatgcactgcatgacaatactgatggatgctactacataaatgaagcttgaaaatattatgctaaatgaaagaaaacagtcacaaaatacatattatataactccattcatataatgtgtccagaacagggaaaacagtggaaacaaaaagtagattagtactgtgatta

SEQ ID NO: 924764 - DNA, 611 bp, Homo sapiens
agatatctttgtcaaacttgacatatcatggattaaattagatctatcatggatcagagctttcacaaaagagaatttcttcttcagtgatggaacatacacttgaagaagtaagaagtaaacttcctatttcaacgaaagcctttctgggcaatgaaagaaacatttttatttgagactgaaaataaagcctgattctaatttgttaaraatttccagacagttaaacatcattaaattagatagaaattgtttctgccaaacatagccaaatggtgatttgacaatgatttgttttacttggttaggaataggtagataattttaacattcagatccttaattattttctatgttgctttcttatgaggtatttgtgtggtagttcttgctattgttttctgttgtcttaaatctttttattttaaatataacatatgactttagttgtggataaaatatcagtttggttcaagattatccacctacgttttcttaatctactccctaaactatttcattttgtttatatcaagagagtaagtgcttatattattgggagtgaaagagattaataagttattttatctgctaatggtaggaactatagc

SEQ ID NO: 924765 - DNA, 611 bp, Homo sapiens
agatatctttgtcaaacttgacatatcatggattaaattagatctatcatggatcagagctttcacaaaagagaatttcttcttcagtgatggaacatacacttgaagaagtaagaagtaaacttcctatttcaacgaaagcctttctgggcaatgaaagaaacatttttatttgagactgaaaataaagcctgattctaatttgttaagaatttccagacagttaaacatcattaaattagatagaaattgtttctgccaaacatagccaaatggtgatttgacaatgatttgttttacttggttaggaataggtagataattttaacattcaratccttaattattttctatgttgctttcttatgaggtatttgtgtggtagttcttgctattgttttctgttgtcttaaatctttttattttaaatataacatatgactttagttgtggataaaatatcagtttggttcaagattatccacctacgttttcttaatctactccctaaactatttcattttgtttatatcaagagagtaagtgcttatattattgggagtgaaagagattaataagttattttatctgctaatggtaggaactatagc

SEQ ID NO: 924766 - DNA, 556 bp, Homo sapiens
cgcagtcaaatctcatcttgaatttctatgtgtttggagaggtacccggtgggaggtaattgaatcatgagggcaggtcttttctgtgctgttctcatgatggtgagtaagtctcatgagatctgatggttttataaaggggagtttccctgcccaagttcttctcttgtctgccatcatgtgcgatgtgcctttcacctctgccatgattatgaggcctccctggccatgtggaactgtgagtccattaaacctctttcttttgtaaattgcccaatcttgggaatgtctttatcagcagtgggaaaayggattaatatactaatttatagctagtaggtaaaaagccagggacttgccattagcgttggaagtggggttgtgggggcagtcttgtggaactgagcccttaacctgtggggttgaatgatatctccaggtatatcatgtcagaattgaattcaattagaggatacctagcttgcgttcaatgcagaattgcttgctggtgaggagaaatccctatacacattttggtgaccagaggtaaagcatt

SEQ ID NO: 924767 - DNA, 544 bp, Homo sapiens
tggagaaaatgtctccagtatatgtcagagacctttgcagcagccccttccatcttagacctggaggcctaggaggaaaaaatggtttagtgacctgggcccagggcccctctgctgtgtgcagtctagggacttggtgccctgcatcccagccactccagccatgactaaaaggggacaaggtacagctcatactgttgcttcagagggtacaagccccaagccttggtagcttccatgttgtgttgagcctgcaggtgcagtcagaaattgagatttgggaacctctgyctagatttcagaggatgtatggaaatgcctgaatgtccagacaaaagtttgctgcagaggcagggtgctcaaggagaacctctgctagggcagtacagaaggaaaatgtggggtgcacacccccacacagagtccccactggggcactgcctagtggagctgtgagaagagtgccaacatccttcagaccctagaatggtagatccactgacagcttgcttcacgtgcctggaaagggtgcagacactcaatg

SEQ ID NO: 924768 - DNA, 606 bp, Homo sapiens
aggaagtaactaacttgcttttgattttacaggctcataggtggaagggacttgccttgtctcagatgagactttggactgtggactttcgagttaatgtagaaatgaggtaagactttgggggtctgttgggaagacatgattggttttgaaatgtgaagatatgagatttgggaggaggcaggggcagaatgatatggtttggctctgtgtcgccacccaaatctcatcytgtagttcccataattcccacatgttgtgggagggacctggtaggtgataactgaatcatggggatggtttcccccatactgttgtcatggtagtgaataagtctcataaaatctgatggtttaataaggggtttctgcttttgcttctctcacattctctcttgccaccgccatgtaagaagtgccttttgccttctgccatgattgtgaggccttcccagccacatggaaccataagtccattaaatctatttttcttcccagtctcgtatcagcagcatgaaaatggactaatacagatagggtttcaccatgttgcctaggctggtctcaaactcctgggctcaaacaatccctctggctcagcctccca

SEQ ID NO: 924769 - DNA, 593 bp, Homo sapiens
gatttctcaaagaattgaaagtagaactaccatttgactcagcaatcccagaaatgcatacatacccaaaggaatataaagcattataccatagagacatgtgtgcatatgttcatcacagcactattcacaatagcaaagacatggactcaatcttgatgcccaccaatggtggaccagatacagaaaatacggtacatatacactgttgaatacaatgcagccacaaaaaagacaaaattatatactttgcagcaatatgaatggagctggaggccattatcytaagtgaattaatgcaggaacagaaaaccaaatactacatgttctcacaagtgggagataaacattgagtacacatggacacaaagaagggaacaacagacaccaagggctacttgaggatggaggggtgggaggagggtgaggattgaaaaaactacctgttgggtactatgcttactacctgggtgataaaataatttgtacaccaaaccccaataacacacaatttacccatgtaacaaacctgcacctgtacctgctgaacctaaaataaaacttgaaaaaaacacagttgcctattgatggtt

SEQ ID NO: 924770 - DNA, 662 bp, Homo sapiens
atctttgacaaagtgcacaagaattagcaatgagaaaaggactccctattcaataaatggttctgggatagctggctaggcttatgcagaaaaatgaaactcgacccctaccttttactatatacaaaacttaactccaggtggattaaaggcttaaatgtaggacytcaaactataaaaaccctagaagaaactctaggaaataccattctgaacatcagccttgggaaataatttataactaagtccttaaaagcaactgcaacaaaaagaaaaactgacaattgagaactaattaaagagcttctgtacagcaaaagaaactatgaatagagtacactgacaacctacagaatagaagaaagtattcacaaactatgcatctgacaaaggtttaatatccacgatctatgaggaacttaattcaacaagcaaaaaacaaataaccccattaaaaagtaggcaaaagacatgaacagacacttcttcaaagaagacatataaatgaccaacaaacatatgaaaaatgctcaacatcactaatcattagagaaatgcaaatcaaaaccacaatgaaatactatctcacacctgtcagaatggctataatgaaaaagtcaaaaaataacaagcaagacagtgagaaaaagagaacacatata

SEQ ID NO: 924771 - DNA, 643 bp, Homo sapiens
taactccaaaaggaactctcaaaactatacaaatacatggaaatgaaataacctgctcctgaatgattcttgggttaacaatgaaatcaagatggaaatttaaaaattctttaaactgaacaataataatgacagaatctatcaaaacctctggaatacagcaaaagcagtgctaagaggaaagttcatagcattaaatgcctacatcaaaaaagcctgaaagagcacaaatagacaatctaaggtcatacctcaaggaactagtgaaacaagaacaaaccaagccaaacccagcagagaaaagaaacaacaaagatcagagcagaactaaatggaattgaaacaaataaaaaatacaaaagataaatgaagcaaaaagctagttctttgaaaagataaacaaaattgatgaacmattagtcagattaaccaagaaaaggagaagattcaaataagctcaagtagaaatgaaatgggagatattacagccaataccacagaaatacaaaagatcattcaagactactatgaatgcctttatgtgcacaaactagaaaatctagaagagatgaataagttcctgtaagtatacaaccctcctagattaaatcaggaagaaatagagactctgaacagaccaata

SEQ ID NO: 924772 - DNA, 619 bp, Homo sapiens
tttcaccagctgtttcctccccatctctctgcaggaacatttcctgccctgactttttcctctgcccaggagatctgtaagagtttcctctgattgctcctgtatcttcctatgtttccctcaatcaaagctgactatacatttgtagtcaaaccgcatmtctttccaccctgaagtcacagcattcttccttgcctttcatttcccctgtcttggtgtcacaagccactttatttctttctgctgacaatttaaaggggccacaggaattttacattaaagcaagagacagggacaagccaacagatgttaaaaataatagtaagttactcaaaaaagctgtatatgaggcagggcacaatgacttttaaattactatagaggccgggtatggtagctcacgcctgtaatcccagcactttgggaggcagaggcgggaggatcacgaggtcaggacatcgagaccaccctggccaacatggtgaaaccctgtctctattaaaaatacaaaaattaggtgggtatggtggcacgtgcctgtagtcccagctactcaggaggctgaggcaagagaatcgcttgaacctaggaggtggaggttacagtgagcccagattgt

SEQ ID NO: 924773 - DNA, 584 bp, Homo sapiens
cggggttgggctaaaaaagccatatttttcttcttgcagagagcctataaatggacatgcaagtagaagagatatcactaaattcttttcctaccagggaatataatattaagaccctaggaaaagaattgcattcctgggggaaggtccatagacggctgctctgggagtgtctgtcctatgcggttgagataaggactgagatacgccctggtctcctgcagtaccctcaggcttaccaggattgggaaaccccagccctggtaaatctgaggtcagaccagttctctgctctygaaccctgttttctgttaagatgtttatcaagacaatatgtgcaccgctgaacatagacccttatcaggagtttctgattttgccttggtcctatttcctcagaagcatgtgatctttgctctgccttttgccccttgaagcatgtgacctactccctgttcatacaccccctcctcttttgaaatccctaataaaaacttgctggttttgcggctcaggtgggcatcacggacctaccgatatgtgatgtcacccctggtggcccaattataaaattcctctctttg

SEQ ID NO: 924774 - DNA, 615 bp, Homo sapiens
attattttcctttaggtagataccctgtaatgggattgctggatcaaatagcagttctacttttagctcttaaaaaaaaatgttcacactgttttctaaagtggttgtactagtttacattcccaccagcagtgtagaagtgttccctgtttaccacatccacgccagcatctactggtttttgattttttgattatggccattctagcaggagtaaggtggtattgcattgtggttttgttttgcatttccctgatcattagtgatgttgagcagttttcatatgtttgttgaccatttgtatatcttcttttgtgggttgtctattcatgttcttagcctgctttttgatggaattgtttgtttatgtcttgctattttgtttgagttcgttgtacattctggatattagtcctttgttggatgtatagattgtgaatattttctcccacactgtgggttgtctrtttgctctgctgactgttccttttgctgtgcaaaagctctttagtttaattaagtcccagctatttttctttgtttttattgcatttgcttttgagttcttggtcgtgaaatccttgcctaagtcaatgtctagaagtgtttttccaa

SEQ ID NO: 924775 - DNA, 475 bp, Homo sapiens
gtaatcccaactactcgagaagctgaggcaggagaatcgcttaaacctaggaggtagaggttgcggtgagccaagatcacaccattgcactccagcctgggcaacaagagcaaaactccatctcaaaaaaaaaaagaaagaaagaaaacccgaaagcttcactacatactctgttggtgaggctgtrgggaaacaggaattctcatacactgctggtggaaatgcaatgtatgagaacccctatcaagagaaatttggcaagtctagtaaaatcacttaggcatttactcttttgacctactcatttctaggtatctatctcaaacacaattcaaaaagtcatacagagacgactattaatagcagccgtattcataatatcaaaaaactagaagcaacccaaatatctccatgtgaagatagattgaactataggtgttatatagttatagtatagtatatcttcacactggaa

SEQ ID NO: 924776 - DNA, 744 bp, Homo sapiens
cagcagctccgaagagagcgaccatcgagaacgagccatgatgacaacggtggttttgtcgaaaagaagggggaaatgtggggaaaagaaagagatatcagactgttactgtgtctatgtagaaagaagtaaacataagagactccattttgttctgtaccaagtaaaattttgtcttgagatgctgttaatctgtaaccctacccccaaccctgtgctcgcagaaacatgtgctktgtcaagatttaatggatttagggctgtgcaggatgtgctttgttaaacaaatgcttgaaggcagtatgctcgttaaaagtcatcaccactccctaatctcaagtacccagggacacaaaacacagtggaaggccgaaggacctctgcctaggaaagccaggtattgtccaaggtttctctccatgtgatagtctgaaatatggcctcctgggaaggaaaagacctgaccgtccccaagcccaacacccgtaaagggtctgtgctgaggaggattagtaaaagaggaagacatctgtctcctgctcatcccctgggcaatggaatgtctcagtgtaaaacccgattgtatgttccatctactgagataggagaaaaccgccttagggctggaggtgagacatgctggcagcaatattgctctttaatgcaccgagatgtttatgtatgtgcgtatcaaagcacagcacctttttcttaaccttgtttatgacacagagacatttgttc

SEQ ID NO: 924777 - DNA, 572 bp, Homo sapiens
aagatatatatagattacaacatgttcttgacacagcacaaaaattgaatggaggtgaggacagtttcagcaacaaatgacttaaacattgaatctaaaaggaaaacatggctatcaaacttaaagtaactagaatgtcaacaataaaccttacagatcacctgtcccaataaaaaaacagaatgttgactttttaaacacacatgtatccagaagaattattgggaaattattgtatccatttctaagtatctctaagtactggaaatatgtattttgatatagattcaaaaaataattaatgtgtaagacaaactattttagaagatatttaaaggattatatttaggttggttaggcaaagaactgaaaaagaayaccctgcccttatttcaattctatttgctctgtgaaggagtggagctggccaacttaagttacttctttgtgcccaggatataactcatcccaagtagcttttgaattgcctgggagctcacaaaaggagaggggtccctgaaggatttctaggactatgaaatagtttgagtacaccatgctctctttgtaca

SEQ ID NO: 924778 - DNA, 722 bp, Homo sapiens
ctttcttggcctctctggaaagtcccaccgcttcctgcgaggggcatccgggctggggggtctccccggatggtctccgagtggagctcttgccagggggctgctagctgggatcgcggcgggcgcaccggcttccctgggagtcttttagcaaccttagaaaattcactctcggaatcttggagggaacttttctaaagagtttccatggcaggaggctgttgacgacagcatatgtgatgtgtgatgtgtgatgtgtggtgcaggctcgcaggttgcagggtagccccagctctcaccacatctggccggggttttgcttcgcgatgggcgcggtctttccggactccgagacccccaggcccctccgaggcccccaggcccctccgaggcttcccagcgcttctcacttccccgtccgcgcgggctgcgtccctggagcgcggggccttggtcggtggggctgggacgccccggttcgggggcaggtgctgcaggcattcgtggaatgaacacmcgatctcgagtgggcgagcggcgtgtgtggagaggaagatgaggaaggacgcgctgtctgcatccagcggcgggggaggccagtatgcagaggccgagggagcttcggggctcggggaggctgggtgggcgtcccgttcctgcgctgcccctgacggagtccccgtcgcagagggcctgtgggccggtgactttctgcagctgct

SEQ ID NO: 924779 - DNA, 606 bp, Homo sapiens
aatatgtattaattcaataattatttaagatgctttctatctgccaagcaggctctgttcttggtgcttgggatatgacagtgaaaatttttcctacttgacggtagttacaaatacgcatgtcaattatgtctcttatatgagagaactgtgccttactcatcctgatattccctcttcctgacccacattaaatgtgccacgaatgccaggtaaatgctaaaataagagatattttcattatctgtcattttcttgcaattcctcttagacaatggctcctttgagaggagaaaacctatcttaatcatccatgtggtttaaattctgtctgccacgatgccacaaacatatygtacgctcaaagaatatcgttttgattcattgcttaacttgaatctgccttcatattaatccacatcaaggggaaacaatgagaagtcaaaattaataaggtaaaataattaaggttgagaaaatatccttattgtttttaacaacaaggagtatgtcttctgtttttctccatctcacacattgtttgctagagaacagaacatatagatgctcaataaatatacacatatagagcatatgggtgcttaa

SEQ ID NO: 924780 - DNA, 603 bp, Homo sapiens
atttccttaaaaaattaaaagtagaatcaatatatgatctagcaattctacttctagctatatatacaaaagaatttaaaacagaatctcaaagagaaatttgtgcacctttattttatagcagtattactcactgatatggtttggctgtgttcccaaagaaatctcttcatgaactatagctcccacaattctgacatgtcatgggagggaccaggtaggaggtaaytgaatcatggtgatgggtctttcccatgctgttctcatgatagtgaataagtcttacaagatctgatgcttttataaagggaagtttttctgcacaagttctgttcacttgtctgctgccatgtgagatgtgcctttgctcctccttgccttctgccatgactgtgaggcctccccagccacgtggaagtgtgagttcattaaacctctttttccttgtgaattaccaagtcttggtaaatctttatgtctttatcagcagcgtgaaaacagactactacactcacaatagccaagaggtgggagcaactcaagtatccattgatggatgaatggataaagtgtggcatgtccacatagtggaatataatttag

SEQ ID NO: 924781 - DNA, 513 bp, Homo sapiens
gagttcattaaacctctttttccttgtgaattaccaagtcttggtaaatctttatgtctttatcagcagcgtgaaaacagactactacactcacaatagccaagaggtgggagcaactcaagtatccattgatggrtgaatggataaagtgtggcatgtccacatagtggaatataatttagccttaaaaacaaaaactctgacacatgctacaacatggatgatcatggagggcattatgctaagtgagaaaagccattcatgacaagacaaatgctgtatgatctcagccatttgagactcctggagagatcaaatgcatggagatggaagtagagtgatggttgtcaggggctgaggggacatggggaataggatttgttttttactgaggacagtttcagtttccgaagatgaaaagagttctgggggtgggtgatggtgatggttacacagcaatatgaatatactgtagggaaagctgtggatcacctctacccatcttagttctta

SEQ ID NO: 924782 - DNA, 513 bp, Homo sapiens
gagttcattaaacctctttttccttgtgaattaccaagtcttggtaaatctttatgtctttatcagcagcgtgaaaacagactactacactcacaatagccaagaggtgggagcaactcaagtatccattgatggatgaatggataaagtgtggcatgtccacatagtggaatataatttagccttaaaaacaaaaactctgacacatgctacaayatggatgatcatggagggcattatgctaagtgagaaaagccattcatgacaagacaaatgctgtatgatctcagccatttgagactcctggagagatcaaatgcatggagatggaagtagagtgatggttgtcaggggctgaggggacatggggaataggatttgttttttactgaggacagtttcagtttccgaagatgaaaagagttctgggggtgggtgatggtgatggttacacagcaatatgaatatactgtagggaaagctgtggatcacctctacccatcttagttctta

SEQ ID NO: 924783 - DNA, 513 bp, Homo sapiens
gagttcattaaacctctttttccttgtgaattaccaagtcttggtaaatctttatgtctttatcagcagcgtgaaaacagactactacactcacaatagccaagaggtgggagcaactcaagtatccattgatggatgaatggataaagtgtggcatgtccacatagtggaatataatttagccttaaaaacaaaaactctgacacatgctacaacatggatgatcatggaggrcattatgctaagtgagaaaagccattcatgacaagacaaatgctgtatgatctcagccatttgagactcctggagagatcaaatgcatggagatggaagtagagtgatggttgtcaggggctgaggggacatggggaataggatttgttttttactgaggacagtttcagtttccgaagatgaaaagagttctgggggtgggtgatggtgatggttacacagcaatatgaatatactgtagggaaagctgtggatcacctctacccatcttagttctta

SEQ ID NO: 924784 - DNA, 606 bp, Homo sapiens
atggatgatcttgcaattaggaaattcttttctactgggaatcaaaacctgatttctatgatacacatagtaggactgttcagcgttccttgaggagtactttctaatgaaatcggcaagctggcctttcattattgatagctggtattgcaagcgcaaatttttctctgtcctgttttgcaaggggaatagtataaaaacagtcttttaagtcaataatgactatagaccaatctggaggaatcgccgtggggaagggagcccctgttgaaagggccgcatgcgttgcaaattagcactgatagcatgtaggccgtgcaaaaatctccatttactagaccttttgggaatgatgaaaatgggcgaattccaagggctgtttgatggttctayatggctggcttttaattgttcctcaactaattcatgggctctttgtaatttctctccctttaaaggctactgttctacccaaataggattttgagagagctacatcaggggtaggggaggaataacaacagtggccattattagaagggggtctgcagagtgacccccccatttggctaataggtcccatccccaaagattaacagggatggg

SEQ ID NO: 924785 - DNA, 579 bp, Homo sapiens
aatgatttatattcccttgggtatatacccagtaatggtattgctgggtcaaatggtatttctggttctaggcctttgaggaattgccacactgtcttccatgctggttgaactaatttacattcccaccaagagtgtaaaagcattcctatttctccacagcttcacagcatctgttgtttcttgactttttaataatcaccattctgactggcatgagatgatatgtcactggggttttgatttgcatttctctaatgatccrtgatactgagctttttttcatgttttttggctgcataaatgtcttcttttgggaagtgtctgttcatgtcatttgcacactttttaatgggctgttttttcctgtaaatttgtttaagttccttgtagattctggatattagacctttgtcagatggatagactgcaaaaattttctcccattgtgtaagttgcctgttcactctgatgatagtttcttttgtggttcaggagttctttagtttaattaaatcccatttgtcaatttttgcttctgttgcaattgcttttgatatttttatcgtgaaatctttg

SEQ ID NO: 924786 - DNA, 579 bp, Homo sapiens
aatgatttatattcccttgggtatatacccagtaatggtattgctgggtcaaatggtatttctggttctaggcctttgaggaattgccacactgtcttccatgctggttgaactaatttacattcccaccaagagtgtaaaagcattcctatttctccacagcttcacagcatctgttgtttcttgactttttaataatcaccattctgactggcatgagatgatatgtcactggggttttgatttgcatttctctaatgatccatgatactgagctttttttcatgttttttggctgcataaatgtcttcttttgggaagtgtctgttcatgtcatttgcacactttttaatgggctgttttttcctgtaaatttgtttaagttccttgtagattctggatattagacctttgtcagatggatagaytgcaaaaattttctcccattgtgtaagttgcctgttcactctgatgatagtttcttttgtggttcaggagttctttagtttaattaaatcccatttgtcaatttttgcttctgttgcaattgcttttgatatttttatcgtgaaatctttg

SEQ ID NO: 924787 - DNA, 624 bp, Homo sapiens
tagcaccatgctagcatggagggaactactgaggcatagaagaaggtctctgcatcaaggtgaccacagtctggcttggagtgagagtggcctacaaaaagcaaatgtgaacatgcaagtccatgtttatcgttaagagatcagatggttgctatgggtcaaaagagctcaggagtcaataagggatgagctggacagggaaagaagaatgtactttaattcagttcatccagccctgtctgcaatttctctgccgatttggccagcagcagtaggagagggctggtaggatgggctgtaggacgttacccagggacatcaccctctgagctgtttatggaaccgaatggaacctaagacttcatttcaaatgtattctattgctattgtaacactcaaaagcctccttactatactgkctacactcttcttataaaataagaagtgttatcatttttatatttattcagaaggcactggccgtagaattaagcaatttcaaaatatggaatgcttgaaaatgtggaagctagcaataacttctcatgaccctaaccgataggactcatgttcttataatcagtcaaaataataagtggcaactgataaattgagtggttattc

SEQ ID NO: 924788 - DNA, 745 bp, Homo sapiens
gtggctcatgcctgtaatcccagcactttgggaggcagagggggggtggatcacctgaggtcaggagttcgagaccagcctggccaacatgctgaaaccccatctctactaaaaatacaaaaaaattagccaggcattgtggcgggcgcctataatcccagctactaaggaggctgaggcaggagaattgcttgagccccggaggtggaggttacagtaagctgagaacatgggccactacactccagcctgggcgtcaagartgaaactccatctcaaagaaaaaaaaaaagcaacatcaaatccagggccagtgaaaaattgtttccaaattggccatgctccaatgtggatttttaaaagtggaatgaacaacaatgggacacaagtatacatctattagaatggcgaaaatcccagaagctgacaatggcaatttctggtgaggatatggagcaacaggaagtctcattcactgctggtgggaaagagaaatggtacagccactttggaagacagtctgacagtttctacaaagctaagcatactctcactatataatgcagcaattgcactccaaagtatttacccgactgatgtgaaaacttatatctgcacaacaacttgcactcaaatgtttatagcagctttatcgatgattgccaaaacatggaagtaactgagatgtcctttaacaggtgaatgaataagcaatctatggtatatccatacaatggaatactat

SEQ ID NO: 924789 - DNA, 745 bp, Homo sapiens
gtggctcatgcctgtaatcccagcactttgggaggcagagggggggtggatcacctgaggtcaggagttcgagaccagcctggccaacatgctgaaaccccatctctactaaaaatacaaaaaaattagccaggcattgtggcgggcgcctataatcccagctactaaggaggctgaggcaggagaattgcttgagccccggaggtggaggttacagtaagctgagaacatgggccactacactccagcctgggcgtcaagagtgaaactccatctcaaagaaaaaaaaaaagcaacatcaaatccagggccagtgaaaaattgtttccaaattggccatgctccaatgtggatttttaaaagtggaatgaacaacaatgggacacaagtatacatctattagaatggcgaaaatcccagaagctgacaatggcaatttctggtgaggatatggagcaayaggaagtctcattcactgctggtgggaaagagaaatggtacagccactttggaagacagtctgacagtttctacaaagctaagcatactctcactatataatgcagcaattgcactccaaagtatttacccgactgatgtgaaaacttatatctgcacaacaacttgcactcaaatgtttatagcagctttatcgatgattgccaaaacatggaagtaactgagatgtcctttaacaggtgaatgaataagcaatctatggtatatccatacaatggaatactat

SEQ ID NO: 924790 - DNA, 630 bp, Homo sapiens
acaggcattgggtaaatagacacattccaaatgggagaaagtggccaaaatgaaggagctacaggatctatgcaagtctgaagtccagcaggacagccagatcttaaagctctgaaatgatctcctttgacttcatgtctcacatcccagtcatgctgatgcaagaggtgggctctcttggcctcaggcagctctgcccctgtggctttgcatggtacagcctccctccaggctgytttcactggctggtgttgactgtctgcagcttttctaggtgcgtggtaaaagctgctggtgaatctaccgttctggggtctggaggatggtggccctcttctcacagctccactagttagttccccagtagggactctatgtgggggcttcaaccccacatttcccttctgcactgccctagcagaggttctccatgagggccccgcccctgcagcaaaattctgcctggacatccaggcatttccatacatcctctgaaatctaggcagaggttccaaaacctcaattcttgatttctgtgaacccacaggattaataccatgtgtaaactgccaaggcttggggcttgtacccaatgaagtcatggcctgagctgtaccttggtcccttata

SEQ ID NO: 924791 - DNA, 765 bp, Homo sapiens
cacagcctggacatgaaaggaactcacttcctaaaagggaaagactccacatcctggatattggatgacatctctcgacccacttggggccagggagatctcaccaccctgaagggaaggacacaagcctggttgttggttgttgtatacaagatgtacacaaaatctgctgattatagaacccttgggccttgagtgaacataaatggtagcctctcagtggttgccacaggccttgagtgagacccagtgttgtgctgccttcaggtctgacccactgtagtgccactagtggtggcaacagggataattgtgtcatcccttccccagctccaggaagctcagcacagagaragacttcatttgtttggggaaaattaaaggaagagaacaagggtctctgcctggtaatctaaagaattctcccagatcttactcaagaccagcaaggcagtacctctatgagcctgcaagagccacagcattaccaggcttggggtgccctctaatgcagttaccaaatacttatattacaacattcaagtcccttcaaatacttagaaagccttcccaagaataatgggtacaaacaagcgtagactgcaaagactccaataaatacctaactcgtcaatgcacagacaccaatgaacatacacaagcatcaagtttatccaagaaaacatgacctcagcaaatgaaataaggcaccagagactaatcccagagagatagagatatgcggcctttcagacagagaattca

SEQ ID NO: 924792 - DNA, 665 bp, Homo sapiens
ataattaagtttagcaaggaaggcacaagataagccaaaagctagactacttgtgtcaaacagagccaagttgtgaatgcaaaacaaaacaaaacaaaacaaaaaccaaaaaaagaaagaagaaataaagaaagaaaagaaaaaaaaagcttgaaggaaattaaaaatgctactccagtgaacacagcagaagcataaagggaaacagccttattgctggtatggagaaagtctgagttgtctggatagaagatcaaaacagctacaacactgccttaagccagagcctgawccagagcaagaccctaactttcttcaattctgtaaaggctaaaagaggtaaggaagctacaaaagaaaagtttaaagctagcagagattgcttcataaggtttaaagaaagaagtcatctccataatataaaatgtgaagcatcaagtgctgatgtagaaactgtgttatccagaagattaagctaagataattgattaaggtggctacactaaacaacatattttcaattaggtgaaacagccttctaatgaaagaagatgccatctaggactttcataaatagagaggtcaaagcctgtcttcaacgcttcaaaggacaggctgactctcttgttagaggctaatgcagctggtgactttaagttgaagcc

SEQ ID NO: 924793 - DNA, 599 bp, Homo sapiens
gttttcatctggaaacttaactgagaaagactctactttctaacttcttaaggttgttggtcaaattcatttctcatagctatatgacttaaaaataaagtaactgaaattgagtattcaacagccgtgtttaagagcagattagacatagctaacagtagggttcttgctctagagtagaactaagtagaaatgtgtacattgaaagatggagtagctgggtgctttggctcgttcctgtaatcccagcactttgggaggccaaggcgggctggggtcgggagttcgacaccagcctgacctacatggagaaaccccattgccactaaaaaaaaaaatacaaaatcagccaggtgtggtggcacatacctgtaaycccagctacttaggggctgaggcaggagaatcgcttgaactcaggaggcagaggttgcagtgagccgagatcaccccattgcactccaacctgggcaacaggaacaaaactcagtctcaaaagaagaagaagaaggaggaggaggagaaggggaagaagagtaaaagagaagacacatactaaaaagagcataagagatatttaggatgtagcgaaaaggtta

SEQ ID NO: 924794 - DNA, 674 bp, Homo sapiens
ttctgcgcaaatatgggttttcaccaatccacattattttaaatatatcggtttttaatcactaagaaaacaaaaagatatgaaatgggtgttggccgggcgcggtgactcacgcctgtaattccaatactttgggaggctgaggygggtagatcacctgaggtcaggagtttgagacaagcctgaccaacttttgaaaacccgtctctactaaaaatgcaaaaattagctgggtatggcagtaggcacctgtaatcccagctacttgggaggctgaggcagaagagttgcttgaacctgggaggcaaaatttgctgtgagcagagattgcaccattgcattttagtccgggcaacacagtgaggctccaactcaaaaaaaaaaaaacaaagaaagaaagaaagaaagaaatgggtgttaatgggagactagaaaccttattcatctattgcctttttgctgacaaacttatcactcagaatgtgacagtaatgtatgatggttaatttcatgcatcaccttccatcggctaagaggttgctagataggtggtaaaatatttgttctgggtgtgtctgtgaaggttttttttgaagagattaatatttgactcagtaaatttagtaaacaagatctgacctcgtcaatgtaagtgggcttcatccaatctatcg

SEQ ID NO: 924795 - DNA, 674 bp, Homo sapiens
ttctgcgcaaatatgggttttcaccaatccacattattttaaatatatcggtttttaatcactaagaaaacaaaaagatatgaaatgggtgttggccgggcgcggtgactcacgcctgtaattccaatactttgggaggctgaggcgggtagatcacctgaggtcaggagtttgagacaagcctgaccaacttttgaaaacccgtctctactaaaaatgcaaaaattagctgggtatggcagtaggcacctgtaatcccasctacttgggaggctgaggcagaagagttgcttgaacctgggaggcaaaatttgctgtgagcagagattgcaccattgcattttagtccgggcaacacagtgaggctccaactcaaaaaaaaaaaaacaaagaaagaaagaaagaaagaaatgggtgttaatgggagactagaaaccttattcatctattgcctttttgctgacaaacttatcactcagaatgtgacagtaatgtatgatggttaatttcatgcatcaccttccatcggctaagaggttgctagataggtggtaaaatatttgttctgggtgtgtctgtgaaggttttttttgaagagattaatatttgactcagtaaatttagtaaacaagatctgacctcgtcaatgtaagtgggcttcatccaatctatcg

SEQ ID NO: 924796 - DNA, 545 bp, Homo sapiens
cagagtgagaacctccaaagatccacttctgtacaaaagcaatgacaaacaggaaaaactgttaaaaattaatattttcagaactttggaaatgaagcaaatattaccaacaattcaaggaggagcacttgttcaaaacaaatgtctgaatcacaagaagaatggcaagatttgtttattggttaacttcattagttaatggtaggaacagccttttaacaaaccttattcccttttcccctccccrttccacagtacccttaaaaactaatagtctccaaaccatgttggaaaccagtagcctaacaatcactagagggaaaagaaggagtttggtgccccttgaaaagctccttccaagataattttcatcattccactcatctcacagtttcctgggaaaacctacttgcagggctggtctttatttgacttgacttagtgctcacacaatgtgaataggctttatccaagaagcatttgctgaaaacatccagtggcaatattttaacactgtagccatctgaagtggtgacaacagctgg

SEQ ID NO: 924797 - DNA, 654 bp, Homo sapiens
ctgagcccccacactcgcccccagatgctgtggttctgctgcaaaaccagaccctcgtttccagcatcctctgtttccatgagcaatactataagccttgagcagaaccagagccgcgtgcacagacacggtgtcatctcatgatttccacctcctgaaccatgtgtgggcactgacggcagactggaaagcggaamgctgcgggatgtagtccttgcatggaccccatggccaggactacctcagaacttctgagggttatgttccaagttcattcctgcccctgctcaggccccaaatctgcctgcatctgcaaagccctagagcttgcagtccttagacctaaataagtggctcctgctcccaccaggccaggccagttaggagagagggtcaaagtcataggtcacagagtgatgcaaaggatgatgagatcaggcagtggggcttcagtctgggggcttccacagtggtcccagcctgtagccattgcctctgcacctagccaatgcaccaccagcccccaagacttccctagaggcagaggaggtgatgataaggggacgctgtgaggggtcttctggtcaacttgcctttctgtggccttttcccctcttcccagtggagcaaattgtttccctgtaggagaagaaa

SEQ ID NO: 924798 - DNA, 593 bp, Homo sapiens
agtgatggctttttcaatataataccaaaggcacatccatcaaagaaataattcatagtgaagcttcattaaaattaaaaacttctgctctgaaaaagacactgtcaagagaatgtgaagccacagattgggagaaaatctttatagaacacatacatataaagaactagtatccaaaacatacaaagaactcttaaaactcaacaatgagaaatcaaaccacctaattaaaaaatgcggagaaagatctaaacagacacctcaccaaaaaagggacacagatgacaagtatgcgtctgaaaagatgctcatgtcatttatcatcagggaatcgcaattcaagacaaagagaaaccaccacacacctactaggatggacaaartctacatactgacagcaccaaatgctggcaaggaggtggagcaaaaggaaatctcattccttgtccatgggagtgcaaactggtgcagccactttggaagacggtttggcggtttcttataaaactaaacactctcaccatgcaatccagcaatcaggctcctaggtatttacccaagttggaaacttaaattcacacaaaaacctgcac

SEQ ID NO: 924799 - DNA, 620 bp, Homo sapiens
ccaccttgcagttcgatcttggcctgctttactagcagtgagcaaggctccatgggtgtgggaccctccaagccaggcacgggatataatttcctggtgtgctgtttgctaagaccgttggaaaagcacactattagggcaggagtgtcccaattttccaggtactgtctgtcacagcttcccttggctaggaaagggaattccccaatcctttgcacttgccaggtgaggtgatgccccgcccttcttcagctcacactccatgggctgcacccagtgtccaacaagtcccagtgagatgaacctggtaactcagttggaaatgcagaaatcacccatcttctatgtcgctcacactgggagctgtagactggagctgttcctattcggccatcttggaacagagacagagaaattggaattcttatactgtattggtrccttgccttagatttgtaaaatggtgaggctgccatggaagagtttaactcaacaagtacccagcaattccagttttgggtatataaccccccacaccaaattgataactggtgttcaaagagaaacttgctcatgaacattgatagcagctttattttcaataggcagaaggtagaatc

SEQ ID NO: 924800 - DNA, 739 bp, Homo sapiens
aagcataattaattaaatcattggtctttggtgatcacaactcaaccttcagctcctccgatctccttacaggttggaaaatggagctgaaagtccctattttgtaattctgtcttgctctttccagtgaccagccctactctaaagttatatagaggctgccagccaccagtcatctcattagcatacaaaagacaccctaatcatgtaggagatgccaagaattctgtgagtcatatgctgaaagggaggagaaagaccaagtgtatatctcacactatcacacgtgtacaacgcgatgttttgatatatgcatacatttggaaatgatcaccacaattaattaaattaatgtgtccattacctcacatagttaccatttttttgtaatgaaaatgcataagatctaccttcttagtaaatttcaagtatataatacagtattgtgacctacagtatagtatagttatcaatactgtttaaatatcaatgttcccaaaattgatcaaaagatcaagaaatactaatcaaaatgtgtatagtaaatgatttttcttgcttaaagagargtttgatcttttgtttggctcctgaaaaataacttctaagcctttggaatgtcctacccaataaaggtgtctctgtttagctgcatgtttatggccacaccagatagtctgtgctaacaacgtgatttatgttgtatagtggaggatcttgagtcacatgttatcagctt

SEQ ID NO: 924801 - DNA, 688 bp, Homo sapiens
acttatatttcccaagtcttcatatctcctgctgagactccatttctgagtctaaatctgaattcctatgtcgttaataatctacatgtccaaaggagactggataattgtattctttttttttttttttttttcttttctttgagacggctggagtgcagtggcgcgatctcggctcactgcaccctcacccttctggattcacgccattctcctgcctcagcctcctgagtagccgggactacaggcacccgccaccacgccccgctattttttttttttgtatttttagtagagacggggtttcaccgtgttagccaggatggtcttgatctactgaccttgtgattcaccggcctttgcttcccaaagtgctgggattacrggcgtgagcgactgcgcccggcccgtattcttaaaatctgctctttttcttccattttctgtgtcattaaatggcacaaaagccaaggaattacaatagactcttctgctgctctttttctgccacatccaatgagtcatttcatttttataaaattatctcaatgttaccttcttctctctgtcttcggatcattgtcttaggtcacagcagtcttgcttcccacttgcattttagatctagcatggaatggacttccatctctaggcttatcctgacccagtaactcctttcaatctactg

SEQ ID NO: 924802 - DNA, 581 bp, Homo sapiens
ttttatccttccagatgtttttcccttctacataaatataaagttttgaaagtgcctgtgtcataagtatatattcttactgattttgatgacatttagaatgtctgcatcataattgttcaacatcaaattttaaaatcagtttccttattgttgggcagttaaccatttcagtattaaaaagttttcaagattattaatatgctatcaataaccttatattttatacgtcttttttttttttttttttttttttttttttgagacagagtctcactctgttgccaggctggagtgcagtggtgtgatctcgactcactgaaacctccacctcccaggttcaaragattctcctgcctcagcctcctgagtagctgggattacgggcatgtgccaccatgcccggctaatttttgtattttttggtagagatggggtttcaccatgttggccaggttggtctcaaactcctgacctcaagtgatccaccccccttggcctcccaaagtgctaggattacaggcttgagccaccatgcctggcccacatcttttttatcttaggaatcatttatggaacta

SEQ ID NO: 924803 - DNA, 581 bp, Homo sapiens
ttttatccttccagatgtttttcccttctacataaatataaagttttgaaagtgcctgtgtcataagtatatattcttactgattttgatgacatttagaatgtctgcatcataattgttcaacatcaaattttaaaatcagtttccttattgttgggcagttaaccatttcagtattaaaaagttttcaagattattaatatgctatcaataaccttatattttatacgtcttttttttttttttttttttttttttttttgagacagagtctcactctgttgccaggctggagtgcagtggtgtgatctcgactcactgaaacctccacctcccaggttcaagarattctcctgcctcagcctcctgagtagctgggattacgggcatgtgccaccatgcccggctaatttttgtattttttggtagagatggggtttcaccatgttggccaggttggtctcaaactcctgacctcaagtgatccaccccccttggcctcccaaagtgctaggattacaggcttgagccaccatgcctggcccacatcttttttatcttaggaatcatttatggaacta

SEQ ID NO: 924804 - DNA, 635 bp, Homo sapiens
  misc_feature 465: n = A,T,C or G
tattgcagtactgttcacaatagcaaagacttgggaccaacctaaatgcccatcaatgatagactggataaagaaaatgtggcacatacacaccatggaatactatgcagccataaaaaaggatgagttcatgtcctttgcagggacatggatgaagctggaaaccatcattctcagcaaattaacacaggaacagaaaactaaacaccgcatgttctcattcataagtgggagttgaacaatgagaacacatggacacagggaggggaacatcacacactggggcctgtcaggtggtgggggggctaggggagggatagcattaggagaaatacctaatgtagatgaygggttgatgagcgcagcaaaccaccatggcacatgtatacctatgtaacaaacctgcatgttctgcccatgtgtcccagaacttaaagtataataaaaaaaaaagaaagaacacgnattcggtagattggaataagttagggatgatggagcattcggggggaaaaaagaacactgcagaaaagcatgcaaatgtgaaacaaataaataataagctcctggaaaaactaagggccatataagaattaaagcataatatagcccacttcttgattaaaaagaaatgc

SEQ ID NO: 924805 - DNA, 589 bp, Homo sapiens
gacactaggaagcagtcagcctccttgctccctgacactgcctttcccttcacccacctttggctggctctggctactaacatgggataacagctttgagatcccttgccacaggtgttggtgtcacccgtgatctaacctcctgtatggccaaatcccctgcccccataggccacagatgccatggcccacgtggccggcttcactgtggctcatgacgtgagtgctcgtgactggctaacaagacgcaatgggaaacagtggctgctgggaaaaaccttcgacaccttctgccctctgggccctgccttggtgaccaaggacagtgtagcaggtaggtccctggtccctgccccctkgtacctaccattgcacagatgaacagccctccagggaggagcatgggttcaggtacatgtggcacctgccctccctggctgccctttgactgctgactccatacagggaaagtcttttatcctcagccaccagttctcccatgggcttccttcccaagccccctagagggaacacaactgcagaggatgtgaaactgcatgcgtgaagtaaattacaaagaacactgagc

SEQ ID NO: 924806 - DNA, 632 bp, Homo sapiens
ctaggaagcagtcagcctccttgctccctgacactgcctttcccttcacccacctttggctggctctggctactaacatgggataacagctttgagatcccttgccacaggtgttggtgtcacccgtgatctaacctcctgtatggccaaatcccctgcccccataggccacagatgccatggcccacgtggccggcttcactgtggctcatgacgtgagtgctcgtgactggctaacaagacgcaatgggaaacagtggctgctgggaaaaaccttcgacaccttctgccctctgggccctgccttggtgaccaaggacagtgtagcaggtaggtccctggtccctgccccctgrtacctaccattgcacagatgaacagccctccagggaggagcatgggttcaggtacatgtggcacctgccctccctggctgccctttgactgctgactccatacagggaaagtcttttatcctcagccaccagttctcccatgggcttccttcccaagccccctagagggaacacaactgcagaggatgtgaaactgcatgcgtgaagtaaattacaaagaacactgagctgatgggtggatcgggcttcctgcggctgccaccatctgaaataatc

SEQ ID NO: 924807 - DNA, 716 bp, Homo sapiens
ccatttcaaagatggataagaataccacataggaacatggggaatgcttgggctgggatgtgaaataatagaaaaaaagatgcaagagaacacagacaagtgaaaaccatgactatttttgggtcaaaacttcatacatgatctttgtccttttttttccaaatgtgatttgatgtggctcgatgacatttataatgtgtgttgcagccattgtcctggcagccactagcccatgtcctctcrcctgttctgggaagccaggatcagacccatacaaatgatcctttcagtcattgagagactggccaggcaaggaagtccaagcaaaactcaaccaagtgtccgggggacactgcaaatctcctcactgtagtacagcagctccattatcgacagattggccacaaagaccacaaccaggaactctacctcctacccacagacaggctgggacagcaaaagtttcaagcctttctacaccctgagatctaggagttctgtccagataattccactgggtccggaagagcaaggacagatgcttgccctcaggcctgggcacaagactgcactgaagggaacaggaaagaagcgagaccccctggcatcatggcatcctgtgccatgaagaccccagccctcccagtgggcccattagcctgacatgagggagagtgactgctatgtgtccagtagctccctgagttgggccactc

SEQ ID NO: 924808 - DNA, 716 bp, Homo sapiens
ccatttcaaagatggataagaataccacataggaacatggggaatgcttgggctgggatgtgaaataatagaaaaaaagatgcaagagaacacagacaagtgaaaaccatgactatttttgggtcaaaacttcatacatgatctttgtccttttttttccaaatgtgatttgatgtggctcgatgacatttataatgtgtgttgcagccattgtcctggcagccactagcccatgtcctctcgcctgttctgggaagccaggatcagacccatacaaatgatcctttcaktcattgagagactggccaggcaaggaagtccaagcaaaactcaaccaagtgtccgggggacactgcaaatctcctcactgtagtacagcagctccattatcgacagattggccacaaagaccacaaccaggaactctacctcctacccacagacaggctgggacagcaaaagtttcaagcctttctacaccctgagatctaggagttctgtccagataattccactgggtccggaagagcaaggacagatgcttgccctcaggcctgggcacaagactgcactgaagggaacaggaaagaagcgagaccccctggcatcatggcatcctgtgccatgaagaccccagccctcccagtgggcccattagcctgacatgagggagagtgactgctatgtgtccagtagctccctgagttgggccactc

SEQ ID NO: 924809 - DNA, 532 bp, Homo sapiens
gaccatactgcccaagatgatctacagattcaatgcaatccctgtaaaaataccaaagatattcttcactgaaatagaaaaaaaaaatcctaaaatttatatggaaccagaaaataccctaagtagccaaagcaatattgagaaaaaaaaaaaaacatagttagaggcatcacattacctgacttcaaattatgctacaaagctatagtagtcaaaacagcatgacattggcatgaaaacagaagtgtagaccaatggaacagaatagagaacccagaaacacttccacattttatagccagctgctrttcaataaaggtgccaaaaacattggggaaaggacagtctcttggataaatggtgttgggaaacctggatatccatatgcagaagaacaaatctattcctccatttcttaccatacacaaaaccaattcaaaataaattaaatacctaaaagaaagacttggaaactatggaactactagaataaaacataagtgaactgctttaaaatattgatcttagcaag

SEQ ID NO: 924810 - DNA, 607 bp, Homo sapiens
atattgcagcactattcacaatagcaaagacttggaacctacccaaatgtccatcaataatagactggataaagaaaatgtggcacatatacacaatagaatactatgtagccataaaaaagaatgagttcatgacttttgcagggacatggatgaagctataaaccatatttttaagcaaactttcacaagaacagaaaaccaaasaccacatgtttctcactcataagtagaagttgatcagtgagaacacatggacattgggaggggaacatcacacaccagggcctgtcagggagtggggggctaggggagggataacattaggagaaatacctaatgtaggttatgggttgatgggtgcaacaaaccaccatagcacgtatatacctatgtaacaaaactccacgttctgcacatgcaccccagaacttaaagtataattaaaaaaagaagcaataaaaacaatctaaatatctaaaaaagaaaaaagaatgaggagcaaatatgaatatatggaaagaattttgtgtaagagaacttaattttttttagatttaagatttaaatacagaaaattgaaaactaaaaaccatgatttggcagt

SEQ ID NO: 924811 - DNA, 597 bp, Homo sapiens
cctgaaaaggagtgtgacaattatttctcaaagaacctgaaacggaaatatcatttgacccagcaatcacattacaggatatatacccaaaagaatacccaaaagaatatatattgctctgccataaaggcacatgcatgcatatgtccgttgtagtactattcacaacagcaaagacatggaatcaacctaaatacccatcaatggtagactagatttaaaaaaaagtgtttwtatatatatatatatatatatatatatatatatatataccatagactactacaccaccagaaaaaaagaatgagatcatgttctttgctgtaacatggatggaactggaggccattatctcaaggaaacaaatgcagaaacagaaaatcaaatatctcatgttcttacttataagtggaagccaaacaagaaaacatggacacaaagatcagaacaatagacaacaaggcctacttgagggtggaggtgggtaagagggagagggttagaaaaatacctactggataccattcttactatctgaatgatggaataatctgtacatcaaacccctaggacacgcagtttacctatatgacaaac

SEQ ID NO: 924812 - DNA, 559 bp, Homo sapiens
taatatcaatttcacttatttctgctccgatctttattatttcttttcttctactaaatttggatttggtttgctcttgtttttctagttctttaagatgcatcattggattgttcatttgaaggtttttcacctttttgatgtaggcacttatagctataaacttcccacttatgctgtatcccataggtttgagtatgtagtgtttctattattatttgtttcaagaaatttttcaattttcttcttaatttcttcagtgaccccactggtcattcagaagcatattgattaatttccatttatttgtatagtttccaaawttcctcttagtattcattttcaattttattttattgtgatcagggaagacgcttgatattatttcaatttttctgaatgttttaaaacttgttttgtaacctaacatatgatctatacttgagaaagatccatatactgaataaaagaatgtgtattcagcagctcttggatgaaatgttgtgtaaatatctgttagatccatatggtctatagtgcagattaagtctgacatttc

SEQ ID NO: 924813 - DNA, 604 bp, Homo sapiens
ctggatcagaatgaacatgaaggagactaagagaaaataaaatcagggtggtaggaaaggaaggattaaacagctatcgggtggcaattgcaagagcaatgtaaagaactttggtttttatttttagtgatgtgaagtcattggatggatatataaatgatatattttaaaagatcattgtgactgctatattgagacttttgaaatatgtaggcaagggtaaaagcagataaaacagttaaaagtctataaaataaagtacaagacaatagtgcttgggaggccagggtggtaatcagagaaaataaaaatggccaaattcagagtttactttgaaaataggtttgaaaggatttgctgaaggattctagagtgaaaatggtcaccagaaagaaaaggtcatatggggaaggacttcctaagagaaactatgacttttagwcaagggaggcagtcagtcattcacagctcagggaaagaaccaagaaaataaacaccatgatttcacttgctttccctgtcttcctgatttcctattaggactccttatcatcttaacccagtccaaagccagagggcaaaggagctttcatcctatattgag

SEQ ID NO: 924814 - DNA, 732 bp, Homo sapiens
tcacctagatccataaactggctccaatggtcttgtggcctccacccaagagctcactcagcataagaagacagctttgactccctatgatttcatcttccacttaacccatcagcactctccagtttccaaccccctatgcaccaaattattcttaaaaactcccatccctgaatttttgggaagaatgatttgagtgatagtaaaactcctggtctcccgtacagagagctttgtgtgaattaaactcttttctgcaattcccctgtcttgataaattgactctgtctaggccacaggcaaggagaacccgacaggtagttacaacacygtcttattctcttctggttccagtgttgctattgagaaatccatgcaaaaccctttggatttctgaactttatgttacctattttttttgttcctttttggaatattttagaattctctcagtattataaaatattataacagtatacattgatataggtcaatttcatccactatgctgctgcagaaacagaattttaatctgaaaaagcatgtccttcaattttgaatgttgtctttgaattatcttagataacttcttttctttctgattccatttctgggcatagttttaatttggttttggacctcctagacaaagcttatcttttcctttctcgtttgtatttttctgctcctctctatgaaattgccttccactgaactgtttatgttttttga

SEQ ID NO: 924815 - DNA, 751 bp, Homo sapiens
gacagaggtttcaaacctccctgggacagagctcccagaggcaagagtgggtcgccatctatgttgtttgaatgacttagttgttctggccttccggctctggagagtacgaggcgaccagggcctagagcagaccgatagcacagcacagctactttatgaaaatgtgtccagactactttttaaagcgggtccctgatcctagtcctccccactgggcaggacctccaaactggggtctccagccacctcctayaggtgcatttgggctggcaataagtccatacctccctgggatggagctcccagagagagggtcaggccatcactttgctgttttgcagccttcactgttgataccttcagatacctgaaaatctgaggtgcctagggactggagtggaaccacagcatacagcagcagccctacagaagagtggccagactgttacgtgggtgcccattcccatatctcctcactgggcaggtcctccaggcctgggcttcctgccacctgctgcggttgctattgagccaggagcagttctgcaacttcctggacagagctcccagtaggaggggtgggttgccatctcacctgtcttacagttcttgcttatgctgtctccaggcttgggatagtctgtggggaccaggggctgatctggacccccagcacagagcaaccaattcacagaaaagtggctagactgttctccatgcagatccttgtcctcacttctcttcactg

SEQ ID NO: 924816 - DNA, 622 bp, Homo sapiens
tagatcatataatagttctacttttaattttttaaggaaactctatactgttttacataatggctaatttataaaaaatttacacaaatgtacatttacaaaaaagttgtgtgaaaaaatatactaatttacattcccaccaacagtgtacaactgtttccttttttccacatgttcactaacacttgttatctttcttctttttgatagtagccattctaacaggtatggggtgatatctcattgtggttttaatttgcatttctctgatgattactgatattgagtattttaatatacatattggtcatttgtatgtcktctttggagaaatgtctattcagatgttttgcccatttttaatcatgttattagtcttcttgctatttggttgaatttattatatattttagatattagccccttaccagatgtatgatttgcaaatactttctcctattctgtaggttgtatcttcattctatagacagttccttttgctgtgtaacttttcagtttaatgtaattccatttgtcgattatcacttttgttgctagtgcttttggtgttgtatccaaaaatcagtgcttacaccaatgtcatgaagcttttacatttttt

SEQ ID NO: 924817 - DNA, 526 bp, Homo sapiens
gagaaatctgatgactcattaggaagaaaagaaaatggaggtgtaagatctgatggcaacaaagctctcgtgcaatgggtggtggtgttgagcccaacacacatactcttcacaccaagcttgtccaacctgcagcccacatgcagcccaggatggctttgaatatggcccaacacaaatctgtaaactctctaaaaatattatgaaattaaaaaacagttttgtaaagttcatcagctatcattagtgttagggtattttatgtggggcccaagaccattcttccaatgtggcccaaggaagccaaaagattggacacccctgctctgctctacaccctcatatacccccatatccaccatacagctacacacasacacacacacacacacactctcacacaaactctctctctctcatagcttctcctaacacaaaacacacactcacactcctctatatctccacaatccatatgacactacacactcaccccctccacactgtcacagataacctctcctca

SEQ ID NO: 924818 - DNA, 624 bp, Homo sapiens
caccatgcctggcctgtatgttgactttgtatcctccaactttactgaatttgtttatcagttctaatagttttttggtggagtccttaggtttttttcaaatataagatcatatcatctgcaaataaggataatttgacttcttcctttccagtttggatgctctttatttctttctcttgtctgattactctagctaggacttccagtactgttttgaataatagtggtggaagtgggcatctttgtcatgttccagatctttgagaaaaggctttaggttttcccctaattcactatgatactagctgtgggtttgtcatatagcttttactgtgttgaggtatgttccttctatgtccagtttttggggggggttttatcatgaagggatgttgaattttatcaactgttttttcagcatcagttgaaatgatcatatggtttttgcccttcattctgktgatatgatatatcacattgattgatttgggtatgttcaaccatccttgcatctctgggataaatcccacttggtcatgatgaatgattttttttttccattggaaagatattgcagatgagatgaataatcactttaatgtgttgttgaattcagtgtgc

SEQ ID NO: 924819 - DNA, 611 bp, Homo sapiens
cacttctcaatcctccctctaaacaggacataccaactgctgttgggaattgggcgatgactgatctagctacttcctgctggataggggcaaagaaggggccctgcagttgtagtgtcctccagaggggaactttttaggccagtcaaagggccagtaggttgatccaggggtccttcgtagaagttgtgaattgagctcatttggggttccatttgtaagaccatctgtagcttgatggcctcgatcctggaggaaacaaatttgacaaggaggttaaaaatgcagggactgggctgggcgcagtgtctcatgcctgaatcccggcactttgggaggccaaggcgggcggatcatgaggtcaggagatcaagaccatcctggctaacacggtgaaaccccgtctctactaaaaatacaaaaaattagccgggcrtggtggcaggtgcctgtagtaccagctacttgggaggctgaggcaggagaatggcatgaacctgggaggtggagcttgcagtgagccaagatcacaccactgcactccagcctgggtgacagagtgagattccatctcaaaaaaattaataaataaaataaaatacagggcccga

SEQ ID NO: 924820 - DNA, 602 bp, Homo sapiens
aaatactgtgcttttccaacaatcttagcaaacggcacaccaggagatcatatcccgcacctggcttggtggatcccaagcccacacagcttttctcactgctagcacagcagtctgaggcagcagcctggtaggggaggggcgtccaccattgctgaggcttgagtaggtaaacaawgtggctggggaagtttgaactgggcagagcccactgcagctctgcaaggcctgctgcctctgtagaccccacctctgggggcaggcatagctgaacaaaagacagcagaaacttctgcagacataaatgtccctgtctgacagctctgaagagagcaatggctctcctggcatggtttctgagctctgagaatggacagactgcctcctcaagtgggtccctgttccccgtgtagcctaactgggagacacctcccagtaggggctgacagacacctcatacaggtgagtgcccctctgggatgaagcttccagaggaaggatcaggcagcaacatttgctcttctgcaatatttgctgttctgcagcctctgctggtgatacccaggtaaacagggtctggagatgacctccagcaaactcca

SEQ ID NO: 924821 - DNA, 602 bp, Homo sapiens
aaatactgtgcttttccaacaatcttagcaaacggcacaccaggagatcatatcccgcacctggcttggtggatcccaagcccacacagcttttctcactgctagcacagcagtctgaggcagcagcctggtaggggaggggcgtccaccattgctgaggcttgagtaggtaaacaatgtggctggggaagtttgaactgggcagagcccactgcagctctgcaaggcctgctgcctctgtagaccccacctctggggrcaggcatagctgaacaaaagacagcagaaacttctgcagacataaatgtccctgtctgacagctctgaagagagcaatggctctcctggcatggtttctgagctctgagaatggacagactgcctcctcaagtgggtccctgttccccgtgtagcctaactgggagacacctcccagtaggggctgacagacacctcatacaggtgagtgcccctctgggatgaagcttccagaggaaggatcaggcagcaacatttgctcttctgcaatatttgctgttctgcagcctctgctggtgatacccaggtaaacagggtctggagatgacctccagcaaactcca

SEQ ID NO: 924822 - DNA, 631 bp, Homo sapiens
aataatcccatgagtaataataaaataacaactgtgataagtactataactgaaagtatagggtatgatgatagcatataaatggagaacataatctagactgggggaggggtgttctctgaagaagtcacattaaaaattgagaattgaaggataagtaacttatccaagtgaactgggtgagtggggatatgaaggaggtagcctggagaagaaygttctaggaatagaaaagagtatctggaaaagtcctgagatggaaagttagctgctatgttaaacagagaaaaggccaataaagctggaacatgctaagcaagatgatattgatgaggtggatatgggctcactgtaacctcatactcttgggctcaagagatcttcccacctcagcctcctgagtatctgggactagtttgccacacatggctaattattttatttttggagagactgggtctcactatgttgcccagtcttgaactcctgttccaagcaatcctcccagcttggcctctataagtgttggaattacaggtatgagccactgtgcccagccaagactatcttaaggtgcaataataattatggaccatgggatccaagctagataagagaggacatgaaggta

SEQ ID NO: 924823 - DNA, 609 bp, Homo sapiens
acctcaataagcagatgagtagccctggctttgggtccactaggtgcagcctgatgcctgggtctgcaggagtaggcagacatggaatttgggtttgcgtagatgggcctagtgcctcagtgcacaggggtaagcctgaagcttgggtctacaggtataagcctggatcctgggtacatggggtctagtgtgttgctggggtccactggggtggacctagtaactgtgttcatggttacaggactggagtctaagtccattgggatgggcccagagccygagtctatgaaggcaggtatggggccaacatctacaggggctggcctgaatcctgaggctgcaggagctagcctggcactggggtgggtctgaaagctggccctgaaggggcatggtggcgaagaccacagtaaagtcatgtgttaacttcactcttcttccgctctgtggaggatatcactgttggcactgtgctgtgcgaaacaggcttgggggagaggagatgtgagtaatgtgaaactgtccttactcccatcttcaatccatctttctttatttctgtactttacccaggtgttgtaatctgtcatatggattccttagctcttg

SEQ ID NO: 924824 - DNA, 752 bp, Homo sapiens
ttgccttgtggtttcattgtgtagttgctttatgttatctgtgagctttgtatttctgtcatcttttatgatggtgtgggtcattctttcatttccatgtgtagactgcacatttgttggtggtctggtctagtggtgacaaattcccttggtgtttctttgtcggggaaaggttatatttctccttaatttatgaagcttagtttggcagaacacaaaattcctggctggcttttttgtttctttaagtgggctaaaaataggctcttaatgtcttctggattatagggtttctgctgagatttctgctgttagtataataggatttcaaaatgattagacccctctcttgatgctcttagagtgttttttttcccctctcattgactttggatagtctgatgactatatacattggtgaagttcttrcaatgtatctctaggaattctctgagcttctggtatctgaatgtctaaatctgtcccaagactagggaagttttcttaaattatttcctcaaataggtttttcatacattcttcttcttctttgttttcttcttcctctgtcattatgtaattatgtataacttgtaggtttggatgttttacataatctcatatatcctgaagtctttgtttatttaaaatttttttaaattgtttctcactgttaatttgaaagacctgtcttctaactctataattcttcttccacttggtctagcctattgttaaaattttcagctgta

SEQ ID NO: 924825 - DNA, 597 bp, Homo sapiens
aaaataaaatgcttaagaatatacctaaccaaggaggcaaaatatctctacaagaaaaaacacaaaacactgctgaaagaaataatagatgacacaaacaaatggaaatagattccatgcttatggatgggtagaatcaatattgtgaaaatgaccatacttccaaaagtaatttacaagttcaatgcaattcacatgaaaacaccatcatcattcttcacagaacaagaaaacaaaattctaaaatttatgagacaaaaaagagcccatatagccaaaacaaaaatgaaccaaaagaacaagtctggaggcatcacattaccgaaattcaaactatactctaaggccataatcacccaaatagcatgctactggtataaaaacagacacgtagactaatggaacagaatagagagcccagaaataaagccaaatactyacagccaaccgaacttcaacaaagcaagcaaaagcataaagtggggaaaggacaccgtattcaacacatggtgctgggataattgacaagccacatgtagaagaatgaaactggattctcgtttctcactttatataaaaatcaacccaggatggatt

SEQ ID NO: 924826 - DNA, 653 bp, Homo sapiens
gaggctgacgatgttcagtgggtcttcactgggactaccaccaaggaaagtatcccctttcatatccaggaacttatttttcagagatcagagaagatctaggttcctcctgattcaaacacagcagagaatgacagcatcaagacaacgtagatggtggtgccaggtcataaattacaagctgagtcggttcaattttatcctgtaggcaattaggagctagcaaagatttctgagcagtatgtgacttttggaatctgtgctttaggaagttgacttggcagcaaaggagggaattgtctatgacagagcctggaggcaggttacaagctggaggaagttaccgtggtgtgagcacaaggcaacaaaggcatggacagagctgggggccagatactgcakggacagataggagaggtgacctggggagaatgcacagtccttggtattcatttaaatggacaaaagaaatgatgctgtcaaaagtacttccattgggccaggcgcagtggctcacccctgtaatcccagcactttgggaggccgaggcaggtggatcatttgaggcctggagttcaagaccagcctggtcaacatggtgaaaccctgtctctactaaaaatacaaaaattagctgaccggtagtggtgtgc

SEQ ID NO: 924827 - DNA, 615 bp, Homo sapiens
ctcactgcaagttctgcctcctgggttcatgccattctcctgccttggcctcctgagtagctgggactacaggcactggccactacgcccggctaattttttgtatttttagtagagatggggttttgccatgttagccaggatggtctcaatctcctcacctcgggatctgccggcmtcggcctcccaaagtgctgggattacaggcgtgagccactgtgcctggccaagtgatctgatcttaccaggtcccacccactaggtaacagggaaaaaatgtatttcagtctatcccactgcaattagtcaaagacaagaatgtaaccaatccatttaagtaaggctaccccataagcaaaatgtctcagcctgattcctctctccacttccagcttatctctaaggtagcatctgggtctacagagaaggggccgatgtcactttgagatattgtgggtttagaagcctcccttggcctcgtgttggccctttggtatgtgcagcctggtgatcactgaggggcagttggacctggccctggtgttctggggtccacagctaatctctgcagttggtctaaccagctttgttcctctcggtcagagccaaagggcc

SEQ ID NO: 924828 - DNA, 500 bp, Homo sapiens
cctgtggggcaggggaaagagactgtcaaggtcctccaggaagctcctgttccacccacacctaggttttataccttccagtcttctcccaccgtcctggagtctggttccacacctgcctgcccaccagggggaaggaagcttggcccaggcctgagcattaactgcaacagggggaattggtggtcagtttctcagaaggactgttttgcccagtagacctaggacttaggactttttttttttttttttttttttgagacggagtctctctctgtcgcccaggctggagtgcagtggtgcgttcttggctcactgaaaccttygcctcctgggttcaagcgattttcgctgcctcggcctcccaagtagctgggattataggtgcccaccatcacgccaggctaatttttgtatttttagtggagagggggttttgccatgttggccaggttggtctcaaactcctgacctcaggtgatctgcctaccttggcctcc

SEQ ID NO: 924829 - DNA, 590 bp, Homo sapiens
tttatttgttctgaagtttcaaagaaggcacaatgaactcagcaaacagagtgaggatggtaggagtgggcgtcggggtagaaaaaggggctcaagagagactttcagaaggagctgagtctggaaaaaggcacaggcactagccagacagagagggcttggggcactccagagcagaagcagcccagtgggcagccctggaagcaggaaacggcctggggggattagagtcctacacttggtgtggtggagctaaaacacatgcacgaggctgggagtgaggaggacgaggctggaccggcaggcgcaggctggacctgcaaggtctctatctaccatgttaagcaactcaagcctgtagggcagaaggtcttaatccagtgtccagaagggagttctctgaagcccttgcagttgtcttcaaaatatctgtatrtctttcataaacttttcaaagacatacatgacccccaacaacctgccatataggttgagaagccgtgtcttctcaggctgatctctgtagtgaccatgtggagagcacgttccacgggagaaagactgtgggcacgacactgtcacgggagaaa

SEQ ID NO: 924830 - DNA, 553 bp, Homo sapiens
agaatataagcaggcagaaaaatgcgaaaagagagactagcctagcctcccagcctacatctttctcccgtgccggatgcttcctgccctcgaacatcagactccaagttctgcagctttggaactcagactggctctccttgctcttcagcctgcagacagcctgttgtgtataatgggacctggtggtcttgtgatttaatgcttaataaattaatatatatatayacacacacacacacacacacacacacacacacatatggcattagttctgtccctctggagaacctcaactaatacaagaggtactttttgtgaaagtttgcaatggactttgtgcaaggctgtggtttttgcagtcttttgtgatagcttctgttatcaggcatacaagcatcaaaaccctctcctcatagctttcctcagctctatttatcagggtattcttcctcccttccctcttttttttttttgaaatagggtttcattctatctcttaggctggagtgcagtgacatgatcatagctcactgcagcctcgacctcctgg

SEQ ID NO: 924831 - DNA, 620 bp, Homo sapiens
ctttttatgttttttaacttgaagtcaatttctgatataaacatagctactccttcacacttttggttttcatttgcatggattttttttcgtcccttctcttttagtctatgtgtatctttatagatgaaataggtttcttgtacttgcatcttgttttttaatacattcagctgttttatatcttttaattgatgaatttaagccatttactttcaaggtttttattaataggtggggatttctgtcatattgttaattattttctgattgttytacatattctttcttcctcttctgttgtttactttacaatttgatggggtttttttatagtgataatatttgactcctttctctttcttatttgtatatctgctctaccagtgagttttatactttcttgtgttttcatgatggtagatatctttctttcactttcagatataggattaccttaaacattttttgtagggctggtataacgatgatgaattatttcattattttctcatctgagaaagaatttctttacccttcatttttgagggatagcttttctgggtatagtattcttggctaccagttgttgttgtttttctctttcagcactttgaata

SEQ ID NO: 924832 - DNA, 522 bp, Homo sapiens
agttcctgcctttgcagggacatggatgaagttggaaaccatcattctcagcaaactaacacaggaacagaaaaccaaacaccacatgttctcactaataagtgggtgttgaacaatgagcacacatggacacagggagaggaatgtcacacactgggacctgtcatggggtggggggctggggaagggatagcattagcagaaatacctaatgtagatgacgggttgatgggtgcagcaaaccaccrtgacacatgtatacctatgtaacaaacctgcaccttctgcacatgtgtcccagaacttaaagtatgtatttataaaaaagaaatgaatgatagatgttataaatatatcttccatcaaataatgtctttggttttgtaaaatcctttacaattttcaggttatttcatgtacattttcttaaagtagttctgcaagttatatagtagaagaaggaattggatcagtgtcagttacatataaaaaatgtggtcaattaaaattttattttacgat

SEQ ID NO: 924833 - DNA, 656 bp, Homo sapiens
ataagaattgcacaaagagggggaggagccaagatggccgaataggaacagctccagtctacagctcccagcgtgagggacacagaagacgggtgatttctgcatttccacctgaggtaccgggttcatctcactagggagtgccagacagtgggcgcaggtcagtgggtgcgcgcaccatgggcgagccraagcagggcgcggcattgcctcactcgggaagcgcaaggggtcagggagttccctttcctagtcaaagaaagtggtgacagacagcacctggaaaatcgggtcactcccacccgaatactgcgcatttccgacgggcttaaaaaatggtgcaccaggagattatatcccccacttggctcggagggtcctatgcccgtggagtctcgctgattgctagcatagcagtctgagatcaaactgcaagggctcggggaggggcgcccaccattgcccaggcttgcttaggtaaacaaagcagcagggaagctagaactgggtggagcccaccacagctcaaggaggcctgcctgcctctgtaggctccacctctgggggcagggcacagacaaacaaaaagacagcagtaacctctgcagacttaaatgtccccttctgacagctttgaagagagcagtggcgctccc

SEQ ID NO: 924834 - DNA, 656 bp, Homo sapiens
ataagaattgcacaaagagggggaggagccaagatggccgaataggaacagctccagtctacagctcccagcgtgagggacacagaagacgggtgatttctgcatttccacctgaggtaccgggttcatctcactagggagtgccagacagtgggcgcaggtcagtgggtgcgcgcaccatgggcgagccaaagcagggcgcrgcattgcctcactcgggaagcgcaaggggtcagggagttccctttcctagtcaaagaaagtggtgacagacagcacctggaaaatcgggtcactcccacccgaatactgcgcatttccgacgggcttaaaaaatggtgcaccaggagattatatcccccacttggctcggagggtcctatgcccgtggagtctcgctgattgctagcatagcagtctgagatcaaactgcaagggctcggggaggggcgcccaccattgcccaggcttgcttaggtaaacaaagcagcagggaagctagaactgggtggagcccaccacagctcaaggaggcctgcctgcctctgtaggctccacctctgggggcagggcacagacaaacaaaaagacagcagtaacctctgcagacttaaatgtccccttctgacagctttgaagagagcagtggcgctccc

SEQ ID NO: 924835 - DNA, 656 bp, Homo sapiens
ataagaattgcacaaagagggggaggagccaagatggccgaataggaacagctccagtctacagctcccagcgtgagggacacagaagacgggtgatttctgcatttccacctgaggtaccgggttcatctcactagggagtgccagacagtgggcgcaggtcagtgggtgcgcgcaccatgggcgagccaaagcagggcgcggcattgcctcactcrggaagcgcaaggggtcagggagttccctttcctagtcaaagaaagtggtgacagacagcacctggaaaatcgggtcactcccacccgaatactgcgcatttccgacgggcttaaaaaatggtgcaccaggagattatatcccccacttggctcggagggtcctatgcccgtggagtctcgctgattgctagcatagcagtctgagatcaaactgcaagggctcggggaggggcgcccaccattgcccaggcttgcttaggtaaacaaagcagcagggaagctagaactgggtggagcccaccacagctcaaggaggcctgcctgcctctgtaggctccacctctgggggcagggcacagacaaacaaaaagacagcagtaacctctgcagacttaaatgtccccttctgacagctttgaagagagcagtggcgctccc

SEQ ID NO: 924836 - DNA, 638 bp, Homo sapiens
agctgctatagtgatttcttcccaaagactgtagtatggaaagggaggcggtgctaactttcgagcagagaaacctggcaaacactgcatcagccaggtgagcggggtcaacatccacggtggtatatgcccttgacatgatggagtgagaatggcatgtcacctctgtggtcttcctccccaaacccatgatctgagtccagtcatggttcgaaaacatcagacaaaccctaactgagggacattctacaaaatacctgaccagaactcttcaaaactgctcaagtcataaacaagaaaagtttgagacacgtcacagccaagaggagcctaagatgatgtgactaaatgtaatgtagtattctgaatgggaccctggaacagaaaaaaagacatctggtaaaaactaagacattctgaataaagtatgaaagtcatttaataacagtgtatcaatattggttcataaattgtaacatgggctacaytaatgtaagaggttaacaatataggaaataattagaaggataaatgggaactctgtgctaatgttacaaattttctataaatctaaaactattctaaaactaaaggttttctaaaaaactcagcagacctcattcttgtacacacagctc

SEQ ID NO: 924837 - DNA, 653 bp, Homo sapiens
atcggctcaattctcctcccctagtccctttaggtttcatgatggtaaaggctgcccagtgctgccaatccttggtgcttcactctccttgttttcctcttgactctgctcccacctctgtgaatagtccctttgttaaacttctactcattacccctttgagtgtgccagstgtttcctgccagtattgtcacatgtacccgtgttctaatgttaaaattccaaccaaatcacttaatttatattatagttgaaagttgtgatatgaggctttcaaattagatgtcttgctttgaaagggggaatttctagaaaatgtattttaaaatgagtgagggtattttatgctaaaatggtgaatcctaacttttttctcagtaggtggaggaaagcattttagctacttaagactggctgacaaaagtgtgtcttctctcttttttacttttcatactcacaagaagttctaggacttgctggccccaactcaggccatcttctcaccctgcacccagacttgtgactcctctggataaaggacaaagtcgatttgctttccttgcttttaaaccatagctgctaaattgagggaagtcaaatgatctggtgctgtaacattccacatctccttccaaattctttttcttctttac

SEQ ID NO: 924838 - DNA, 748 bp, Homo sapiens
atgcctgtgcccaggggtgcatcaggtagagtgaggagctgggattggatcccttggccaggctgctgcttctgcaattatccagctaccgtaggacaggaataaaagaagccacagaaatcaaagagctgaggtaagcaggaaggcagggcgagaagggagggcccaaaacagcctttccccaaaacagactttgctcatgatgatgggaactgtcgagtcttttgagggaccaaaagggggacacagtagcagagctgaagggccttgtcctccaggaatcaggaaggaaaggaaactaaggcagccagagtttatgggtcagtgctgggccccaaagcccaaccgtgcaaagggttttggctccacctccagcaaaatgatgtctgatgatgtgtcccaggatggggtctctgccagccctcctactcattgatgctcaccctgcacccagaaccactcaagaagcagcgggggtgggatgaacctccaggatgcctgcaggtggggcagattcaggggtgaaattcagaactgatataagaaatagatttaccttgaagctaatgatgcttccakcacaggcctctcatttgtaggaaccccttccaaagccccaggagtggctctagcaatcaatgtaagtaagaagataacctctcattctactgggacctcccctgtgtcccacacaatgcactctgcccccatcaggtggcactggagtggccccaggcatatgggggat

SEQ ID NO: 924839 - DNA, 545 bp, Homo sapiens
cagacactgagctagctgcaggagcttttttttccataccccagtggcgcttggaacaccagcgagacagaaccgttcactccactggaaagggctgaagccaggaagccaagtggtctagctcagcagatcccaccttcatggagcmcagcaagctaaaatccactggcttgaaattctcactgccagcacagcattctgaagtcgacctgtggtgctcaagcttggtgggggcaggagggtccaccattactggggcttgagtaggtggttttcccctcacaatgtaaacaaagctgctggaaagagtgaacttggtggagcctactgcagctaggcaaatctgcagtagccaggctgcctctctagattcctcctctctggacagggcatctctgaaagaaaggcagcagccccagtcagaggcttatagataaaactcccatctccctgggacagagcacctgagggaaggggtgcctatgggcacagtttcagcagacttaactattcctgcctgccagctctgaagagagcagtggatc

SEQ ID NO: 924840 - DNA, 567 bp, Homo sapiens
atcgcttgaacctgggaggcggagattgcagtgagccaagatcatggcactgcactccagcctgggtgacagagcaaggctccttctcaaataaatagataaataaataaatgaaggcaaagcagcattgttaactaaaaataagagcctacaggctccaaattgggataatttctactaactgtatatttgatggaaatggattgagaaacacatttttaataactcatgtatgccctgtcatctgaaccaaaataggacacatgggccaagaagttacaaatctyggtgtgggcctaaccctgggaagcagggtctgccctgatgtgttccccacctgcatagacactgccactcatcagagcaagctttctgcccctctgattgtcatcatgttctcccaacctacactcattcagaaactgcaacactcagcatgcaatgtggcaggaagcagaagggaacaggcaaagctgggctgtgtcccgggatccttaactataaaaggaaatgctttaactttagaaatgcatttccataaggattttagtcaatttgtccatttct

SEQ ID NO: 924841 - DNA, 666 bp, Homo sapiens
caagttcttgtgtaatgaagtcaatgctgtcaggccaagtgaagggaaaagagagatcagactgttactgtgtctatgtagaaaggaaagacataagagactccattttgaaaaagacctgtactttaaacaattgctttgctgagatgttgttaatttgtagctttgccccagccactttgacccaaccactgtgacccaacttggagctcacaaaaacatgtgttgtataaaatcaaggtttaagtgatccagggctgtgcaggacgtgccttgttaacaaaatgtttacaagcagtatacttggtgaaagtcatcgccattctctagtctcaataagccatgggcacaatgtactgtggaaagctgcagggacctctgcccttgaaagcggggtattgtccaagttttctccccrtgtgatagtctgaaatatggcctcgtgggatgagaaagacctgactgtcccccagcccgacacccgtaaagggtctgtgctgaggtggattagtaaaagaggaaagcctcttgcagttgagatagaggaaggccactgtctcctgtctgcccctgggaactgaatgtctcggtataaaacccgattgtacatttgttcaattctgagataggagaaaaaccgccctatggtgggaggcgagatatgtt

SEQ ID NO: 924842 - DNA, 699 bp, Homo sapiens
gttcttgtgtaatgaagtcaatgctgtcaggccaagtgaagggaaaagagagatcagactgttactgtgtctatgtagaaaggaaagacataagagactccattttgaaaaagacctgtactttaaacaattgctttgctgagatgttgttaatttgtagctttgccccagccactttgacccaaccactgtgacccaacttggagctcacaaaaacatgtgttgtataaaatcaaggtttaagtgatccagggctgtgcaggacgtgccttgttaacaaaatgtttacaagcagtatacttggtgaaagtcatcgccattctctagtctcaataagccatgggcacaatgtactgtggaaagctgcagggacctctgcccttgaaagcggggtattgtccaagttttctccccgtgtgatagtctgaaatatggcctcgtgggatgagaaagacctgactgtcccccagccygacacccgtaaagggtctgtgctgaggtggattagtaaaagaggaaagcctcttgcagttgagatagaggaaggccactgtctcctgtctgcccctgggaactgaatgtctcggtataaaacccgattgtacatttgttcaattctgagataggagaaaaaccgccctatggtgggaggcgagatatgtttgcagtaatgctgccttgttattctttactccgctg

SEQ ID NO: 924843 - DNA, 603 bp, Homo sapiens
ggaaaaatcaatgatccagaacacaagagacttgagttccagtcttggattagtagtttactaatcattatcaccttgggtaagttaaaacctgcattggtttcattgcgcttctctgaacaatgacaataataccacaacatacctaattatggttgttttaagtatcgagataaaacaggtagagaagcttagggatctaagaaaggttataataaccatcagtgttgctctctgaaaattgtggagttaccaccggatggaaaatagamtatgtcctgcagttatgcatttctttaaatatttggttttaatatgtcctgacaactttctaataacccctcaagaatcaggtagcacactgatgagcacaatgggtagggaggaagtggtgtaagacagatatgatggcccattatgtgggatgttataagtgtggtgaagaatttggatttttttttttgagatggagtcttactctgttgcccagcatgcagtgcaatggtgcaatctcagctcactgcaacctctgcctcccaggttcaagcaattctcctgcttcagcctcctgaggtagctgggattacaggcacacacccacta

SEQ ID NO: 924844 - DNA, 542 bp, Homo sapiens
ccccatcatattctattattgggcaaaataaaaggtaaaccatgtgctcaaaacagcaaatattgtgggtgacagtgacactggtattcggaaagatgaagagatgcaattaagaaacctggcaaagaagtaaacatgccatgtagcttacaaaagaccagccacattgtgtgtattttaatattgtttaacagtaacacctaataaagagagcatcatgattgtgtgaactacattttcggtcataatgaatgctacaaaattaacctcccaagtttaracaggctacaacgtcttgggaaatatgcaagaagaattatttgataaaggtgacagtttttcacacctgaaaatgatcttctcccagcctatcttgatcaacagccagcagcaacacattgcagatataatctcaagaccttgtggcatgtacttctcactacatgcataaccttaatatggacagaggatcatggagattttgaatataatttcccacatgacaggagattaaatagaccacagtggaagaagctaggtct

SEQ ID NO: 924845 - DNA, 605 bp, Homo sapiens
agattttttgccagagagaagaacaaaacacaaacgggacttacaggttcccatgacattccaaaacccagcaggccagttattcaaacctacagctccaaaatcatcctttttaagtccttgtcccacatctaggacacaagggcgtgagggctgggctcccaagkccttgggcagctctgtacctgtggctttgcagtgttcagcccccgcagctgccctcatgggctgggctagtgttgagcacctgtagcttttccacaatgaagatgcaagatgttagtgagtctatgaatctgacgtttcagaatggtgctccctgtgtggtggttccaaccctatatgttccttccatactgccctagtaaaggattcccatgaggctctgcctctttgaatagtttcgacctggacacccaggtttttctgtaaatcctctgtagtctacatgaaggattctgagcctctagtcttggcctttttgcacctgctggctcaacactatgtggaagccaccaaggcttgcagcttgcaccctctgaagcagcgacccaagatgtacctttgtatctgtcagccatggttggagctggagcttcaggtat

SEQ ID NO: 924846 - DNA, 609 bp, Homo sapiens
acactgaggtttttccttacatactcttgagtctagacaaaggctcccaagcctgtgcacctgctggcttaacactatgtggaagccaccaaggcttgcagcttgcaccctctgaagcagtgacccaagctgtacctgtgcatctttcagccatggctggagctggagctggagctgcagggatgcaggcggcactgtcctgaggatggacacagcagcgcgaccatgggactgacccaggaaaccattctttggtcctagaactcagggcctttgacagcaagctctgctgcaaaggtctctgaaatgccttcaaggcctttttaacattgtcttagctattagcactgggctccattttatgcacatttctgaagccttcttgaattttcccactraaaatcagcttttctttttgacctcttgggcaggctgtaaatcaaacttcaaagctctgcttctcatttaaatataagtttcaacttgaggtcatttatttggtcacacagaacaccacaggctgttcaatacagacaagatacctcttgagctttgctgcctagaagttcatttcaccagatataccctaaatcatcaccctcaagttca

SEQ ID NO: 924847 - DNA, 609 bp, Homo sapiens
acactgaggtttttccttacatactcttgagtctagacaaaggctcccaagcctgtgcacctgctggcttaacactatgtggaagccaccaaggcttgcagcttgcaccctctgaagcagtgacccaagctgtacctgtgcatctttcagccatggctggagctggagctggagctgcagggatgcaggcggcactgtcctgaggatggacacagcagcgcgaccatgggactgacccaggaaaccattctttggtcctagaactcagggcctttgacagcaagctctgctgcaaaggtctctgaaatgccttcaaggcctttttaacattgtcttagctattagcactgggctccattttatgcacatttctgaagccttcttgaattttcccactaaaaatcagcttttctttttgacctcttgggcaggctgyaaatcaaacttcaaagctctgcttctcatttaaatataagtttcaacttgaggtcatttatttggtcacacagaacaccacaggctgttcaatacagacaagatacctcttgagctttgctgcctagaagttcatttcaccagatataccctaaatcatcaccctcaagttca

SEQ ID NO: 924848 - DNA, 613 bp, Homo sapiens
aatgcaaaactgttttatatgcagatttaaggtagtgagcagtcaagtttaaaaaatggttctggtatcctgtagcttctcaataataatatactcttacattccaacagagaaggatggattatgggtttttcaatttgcatcaggcatattaattgcagagtagggcttccacataaaatatcaatgtactggaacaaactgttaatgtaccagaatatgaacacttacattcatttctggagctttaaaaggaatcatccccctcccccgctttttaatatctatacctctggagatggtacagttttttagtcagttaatgagaactatgtaaccaccatttctccaaaaatccctaattagattaagtgcaatagrgctattttagtaatttctgctggggaagaatacaacaagccattagggaaagagaataatttagaaggtttgaaagaaacttattttagagttacttttaagaaacatgacatggaagatcaactttatgtcctagttggaggcagggaggcatactcaacttttatttgcattatatttctcaactatgaagagaatacctaaactagtaaaagtttaattgaaagtttta

SEQ ID NO: 924849 - DNA, 630 bp, Homo sapiens
caagttcaagttctgtgactcactggctctgtaattctgggtaagtctcttgctctccttgagtctcatatcctccttggtaaaatggagaggtagagctattgttagattttgaaggcaaggcaagggttaaagaaagacagagaaagacagttgacggcttcaacagcaacacctttattactagcaaaaccctgcagaggaggaaaccagcttactgccagcaccaactgcctctcacaggctggggtgatcatgggactgggaaggaggggtstgggcggtagagcttgctgcccggcaggatatggcaaggatgttcctgcagtcaggctgttgggcctttgcccgggagggtgcgataaggatgtttctacagtcaggtgatcaggaaggatgcttctcacggccagagttcccaaggaatgtttcattctgaccagggtgtgcaaaacggctgcaggtttacaaaatggtacaggttagactaacagcaacatctcccaggtagacagttctataaagtaaacttcccttgagcacctacactgtaccagacatggtgctaggacccaggccacaggaggaacaggacagatgaggcccctgccatcctggtgctcatgcctg

SEQ ID NO: 924850 - DNA, 630 bp, Homo sapiens
caagttcaagttctgtgactcactggctctgtaattctgggtaagtctcttgctctccttgagtctcatatcctccttggtaaaatggagaggtagagctattgttagattttgaaggcaaggcaagggttaaagaaagacagagaaagacagttgacggcttcaacagcaacacctttattactagcaaaaccctgcagaggaggaaaccagcttactgccagcaccaactgcctctcacaggctggggtgatcatgggactgggaaggaggggtgtgggcggtagagcttgctgcccggcaggatatggcaaggatgttcctgcagtcaggctgttgggcctttgcccgggagggtgcgataaggatgtttctacagtcaggtgatcaggaaggatgcttctcacggccagagttcccaaggaatgtttcattctgaccagggtgtgcaaaayggctgcaggtttacaaaatggtacaggttagactaacagcaacatctcccaggtagacagttctataaagtaaacttcccttgagcacctacactgtaccagacatggtgctaggacccaggccacaggaggaacaggacagatgaggcccctgccatcctggtgctcatgcctg

SEQ ID NO: 924851 - DNA, 842 bp, Homo sapiens
taggaggatcacttaattaactaggcaacacaggtattttagtatattaatcacttccctaggtaggcaagttctaaatcacccttttctcctatatgaggacacatggagctactgttttctgttcccgtgttactctttaatctctgtcagtgttgtacttttgaacttccactttgtaacactgcactacactaaacactatatgtagcaagcattctatacgtttgtagaagattttagtaaatatgtactttcaaatgctatataacacatctgcaacttgttttgcaaactgggggtctgaagtctttggacaagtctgcattccaccacctgccatatgtgctccttaacctggcttccaatctcaaagctgcattcacttattttaaatcttgaggagcaggataggtgttgacaatgtgttacttagaatgttccaagtattccctaatctctgggtcattcctgtcaaaacaggagtgtgactacacagtgaccagsatgcaagctgatgatatttttgcttctaatctgagaaaagaaattgcttttgtgcagactggtatctctagggtgactttgttctaaatgctaatatcttattctaaatatcatcaattgtcaaatatctttgaaataaaattctgcaaaaaaagtacacacttcagaatttctgaataaaaaatatcaaaccatctctttatgatttaaattgtaaataagagctttattgtttgcttttgtttttattttgatggaaataggatgttgaggcaatttcctggagattagacaatgacattattttaaactttttactatccaggaaaaaacat

SEQ ID NO: 924852 - DNA, 587 bp, Homo sapiens
attgctctatccagaactttcaatactatgctgaataggagtggtgacagagggcatccttgtcttgtgccagttttcaagggggatgcttccagcttttgcccattcagtatgatattggctgtgggtttgtcatatattgcttttattattrtgaggtatgttccttcaatacctagtttattgagagtttttaacatgaagggatgttgaattttattgaaaaccttttcttcatctattgagataatcatgtggcttttgtagttctgtttctgtgatgaatcacatgtattaatttgtgtatttcaaacaaactttgcatcccaggggtgaagcctacttgatcgtggtagataagctttttgatgtgctggtggatttggtttgccagtgttttgttgaggacttttgcatcaatgttcatcaaggatgttggcctgaagtttttgttgttgttgtatctctgccaggttttggtatcaggatgatgctggccttatggaatgagttagggaggtatccctcctcctcaattttttggaatcatttcagtaggaatggtaccagcttttctttgtatatct

SEQ ID NO: 924853 - DNA, 650 bp, Homo sapiens
acgcagcttatcacccctcctacttgaaatttacccttcactggactgctgggatgccacttctgtggttctcattttactgcataggcactccttttctatcacctcagcgtctaaatgttgacatactcaggctcaggctcagtccttagacctctcctcttctctggctttaatcacttaatagatgatttcatctagtcttgtaatttccaatttcacatttcacttacattttgaagattctgaagtttatatctccatcccggacttcttccctgaacaacaaactcctttatccaactatctattctataygtcctattggatctctaatagaaagagggataataaaattaagctcccaattttcttccacccacatcaccaaagttgtccctgtcatcatctttgccatatctctaaatggcaactccctttttccagttgctcaggcccaagattttggagtcattcttaaaaacactcttgcttcccactccacattcaatccatagcaaattctgtcagttttactctcaaaatatatgcataatttaaccctgtccactgctaccaccctgactccatcatttctttcttccattattacagtcttcaatcatctctccgcttccacccttgccatc

SEQ ID NO: 924854 - DNA, 631 bp, Homo sapiens
taagcatacttcaacataataaaggccatatgtgacaagctcacagctaatatcatactcaatggtgaaagattgaaagcttttcctctatgatcagaaacaaaacaggatgcccactcaccacttctattcaacataatactggatgtcctggtcaaagcaaataggcaagaaaaaagaataaaagccatccacatagaaaaggaggaagcaacattttctctgtatgcagacagcactatcttacatactgaaaaccctaaaaacccatcaaaaaactattttttttttttgagacggagtcttgctctgtcacccaggctagagtgcagtggcacaatctcggctcactgcaagctctgcctcccgggttcatgccattctcctgcctcagcctcccgagttgctgagactacaggcacscaccaccacgcccggctaattttttgtatttttagtagaggcggggtttcaccatgttagccacgatggtctccatctcctgacctcgtgatccgcccaccttggcctcccaaagtgctgggattacaggcatgagccaccacaccaggcccaaagaactatcataactactaaacacattcagtaaagttgcaggattcaaaatcaa

SEQ ID NO: 924855 - DNA, 631 bp, Homo sapiens
taagcatacttcaacataataaaggccatatgtgacaagctcacagctaatatcatactcaatggtgaaagattgaaagcttttcctctatgatcagaaacaaaacaggatgcccactcaccacttctattcaacataatactggatgtcctggtcaaagcaaataggcaagaaaaaagaataaaagccatccacatagaaaaggaggaagcaacattttctctgtatgcagacagcactatcttacatactgaaaaccctaaaaacccatcaaaaaactattttttttttttgagacggagtcttgctctgtcacccaggctagagtgcagtggcacaatctcggctcactgcaagctctgcctcccgggttcatgccattctcctgcctcagcctcccgagttgctgagactacaggcacccaccaccacgcccrgctaattttttgtatttttagtagaggcggggtttcaccatgttagccacgatggtctccatctcctgacctcgtgatccgcccaccttggcctcccaaagtgctgggattacaggcatgagccaccacaccaggcccaaagaactatcataactactaaacacattcagtaaagttgcaggattcaaaatcaa

SEQ ID NO: 924856 - DNA, 426 bp, Homo sapiens
gaggaagcaacattttctctgtatgcagacagcactatcttacatactgaaaaccctaaaaacccatcaaaaaactattttttttttttgagacggagtcttgctctgtcacccaggctagagtgcagtggcacaatctcggctcactgcaagctctgcctcccgggttcatgccattctcctgcctcagcctcccgagttgctgagactacaggcacccaccaccacgcccggctaattttttgtatttttagtagaggcggggtttcaccatgttagccacgatggtytccatctcctgacctcgtgatccgcccaccttggcctcccaaagtgctgggattacaggcatgagccaccacaccaggcccaaagaactatcataactactaaacacattcagtaaagttgcaggattcaaaatca

SEQ ID NO: 924857 - DNA, 791 bp, Homo sapiens
tgtctgtttccgtctatttccatattgggcaactcttcatattggaattttagtagtgccatttatatgttttcagaaggatatacaggttgaatgtccccaagtccaaaatctgaaatgctccaaaatccagaactttctgagcatcaaaatgatgcttaaaggaaatgctcattggagcattcaattatcagattagggrtgcttaactggtaagtataatacaaatattccaaaatcagaaaaaatcagaaatccaaaacacttgtgatcccacacattttggataaggtatacccaacctgtgcaatatttgatttatgtagccagtctcttgttgttggacatttaggttaggtctaaacatctttggttttctttcatttttttctggactatttttctagactagattcccagaggcaggattatactgctaattttaccatatccttctaactccatccaaaaaagaataataaccagtgaggcataattttctagttttgtcattgccttgccagacgtgtgtgtttaaggggaacaagaggagcctcggtatcgtttatttgcatttctttagtctccactgaagctgagctttttctctgcatgctcaagtactctttgtaacttcctctttgtggctggttcactcctgtcttttgagattggggagaattcagatacacagggaagaggtatggtatggcaaaggaggagagcccagagcatgtttgctggttggtgagaagatgcgtttggggcaggggctggtgtgcttagggaaa

SEQ ID NO: 924858 - DNA, 606 bp, Homo sapiens
atgtttattgcagcactattcacaatagcaaatatatggaatcaatctaagtgcccatcaatgatgagttggataaagaaaatgtggtacatatacaccatggaataccatgcagtcctaataaagaataaaattatgctctttgcaacatcatggatgaggttggacgacattatcctaaacaaattactgtagaaatgtaaaaccaaatacttcatgttctcatttattagtgggagctaaacagtgagtttgcrcagacacaaagttgggaacaataagtactggggattcaaaaaggtgggagggagggagggagagaagggacacattttgagaaactacctatcaggtactctgttcactatttggatgacaggatcattagaagctcaaacctcagtgtcatataatatattcatgtcaaaaacctgcatatgtctcccttgaatctaaactaaaatgttgggttgtgtgtggtgtctcacgcctgtaatcctaacacttgcagaggccaaggcaagaggattacttgagctcaggggtttgaggccagtctgagtaacatatcgagacttcatctctactaaaaatacattttaaaaa

SEQ ID NO: 924859 - DNA, 606 bp, Homo sapiens
atgtttattgcagcactattcacaatagcaaatatatggaatcaatctaagtgcccatcaatgatgagttggataaagaaaatgtggtacatatacaccatggaataccatgcagtcctaataaagaataaaattatgctctttgcaacatcatggatgaggttggacgacattatcctaaacaaattactgtagaaatgtaaaaccaaatacttcatgttctcatttattagtgggagctaaacagtgagtttgcacagacacaaagttgggaacaataagtactggggattcaaaamggtgggagggagggagggagagaagggacacattttgagaaactacctatcaggtactctgttcactatttggatgacaggatcattagaagctcaaacctcagtgtcatataatatattcatgtcaaaaacctgcatatgtctcccttgaatctaaactaaaatgttgggttgtgtgtggtgtctcacgcctgtaatcctaacacttgcagaggccaaggcaagaggattacttgagctcaggggtttgaggccagtctgagtaacatatcgagacttcatctctactaaaaatacattttaaaaa

SEQ ID NO: 924860 - DNA, 606 bp, Homo sapiens
atgtttattgcagcactattcacaatagcaaatatatggaatcaatctaagtgcccatcaatgatgagttggataaagaaaatgtggtacatatacaccatggaataccatgcagtcctaataaagaataaaattatgctctttgcaacatcatggatgaggttggacgacattatcctaaacaaattactgtagaaatgtaaaaccaaatacttcatgttctcatttattagtgggagctaaacagtgagtttgcacagacacaaagttgggaacaataagtactggggattcaaaaaggtgggagggagggagggagagaagggacacattttgagaaactacctatcaggtactctgttcactatttggatgacaggatcattagaagctcaaacctcagtgtcatataatatattcatgtcaaaaacctgcatatgtctcccttgaatctaaackaaaatgttgggttgtgtgtggtgtctcacgcctgtaatcctaacacttgcagaggccaaggcaagaggattacttgagctcaggggtttgaggccagtctgagtaacatatcgagacttcatctctactaaaaatacattttaaaaa

SEQ ID NO: 924861 - DNA, 590 bp, Homo sapiens
cctgacctcatgatctgcccgcctcggtctcccaaagtgttgggattacaggcgtgagccactgcgcctggccgcctgtttgcaatttatcaaccaaagtttattccctgagaggttcctatgtccagtatatttgggaactacctatattccatattttctcagatcagcgtaaggggccaggtctcttttcctatgggattaaagactaattttctagttttaggggcagaactagaagcacattctcattccccctctgagagcatctttacacaataacagactcacaaggcacaagtagacayacacaagctttagcgatgcctcctgtcttctcaagaccctgtgggaaagagaacagagggtctatccaaagaagaagttgaagaattagagtgtctcagcactccagatatgccagcacagagataggtgggtggaattgttccaattatttatgatccccaagaaaactggggactttctctactgtttagagaaggaagcatgggcttcagtagatgcagagtaacagcatggattgggtgtgtattctgttgcctttagctgccctggagagaaggcca

SEQ ID NO: 924862 - DNA, 590 bp, Homo sapiens
cctgacctcatgatctgcccgcctcggtctcccaaagtgttgggattacaggcgtgagccactgcgcctggccgcctgtttgcaatttatcaaccaaagtttattccctgagaggttcctatgtccagtatatttgggaactacctatattccatattttctcagatcagcgtaaggggccaggtctcttttcctatgggattaaagactaattttctagttttaggggcagaactagaagcacattctcattccccctctgagagcatctttacacaataacagactcacaaggcacaagtagacacacacaagctttagcgatgcctcctgtcttctcaagaccctgtgggaaagagaacagagggtctatccaaagaagaagttgaagaattagagtgtctcagcactccagatatgccagcacagarataggtgggtggaattgttccaattatttatgatccccaagaaaactggggactttctctactgtttagagaaggaagcatgggcttcagtagatgcagagtaacagcatggattgggtgtgtattctgttgcctttagctgccctggagagaaggcca

SEQ ID NO: 924863 - DNA, 637 bp, Homo sapiens
gcagcaacttgctagctcttgtcttttttcttcctctccccttcctttttctttttattgtaaagtttcttcaaataaccttagccattggtagtaacaggagcaacctgtattgcaaaacattgtattttcaatattctaattttgcttttagaggaaaaaaattgttgtttaaagaaagctggaaggaactaggtgtggttaactgacctaaaatgttattggaatagttcagatggatagaaacaagaggaatgrcaataagaatgcgagggttttaaatagcacatgttctttttttttttttttttttgagatggggtctcactctgttgcccaggctggagtgcagtggcacgatcttggctcactgcaagctccacctcccgggttcacgccattctcctgcctcagcctcccgagtagctgggactacaggcgcctgccaccaagcctggctaattttttgtatttttagtagagacggggtttcaccatgttagccaggatggtctcaatctcctgacctcgtgatccgcctgcttcagcctcccaaagtgctgggattacaggagtgagccaccacgcctgggcacgtgttctttcttatataacaagcttttcaaattcacaggtt

SEQ ID NO: 924864 - DNA, 632 bp, Homo sapiens
ttcaagaccagcctggccaaaatggtgaaaccctgtctctactaaaaatacaaaaaaaattagctgggtgtggtggtgcatacctataatcccagctactggggaggctgaggcacaagaatcacttgaacttgggaggtggaggttgcagtgagccgaggtcayaccattgcactccagcctggacaacagagtgagaccccatctcaagccccttccccacacaaaaaagagataacaaacataagagcagaactaaatgaaattaaaacaaataaacaaacaaatacaaaagataaatgaaacaaaaaactgattatttgaaaagataaacaacattgatagaccattagcaagattaaccaagaaaagatccaaataagctcaattagaaataaaatgagagatattacaattgataccacaaaaatataaaagctcattcaagactactatgaacacctttacactcacaaactagagaacctagagaagatggataaattcctggaaatatacaacactcctagattaaaccaggaagaaatagaaaccctgaactgaccaataacaagcagtgagattaaaatggtaatttaaaaattgccaacagaaaaatgttcaggaccaaa

SEQ ID NO: 924865 - DNA, 632 bp, Homo sapiens
ttcaagaccagcctggccaaaatggtgaaaccctgtctctactaaaaatacaaaaaaaattagctgggtgtggtggtgcatacctataatcccagctactggggaggctgaggcacaagaatcacttgaacttgggaggtggaggttgcagtgagccgaggtcacrccattgcactccagcctggacaacagagtgagaccccatctcaagccccttccccacacaaaaaagagataacaaacataagagcagaactaaatgaaattaaaacaaataaacaaacaaatacaaaagataaatgaaacaaaaaactgattatttgaaaagataaacaacattgatagaccattagcaagattaaccaagaaaagatccaaataagctcaattagaaataaaatgagagatattacaattgataccacaaaaatataaaagctcattcaagactactatgaacacctttacactcacaaactagagaacctagagaagatggataaattcctggaaatatacaacactcctagattaaaccaggaagaaatagaaaccctgaactgaccaataacaagcagtgagattaaaatggtaatttaaaaattgccaacagaaaaatgttcaggaccaaa

SEQ ID NO: 924866 - DNA, 619 bp, Homo sapiens
tcatccgcagggatcttcaggagggagatggctgatgcagcacaaatttctttcacaggagtatcttgcagaatacagtatgagacgcacaaaggctgcattgagtctttttaagggactgggcctttgtggcattggggtaggagctctccagatagcatctaatgagtagaaacattcaggttgctttttttttccttactggcaaaactgtgtgtgcatcatgaatgaagctggtctcccttatccatatcaaaactaaaccccaattaattggctaaattgggactcaacacctccaggagccatgcggaagaaagccccagcacactttaaagtagcttacctcatatttgatgaaagcaaaacgcttatgaccagtgtgctgctaatacaagtcaacagataawgctgtatgaaaaattatttttcccaatcatagctagcatagtccacattttgcattatactttccccccctttttttaaattttaaacactggtccttttctttcctttttttaaatattaatttaattatacaagacagagtctcagtatgttgccaaggctggtcttcaactcctgagctcaagcgatacatccgtctctgcctccc

SEQ ID NO: 924867 - DNA, 609 bp, Homo sapiens
gccgggcatggtggttcacgcctatgtaatcccagcactttgggaggcggaggcaggagaatcacctgagatcaggagttccagaccatcctggccaacatggtgaaaccccgtctctactaaaaattcaaaaattagctgggcgtggtggtgcatgctggtaattccagcactttgkgaggctgaagcgggtggatcacctgaggtcagaagtttgagaccagactggctaacatcgcaaaaccccgtttctactaaaaatacaaaaacaagccgggcatggtgctacacgcctgtaatcccagctactcgggaggctgaggcaggagaatcacctgaacctggtaggtggaagttacagtgagccaagatcgcaccactgcactccagcttgggtgacagagcaagactctgtctcaaaaaaaaaaaaggaaaaccatagaaggggagagacctgcctcctggcagggctgggactggattcctggatttctgacttcctgccaggttctttccacccctcctagagtttatgatgccagcagtgaggtcgtcatactgcagaaatagttacaggcacctgctggtatgtgcagggcaccttccggg

SEQ ID NO: 924868 - DNA, 609 bp, Homo sapiens
gccgggcatggtggttcacgcctatgtaatcccagcactttgggaggcggaggcaggagaatcacctgagatcaggagttccagaccatcctggccaacatggtgaaaccccgtctctactaaaaattcaaaaattagctgggcgtggtggtgcatgctggtaattccagcactttgtgaggctgaagcgggtggatcacctgaggtcagaagtttgagaccagactggctaacatcgcaaaaccccgtttctactaaaaatacaaaaacaagccgggcatggtgctacacgcctgtaatcccagctactcgggaggctgaggcaggagaatcacytgaacctggtaggtggaagttacagtgagccaagatcgcaccactgcactccagcttgggtgacagagcaagactctgtctcaaaaaaaaaaaaggaaaaccatagaaggggagagacctgcctcctggcagggctgggactggattcctggatttctgacttcctgccaggttctttccacccctcctagagtttatgatgccagcagtgaggtcgtcatactgcagaaatagttacaggcacctgctggtatgtgcagggcaccttccggg

SEQ ID NO: 924869 - DNA, 551 bp, Homo sapiens
aaatataatttcttatgatcccttctcccaagatgctctgagtcccttgactttatcttcttttaaaatttgaagtatatcaggtgcggtggctcacgcctgtaatcccagtacttcgggaggccgaggtggatggatcatgaggtcakgagttcgagaccagcctgagcaacgtagtgaaaccctgtctccactaaaacaaaaattagccaggcagagcggtgcccgcctataatcccagccactcaggaaactgaggcaggagaatcacttgaatcctggaggcagaggttgcagtgagccaagatcacgccactgcactccagcctgggcgatagtgtgagactccgtctcaaaaaaaaaaaattttttttgagatataattcacatacatgcataaaattcaccattttaatacccttctgtggcttttatttattatttttgagacagggtcttgctctgacacccaggctggagtgcagtggtacaatcatagctccctgcagccccaacctccctgggctcaagtgatcctccggcggcctcag

SEQ ID NO: 924870 - DNA, 587 bp, Homo sapiens
tcacttgtccataaactccatgcattttgtccctaaaaatataatttcttatgatcccttctcccaagatgctctgagtcccttgactttatcttcttttaaaatttgaagtatatcaggtgcggtggctcacgcctgtaatcccagtacttcgggaggccgaggtggatggatcatgaggtcatgagttcgagaccagcctgagcaacgtagtgaaaccctgtctccactaaaacaaaaattagccaggcagagcggtgcccgcctataatcccagccactcaggaaactgaggcaggagaatcacttgaatcctggaggcagaggttgcagtgagccaagatcacgccactgcactccagcctgggcgatagtgtgagactccgtctcaaaaaaaaaaawttttttttgagatataattcacatacatgcataaaattcaccattttaatacccttctgtggcttttatttattatttttgagacagggtcttgctctgacacccaggctggagtgcagtggtacaatcatagctccctgcagccccaacctccctgggctcaagtgatcctccggcggcctcag

SEQ ID NO: 924871 - DNA, 637 bp, Homo sapiens
aattcaaacacaaaaatatatgaaaatcaatgaaacgcaaaactcattgtttgaaaaaataaaactgatagactattagctagattcatcgagagagaatacgtcacagaaaacagaattaaaaacatcacataaacacaattaaaaacaaaactacatgaccatctcaatagattcagaaaaatcattcaacgaaatccagcacccctttatgataaaaactctgaataaactaggcatagaagaaaactacttcaaaataataaaagctatagatgaaaaacccacagccaatatcatactgaatgaggaaaagttgaaagcattccscctgagaacaggaacaagacaaggatgaccacgttcaccactcttattctacatagttctataaatactagccagagcaatgagtcaagagaaagaaataaaggccatccaaattggaaaagaggaagtcaagttatcgttgtttgccgataatatgattgaatacctagaaaatcctaagactcctccaaagacacttaggtttgataaatgaattgagtagtctcagattacaaaatcaatgtacacaaatcagtagcacaccaaaaatgaccaagctgagaataaaagcaagaattcaatccct

SEQ ID NO: 924872 - DNA, 703 bp, Homo sapiens
  misc_feature 699: n = A,T,C or G
catagttaataaaaggactttgaagctttcagcaggaatgtgatagcgtctcttgtggagagacagctctgtattggtaatagataacccagaatgaatctgtccgggtgataatggattttcaagtagaaatgtatttgttccccaaataagcatcaagttatctaaagccagtttttaaaagtttatgatactaatattttaattttgctatatgttgataactacattaccayggtttgctattttcctagcacttctatttacctgtagttgtcttcattgtgcttaggattttaggagaaaatatttgtaatttttctcagctagttgttgtcgtaattaattttttataatagcaaatctgaattaagtaggtcaggatttaatttcacaagaaaattctattttgtttatgatttttaaaacacagaaaggatgcttgagaactgaaaccagttattcaaatcagtggcacatttatggcttattagggtaattggtccatgaaataagacattactgccacaagtaaaccttgggggaaatcatcctttttatgtttaaaatggttacctgatttgttaaatatatttcagccctgacatttatgacagtatttaaaactattttggagaattaacaccataagctttatgtacaaaaacagtaggatagtgaaagcttctttggtgccgnctat

SEQ ID NO: 924873 - DNA, 739 bp, Homo sapiens
agaaagactcacaatgcctagtgggcttatttgggttttggaggccacacattcgttacctgggggtgttacttggcccattaatcaagagacctgaaaggcttccagttttgagtggggtccaggacaggagaaggctctgcaacaggtccaaactgctatgcaagttgctctgtcacttgggccatagaacagagcagatctaattgtgcttgaggtgtcagcagcagagagggatgctgttaggagcctttggaagtcccccatagatgaatcacagcagaggcctctaggattttggaggaaggccctgccatcttctgcagataactactttcctttttagaaagagctcttgccctgttactggactttggtagaaactaaacggttggctatgggtcatcaagtcaccatgcgacctgaactacctatcatgaattgagtgctttctgacttgtctagccaaaagtggggcatgcacagcagcattccatcatcaaatggaagtggcatatatgtgatcaggcttgagcaactcctgagggcacaagtaagttatatgaggaagtggcwcaaatgctcatgatccccattcctgccacactgccttctctcccccagcctgcactgatggtctcatggggagttccccaggatcaattaacagaggaagagaagacaagggccctgtttacagatggctctgcacgatatgcaggcaccacctcaaagtggt

SEQ ID NO: 924874 - DNA, 622 bp, Homo sapiens
aaaattggtgacaaataaattttgggaagaggtatgtgaatggacctctccgagtggtcaaaaactgtgaagatatttgtatttcatgtgagtgcttatcaaacggtgacctcagcagaggaggattttaataatcaagtaaacaggatgactcattctatggacaccagtcagcctctttctccagccacccctgtcattgcccaatgagtccatgaaygaagtggccatggtggcagggatggaggatatgcatgggctcagcaacatggacttccattcactgacctggctatggccactgctgagcacctaatttgccagcagcaaagaccagcactgagccctcaatatagcaccattcctcggaatgatcagccagctacttggtggcaagttgattatattagacctcttccatcacggaaagggcagcggtttttcctcaccagaatagacacttactttggatatgggtttgcctatcctgcacacaatgcttctggcaagactacaatccaagaactcatggaatgccttaaccactgtcatggtatcccacatagcattgcctctgaccaaggcactcacttgttggctaaagaaatgcggcagtgggctc

SEQ ID NO: 924875 - DNA, 712 bp, Homo sapiens
ttttcacacagtcctaattcatgacaaatgtacttattttttgtcatatagcctcttttttaattaagagaaccatatcctatttctaacttattactattaatgacagcacaggcatcaaatttcaaggtgacttttttgggcacccctttttcttctgttttggctaacactttaatcatgtcatttatgagcccccacgagtcctcagtccttaatcttatttcaaaaactgtggtcatgggaagctcagatggktcataacacacataacacaggtcatttcctgggttacataccttgtatagaataacattatacaaacaagttattttcagagttccagtacacttataataaccataaaataataggaccatagcaactttttgtcctacctcagtgacttggtgtatacactgggaacagtcctcagtctgaggaaggtcagttgaagtccttactgtacaagttcaaattttaaggaaaatgagtcccatgatgagttttcttatgctttggccatgtgtggaccagtcagcttctggatgtgactggagcagggcttgttgtcctcttcagagtcactttgcaggggttggtgaaactgctactgtccacatacagctcacagtctactgatgttcaaggatggtcttggaggttgggcctgctagaataaactagtccaatacctctacatatttatgtt

SEQ ID NO: 924876 - DNA, 552 bp, Homo sapiens
tgggggtgacatcacatattggcagattccatgatgccccttgagccacaaaaccagcaagttttcattagggatttcaaaaggggagggaggtacgaacaggaagtaagtcacaaagatcacatgctacaaagggcaataaaagatcacaagggcagagmaagatcacaaggtgagggtgaaattagaattactgatgaggttccatgtcccactgggaatgcattgtcattgataagcatcttaacaggaaacagtgttcgagagcagataaccgttctgactagaattcaccaggctggaatttcctaatcctagcaagccttagggcactgcagaagaccagggtgtatttcatcccttatgttcaactgcataaggcagacactcccagagcggccttccataggcctacccctgggaatgcattcctttcccaggtttattccttgctgggaaaagaattcagtgatatttctcctgtttgctttctgcaataagaaaagtatgactctgttctgcccggccctgcaggcggtcagaccttatggt

SEQ ID NO: 924877 - DNA, 664 bp, Homo sapiens
aataaaacaaggattcctgacacaatagattctaacactgccatgggtgtcatagtcactaagtgactttttagtttgctgatcattgatccactagacactaacagctccaatcggatcaatgcaggataacatatgaggaggactttgcatgttaaaaatctactggaaattttacatgaaagagttcattatctgggtaatgtgacctgtgtccaaatgatacatgtggaccatttgtcaggttttttaatggaaaaaaatgaatttttttctaaaagcctaattatgtgataaattccactgccgagaaattgaagccacttgggtgtcatgaatgtgtaaacatgttaattcgagggctgtgttacctaaagaagtatatttcattccactctcttagcttccctttccccaacrgggtcatctcatccatctcctccattcctatggcccaccaacactctgttcttgggtctttctctcttcgtagcctgggccagcttccattttccctaaatccttctttcctgtgctcacagttccttctaagagcttgtctcctaaggccagcatttaacccaaggtccctttgctatcttcattccctggggccctgttgtcatacagttttatcagaagagagcagacagagaagaaaata

SEQ ID NO: 924878 - DNA, 609 bp, Homo sapiens
cagacacacaattattgaaaaaaaaaaactgaactttttcaattaggtaaaagataaatttacagattatagaagctcagtaaattccaagtgtgagcaaacatcattaaaatgagcaagtatgtaatagtcaaagtatttaaagccaaagaaagaatgttttcacaagccagacaaaaatggcatattacatacatgcaaaaaatgtttcaaatatctttttcttgtcagaaattttagatgtgagaagacagttgaaaaatattataaggtaatgcaaggaaagaaactgccaacccacaattctacatccaacaaatgtattcttcagaatatgaaggcaaaatagagacaacctcatacgttccaccattgtgttttggaagcagataatttgttttytagttttacagttctgtggatgaagggactttgccccagtatggatgaaaactaagagtctcacccatacctaatttagatcatttcaatgatgagatttgtaactttttgagttgatattaatgtgacattttttagagttaacgcttaaatgggttaagaatttgggggacatgggtaaatgtattttgcacacgggagaacatg

SEQ ID NO: 924879 - DNA, 648 bp, Homo sapiens
atagcacagcagaaagtttgtcaaaaagttttttttaggaaaaattttattgaaatatatgcatacagaagagtgcattaatcataagtgtatatagccattgaattttcacaaagttaatggcccgtatcactgtatcaagaaaacaggacattaccaggtccctagtcccttccaccttgatccctcgcagtcattgagtcctacaaaaacagaccactttccrcactcccctcatcatggattcgtttggccagtttctgagttttatataaatacaattgtacaggatgtgtatttttctggctcatttctttatttaatgttatttcatgagatccattcatattattaacatatagcagtagtttatcgctttttgttgctttattgtaattgattgcatgattatttgcaatttattcatctattctattgttgacagacatttgggaggttttcaggtttttggttattataagtaaagctgctatgaatcttcttacacacatcttttgagtgtacacaaacatgcaattttgttaggcatttttctaggtatggaagtgctgggtcataaaatatatgtgtttagctttaataaatactgccaaattgttttataaggtgatcatacaaatttatact

SEQ ID NO: 924880 - DNA, 578 bp, Homo sapiens
ttattccaaataaagtaagtccacttaggaagatctgtggagctctctagccttatagcctgcctatcttcatgggcagaatgtctattttaacacagtggagctgggggtagggacagtggcctgcatcttccagagggtgatatccttgstctatgagcagggctttgagcaaggagagtagcccccgatctcaggttgcttttcctgttataaaattcccaccctataagaaagatggggtgggtgcttcagagcccagtattcttggcctgtcattccttgatacagtttggatatgtgacctgtgtaaattccatgttaaaatgtaatctccaatgttggtggtagggccaggtgggaggtgtttgggtcatgcagtcgatccctcatgacttggtgctctcttcaccatagtgagtgaattctaatgatatctggttgtttcaaagcatggggcacttcccccttctcttgctcctgctcccaccacatgatgtgctagctcccactttaccttatgccataagtaaaagctccctcagacctccccagaagcagatgtcagtgtcatgctg

SEQ ID NO: 924881 - DNA, 578 bp, Homo sapiens
ttattccaaataaagtaagtccacttaggaagatctgtggagctctctagccttatagcctgcctatcttcatgggcagaatgtctattttaacacagtggagctgggggtagggacagtggcctgcatcttccagagggtgatatccttgctctatgagcagggctttgagcaaggagagtagcccccgatctcaggttgcttttcctgttataaaattcccaccctataagaaagatggggtgggtgcttcagagcccagtattcttggcctgtcattccttgatacagtttggatatgtgacctgtgtaaattccatgttaaaatgtaatctccaatgttggtggtagggccaggtgggaggtgtttgggtcatgcagtsgatccctcatgacttggtgctctcttcaccatagtgagtgaattctaatgatatctggttgtttcaaagcatggggcacttcccccttctcttgctcctgctcccaccacatgatgtgctagctcccactttaccttatgccataagtaaaagctccctcagacctccccagaagcagatgtcagtgtcatgctg

SEQ ID NO: 924882 - DNA, 778 bp, Homo sapiens
tcatagaaatggacctgaattcaaaggcagaaaattcaggatcaaatgccacttgctgtgtgtggcaattgtgtacctgctcagggcctcagtttccccttctgcaaaataggggtggatgaaaagattcccatcccctatgtcttagtctgggctgctgtaacaaagtgccatagaataggtggcttataaaaacagcagacatttatttcggacagtgctggaggcccgatgtccaagatcaggttgctagcatggcagggttctggcatggcagctctcttccaggttgcagactgctgcagtcacatggcagaaagagaactagagagccctctgaggtccctttacaagggcatgaatcccattcttgagggtccctccctcatgacctaattatctcccaacggccctgcctcccactaccatcacagtgagataaggatttcagcakattaatttcggggggatgcacacatggagtctccaacaccacatcaccattctttaacaaacaggtctagtaggacaatttggaggaaggaaatattttgtagaaaaataataatcactttgtttttagatatactgcatgcatatatttaacttttcacacaagtgcattaatgtgctcatatggatgtgagctcatcttagttctcactttttctctttttgctcagctcctgtcctgactacgggagacctttaaggacctctctagctgtggtggtccacgtttctgaaacaggaaaacttcaagggaaaggtaaacgga

SEQ ID NO: 924883 - DNA, 641 bp, Homo sapiens
ctatgactaaaagggttcaaggtacagctcggactgttgcttcagagggtggaagccccaagccttggcagcttccacatggtgttgagcctacaggtgcacagaagtcaagaactgaggtttgggaacctctgcctagatttcagaggatgtatagaaatgcctgaatgcctaagcagaagtttgctgcaggggcagggccctcatggagaacatctgctagggcaatgtggaagggaaatgtggggtcagagcccccatatagagtccctactggggcactgcctagtggagttgtgagaagagggccactgtcctctagatcccagcatggtagaaccaccaacagcttgcaccgtgcacctggaaaagccacagacactcaayaccagcccttgaaggcagttggaagggagactgtgtcctgcaaagccacaggggcagaggtgcccaagacatgggaacccatttttttgcatcagcatgacctggatgtgagacatggagtcaaaggagatcattttggagctttaagatttgactgccctgctgggttttggacttgcatgggccctatagctcctttgttttggccaatttctcccatttgtaatggctgtatttacccaatgcctgtatcc

SEQ ID NO: 924884 - DNA, 515 bp, Homo sapiens
gctttaagatttgactgccctgctgggttttggacttgcatgggccctatagctcctttgttttggccaatttctcccatttgtaatggctgtatttacccaatgcctgtatccctgttgtatctaggaagtaactaacttgcttttsattttacaggctcataggtagaagggacttgccttgtctcagatgagactttggactatgaacttttgagttaatgttgaaatgagttgagactttggggggctgttgggaaggcatgattggttttgaaacgtgaggacatgagacttgggagaggccagtggcggagtgatatggtttggctctgtgtccccaagcaaatctcatcttgtagctctcataattcccatgtgttgtgggagggacctggtggcagacgactgaatcatgggggcagttctttcccatgctgttctcatgatagtgaatgggtctcatgagatctgctggttttaaaaacaggagtttctctgcacaagctctctct

SEQ ID NO: 924885 - DNA, 601 bp, Homo sapiens
aaaacctcagattcttctcctggctgctctttttctcctagtcttcaaacctgaaattctagagtaagtttttaatgcttccctcatacctgtttaatttcctaattctctaagtaatttcttcccggtatctccacttttctcgttgccttcaccctaatcaggaccttaatacacacacctagattacagcaactgtcttctaaccagtttctctgcctcgggcattctatccctgtcttctaaccagtttatctgcctccggccttctatcckcagccagtctgtcctgtacatttccagtgagtgagtcttcctagatgataatatcactaccctgcccaaacatctttcatggcttcccaaaatccagaggacaaagatgtgtaaacggataatcatggccagccacaagcaaatcctaacctactttttagattcatctcctatgacatgccatgctagccaaactgctgtattagccatactcgaaaatgcttttatgtctttggtcactgttccctaaaagaggacacatgctccattgtcacttctcaccaaatactcccatttcttcaaggcttgtttcaagccccacctc

SEQ ID NO: 924886 - DNA, 610 bp, Homo sapiens
gtgagatcgcgccactgcactccagcctgggtgacagagagtgagactctgtctcaaaaaaataaaaataaaaataaaaatttgaagtttcttagttctccatgtgagggggaaaatgcctacagaccacgcaaccctaaatttttgttgtaggtaatacttaatgctaatgtccacactgtttcttaactcttggcctgccaattgtggtggcttaaaatgaattctacctttctgctttatttcagaagttctggtccgtgttttgtttcataggtttgcagtgttgggatgtaacagagagttggtgattactcagtagtaaaaaaaaaaaaaaaaatttaaaaatcacaggtaggagaattgaggacatagtctacttggtactgactcttttgtgggtggggagggtggggaaaatcacaattgttttycagtgtcacacaggggggctatatttgctacacaatgtggaaaatatgtacattagcctatacacaaaggaagttaaagatataaattgcagagtgagtattaccagctccattttagagatgaagcagcaggaactcaccatcatgtaaatgttctagatgtacccaaaccaagt

SEQ ID NO: 924887 - DNA, 826 bp, Homo sapiens
gggctcctgagtcgggttgggacttggagaacttttatgcctagctggaggatggtaaatgcaccaatcagcaccctgtgtctcattcaaggtttgtgaatgcaccaatcagcactctgtatctagctaatctggtagggacttggagaacctttatgtctagctaaaggattgtaaatacaccaatcaacactctgtgtctagcttaaggtttgtaaacataccaatcagcaccctgtgtctaccttaaggtttgtaaatgcaccaatcagtgctctgtgtctagctaatctaggggggacttggataactttygtgtctagctcagggattgtaaacgcaccaatcagcaccgtcaaaacggaccaatcagctctctgtaaaacagaccaatcagctctctgtaaaatggaccaatcagcaggatgtgcgtggggccagataagggaataaaagcaggctgcctgagccagcagtggcaacccacttgggtcccttttcacactggcgaggctttgttctttcactctttacaacaaattttgctgttgctcactttttgggtttgcactgcttttatgagctgtaacactcaccgtgaaggtttgcagcttcactcctgaggccagcaagaccacaaactcacctggaggaatgaacaactccagaagggaggaacgaacaactccagacacgctgctgtaagagctgtaacactcaccgcgaaggtctgcagcttcactcctgaagccagtgagaccatgagcccaccagaaggaagaaactctgaacacatctgaacatcagaaggaacaaactccggaca

SEQ ID NO: 924888 - DNA, 423 bp, Homo sapiens
tcatttagcaccacagtagtctttttaaaacctaatccatatcatgtcactcccctgccaaaactctccaatgaactttcatctcagaataaaagctagtccttaaaatggtcttcaggccctaaataatctgggagccattacctgactgaatgtgtcagctcctacactttcccgcattcacacrgctatggtcaccaaattccttgctgtttcttttatagtctagacctgctttacatatgctgctgagtttgcacattctgtttcctcactggagtttttcccacagtctgatggttagtttcctcacttcatttggatcttcattcaaaagtcactttttcaatgcggtcttctttggctactcaagctaaaatttaagcaaacaatcttgtttcatcggttctctcagctctatgt

SEQ ID NO: 924889 - DNA, 458 bp, Homo sapiens
tgttggaggcagggcctggtgggaggtgattgggtcatgaatacagatccctcatgcatggtttaacaccatccccatggtgataagagagctctcactcaattatttcacacgagatcaggttgtttaaaagcctgggacctccccgaccccagtctcttgctcccaytctcatcatgtgatgtgcctgctcccccttcactttctgccatgattggaagcttccagaggccctcaccagaagcaaatgttggacccacactttctgtgcagcctgcagaactgtgagccaaagtaaaccacttttccttataaattacccagtctcgggtatttctttatagcaatgcaagaatgagttaattaaaaaattggtactgaggagtagggtgctgttataaagatactagaaaatgtggaagtcgctttggaactgggaaatgagcagaggttggcag

SEQ ID NO: 924890 - DNA, 761 bp, Homo sapiens
gaccccaggtacagctcaggtcactgctccagagggcacaagtcataagcctcggcagcttccacatggtgttaaatctgcagttgcacagaatgcaagtatgaaggaggcttggcagatccccactagatttcagagttgtattggacagtctgggtgtctaggcagaaacttgctgtaaaggcagagcccctagaggatactctacatgggcaatgccaaggggaaatgtggggttggagcctccgcacagagtccccagtagggcactggctagtggaggtgtgggaaggaggccgctgccctccagacctgagaatggtagatccactgagagcttgcctcctgagcctagaaaagctgcaggcactcaacttcaaaccatgagatcagccatgaggctacaccctgcaaagtcacaggggtggagctgcccaaagtcttgggagacactcccttacaccastatgccctggaggtgggacatggagtcaaaggagttgattttggagctttaagattagtgactgccctgttgggtttcagacgtatagggggcctgttgcccctttcttttggctaatttttctcttttggaattagattgtacaccattgtatcctggaattaaataattttgttttttaatctcacaggctattggatggaaggcattcatctccagttgagactaacgacttgggactttggagttaatgctggaatgagttaatatgttgggggaactattgaaaaggcat

SEQ ID NO: 924891 - DNA, 741 bp, Homo sapiens
atggagtcaaaggagttgattttggagctttaagattagtgactgccctgttgggtttcagacgtatagggggcctgttgcccctttcttttggctaatttttctcttttggaattagattgtacaccattgtatcctggaattaaataattttgttttttaatctcacaggctattggatggaaggcattcatctccagttgagactaacgacttgggactttggagttaatgctggaatgagttaataygttgggggaactattgaaaaggcatgattgtattttgaaatggcgagaaggacatgagatttgggaggtaggtggatgaaatgatacgattgggatgtctgtcccctccaaatctcatgttgcaatgtgcgtccttgtgttggaggtgaggtctggtgggaggtgactggatcatgagggtggattcctcatgaataatttagcaccatctccttggtgaaaagtgagctcttactcagttcacaagagatctggttgtttaaaagtctgggacctcccctcttttgctttcttgctcctgctctcacagcatcatgtgcctcctccccctttgccttctgttatgattggaagcttcctgagggccttacgagaagcagttgctggcaccatgcttcctgtacagcctgcagaattgcgagtcaaaataaatcactttcttcataaattacccagccttgagtatttcttcatgacaatgcaagaacaa

SEQ ID NO: 924892 - DNA, 803 bp, Homo sapiens
tgctcgctcgatgccgggcatttcactgagcttctcacgcacattaccttattttccctgtggggtgtactgcattttacaggcgagaaggctgaggctcagagaagcatcctttcaaagggcgcactgctcggtagggggtacggcggggttgaacactctgctgttcagtctcccatgccctctcatctgagaagctgcggctggcggtggctgcagaagtggggttgaggagtgtgataatcatcgtccctggggtacaaactcggcagggcagcccctccggtgaggtccggccaggcctgggggatggcctagactggggtggggtgagccttgcagaaactgttcaggctmctggccgctcactgtcccatttctaggtcacaatgctggccacggcctctgtacaggtgtggccctgcgtcctgtacgaggtgtgtggcgaggtggcaagcaggagcagggatgggcactgctgattcagtagcccacacctgtgcctggggccgtgggggcggctcctctgcctctgtgttgttttttcgtgtggctgctgggagtgtgtctgctctaggaggtggtggccggtgagtcagacagtggagtgaccatccactcctccccgatgctagcctgcccaccagaccagggactcgtccacaccctcaaaggcccctgcgctaagagacaccaggccacttcatcctggactctgtggggcacagggctgggctaacacctaggagggcatttgtttattctttgagtatctgctgtgcaccaggacactgataggcgca

SEQ ID NO: 924893 - DNA, 803 bp, Homo sapiens
tgctcgctcgatgccgggcatttcactgagcttctcacgcacattaccttattttccctgtggggtgtactgcattttacaggcgagaaggctgaggctcagagaagcatcctttcaaagggcgcactgctcggtagggggtacggcggggttgaacactctgctgttcagtctcccatgccctctcatctgagaagctgcggctggcggtggctgcagaagtggggttgaggagtgtgataatcatcgtccctggggtacaaactcggcagggcagcccctccggtgaggtccggccaggcctgggggatggcctagactggggtggggtgagccttgcagaaactgttcaggctcctggccgctcactgtcccatttctaggtcacaatgctggccacggcctctgtacaggtgtggccctgmgtcctgtacgaggtgtgtggcgaggtggcaagcaggagcagggatgggcactgctgattcagtagcccacacctgtgcctggggccgtgggggcggctcctctgcctctgtgttgttttttcgtgtggctgctgggagtgtgtctgctctaggaggtggtggccggtgagtcagacagtggagtgaccatccactcctccccgatgctagcctgcccaccagaccagggactcgtccacaccctcaaaggcccctgcgctaagagacaccaggccacttcatcctggactctgtggggcacagggctgggctaacacctaggagggcatttgtttattctttgagtatctgctgtgcaccaggacactgataggcgca

SEQ ID NO: 924894 - DNA, 589 bp, Homo sapiens
atacagccagtattaaaaattaaataaattatgttaaaagcaaaagtaatccatatggaatgaatacttatcatatcttaaatattttgctacattttattaatatcaatgctattaggatatttatgactttcatttatatggtattatctttatatatatttgtgcatatatatgcacatctctttttatctccatgatrattgacatcacattggtagcatgaaattgaccatagcgggaatatttacactatggaaagtggcaaatgctacaaaacaggttgttgttttttctagagtgccaggtgtaaaacatttaccaatacacctgggggtagaatgcactcgtgaaaccacttgatcctggagttttctttatgaaaaaggtttcactttttaaaaactatgaatgtaattcctttaacagacataagatattcaaattatttcttattgaatgaccttcatagtttgtgtttcaaagattatgtccattttatcatctaagtcactgaatttattggcatgtagttgtttataatatctccttaggtttttttcaatgtttgtaggatctgtagtgatat

SEQ ID NO: 924895 - DNA, 589 bp, Homo sapiens
atacagccagtattaaaaattaaataaattatgttaaaagcaaaagtaatccatatggaatgaatacttatcatatcttaaatattttgctacattttattaatatcaatgctattaggatatttatgactttcatttatatggtattatctttatatatatttgtgcatatatatgcacatctctttttatctccatgatgattgacatcacattggtagcatgaaattgaccatagcgggaatatttacactatggaaagtggcaaatgctacaaaacaggttgttgttttttctagagtgccaggtgtaaaacatttaccaatacacctgggggtagaatgcactcrtgaaaccacttgatcctggagttttctttatgaaaaaggtttcactttttaaaaactatgaatgtaattcctttaacagacataagatattcaaattatttcttattgaatgaccttcatagtttgtgtttcaaagattatgtccattttatcatctaagtcactgaatttattggcatgtagttgtttataatatctccttaggtttttttcaatgtttgtaggatctgtagtgatat

SEQ ID NO: 924896 - DNA, 589 bp, Homo sapiens
atacagccagtattaaaaattaaataaattatgttaaaagcaaaagtaatccatatggaatgaatacttatcatatcttaaatattttgctacattttattaatatcaatgctattaggatatttatgactttcatttatatggtattatctttatatatatttgtgcatatatatgcacatctctttttatctccatgatgattgacatcacattggtagcatgaaattgaccatagcgggaatatttacactatggaaagtggcaaatgctacaaaacaggttgttgttttttctagagtgccaggtgtaaaacatttaccaatacacctgggggtagaatgcactcgtgaaaccacttgatcctggagttttctttatgaaaaaggtttcactttttaaaaactatgamtgtaattcctttaacagacataagatattcaaattatttcttattgaatgaccttcatagtttgtgtttcaaagattatgtccattttatcatctaagtcactgaatttattggcatgtagttgtttataatatctccttaggtttttttcaatgtttgtaggatctgtagtgatat

SEQ ID NO: 924897 - DNA, 557 bp, Homo sapiens
gcaggacaatggtgtgaacccaggaggtggagcttgcagggagccgagatcacgccactgcactccagcctaggcgacagagcgagactccgtctcaaaaaataaataaataaataaatagataaataaataaataaattgcccattygtatagtgagctgttttcttgagtgttgagagttctttataccagtaagatacaaatcttacatcagatacatgtttatgaaaatattttctcccagcctctagttttttaattaacagtttctcttgaagagcaaaaatttaaaattttgatgaaatccaattggttatgttgttcttttaatgattctttttggtggtcatatctaggaaagctttgcctaatgcatggtcacaggtgttttcttacacattgtttttatagttttaagttttatatttaactctatgttcaattttgagttaatttttgtatataatatgagatatagatcaaaggggttttttgttttatttttgcgtgtgaatatctagttgttccagtatcatttgttgagcagacttctttc

SEQ ID NO: 924898 - DNA, 626 bp, Homo sapiens
cttcttcttcttcttcttcttctttttttgagacaaagtcttactctgtcgcccaggctggagtgcagtggtgtgatctcggctgactgcaacctccacctcccaggttcaagcgattcttctgcctcagcctcccaagtagctgggactacargtgcgtgccaccacgcctggctaattttttgtatttttagtagagatggggtttaaccgtgttagccaggatggtcttgatctcctgacctcgtgatccacccaccttggcttcccaaagtgctgggattacaggtgtgagccaccgcgcctggcctcagttctttttacatggtctctttatttatgacgtattttcagtgttgttggttttcaattatgagtggaaacaagtcaaaaatatatcatcaggacactgtgtgtttattttggaagaattttctggctagctaagtgggaggaatactacactaatcccaaaaataaaaatcgctactgtccattttgagctagggcttgggcttgggagacctgagctcagttctggaatgcagagtcctctcaagagggcagagcgtcgaccctgcctctgtggctcacagtcatcatgacctgaggattagggttctcct

SEQ ID NO: 924899 - DNA, 626 bp, Homo sapiens
cttcttcttcttcttcttcttctttttttgagacaaagtcttactctgtcgcccaggctggagtgcagtggtgtgatctcggctgactgcaacctccacctcccaggttcaagcgattcttctgcctcagcctcccaagtagctgggactacaagtgcgtgccaccaygcctggctaattttttgtatttttagtagagatggggtttaaccgtgttagccaggatggtcttgatctcctgacctcgtgatccacccaccttggcttcccaaagtgctgggattacaggtgtgagccaccgcgcctggcctcagttctttttacatggtctctttatttatgacgtattttcagtgttgttggttttcaattatgagtggaaacaagtcaaaaatatatcatcaggacactgtgtgtttattttggaagaattttctggctagctaagtgggaggaatactacactaatcccaaaaataaaaatcgctactgtccattttgagctagggcttgggcttgggagacctgagctcagttctggaatgcagagtcctctcaagagggcagagcgtcgaccctgcctctgtggctcacagtcatcatgacctgaggattagggttctcct

SEQ ID NO: 924900 - DNA, 626 bp, Homo sapiens
cttcttcttcttcttcttcttctttttttgagacaaagtcttactctgtcgcccaggctggagtgcagtggtgtgatctcggctgactgcaacctccacctcccaggttcaagcgattcttctgcctcagcctcccaagtagctgggactacaagtgcgtgccaccacgcctggctaattttttgtatttttagtagagatggggtttaaccgtgttagccaggatggtcttgatctcctgacctcgtgatccacccaccttggcttcccaaagtgctgggattacaggtgtgagccaccgcgcctggcctcagttctttttacatggtctctttatttatgacgtattttcagtgttgttggttttcaattatgagtggaaacaagtcaaaaatrtatcatcaggacactgtgtgtttattttggaagaattttctggctagctaagtgggaggaatactacactaatcccaaaaataaaaatcgctactgtccattttgagctagggcttgggcttgggagacctgagctcagttctggaatgcagagtcctctcaagagggcagagcgtcgaccctgcctctgtggctcacagtcatcatgacctgaggattagggttctcct

SEQ ID NO: 924901 - DNA, 746 bp, Homo sapiens
caagttggacaaacattgacataagtctgaaggcagtatctttcccatgaggttttgcaaacaggagccttagaactgtaagatttaaaggatggtggggggtggggggggtacactaggaaagacctgggctgtggagtctgctattcttggctttatttattatttgacatgtgaccttgggcaagtcacttttcctagcttcagttgtcatatcttaataatggacccagtattatctacctagttgagtggtagtagcaagttttgatcatgataaagatgacagtttctcaccaaggcagaaatcagcaaaagttagtttcattctttccaagtggtcattccctgatggaacttctcatccccgggaggtcatctgcacaggatgcactgggctccatccctcctcctttgcagagctcaccctcactttccaaaggctttgcaagatgctggaaatagaggagaattgcccatgtgctttgtcttagggtagctttgccctatccactcttgaggaagaaacagtgtgatatctggcctacttaagcatcatacggaatcaggatgggcccagttctccaaccctccagccctcctstccttgctggttgggaccatttgaccccattgagagggttcagctctgtctggcctgggaatctgcctctactcagggaaaattcagcattaccttcttgataaaatgcttgctgcttcttttagctcctctaggaaaatgg

SEQ ID NO: 924902 - DNA, 708 bp, Homo sapiens
ctctcggcagaaaccccacaagccagaagagagtggggaccaatattcaacattcttaaaggaaagaattttcaacccagaatttcatatccagccaaactaagcttcataagtgaaggagaaataaaatattttacagacaagcaaatgctgagagattttgtcaccaccaggtctgccctaaaagagctcctgaaggaagcactaaacacggaaaggcacaaccggtaccagtcactgcaaaaacatgccaaattgtaaagaccatcgagactaggaagaaactgcatcaactaaygagcaaaatcaccagctaacatcataatgacaggatcaaattcaaacataacaatattaaccttaaatgtaaatgggctaaatgctccaattaagaaacacagactggcaaattggataaagagtcaagaacccatcagtgtgctatattcaggaaacccatctcacgtgcagagacacacataggctcaaaataagagggatggaggaagatctaccaagcaaatggaaaacaaaaaaaggcaggggttgcaatcctgtctctgataaaacagactttaaactaacaaagatcaaaagagacaaagaaggccattacataatggtaaagggatcaattcaacaagaagagctaactatcccaaatatatatgcacccaatacaggaacacccagattcataaagcaagt

SEQ ID NO: 924903 - DNA, 708 bp, Homo sapiens
ctctcggcagaaaccccacaagccagaagagagtggggaccaatattcaacattcttaaaggaaagaattttcaacccagaatttcatatccagccaaactaagcttcataagtgaaggagaaataaaatattttacagacaagcaaatgctgagagattttgtcaccaccaggtctgccctaaaagagctcctgaaggaagcactaaacacggaaaggcacaaccggtaccagtcactgcaaaaacatgccaaattgtaaagaccatcgagactaggaagaaactgcatcaactaatgagcaaaatcaccagctaacatcataatgacaggatcaaattcaaacataacaatattaaccttaaatgtaaatgggctaaatgctccaattaagaaacacagactggcaaattggataaagagtmaagaacccatcagtgtgctatattcaggaaacccatctcacgtgcagagacacacataggctcaaaataagagggatggaggaagatctaccaagcaaatggaaaacaaaaaaaggcaggggttgcaatcctgtctctgataaaacagactttaaactaacaaagatcaaaagagacaaagaaggccattacataatggtaaagggatcaattcaacaagaagagctaactatcccaaatatatatgcacccaatacaggaacacccagattcataaagcaagt

SEQ ID NO: 924904 - DNA, 708 bp, Homo sapiens
ctctcggcagaaaccccacaagccagaagagagtggggaccaatattcaacattcttaaaggaaagaattttcaacccagaatttcatatccagccaaactaagcttcataagtgaaggagaaataaaatattttacagacaagcaaatgctgagagattttgtcaccaccaggtctgccctaaaagagctcctgaaggaagcactaaacacggaaaggcacaaccggtaccagtcactgcaaaaacatgccaaattgtaaagaccatcgagactaggaagaaactgcatcaactaatgagcaaaatcaccagctaacatcataatgacaggatcaaattcaaacataacaatattaaccttaaatgtaaatgggctaaatgctccaattaagaaacacagactggcaaattggataaagagtcaagaacccatcagtgygctatattcaggaaacccatctcacgtgcagagacacacataggctcaaaataagagggatggaggaagatctaccaagcaaatggaaaacaaaaaaaggcaggggttgcaatcctgtctctgataaaacagactttaaactaacaaagatcaaaagagacaaagaaggccattacataatggtaaagggatcaattcaacaagaagagctaactatcccaaatatatatgcacccaatacaggaacacccagattcataaagcaagt

SEQ ID NO: 924905 - DNA, 580 bp, Homo sapiens
ttttaacatctcatgtatctatggataacaggttctcaggtgaagcgccaagtatgtcactgaaagcccagtggagttaagtgtgcaaagtcagtctgaacatatgctgtaatggatttgacctcgaatagcactacaaagagaaattgcagataaccatctgaactgacttctgaagcttrtagttctggctcctgagatacagagagaaaagtgagcccaaacaggtgggagcaaacaactcagagagcccagaatgaatacgagtctaactttaaaagtaaataaaattaaataaaaatgatttattctatagctctttgtcttttattggttcccacacaatgtccacacaataaacagttttcagcacatgttatactttttctgatcacattggtgtctgttaaaataaggcccagcactttgggaggccgaggcgggtggatcacgaggtcaggagatcgagaacatcctggctaacacggtgaaactccgtctccactaaaaatacaaaaaattatccgggcgtggtggcggcacctgtagtcccagttactccggaggctgaggcaggaga

SEQ ID NO: 924906 - DNA, 583 bp, Homo sapiens
cacaaccaacacttcaaaagttgaacaaattggactccaaagttttgcttcatctaccatactcatctgacctctcaccaactgacaccacttattcaagcatctcaacaactttttgcagggaaaacgcttccacaccagcaggatgcaggaaatgctttccaagagtttgttgaatcccaaagcatgaagttttatgctacaggaataaacaaacattttttcagccrggcatggtggctcacacctgtaatcccaatactttgggaggctgaggcaggcggatcacaaagtcaggagtttgagaccagcctgacgcaacatggtgaaaccccgtctctactaaaaatacaaaacttagctgggcatggtggcacgccgcctgtatcccagctactcaggaagctgatgcagaagaattgcttaaacctgggaggcagaggttgcagtgagccaggatcgcaccactgtactccagcctgggcgacagagtgagactctatctcaaaaaaaaaaaaaaaattattggcaaaaaaatgttgatcataatcgttcctattttgattaataaagatgtgtttga

SEQ ID NO: 924907 - DNA, 609 bp, Homo sapiens
gacagcatgctggcagcccttgcaagccctaggtctctcttggtgcctcctcggccttggcacccactctggccatgcttgaggagcccttcagcctgccactgcactgtgggagcccctttctgggctggccgaggtcagagctggttccctctgcttgcggggaggcatggagggagaggtgggggcgggaactggggctgcgtgtggtgcttgcgggccactgcgagttctgggttgagatgggctccatgggccctgcactcggagcagccggctggcgccacgccaggcagtgagaggcttagcacctgggccggtagctgtggagggtgctccgggttccccagcagtgccgggccggcgcttcgctcaaattctcactgggccttagctgcctcccygtggggcagggctcgggacctgcagcctgccatggccgagcctcccaccaccgtgggctcccgcatggcccaagcctccccgatgagtgccgccccctgctccgtggcaccgaggcccttcgaccacccaagggctgaggagtgtgggcatgtggcgtgggactggcctgcagctccacctgtggccctggtgcgggatctacta

SEQ ID NO: 924908 - DNA, 516 bp, Homo sapiens
tgcctttgcagggacatggatgaagttggaaaccatcattctcagcaaactaacacaggaacagaaaaccaaacaccacatgttctcactaataagtgggtgttgaacaatgagcacacatggacacagggagaggaatgtcacacactgggacctgtcatggggtggggggctggggaagggatagcattagcagaaatacctaatgtagatgacgggttgatgggtgcagcaaaccaccrtgacacatgtatacctatgtaacaaacctgcaccttctgcacatgtgtcccagaacttaaagtatgtatttataaaaaagaaatgaatgatagatgttataaatatatcttccatcaaataatgtctttggttttgtaaaatcctttacaattttcaggttatttcatgtacattttcttaaagtagttctgcaagttatatagtagaagaaggaattggatcagtgtcagttacatataaaaaatgtggtcaattaaaattttattttacgat

SEQ ID NO: 924909 - DNA, 822 bp, Homo sapiens
atgttccagctgccatatagaaatttttattttgggactcattgggtcacattttaatgatgtactgtaacaagaagaatttcaaaataatgttttttttattagttaaattcattttttaattatcattatactttaacttctgggatacatgtgcagaatgtgcagtgtttgttacatagctatacatgtgccatggtggtttgctgcacctgtcaacccatcatctacattaggtatttctcctaatgctatcctgtcccctagtcccccaccccctgacaggccccaatgtgtgaagttcgcctccctgtgtccatgtgttctctttgttcaactcccacttatgagtgagaacatgtggtgtttggttttctgttcctctgttagtttgctgagaatgatggtttccagcttcatacatgtccctgcaaaggacatgaattcattcttttttatagctgcatagtattacatggtgtatatgtgccacattttctttatccagaccatcattgatgggcatttgggttggttccaagtctttgctattgtaaacagtgctgcaataaacatacgtgtgcaagtttctttgtagcagaatgatttataatcctttgggtrtatacccagtaatgggattgctgggtcaaatggtatttctggttttagatccttgaggaatctccacactgtcttccacaatggttgaactaatttacactcccaccaacagtgaaaaagtgttcctatttctccacatcctctccagcatttgttgtttcctgactttttaatgatcaccattctgactggcttgag

SEQ ID NO: 924910 - DNA, 568 bp, Homo sapiens
cttgcttcttaaagacccagtccttgctctgcatccttgagtcacttctatctttggttccagggctgagaggtgttcctttgaagacaaacaaataagtcccttttctcttttcattcattgggcctcattagactaatctccacttcttgaaatattatttctcactagattcctctttccagaaagtccaaactgggttgtcttattccatttgagctgccacaacamaatactataaactgggtggcttataaataatgaaaatgtatttctcacagctcccgaagtcgggaagtccaaactcagggcagattcagggtctggtgaggatctgctttctgcctatagacagtgccttcttgctgtgtcctcacatggtgaaaggggtgggggtctccctctagcctttttgatgagggcattaatcccatacatgaggactgctctgatgacctaatcacctcccagaggcagtacctcataataccgtcaccttgagggctaggatttcaacatgaattttggaggagaaacaaacattcagaccatagaatttcacccttgc

SEQ ID NO: 924911 - DNA, 491 bp, Homo sapiens
tgcagagccttctcctgttctggaccctacttaaaactggcagcctttcgggtcacttgacaaatgggcctgagtaacacacccaaatgaggaatgtgttgcctccaaaatccacataggcccactacgcactgtggcttcttcttggctgtaggaggggccaaaggcagcaacttatccttcaccttagaaggaatatattgacaggccycacaccactgaaccgctagaaattttactgaggtagaagatccctgaattttagtcggatttatttcccatcctgtggcacgcaaatatctcaccaataagtctagtgtgtttgctacttcttgctcactggatccagtcagcataatgtcatcaatgtaatggaccaatgtgatatcttgtggaagcaaaaagtgatcaacgtctctctgaatgagattatgacacaaagccagagagttggcatacccctgaggtaggacagtaaaggtatattgctg

SEQ ID NO: 924912 - DNA, 491 bp, Homo sapiens
tgcagagccttctcctgttctggaccctacttaaaactggcagcctttcgggtcacttgacaaatgggcctgagtaacacacccaaatgaggaatgtgttgcctccaaaatccacataggcccactacgcactgtggcttcttcttggctgtaggaggggccaaaggcagcaacttatccttcaccttagaaggaatatattgacaggccccacaccactgaaccgctagaaattttactgaggtrgaagatccctgaattttagtcggatttatttcccatcctgtggcacgcaaatatctcaccaataagtctagtgtgtttgctacttcttgctcactggatccagtcagcataatgtcatcaatgtaatggaccaatgtgatatcttgtggaagcaaaaagtgatcaacgtctctctgaatgagattatgacacaaagccagagagttggcatacccctgaggtaggacagtaaaggtatattgctg

SEQ ID NO: 924913 - DNA, 637 bp, Homo sapiens
cattatcaaataaaatctactcggaaaacctgaacaagacacatatggtcttcagtgatctggatagtgtggcctgagtcagtggsatgcacaaggatgcctgagtaaattcagagaaagtatcagctacagtcaggatctagtggaatcttcttgattggatgaggggcccaatgtgatctattcattggaaactccttggtcattggctggagagattttttcccaggcagcatttttagctttggccatggtctggctggaggaaaaccttttccatgctatgttggcatgttcagaccacagaggcagtctatgcatgtaggccagtctaggatggtatccaaatttctcatggatccagaaggcaataggttgaacatctgcttgttctggattagggcacaattcagtctctgagtttagctgacaaacatggtctgctcattgattatattcccctttgtcagtctgagagcctttctggtgatcatcaaccttgataagaaaaccttattaggaatggagcatttttttttctaaatgtctcacccctacagggaagcttgtttatatggcactcagacctgccagtggcctaaccaaatggccaagacattggtcacagcctgtgagt

SEQ ID NO: 924914 - DNA, 592 bp, Homo sapiens
ctgctcagctctcagcagaggggaaaccttggcataagtagctcctgttcacaggcaggtcatcctgtcatctctctgagtctggctgagtctgggggttttatgggcttcagaggggaggaagtgcatgctgattggttcctgggtggccatgsgcagccctggaaaaggcatcataagttctcattctggtccatggaactgacagcccagcccccaggcttcaggccacccctggcttgaaggtggggcttcaccagggacccacccctttctatcctggagcctgtctgcctcctgccctcatccatggcactgaggctgttcttgccaaggggtgcctgcaggtcatctgtgagcttctccgagcatgccccgggcctccctcccatcctcgtcagcactcaaagtccagagtcagcactgtgttgagcgtgcacacacctggctgggttgtggcagcacccaggcttggcctcaattttactctgagattggagcaagcaccaggatcggggagaggccaggcagcaggagcaggcatatgcatacctgtgggggaaggagggccttctctggcccctgagagtgc

SEQ ID NO: 924915 - DNA, 763 bp, Homo sapiens
ttccttttcccccctaacatttaatgtggagtactcagacaggaatctggtttttgttcttccgtgtttaaagtggacttattcttgtgggattcatctatgcagtttgaatattttttgagatttcacataatggtgttttttttttattttaaactttgcttaaaataacatgtactctatttcaagattaaaaactttatttagatttggaaaagttttattaagtgtttttgcatactagctgcagtgcaagaaaagtaaaagcaagaggaaaagaataaaaacgagaaaaatcaaagaccaaaagatttagaacaaaaataagtgataacttgtaagttccagttctgccccgttagttgtgtgttttagagaaagttgtgtaattcctaaactttattttccatagctatgatgattataatccctgctctatgaaatatgtgaattaaataggaaaccagatatgacggtgtctagcatactaccaggtctgaatgtccaaccattagtgaaaaggagaagaaaygacattttaaatatgacctatgatgaagaaagaattttatattgggaaattcagtatcgttagaagattgctgagaaatctatgagaaaaattatattaacaacttgtttaaaatccaagctttattctgctgtttaagaccggatctcattttgttctctgagattttatttggtgtatgaccatgttttaccctcacaattcaattattatgtaagcatattttaaaag

SEQ ID NO: 924916 - DNA, 763 bp, Homo sapiens
ttccttttcccccctaacatttaatgtggagtactcagacaggaatctggtttttgttcttccgtgtttaaagtggacttattcttgtgggattcatctatgcagtttgaatattttttgagatttcacataatggtgttttttttttattttaaactttgcttaaaataacatgtactctatttcaagattaaaaactttatttagatttggaaaagttttattaagtgtttttgcatactagctgcagtgcaagaaaagtaaaagcaagaggaaaagaataaaaacgagaaaaatcaaagaccaaaagatttagaacaaaaataagtgataacttgtaagttccagttctgccccgttagttgtgtgttttagagaaagttgtgtaattcctaaactttattttccatagctatgatgattataatccctgctctatgaaatatgtgaattaaataggaaaccagatatgacggtgtctagcatactaccaggtctgaatgtccaaccattagtgaaaaggagaagaaacgacattttaaatatgacctatgatgaagaaagrattttatattgggaaattcagtatcgttagaagattgctgagaaatctatgagaaaaattatattaacaacttgtttaaaatccaagctttattctgctgtttaagaccggatctcattttgttctctgagattttatttggtgtatgaccatgttttaccctcacaattcaattattatgtaagcatattttaaaag

SEQ ID NO: 924917 - DNA, 719 bp, Homo sapiens
agaatcactaaaacaaagatcacattatacccatcaatctgtctgagtacggattaggtgatatggtttggctgtgtccccacccaaatctcatctcaaattctaatctgaattgtaatccgcaagtgttgagggagggacctggtgggaggtgactaggtcatgggggcagtttcctccatgctgttctcmtgatagggagtgagttcttatgaaatctggttgtttgataagtctctggtgctttccccttctctctctacctcctgctgcctgggaagaaggtgcttgcttctccttttccttctgccatgattgtaagtttcctgaggcctccctgtcaatgtggaaatgtgagtcaaataaacttcttttgtatataaattatccagtctcaggtagtatctttatagcaatgtgaaaatggactaatacaggaattggtaccacgtgtttggagcactgctgttaatataaagataacctgaaaatgtggaagtgactttgtaactgggtaactagcataggtcataaaaatttgcagggctcagaagaagacagaggtatgtgggaaagtttgtaacttctagagacttgttgaatggttttgaccaaaatgctgatagagatatggacaatgaagtccatgctgagatggtctcagatggacatgaggaatttattgcaaactggagcaaaaatcactgctactatgcttt

SEQ ID NO: 924918 - DNA, 716 bp, Homo sapiens
agatcacattatacccatcaatctgtctgagtacggattaggtgatatggtttggctgtgtccccacccaaatctcatctcaaattctaatctgaattgtaatccgcaagtgttgagggagggacctggtgggaggtgactaggtcatgggggcagtttcctccatgctgttctcatgatagggagtgagttcttatgaaatctggttgtttgataagtctctggtgctttccccttctctctctacctcctgctgcctgggaagaaggtgcttgcttctccttttccttctgccatgattgtragtttcctgaggcctccctgtcaatgtggaaatgtgagtcaaataaacttcttttgtatataaattatccagtctcaggtagtatctttatagcaatgtgaaaatggactaatacaggaattggtaccacgtgtttggagcactgctgttaatataaagataacctgaaaatgtggaagtgactttgtaactgggtaactagcataggtcataaaaatttgcagggctcagaagaagacagaggtatgtgggaaagtttgtaacttctagagacttgttgaatggttttgaccaaaatgctgatagagatatggacaatgaagtccatgctgagatggtctcagatggacatgaggaatttattgcaaactggagcaaaaatcactgctactatgctttaccaaaaagactg

SEQ ID NO: 924919 - DNA, 575 bp, Homo sapiens
gaattaaaagccatacaaacaatagagaaaataaagaaaaaaataatgcaattgataaacccctagaaatatagaagaaaaaaagatgacaaggcaaaatttctatataaaggctacaaaaaggatatcattatctcaaagactttgaaaaataataatgaagatattatgagcaatattttgtcaataaatttgacaacttggatgaaatgtaaattaaaaaaaaaaaagtaccaaaactgactaaaaaataaacagaaaacccttagggctctacatcaatttaaaatatagtacttttaactgaaaaacttctcagaaaaaaagttctaggcccagatgtctttactagtgaaygttgtcaaacatttaagacagatataaaaatcgtacaaaaatattttcagaagatagagacaaaaagactatcacaaatcattttgtgagaatactattttaaagtaaaacttgagaataacattacaagagagaatattatagaccaatatcgctcataagttaggtgccaaaattaatgtcattaagaaatcaaacattctaatatatgtttataa

SEQ ID NO: 924920 - DNA, 647 bp, Homo sapiens
gaagattaaaatgagacacttccaaatactgcaggttctataaaatctcaataattatataagaatagcactggcacatgtagatagacatttgaaaggaatagaacaaaacccaggaataaaggcaagaatgtaagaattcaatctgtgttaaaggtggcacttcaaatcagtgaaaaaagaatgtattattttaaaaatgctattaggaaaactgattaaccattttgaaaaaaattaatgatgcctatccacaaaataagcataaaaacaaatttctagtggttwaaacacatattattgaagaaggatgatctctcaaataaatagggtcaggataattatcaatacgggaaaaaaggaaattggattcatacctaactccaaacgtaaaagttaactctagacagaatataaacctaaatgtgaaaggaaaaactctaaggcacatgaaaaaaaaaggagaatatatttgtatcacctaggctaggtaaggactttttaaataatatgttaaaggataaaccatataaaaaaagatatattttcctatactaaaattaagaatgttttaaaatatttttaaaaagacaagccaaagagtggaagagtgacttgcaatatgtaaataacacctacaagtcagt

SEQ ID NO: 924921 - DNA, 590 bp, Homo sapiens
ctaagaaaagagagaaaatggaatcatataaaatgttcaattaaaaccacaaaagccagaaaaaaattggaagacaaagatagaagaaaagaacaagagtgatacatagaaagcattaacaaatatgttagatattagtcaaaatatataaataaccactttaaatattaatggtctaaatatagcagtcataagacagagattgccagagtgggtcaaaaaataagacccaacagtgttttgttttcaagaaaccaattttaaataaaagatatatatagatagattaaaagtaaagagggggagaaagatatacaatgktaacactaatcaaaagaaaacagaagcagctatattaatttctgaaacagaagacttcaaagtaaaaagagttaccagataatctggggagaaatggcagataagaagcagaattaacttgcagctcccacttggacagacagagcagcacatggagactcacgtcataaaactttgcttctagaactaccataagaacataccagaaaagctgagagaatccagagaccatatgaaggaaacagattgctgttgcaggctctcagaga

SEQ ID NO: 924922 - DNA, 601 bp, Homo sapiens
cttcatctactctgttgcaatatattgttttggttgatgtatgtgaaaaaaattcagtctcacacagatatacagttggaatacaaggaagtattttaatagctttttcaggtaattttgggatatattttgattctacaaaggcagatggcagtttcttaaaagttaattgtggtgtggatctgaaagcattatcagtgaacatttttcaaatgctattacattaaagtgcactggttgattttgtactttgaatgattttttttactaatgcatgattttgtgatatcaggcattgctcatcttgaaaatatttattcgctgagttaagcaaatattccaagtgttgatgcattttattgtatamtaccatgaaatcattttgttagtgtcttcaccaatctcatcaggaaagtattgcagtattgggaagctgtcaagctcacagtgaaaaatatgttttacaaaattccatctcccccccaaaagctcatcttatcattgatgacaaatgttgtcagttgctttctttgaagtgatagattcactttcctcatttttaggaaagtgtttactatataactgtatatgatgaactata

SEQ ID NO: 924923 - DNA, 650 bp, Homo sapiens
ccctcttcccagagagatgtgctcaggaataggtgcccaacaggaagtatttgattgagagcttatttgtccctccaggagatattcaaggagagcccccatccagaccccaagcgagaagagctaccgtgtctcacagggcccacagcccatcacccacatcatcccacggagggcggggattatgcccagtgtgcagaagggttgacaaaggccaggtaggggaagtggctggctctgcttacatggacccaagactcactccagaacccctgaccttccgctgaaggatctttgcaccaactctcctggccccagtgggtctggctcaccagaagttaggcctggaagggagkaggctgggtggggggacatagaaggcaaaagcagcagtgtcctcacatggaactgttcctccaggtcctttccctgggacccctccctggagagctctccctgctctctctggcttcctttcccttctgtcaaccctaatagcataggttttggtgtcaggcagtcctgcgttggaatctcagattcccagggacagtcatgatttatacgtgttgtcccggtatactaatacatcaaggctccttgtcaccctcaaacatgcgcattaggaccatgcatcatgtgtcccgctt

SEQ ID NO: 924924 - DNA, 763 bp, Homo sapiens
taatctgataaaacggtggcatttacatttcagatctttctttttttttttttttttttttttttgaggtggagtcgccctctgtcacccaggctggagtgcagtggtgcaatctcggctcactgcaacctccacgtgctgggttcaagggattcttgtgcctcaccctcccgagtagctgggattacaggtgcgcaccaccacacccagctaatttttgcacttttagtagagacagggtctcaccatgttggtcaggctggtctcaaactcctgccctcaggtgatccgcccgcctcagcctccaaacgtgctgggattacaggcgtgagccaccgcgcccagccacatttcagatcttgattccatgtttgttcagctctgaggcttatgcctttgggaaggtccaggcagagcatgcagcccaggtcaccctcgggacaygatggctttcagcgtggctcctggtggctgtggtagaagaacgggagccctgaggggatagagctgcaaatctctaatggcagctcccgccatggcggagttggggtggtgaggggggccgtagggcccagaagccccactttggggtagcagtctctgggttgagtagtcaaggcctgatgatccaggggaccctgtcagctttgggggctcagtgagaggccggctctgaccactcggggtggaggggagaggccattcctgggtagacagcttgctcctggtaagtgagccacacaggacatagccatgcatccgc

SEQ ID NO: 924925 - DNA, 657 bp, Homo sapiens
tttccactctcctagacaggaggtcccatgtggattctggaatcagaaaagcctgcttcctgagtttgaatccagtcttcatccttcaactgtgggaccctggacaagaaccaacatcttccagcagagaccaccaagaacacacttgtggttgaataagccaggtttattaattactgcagtgagagagaatacacaccagggtgtcttagtaagagggagttagacaaaacctrtgatagaattggggttggtatgagagatttggggggagggtaagtgtattagtccattttcacgctgctgatgaagacatacctgagactgggaagaaaaagaggttcaattggacttgcagttccacatggctggggaggcctcagaatcatggtgggaggtgaaaggcacttcttacatggtggtggcaagagaaaatgagcaagaagcaaaaatggaaacccctgataaaaccatcagattttatgagacttattcattaccacaagaatagcacaggaaagatcagccccccataattcaattacctccccctgggtccctcccacaacccatgggaattctgagaggtacaattcaagttgagatttgggtggggacacggccaaaccatatcagtaaggaagtggcagtttactt

SEQ ID NO: 924926 - DNA, 563 bp, Homo sapiens
ctgtgtgacctcaggcaagttacttaacctctctgaacccatttctccatctgtaaaaagggaaaaatctaacactcacaagggtgttgtaaaaattcagttaggtaatgcacataaagtgcttagcatggagcctggcacagagattagcctataaatagtagttgctgttattttactgaattgaaaatagtttaaaagataaattagtttaaaacttttatctgtctgtttaaaattgtatgatttgtttcataaatagcataaatggaaactgagacaaaagcaagcartctctcagcttccataaaaccctggactaggtcaccagactggaagttcaaaataaactgatttagtagcagcttatcctcagttgtccagagaggcagagcagggagcttggctctgtaactggattgagggcagcctgatcctggccactccacactgtgggtggtggagttgctggaggccacaacgggtggccaaggccatccagacaggcccctatggacaggaaagagtctactctctggactggatcctttcagtcttgactt

SEQ ID NO: 924927 - DNA, 617 bp, Homo sapiens
gtgtcagtcggcccctactgggcggtgtctcccggttaggctacttgggggtcagggacccacttcaggaggcagtctgtccattctcagatctcaaactccatgctgggagaaccaccactgtcttcaaagctgtcagacaggggcgtttaaatctgcgaagtttctgctgccttttgttcagctatgccctgcccccagagttggagtctacagagtcaggcaggcctccttgagctctggtgggcttcacccagtgcaagcttcytggccgcttcgtttacctactcaagcctcagcaatggcggacacccctcccccagccttgctgccgccttgcagtttgatctcagactgctgtgctagcagtgagtgaggctttgtgggcatgggaccctctgagccaggggtgagatataatctcctggtgtgccatttgctaagaccactggaaaagtgcagtattagggtgggagtgtcccgattttccaggtactgtctgtcacggcttcccttggctaggaaagggaattccccgaacccttgtgcttccctggtgaggcaatgccccgccctgcttcagcttacactccgtaggctgcacccactgtccgaca

SEQ ID NO: 924928 - DNA, 604 bp, Homo sapiens
gaaatgactaagcttagtgagaaaggcaagtcaaaagccaagataagccaaaagctatgcctcttgcatcaaacagccaatttgggaacccaaagaaaatgttcttgaaggaaattgaaagtgtaactccagtgaacccatgaatgatgacaaattgaaacaggcttattgctgatacgaatatagttttagtgatttaaatgaaagatcaaaccagccacaacatcctcttaaaccaaagcccaatccaaggcaaggccctctctacaattctatgaaggctgagatyggtgaggaagctgcagaaaaaagttggacgatagcagagattgatttatggggtttaaggagagaagttgtctccataacataaaagtgcaaggtgaagcataaaatgctgttgtagaagctaaaacaagttatccagatccagctaagatcatggatgaaggtggttatataaacaacagatcttcagtgtaaaagaaacagctttctgtcaaaagaatttgccatctaggactttcatagctagaaaggagaagtcagcactttgctgactttgaagcttcaaagaacaggctgactcccttactagggaata

SEQ ID NO: 924929 - DNA, 623 bp, Homo sapiens
aataaaatacttaggaatgcacttacccattgagatgaaaaatctctacaaggactgctgaaagaaatcacagaggacagaaacaacacatcccatgcccatggttagaaataatcaatactgtgaaaatgaccatactgccaaatcaatctataaattcaatgcaatttccatcaaaatgccaccatcattcttcatagaactagaaaaaacaatcctaaaactcayatgtaaactaaaaagagcctgcatatcccaagtaatgctaagcaaaaacaacagatatggaggcatcactctatctgacttcaaattatactccaaggctatagttaccaaacagcatgctactggtataaaaataggcacatggataaatgaaacagaatatagaacccagaattaatgccaaatacttatagccaacagatatttgacaaagcatacaaaaacataaagtgaggaaagataccctattcaataaatgattctgggacaactggcaagccacatgtagaataataaaactggatcctcgtctctcatctcatgcaaacatcaactcaagatgaatgaaagtcttttacttaagacatgaaaccataaaaatcctagataataaa

SEQ ID NO: 924930 - DNA, 623 bp, Homo sapiens
aataaaatacttaggaatgcacttacccattgagatgaaaaatctctacaaggactgctgaaagaaatcacagaggacagaaacaacacatcccatgcccatggttagaaataatcaatactgtgaaaatgaccatactgccaaatcaatctataaattcaatgcaatttccatcaaaatgccaccatcattcttcatagaactagaaaaaacaatcctaaaactcatatgtaaactaaaaagagcctgcatatccmaagtaatgctaagcaaaaacaacagatatggaggcatcactctatctgacttcaaattatactccaaggctatagttaccaaacagcatgctactggtataaaaataggcacatggataaatgaaacagaatatagaacccagaattaatgccaaatacttatagccaacagatatttgacaaagcatacaaaaacataaagtgaggaaagataccctattcaataaatgattctgggacaactggcaagccacatgtagaataataaaactggatcctcgtctctcatctcatgcaaacatcaactcaagatgaatgaaagtcttttacttaagacatgaaaccataaaaatcctagataataaa

SEQ ID NO: 924931 - DNA, 597 bp, Homo sapiens
ggttcaagtgattctcctgcctctgcctcccgagtagctgggattacaggcacctgccaccctacccagctcttatatatatatatatatatatatacatatatatattctctgtatatatatatatatacatacatatatatattttctgtatatatatatacawacacacatatatatttcctgtatatatatatacatacatatatatcttttctgtatatatatatatacacatacatatatatatatatatattttttttttctgtatttttagtagagacagggtttcaccatcctggccaggctgcgtttcaaactcttgacctcaagtgatccgtctacctcggcctctcaaagtgctaggattacaggcatgagccaccactcttggccttaaagcaaatttttaaactacagagaaaccaaataataaaactgaatgtagttttaccctaaaactcaaaaaactttttaaaaacataaaaaaaatctttaaaaaagagcacaatttaagattaagtttggatcagtaccgtgacaccagtctgaataggactagaatagctactgaaagcacaaattggatttgtcc

SEQ ID NO: 924932 - DNA, 597 bp, Homo sapiens
ggttcaagtgattctcctgcctctgcctcccgagtagctgggattacaggcacctgccaccctacccagctcttatatatatatatatatatatatacatatatatattctctgtatatatatatatatacatacatatatatattttctgtatatatatatacaaacacacatatatatttcctgtatatatatatacatacatatatatcttttctgtatatatatatatacacatacatatatatatatatatattttttttttctgtatttttagtagagacagggtttcaccatcctggccaggctgcgtttcaaactcttgacctcaagtgatccgtctacctcggcctctcaaagtgctaggattacaggcatgagccaccactcttggccttaaagcaaatttttaaactamagagaaaccaaataataaaactgaatgtagttttaccctaaaactcaaaaaactttttaaaaacataaaaaaaatctttaaaaaagagcacaatttaagattaagtttggatcagtaccgtgacaccagtctgaataggactagaatagctactgaaagcacaaattggatttgtcc

SEQ ID NO: 924933 - DNA, 597 bp, Homo sapiens
ggttcaagtgattctcctgcctctgcctcccgagtagctgggattacaggcacctgccaccctacccagctcttatatatatatatatatatatatacatatatatattctctgtatatatatatatatacatacatatatatattttctgtatatatatatacaaacacacatatatatttcctgtatatatatatacatacatatatatcttttctgtatatatatatatacacatacatatatatatatatatattttttttttctgtatttttagtagagacagggtttcaccatcctggccaggctgcgtttcaaactcttgacctcaagtgatccgtctacctcggcctctcaaagtgctaggattacaggcatgagccaccactcttggccttaaagcaaatttttaaactacagagaaaccaaataawaaaactgaatgtagttttaccctaaaactcaaaaaactttttaaaaacataaaaaaaatctttaaaaaagagcacaatttaagattaagtttggatcagtaccgtgacaccagtctgaataggactagaatagctactgaaagcacaaattggatttgtcc

SEQ ID NO: 924934 - DNA, 595 bp, Homo sapiens
agatacaatgagggtataggcattgggcaaatattccctttccaaaagggaaaaactgaccaaaacaaaggggctataggccccatgaaagtctgaaacccaacatggcagtcattacatcttgcagctctaaataatctcctttgactccatgtcttacatctaggccacactaatgcaagccggactgatttcatgggctggcattgagtgcctgaggcttttctaggtgcatggtatagcttttggtgggcctaccattctgggktctggaggatggtggccctcttctcacagctccattgccattgcttcagtgggtactgtgtgcaggggctccaaccccacatttcctttccacgttgccctagtagaggttttccatgacggctctgcccctgcagcaagtttctgcctagaaatccagtcatttccatacatgctctgaaatctaggcagaggctcccaagcctcaactcttgtcctctgcacacatgcagtcgtaacaccatgtggaagccaccaaggcttatggcttgcaccctctggagcagtggcctgagacatatctggggaccttttagccatggttaga

SEQ ID NO: 924935 - DNA, 535 bp, Homo sapiens
atgtattgacatggattttttttatactttcatatatatgttctgggatccatgtgcagaacatgcaggtttgttacataggtatacacgtgccatggtggtttgctgcacccatcaacccccttcatctacattaggtatttctcctaatgctatctctcccctagctccccactcccgacaggccctcgtatgtgatgttcccctccttgtgtccatgtgttctcattgttcaactcccacttatgagtgagaacatgtggtgtttggttttctgttcctgcgttagtttgctgagaatgatggtttccagcttcatccatgtccctgcaaakgacatgagctcatccttttttatggctgcatagtattccgtggtgtatatgtgccacattttctttatccagtctatcattgatgggcatttgggttggttccaagcctttgctattgtgaacagtgcctcaataaaagatttgattcaaaaacattttaggaaataacacagtgtgaagcgggaggttgagaagggcag

SEQ ID NO: 924936 - DNA, 875 bp, Homo sapiens
gccttctccccacagaaaatactttcggaggattcccccgaccccaggatgtagccacctctcccctgtgtcggcttcactctgcaggtctcggcaaggagcacccctgtccacactgaacaagaagcccctggacccttccgagtggccatcacctgatccacggccacatcctccacgggaagccacggttcacgtcaatcccggcaccaaggtcccagaattcacagcttctgggctcggtcccgcaagaccacccccccatgagggccagtgcagatggacagccaggccacctgcatttcttcccagccagcgacaaactcggctgcccacaacctcctcgggtgcaatttttctttggatgacacagaacttgggaaagcacttcactcaccatcactagctcttataaaggacacagctcaaggagagccaaactgagggacgcacggggcagggtgcagggcacacgtcacacctgccctgggtgcaccaggctccctgcacctccacgtgtctgccaacctgcgagctccatgaacctctcacttagttctctatgcaggtttcacgtacataggcatgatgrattaaatcactggccattggtgattaaccccccaagagttgggggggcctgaaaggcccaaccatctaatggtgccttggcctttctggccaccagccccaccctgaagccagccagggctcccagccacctctcagcacacaaaagacactcatcgccccagagactccaagggtctcaggagccaggaaccagacacaaactccaaatacatacgttattattaacccacacacagatgatacaaaacttctttttcaccctccaatgctcagtgctgagc

SEQ ID NO: 924937 - DNA, 563 bp, Homo sapiens
catatctccccactagaccaccgttgctgtcagaaccacagagccagctagccccatccctgccagcaacccactcttgcaccaacactaccgtgggagtgaaactaggcacagagaacagtggaccttcccctgccctgagcaaccactcctgcctgtggtgcacaaagagcacacacagacttgtgctgtcagctccctgcccccatgctaacactactaccagcaaatctcactcacagttttaagcaagggcccccaaccccacagccgtgctgcctccaccactggagtgaatccccacatggaagcaggcaccccggcacccactagcatcctgcagcagccaacgagtatgcaccctgctgcactgctgctgctgcggctgctgctgctcatacttgtgaaaaagwaaggattcaactgccacctcactacaaaatgctttgggtggacccactggagttcaatgacaaacggtccaggagcacctcatcacccccctcccctacaaccagtgcagtggattcctaacctctaggagctagataacaaagtcaggc

SEQ ID NO: 924938 - DNA, 550 bp, Homo sapiens
cgtctggtactcagctttttttgcttggtaggtgatattgttaggctttgtgtccccacacagatctcatcttgacttgtaatccccataatccccacaagtcaagggagagacaaggtgtagttaattgaatcatggggctggtttgccccatgctattctcataatagtgagtgagttcttacaagatctgatagattcataaggggctcttccccctttactgggcacttcttcttcctgctgccctgcaagaaggtgccttgctttcctttcaacttatttcrtgattgtaagttttctgaggcctcctcagccatgctgaactgtgagtcaattgaacctcttttcctttctaagttacccagtaattattacaagtagaaaacaaacatcatcctgataccaaaacctggcagagatacaaccaaaaaaaaaaaacttgaggtcaatatctctgatgaacatcgatgcaaaaatcctcaataacatactggcaaactgaatccagcagcacatcaaaaaacttatctaccacgatcaagttggc

SEQ ID NO: 924939 - DNA, 649 bp, Homo sapiens
agaaatattttttaataaattatccagtttgtgttattctgttatagcagcaaaagacagactaaaacagtacattggtaccaaggagtggggctgttgctataacaaataactaaaatatgaaagtggctttggaactgaataatgggtcgaggctagaagaatttggagggacagcatggaaaatgctttgttgtcatcaatagacatttaatggtgattctgttgacggctcagatgaccagagctgtagggaaagtctgaatcttcttagagattacctaagtggccatgaccagtatgttagtaaaaatatggacagtggaaggccattatgataaggtctaagatggaaatgrgaaacaaggtataaaaacctggagttaaggtcaatattattataaagtagcaaagagcctggcaaaattatggtatctcctagggctttttggaatgcataacttaagagtgatgaacaaagaactgcctaagaaatatttaagcagcaaagcactcagtctgctttttagctagttttaagtgtgtacagtgagacacgagggcagaaaaaatgacttaaagatggaatctataattaaaaggaaagcagagtagaaaggcttggaaaatttgcagcctggccatgcaa

SEQ ID NO: 924940 - DNA, 653 bp, Homo sapiens
ttacctaagtggccatgaccagtatgttagtaaaaatatggacagtggaaggccattatgataaggtctaagatggaaatgggaaacaaggtataaaaacctggagttaaggtcaatattattataaagtagcaaagagcctggcaaaattatggtatctcctagggctttttggaatgcataacttaagagtgatgaacaaagaactgcctaagaaatatttaagcagcaaagcactcagtctgctttttagctagttttaagtgtgtacagygagacacgagggcagaaaaaatgacttaaagatggaatctataattaaaaggaaagcagagtagaaaggcttggaaaatttgcagcctggccatgcaaagagtgcaaaaaatatgttcagcagaccatattaagagtgtttgtaagggaccactggctaatgagattactatggataaaagaatccaggtcaagataatgagagaaagaaagaccccaaaggtattttagagatcttcaggcttcccctttcatcacaggcccagtgctctagaagggtgagtggtttgaaaggatggtcctggggcaccctccatgcccttgctagtcaaaagcatcttgggtctctgctcctggaattcccacacagtgatccctgg

SEQ ID NO: 924941 - DNA, 639 bp, Homo sapiens
tacttagaaattatttaacaagagaaatgaaagacttctatgctgaaaactgtaatttattgttgagcaaagaatgaataaataaataaatgaagatttacataaaataggagacaatgcatatacttgaattagaagactcaatattgtcaagatttttctcattcccaaattkatcaatagagtcacacaattccttttaaataactagcagtgtttttattttgcagaaattgataacctaacataaaatgaatacagaaatttaaatgatttagaatagccaaaacaattttgataaaagggaatgaaattgaaggacttaatccaatttcaaaacttacaataaagctatagtaatcaatcaaagagagtgtttttagcactaaaacaggcttatagatcaatataacattttaacattggtgccaaaacaatttaaggacaaaatgacactttttttcagcaaataaattgaacagtcacattaaaaaatctgagatccatactgaaaattaaccaaaaatgaatcatagacctcaatttaatagttaacactataaatcttctagattgcaacataacaataaagcattatgatgtaggattggaaaatgagataaatacaacattaaaagc

SEQ ID NO: 924942 - DNA, 790 bp, Homo sapiens
gtttgtttacaccagcatcaccacaaacacatgagtaatgcattgtgctatgatgttaggaaactgtgccatcactcagcaataggaatttttcagctttattacaatcttatgggatcgctgttatatatgcagtccattgttgactaaagcatagttatgtggtgcatgactttatgagaaagcacatagaaatgcttgtaacagtgmctgaaatttcagccactgtatcaatgtggtaaagaaggatgttttactacatctctcaagttatacgcagagctgcttgcccactgtcctagtctgttttctgctgctagagcagtctgtcacagcctgggtaatttacaaggaacaagggtaatttatttggctcatggttctggagcctgggaagtccaggtacatggctctggcatctggcgagaatcacccattgtggaagggtggaaggcgaaagcaagccatgaaagacaaagagaaaaagtgaactcctgagataattaacctactcccaggataacagtgagaatccatttatgacctaatcacctcttaaaggttctgcttcccagtactgttacattagcgattaagtaattaagtttcaacatgaattttggtgggagcattcctaccatagcactcagctcttccagctaaggcttgcctttggtaccctgtcctgttcccaagttatacttatgtagtgggtatgtaggttttcataactactctcctgctttgagtataagtgtttctaaagtgtgctttagaaccacttggaacc

SEQ ID NO: 924943 - DNA, 790 bp, Homo sapiens
gtttgtttacaccagcatcaccacaaacacatgagtaatgcattgtgctatgatgttaggaaactgtgccatcactcagcaataggaatttttcagctttattacaatcttatgggatcgctgttatatatgcagtccattgttgactaaagcatagttatgtggtgcatgactttatgagaaagcacatagaaatgcttgtaacagtgcctgmaatttcagccactgtatcaatgtggtaaagaaggatgttttactacatctctcaagttatacgcagagctgcttgcccactgtcctagtctgttttctgctgctagagcagtctgtcacagcctgggtaatttacaaggaacaagggtaatttatttggctcatggttctggagcctgggaagtccaggtacatggctctggcatctggcgagaatcacccattgtggaagggtggaaggcgaaagcaagccatgaaagacaaagagaaaaagtgaactcctgagataattaacctactcccaggataacagtgagaatccatttatgacctaatcacctcttaaaggttctgcttcccagtactgttacattagcgattaagtaattaagtttcaacatgaattttggtgggagcattcctaccatagcactcagctcttccagctaaggcttgcctttggtaccctgtcctgttcccaagttatacttatgtagtgggtatgtaggttttcataactactctcctgctttgagtataagtgtttctaaagtgtgctttagaaccacttggaacc

SEQ ID NO: 924944 - DNA, 790 bp, Homo sapiens
gtttgtttacaccagcatcaccacaaacacatgagtaatgcattgtgctatgatgttaggaaactgtgccatcactcagcaataggaatttttcagctttattacaatcttatgggatcgctgttatatatgcagtccattgttgactaaagcatagttatgtggtgcatgactttatgagaaagcacatagaaatgcttgtaacagtgcctgaaatttcagcmactgtatcaatgtggtaaagaaggatgttttactacatctctcaagttatacgcagagctgcttgcccactgtcctagtctgttttctgctgctagagcagtctgtcacagcctgggtaatttacaaggaacaagggtaatttatttggctcatggttctggagcctgggaagtccaggtacatggctctggcatctggcgagaatcacccattgtggaagggtggaaggcgaaagcaagccatgaaagacaaagagaaaaagtgaactcctgagataattaacctactcccaggataacagtgagaatccatttatgacctaatcacctcttaaaggttctgcttcccagtactgttacattagcgattaagtaattaagtttcaacatgaattttggtgggagcattcctaccatagcactcagctcttccagctaaggcttgcctttggtaccctgtcctgttcccaagttatacttatgtagtgggtatgtaggttttcataactactctcctgctttgagtataagtgtttctaaagtgtgctttagaaccacttggaacc

SEQ ID NO: 924945 - DNA, 610 bp, Homo sapiens
tgattttgccgactctgtacatcgatttgaagagtactgccatattccaatccgtgaacatgatgtcttttcatttacttaggtcttctttaatttctttcgatgatgctttgtagttttcagtgtacaggtaatttatttctaagtatattactctttttgatgctatttgtaaatggaactgtccttaattttattttgattgtccaytgctagtgtacagaaagaaatacaatagaattttttttttttttaaagatacggtcttgttattttgcccaggctggtcttgaactcctagcttcaagtaatcctccagcctcagcctcccaaaacattgggatttaaggtatgagccactgcacctggcctttttgattttttaagagtcagagtcttgctctgttccccaggctggaaagtggtggtgcgattgtggcccactgcagccttgaaatcctgggctcaagcaatcctcctgcctgagcctcttgagtagctgggactacagaactgtgccaccatggccagctaagagttttgcacattgatcttgtatccttcaattttgcttaacatgtttcttatgggttccttaggattttccaca

SEQ ID NO: 924946 - DNA, 661 bp, Homo sapiens
tataatttacatatcataaaatctacctgtttttagggatacacttcagtgatttctagtaaaaaaaacccagcgcgcaaccatcaccagaatctggtttagaacgtttctgccacccctgaaagattcctcatgcccacctgaaattttcctttccacaccgacgcaaccgcttctccttctatctctacagactggccttttctgagacgccatgtaaaccgaatcaatcacttatagatcttttgtgtctcgcttttttctttttgagagaaggtctgtctctatcgtctaagctggagtgcagtggagtkatcttggctcactgcaacctccacctctcgggctcaaaccacccttccacctcagcctcctgagtagctaggactacacgcgtgcaaccatgcctggctaatttctgtattttttgtagagatggggttttgccatgcggtccaggctggtcttgaactcatgagctcaactgatgcgcatgcttcagcctctcaaattgctggaattacaggcatgagccaccatgcccagcctggtttctttcactgagaactcaacctttatgttaattctatagacttttaagtaaaagaaaacaggaaatggaaataaaaaccaaatctgagtgtgctttgcactgaagaaa

SEQ ID NO: 924947 - DNA, 484 bp, Homo sapiens
aaattattcatcttataactacaggtttataccctttgaccaacatctccccatttctaccacccccagcccctgacaaccaccattctattctattaccatgagttcgactttttaaagatttcacgtagaagtgagatcatgaagtattggtctttctgtgtctgccttattttacttagcataatatcctccatgtttatctgtgttgttacaaatggcagaatttcwttccttattaagtctgaatagaatgtatattccatacacatcacatttggctttatcaattcattcatcaactgatgcttaggctgtttccatatctgggctattgtgaatagtgctgcaatgaacaggggagtgcagacatctctttgatatcctgattttattttgtttggataaatacccaaaagtaagattcaaaatgcagaaaatcctcaacaaagtactaacaaaccaagttcaacaacacattaaa

SEQ ID NO: 924948 - DNA, 642 bp, Homo sapiens
gcagacttgagttaagtttatgattatgaaataaaaactaaataacaattgtcaaaaaaagaaaaaataatcagtcaagattgattgactgaagatctaacaattacaaatatatgtgcacttaacaaacaatacaatcccaaaatacaggagaaaaaaaacctgacagaattgaagaacggcatggacaatttaagaacagatggagactccagtaatccactttcaataatagctataataactaaacataagatcagcaaagaaagacaacactgtagaggacctgaacaacattaaaaaacaaatggagctggcaaacattgacagaacattccacccaacagcagcaagatacatattrtcttcaagaacatatgagatattctccagcataaaccatatgctagtctacataaaagcctcaataaatttaaaagaactgtaattatacaagtacgttttcccaccacaagtaattaatcagaaatcaataacaggaaaatatttggtaaattcacaaacatgtggcaagtaataacatactcttaaataaccaacaaattgaacaataaatcacaagtaaaattggacaatactttgaaatggatggccaatgaaagaaaaattgccaaaacttat

SEQ ID NO: 924949 - DNA, 577 bp, Homo sapiens
agaacatcaggtagacttctaagctttttgactctactccttctctcccagatggcatctttggacccacctgaggcctcagggaacttgtcaccctgaagataaggatgcaagcctggctggctttgcaacctgatgattgtagagccccaggcccttgagcaaacataagccacagccagggagtggttacagcaggccttggggtaagacccagtgctgtagtgacttcagctctgatccagtgcagtcctggtggtgytggcaacagggttgcttgtgtcacaccacccctgcttcctggtggcttagaactgaaagagagcttctgtttgtttggaatagagtaagggaagagaacaagagtatctgcctagtaatgaagagaattctggatcttgtccaagaccttgtacctctgtaagtctataagaactacagtgttaatggtcttggggtgcccctgaaagcagatacaaattagatcacaacatccgagtccttttgaacatctgcaaagccttctgaagaaggatgggtactaacaagcccaaactgagaaaaatacaataaatac

SEQ ID NO: 924950 - DNA, 577 bp, Homo sapiens
agaacatcaggtagacttctaagctttttgactctactccttctctcccagatggcatctttggacccacctgaggcctcagggaacttgtcaccctgaagataaggatgcaagcctggctggctttgcaacctgatgattgtagagccccaggcccttgagcaaacataagccacagccagggagtggttacagcaggccttggggtaagacccagtgctgtagtgacttcagctctgatccagtgcagtcctggtggtgttggcaacagggttgcttgtgtcacaccacccctgcttcctggtggcttagaactgaaagagagcttctgtttgtttggaatagagtaagggmagagaacaagagtatctgcctagtaatgaagagaattctggatcttgtccaagaccttgtacctctgtaagtctataagaactacagtgttaatggtcttggggtgcccctgaaagcagatacaaattagatcacaacatccgagtccttttgaacatctgcaaagccttctgaagaaggatgggtactaacaagcccaaactgagaaaaatacaataaatac

SEQ ID NO: 924951 - DNA, 638 bp, Homo sapiens
gctgaagctgagatggatgaactgattaaagtgggcttcagaaagtgagtaataacagattttgctgagctaaaggattatgttctaacccaatgcaaagaagctaagaaccatgataaaagattacaggagctgttaactagaataaccagtttagagaatgacatgatggagctgaaaaacacagaacgagaactttgtgatgcaaagacaactatcaatagctgaattgaccaagcgaaagagagaatatcagagcttgaagactatcttcctgaaataaggcaagcagacaagattagagaaaaaagaatgaaatggaaagaacaaaatctccaggaactatgggactatgtgaaaagaccaaacctacgactaactggagtagctgaaaaagatggggagaatggaaccaagttggaaaacacactgcaggatrtcatccaggagaaactccccaacctagcaagacaggccaatactcaaattcaggaaatccagagaaccccagtaagatactccatgaaaagatctaccccaagacagataatcctcagattctccaaggtcaaaatgaaggaaaaaatgttaaaggcagccagagagaaaggccaggtcacctacaaagggaagcccat

SEQ ID NO: 924952 - DNA, 608 bp, Homo sapiens
cctgctttatgctgggtactggaggcactaccggctgtgggtcaccggggcggggatgggggcattctcaggactggatgcctggactgtgtcttctggggattcctccttttcttttcttttttcttttttcttctctccctctccctctccctctccatctctctttctattttcttttttgagatggagtctcgctctgtcacccaggctggagtgcagttgcacaatctcggctgactgcaacctccacctcctgggttcaagcaattcttctgcctcagcctctcgagtagctgggactacaggcgcgcgccaccatgcccagctaatttttgtatttttagtagagacggggttttaccgtattgtccaggctggtcttgaattcatgaactcatgaccttgtgatctgcccgcctcagcmtcccaaagtgctgggattacaggcgtaagccaccgcacctggcggattcctcctcttcattgcttctgctgtggttccctaccctctggagccaagccctaccctaccgcctggcccctcaaaagacaaggggcccctttagaacttactccccggacaacccaacccaggtcccctaggc

SEQ ID NO: 924953 - DNA, 864 bp, Homo sapiens
gatcgtgtccgtcactccattggcttctcatcccactgagaggagattctaaaccactcaccatactctgcaagatcccatataacctggcccctgcctacttcactggcttcatctctatgctcctcctccctctctctgttctgttcacactttcctttctgttctgagaaattgcaccaacttcaagccaggcgtggtggcagttgcctgtcttcctagctacttggcaagctgagacaggaggatcccttgagtccaggagtttgaggctgcagtgaaccttgattgtgtcactgcctgagcaacagagggagactctgtcccttaaaaaaacaacaaagaagcagttgtatgagtttgtacaagaagatttttctgcttgaaatccatcttccctaaaatttcacatctggctttttgtcatgctggtctcaactcacaatttcctttcagaaagaccttccttgatcacccaacttcaatttgtcaactctctccatcacccaattttgtgttttcttcagacgayttatcaatgatacattttcttgtgaatcatctgtgaccttaacccttttactaatgatgtaagagttgaaagtttgcctgctttgttcactgatttatccccagtgcttagaacagacatttagatgatatagcaattttgttgcacattcacatatttcactctgcattaactaaaaggaaaacattatgcacttgctataattaaaaaatgacagtttctctgcagagattttaaatatacagggaaaagattgacatcttggatgtaacgcttcaatgtattgtagcaggatgagccacagacaaaacctctcagacaccaagttgtag

SEQ ID NO: 924954 - DNA, 595 bp, Homo sapiens
ctattttaaaatatgcaatacattgttgttaacgatagttgccctattctgctatcaaatattataacttattccttctctctaactgtgttttatagggttgttgtgaggactaaatgaaaaaactgcatgcaacgtatttagcagaatatctgacacacaattaagttttgttttttattgtaatagtgaaagacaaagcaaaacaatttttaaaggaaaayaaggctgaaggatgcacactacctgattgtaacagttactatggtggtgcattaaacaggacagcgtggaattggcatggggtatatattgatatggtttggctctgtgtcctcacccaactctcatgttgaattgaagttgcagccaattggagttgcaaccacagtgttaggggtgcagcctggtgggagatgattggatcatgggggtgctttctaatggcttagcaccatctccgcagtgctatctcatgatagagttctcaagagatctggctgtttaaaaatgtgtgtacctttcttcttcactctctattcctcctgctccagctatgtaagacatgccctttgccttcagccatgattttaag

SEQ ID NO: 924955 - DNA, 647 bp, Homo sapiens
aactctgatagggatcaagttactgaacctcagttttctcatgtatataaggggaattatgattatttattgtgaggattgaataaataaaatatgttgagtgcctcactcattgtaaatagttcattcatattagtctttttttttaatggcttcttcccatcctcattgctgagaaacttgagagagaacaaatacctatacatctctaccatgataggcattgtgctaggggctcttgaggacacgtaccttgcctttaaaaaggcagctattggcagggcgcggtggctcacgcctgtsatctcagcactttgggaggccgaggcgggctgatcacaaggtcaggagatcgagaccatcctggctaacatggtgaaaccccgcctctactaaaaaatacaaaaaaatcagccaggcgtggttgtgggcgcctgtagtcccagctactcgggagactgaggcaggagaatggcgtgaacccgggaggcagagcttgcagtgagctgagatcgcgccacttcactccagcctgggcgaccagagcaagactctgtctcaaaaaacaaaacaaaaaaaggcagctatctagtagggaagtcagtagtcagtacttgtaagcaaatgtttgcaaaaaggtattctaa

SEQ ID NO: 924956 - DNA, 458 bp, Homo sapiens
cttttagaataccatccctgagaaggcaactggacatattttatgcaagtatttctaaaatacacagagataatattttgaattaagccttcaaatgtaagatgatttaattcaatttgtttattttcaaattctcagaggaaaaaaatgcctttaaaaataattttttgtaacgtatttttttttgtccttartatatgctttaaaatatacagattcccttggatttctaaaatttaattctgttaatatttcagttttaaaacacaaagaggtaaacaaatgaatgcttgcctaaccagaatttaaatatttttggaatctgttgacttattaaatatctcattgagttttgctataaaaaataaacagcttaattttttatcatttgaatatcatgatttttacaagattattctcttgctggagaataacattcctttgcgatgtgcttttca

SEQ ID NO: 924957 - DNA, 552 bp, Homo sapiens
aaaggaatgtcttgagagccaaaagggatattgggccagatcccaatccaataagggccttaagctgaaggggccctctgctccagccagctcccaaatcagacaccatcatttacaggacaaagccaagggcaattctggaggtggcaaataaaattataaatttccaggctgggcatggtggctcaagcctgtaatcccagcactttgggatgccaaggyaggaggatcatttgaggtcaggagttccagaccagcctggctaatgtgatgaaaccccgtctctattaaaaatacaaaaagtagccgggcatggtggcatgcacctgtaattgcagctactcaggaggctaaggcaagaaagtcgcttgaaccgaggaggtggaggttgctgtgagccgagatcgcacaattgcactccagcctgggcaacagagtgagactctgtctcaaaaaaaaaaaaaaattataaatttcccttttgggttcaagagctgcctactttgctaatctccagctctaagaaactctcctccaaatcctgttgggtaa

SEQ ID NO: 924958 - DNA, 552 bp, Homo sapiens
aaaggaatgtcttgagagccaaaagggatattgggccagatcccaatccaataagggccttaagctgaaggggccctctgctccagccagctcccaaatcagacaccatcatttacaggacaaagccaagggcaattctggaggtggcaaataaaattataaatttccaggctgggcatggtggctcaagcctgtaatcccagcactttgggatgccaaggtaggaggatcatttgaggtcaggagttccagaccagcctggctaatgtgatgaaaccccgtctctattaaaaatacaaaaagtagccgggcatggtggcatgcacctgtaattgcagctactcaggaggctaaggcaagaaagtcgcttgaaccgaggaggtggaggttgctgtgagccragatcgcacaattgcactccagcctgggcaacagagtgagactctgtctcaaaaaaaaaaaaaaattataaatttcccttttgggttcaagagctgcctactttgctaatctccagctctaagaaactctcctccaaatcctgttgggtaa

SEQ ID NO: 924959 - DNA, 552 bp, Homo sapiens
aaaggaatgtcttgagagccaaaagggatattgggccagatcccaatccaataagggccttaagctgaaggggccctctgctccagccagctcccaaatcagacaccatcatttacaggacaaagccaagggcaattctggaggtggcaaataaaattataaatttccaggctgggcatggtggctcaagcctgtaatcccagcactttgggatgccaaggtaggaggatcatttgaggtcaggagttccagaccagcctggctaatgtgatgaaaccccgtctctattaaaaatacaaaaagtagccgggcatggtggcatgcacctgtaattgcagctactcaggaggctaaggcaagaaagtcgcttgaaccgaggaggtggaggttgctgtgagccgagatygcacaattgcactccagcctgggcaacagagtgagactctgtctcaaaaaaaaaaaaaaattataaatttcccttttgggttcaagagctgcctactttgctaatctccagctctaagaaactctcctccaaatcctgttgggtaa

SEQ ID NO: 924960 - DNA, 736 bp, Homo sapiens
ctcacaccagctctttcacacctcattgacacctgctcactcatatttcacaccacttacacttgcacctcacacctgctcacgcatgcacatacattctgctcatgcatatccacttgcatgcttacacgcctgttcacacacaaccactcagacacctacttgcacactcaaatgctcacacacattctgctctcacatccactcacagcagctcacactcatgcatgctcacacacacctgctctcacactcacacatcacacccattctcttgtttttgagatggagttgctcttgttgcccaggctggagtgcaatggcacgatctcggctcactgcaacctccacctcccgggttcaagcaattctcctgtctcagccttccaagtagctgggattacaggcgttcaccaccacgcctgactaatttttgtatttttagtggagacggggtttcgccatgttggccaggctggtctcgaacacctgacctcaggtgatccgcctgcctcagcctcccaaagtgctgggatacaggcgtgagccaccaygcccggcccactcacacccattcatgctcacacactcattcacacacctgctttcacacatacacatacctgttcacacacatgcacacctgctcacacacgcaggtgcttaagcacgtcctcaccccccacacacacctgctcacacatgggaacacacacatgcttacacatgttaaaac

SEQ ID NO: 924961 - DNA, 801 bp, Homo sapiens
aatagccacatggtcataacagtggaaaattcaaatactgatttaacaaatgttaccatatagagtaatgaattggggatgtgtggagaaatgtgagtgtgtgtgtgtgtgtgttgtgaatgactaaagttgaattctgattgtacaagtaaataaaatatatctctaactgaaaaatcaagctgcctgacacatcaaaggcactcaataaatatttgccaataaataatgctctaagtctctattccacatcttcatttgtacatttacatagcactggaatagaaagactggaggccgggcacggtggctcacgcctgtaatcccagcactttgggaggccaaggcgggtggatcacaacgtcaggagatcaagaccatcctggctaacacggtgaaaccctgcctctactaaaaatacaaaaaactagctgggcatggtggcactcgcttgtagttccagctactcgggaggctgaggcaggagaatcgcttgaacccgggaggtggaggttgcagtgagctgacatcacaccactgcaatccagcctgggcgacagagcgagagtccatctcaaaaaaaaaaaagaaaagaaaaaagaaagacagactggaaaaatagcttttatcaatctctgataygctacatatgtcatggagaaatgcagaatggcatgatatgaaattccatttttgaatgaataaaatatacatgtgtatgtatatatacttattaacacttaggattatatacacacaataaaacgtctgtaaggataaactaaggttctatcagtggga

SEQ ID NO: 924962 - DNA, 563 bp, Homo sapiens
taaacatttgtgatgttttgttttttttaaggagcttaaatgatgagaactactttgcctgatccccgttgtcatctttcactgcccaaatattttgaaaacccattaactacagcagattctgcataaacatattccaaatataaaatttctaagtctctaaggaaaatactggccattatatattgtcaagattatttttctagcaacytctcagcattgggttcttctggtcatttctatggcacaggacatgcaatctctctctttttttctaacttttattttaggttcaggatttcatgtgcaggtttgttatataggtgaactgcatgtcacaggggtttgctgtacagattatttaatcacccagatgataagcatagtacctgataagtggttttttgatcctcaccctcctcccaccctccaccttccagtaggccctggtgtctgttatttccttctttgtgtccatgtatgatcaatgtttagctcccacttgtaaatgagaacatgaggtatttggttttctgttcctatgttagcttgcttaagataat

SEQ ID NO: 924963 - DNA, 487 bp, Homo sapiens
cttggtgatgtgtgcattcaactcacattgttaaatctttcttttgatagagcagttttgaaacacactttttgtagaatctgtaagtggatatttggagcactttgaagcctatggtggaaaaggaaatatcttcacataaaaactagacagaagcattctcagaaacttctttgtgatgtgtgcactyaacacacagagttgaacttttcttttgatcgagcagttttgaaacacacttttagtggaatctgcaagtgaatatttgaagcgctgtgaggcctatggtggaaaaggaaatatcttcacataaaaactagacagaagcattctcacaaacttctttgtgaggtgtgcattcaactcacattgttgaacatttcttttcatagagcagttttgaaacagttttttttatagaacttgcaagttgatattttcagccctttgaggcctatgttggaaaacgaaatatgtgtacaaaaaa

SEQ ID NO: 924964 - DNA, 487 bp, Homo sapiens
cttggtgatgtgtgcattcaactcacattgttaaatctttcttttgatagagcagttttgaaacacactttttgtagaatctgtaagtggatatttggagcactttgaagcctatggtggaaaaggaaatatcttcacataaaaactagacagaagcattctcagaaacttctttgtgatgtgtgcactcaacacacagagttgaacttttcttttgatcgagcagttttgaaacacacttttagtggaatctgcaagtgaatatttgaagygctgtgaggcctatggtggaaaaggaaatatcttcacataaaaactagacagaagcattctcacaaacttctttgtgaggtgtgcattcaactcacattgttgaacatttcttttcatagagcagttttgaaacagttttttttatagaacttgcaagttgatattttcagccctttgaggcctatgttggaaaacgaaatatgtgtacaaaaaa

SEQ ID NO: 924965 - DNA, 601 bp, Homo sapiens
cttacctactatgtaccaaaatagtgttctaagcattgggatacagcagaaaacaaaaaacaccaggtcttttctttcattgagatttcattctaaaggcagaggatagacattaaacaaaaatctaataaacataatgaataagcaaaactaacactttgcccttccaccatagtgaccaaacacaccacataccacagtcagggctggtgggggagcacgttttttaaggagtacttctacatcatgaaataaacttcaaaaacaggaatttcccatctagagttagtcctcaaaataaatgagaccttgagccctttytcagaaattgctaagtcattagtgaacatattttgcccctgacttttgcaatgccagcatcggcagatatgtgatgaccctacagatgtaataattatgtgagaaaaccactatcatttcccatcatgaacagttaactaatgataaccttgaagagtttctttccataaacacttgccatgtcctttacctggagagccagttctgaaggctggtctttcttgcaaaacattgcaagtaaaaatccttttgctttctcattgcttttatttctgagttg

SEQ ID NO: 924966 - DNA, 445 bp, Homo sapiens
gctatatgagacagcctattgttcccaggctacaaccctgtgcagcgtgttcctgtactgaatactgaggcaatcatacacaatggtaagtgctggtgtatctaactatatctaagcatcgaaaagatacagtaaaaatacagtacaaaaggtaaaaaatgatccacctgtatcagcacttacgatgaatggcacttgcaggaccagaagtggctctgggtgaggcastgagtgagtggtgagtgaatgtgaagccctagagcattactgtacgctaatgtagactttataaatgctgcacacttaggctacactaaatttgtaaacacgtttttctttcttcagtaataaattaaccttagcttactgtaacccttttacttaaaaatcttttaatttttttaaactttttgactctatgataacacagcttaaaacacaaatg

SEQ ID NO: 924967 - DNA, 746 bp, Homo sapiens
tttctccttaaaaaatgggttttgcttctctactgcatcgtcaggctgcaaattttctgaactttcatgctctgtttctcttttaaaacagaatgcttttaacggcacccaagtcacctcttgaatgctttgctacttagaaatttcttccaccaggtaccctaaatcacctctctcaagttcaaagttccacaaatctctagggcagaggcaaaatgccaccaatctctttgctaaaacataacaagggtcacctttgctcccattcccaaacaagttcttcatttccatctgagaccacctcagcctggcctttattgttcatatcaccatcagcatttttgtcaaggccattcagcaagtcgctaggaggttccaaactttcccacattttcctgtcttcttctgagccctccaaattgttccaacttctgcctgctacccagttccaaagtttttgggtattctttcaacaatgccccactctactggtaccaataaactgtattagtccattttcacactgytgataaagacatatccaagactgggcaatttacaaaagaaagaggtttaattggacttacagttccacgtggctggaggaggtctcacaattatggcagaaggctaaaaacacttcttacatggcagcggcaagagagaatgaggaagaaccaacagctgaaacccctggtaaacccatcaagtatcatgagacttattcaccaccaggagaatagcac

SEQ ID NO: 924968 - DNA, 591 bp, Homo sapiens
acaagaggtgggctcccaaggccttgggcagctccacccttgtggccctgcagggttcagctcccatggctgccctcaagtgctggtattgaatgtctgccacttttccagatgcatggtgcaagctgttggtgggtctaccattctggggtctgaaggatggtggccctcttctcacagctcctctaggcagtgccccagtggggactctgtgtggrggctccaaccccacatatcccctatacattgccctagtagaggttctccataagggctccacccctgcagcagacttctgcctggacatctaggcattttcatacatcctctgaagtgtagatagaggctcccaagcctcaactcttgctctctgtgcaccctcaggcttaacaccacatggaagtcaccaaagcttctggctggcaccctctggagcagaggcctgagacacacctggggcccttttaacaacagctatagctagagtggctgggacacagggagcagtgtcctgaggttgcacaggacagcagggccctgggcctggcccatgaaaccattcttcccaaatccaaaccatatcaggaagga

SEQ ID NO: 924969 - DNA, 591 bp, Homo sapiens
acaagaggtgggctcccaaggccttgggcagctccacccttgtggccctgcagggttcagctcccatggctgccctcaagtgctggtattgaatgtctgccacttttccagatgcatggtgcaagctgttggtgggtctaccattctggggtctgaaggatggtggccctcttctcacagctcctctaggcagtgccccagtggggactctgtgtggaggctccaaccccacatwtcccctatacattgccctagtagaggttctccataagggctccacccctgcagcagacttctgcctggacatctaggcattttcatacatcctctgaagtgtagatagaggctcccaagcctcaactcttgctctctgtgcaccctcaggcttaacaccacatggaagtcaccaaagcttctggctggcaccctctggagcagaggcctgagacacacctggggcccttttaacaacagctatagctagagtggctgggacacagggagcagtgtcctgaggttgcacaggacagcagggccctgggcctggcccatgaaaccattcttcccaaatccaaaccatatcaggaagga

SEQ ID NO: 924970 - DNA, 754 bp, Homo sapiens
tagggcatgcctgagcacatgccaggcatttctgaaaagcctcccaaatgtcttgcgtgggcagggacagaccccaatgcgtattgacctgttgtatcagtttaccccctgcatgtcccaatttccagtgtagccacaaggccacatctcatgtaggtgccgactctaaccattggaccttggccaaggcatctgcctcatcattgccgggggtggccaaaggcatatggcctgacacatgataaacggttacctgtttctgatgacccatttcccagaggtcttgccacgtggcttgaccccaaatgggttggtggccgactagcaacttctgtattttccaggtagttaaccacaaagttaagccttggtagaccacccagctattgatacagattaccatcagtgtcacctccttggtgatcaccatccacactgctctaagttcagcccattggctactttgtccacaccgggtttcaaaccatatggtgtcagtactaggttggactgcaacagyggtccaagcagttatagcacctcggctagacccatctgtgtaccatggcctatcgagaatggggggacaccctcccttaaatgctgaaggctcagggtctaggggtgcctcaggccccatggccttaggccccatgaccttatcttgcattaggactataggtcccaagaccttttgcagctctgctgctatggtacttgtactcagcttactccactgctccaagtaggcact

SEQ ID NO: 924971 - DNA, 623 bp, Homo sapiens
tttttttttttttttttaagtagagacgaatctttgctatgttgcctaggatggtctcgaccttctcaagagatcctcctacctcagcctcctgagtagctgaaactgtagacatacaccaccatgcccaactgtttttgtagagatggggtttcaccatattgcccagmctggtctcaaactcctgggctcaagggatcctccgtatcagcctcccaaagttttggggttacaggtgtgagccactgtgcttggccatgcctgggatttttttttttttttttttttttgaacagagtctctgtcacccaggttggagtatggtggcacgatattggctcactgtgacctctgcctcctgagttcaagcaattctcctgcttcagccactcaagtagctgagattacaggtgcatgccaccatgcctggctaatttttgtacttttattagagacggggtttcaccacattggccaggctggtcttgaactcctgaccacaagcaaccctctctccttgccctgctaaagtcgtgggattacaggaatgagccactgcactccgtcatgcctgggatttttaaccactgtactccaatgatctaactgtaacaaaactaata

SEQ ID NO: 924972 - DNA, 623 bp, Homo sapiens
tttttttttttttttttaagtagagacgaatctttgctatgttgcctaggatggtctcgaccttctcaagagatcctcctacctcagcctcctgagtagctgaaactgtagacatacaccaccatgcccaactgtttttgtagagatggggtttcaccatattgcccagactggtctmaaactcctgggctcaagggatcctccgtatcagcctcccaaagttttggggttacaggtgtgagccactgtgcttggccatgcctgggatttttttttttttttttttttttgaacagagtctctgtcacccaggttggagtatggtggcacgatattggctcactgtgacctctgcctcctgagttcaagcaattctcctgcttcagccactcaagtagctgagattacaggtgcatgccaccatgcctggctaatttttgtacttttattagagacggggtttcaccacattggccaggctggtcttgaactcctgaccacaagcaaccctctctccttgccctgctaaagtcgtgggattacaggaatgagccactgcactccgtcatgcctgggatttttaaccactgtactccaatgatctaactgtaacaaaactaata

SEQ ID NO: 924973 - DNA, 623 bp, Homo sapiens
tttttttttttttttttaagtagagacgaatctttgctatgttgcctaggatggtctcgaccttctcaagagatcctcctacctcagcctcctgagtagctgaaactgtagacatacaccaccatgcccaactgtttttgtagagatggggtttcaccatattgcccagactggtctcaaactcctgggctcaagggatcctccgtatcagcctcccaaagttttggggytacaggtgtgagccactgtgcttggccatgcctgggatttttttttttttttttttttttgaacagagtctctgtcacccaggttggagtatggtggcacgatattggctcactgtgacctctgcctcctgagttcaagcaattctcctgcttcagccactcaagtagctgagattacaggtgcatgccaccatgcctggctaatttttgtacttttattagagacggggtttcaccacattggccaggctggtcttgaactcctgaccacaagcaaccctctctccttgccctgctaaagtcgtgggattacaggaatgagccactgcactccgtcatgcctgggatttttaaccactgtactccaatgatctaactgtaacaaaactaata

SEQ ID NO: 924974 - DNA, 619 bp, Homo sapiens
gcaagactccatccgaaaaaaaaatgtggctaggcgcggtggctcacacctgtaatcccagcgctttgggaggccaaggcggccagatcacttgagatcaggagtgtgaaaccagcctggccaatgtggtgaaaccatgtctctactaaaaatacaaaaaattagccaggcgtggttgtgggcacctgtaatcccagctacctgggagtttgaggcagkagagttgcttgaatctgggaggcagaggttgcagtgagccgagatcgtgccattgcactccagcctgggtgacagagcaagacacaagacattatctgaaaaaacaaaaaaaaaaaagtgtgaacaatcttagaaacaaatctctgccgctcttcctgcttctcatcccaagaacgacccacagagaccagtttcccccattcctgtctccctaaatgcgctgtcctctctccctgcctggctgcagccacttgttttcatgaagacttccgcgggcttccaggatggacacatctggtattcgatcttcagccgctgcgctcgcagcagcttcacccgcgtccagagggtgtcctgctgcttctccctgctgctgtgcaccatgctgaccagcatcatg

SEQ ID NO: 924975 - DNA, 607 bp, Homo sapiens
agagggcaagagctttcctggaccctcacttgacgaatctgggcactgccaaccagcttggagttcccatcagtgataaagcctaaaaagaaaaacaaggtgggtaaatctagcaatcaaaataatcttaacacattccaagctcccyggcctgaggctaatgtgaaattcagcgtacccattatagagacagcccagagaagtttatcaccaactataggctacatttatccaaataacctcaccatctctcctgctggaatctactgtgcttccgcacaacttctcttagggaatggaacctgccaccccgtcatccatctggatgtgcctgtgccctttctcctcaatcctccatcccactggtcaccacatcctatccatcctacttttttcatgtcttatgtgcccatcccgttctctccatcaccactgtccctggtccctccctgcaccagccctcatcctgtgtcctcagcatcctaacttgccacctcctccacctcttttttttttttttgagacagagttttgctcttgttgcccaggctagagtgcaatggcgtgatcttgtctcactgcaacctttgcctcctgattcaagcaa

SEQ ID NO: 924976 - DNA, 606 bp, Homo sapiens
gtaaaaaacaaatagccatactgaataaaataatatgagctatatttttccataagctatatataatatttatattatattttatttttttttaatttatttagagacagagtctctcactctgtcacccaggctagaatgcagtaatgtgatctgggtcaccgcaacctccgtctcccaggctcaagttattctcctgcctcagcctcccgagtagctggaactacaggcgcccgccaccatgcctggctratttttttgtactttcagtagagctgggtttcaccatgttggctaggctggtctcaaactcctgacctcaggtgatccgcctgtcttggcctctcagaatgctgggattataggcatgggccaccacacccggccaatattattttttagaaatagggtctcactctgtcacccagactgaagcactgtggcgacctagatagctcactgcagccatgaactcctgggctcaagcgatcctcccgcctcagcctcccaagtagctgggaccacaggtctgtgccaccacacttggctaaattttaagagatttctttgagacagggtctcactatgttgcccaagttggcctca

SEQ ID NO: 924977 - DNA, 606 bp, Homo sapiens
gtaaaaaacaaatagccatactgaataaaataatatgagctatatttttccataagctatatataatatttatattatattttatttttttttaatttatttagagacagagtctctcactctgtcacccaggctagaatgcagtaatgtgatctgggtcaccgcaacctccgtctcccaggctcaagttattctcctgcctcagcctcccgagtagctggaactacaggcgcccgccaccatgcctggctgatttttttgtactttcagtagagctgggtttcaccatgttggctaggctggtctcaaactcctgacctcaggtgatccgcctgtcttggcctctcagaatgctgggattataggcrtgggccaccacacccggccaatattattttttagaaatagggtctcactctgtcacccagactgaagcactgtggcgacctagatagctcactgcagccatgaactcctgggctcaagcgatcctcccgcctcagcctcccaagtagctgggaccacaggtctgtgccaccacacttggctaaattttaagagatttctttgagacagggtctcactatgttgcccaagttggcctca

SEQ ID NO: 924978 - DNA, 606 bp, Homo sapiens
gtaaaaaacaaatagccatactgaataaaataatatgagctatatttttccataagctatatataatatttatattatattttatttttttttaatttatttagagacagagtctctcactctgtcacccaggctagaatgcagtaatgtgatctgggtcaccgcaacctccgtctcccaggctcaagttattctcctgcctcagcctcccgagtagctggaactacaggcgcccgccaccatgcctggctgatttttttgtactttcagtagagctgggtttcaccatgttggctaggctggtctcaaactcctgacctcaggtgatccgcctgtcttggcctctcagaatgctgggattataggcatgggccaccacacccggccaatattattttttagaratagggtctcactctgtcacccagactgaagcactgtggcgacctagatagctcactgcagccatgaactcctgggctcaagcgatcctcccgcctcagcctcccaagtagctgggaccacaggtctgtgccaccacacttggctaaattttaagagatttctttgagacagggtctcactatgttgcccaagttggcctca

SEQ ID NO: 924979 - DNA, 718 bp, Homo sapiens
taacagctgcactgccaactgaaagactctcagtggccaaagctggaacaatttgagcaacaaaacaaagtagtattggattataacccaaggtataaagtaaatatacatgagtccatactgacataagtaaataaatgggggagaacaggcaactctccagaacagaattccacaagattatgtagatactccaccaccttggaggaacagggtaacttcccagtcctyacgtgtaggctgcacacagtgacttccttccaaagagttatgaaaagggagaaaaagagtaacttcaaagcagagaaacctagccacgtgcaatagctcacatctgtaataccagcactttggtaggctaaggcagacagattgcttgagcccaggagttcaagaccagcctgagcaacatggcgaaaacccgttctctacaaatatacaaatacaaaaaattattcgagcatggtgacgtggcctgtagtcccagctactcgggagggtgagatgagaggatcacccaggcccaggaggttgaagctgcagtaagccaaaatgacactactgcactccagcctggaagacatagtggaccctgtctccaaaaaaaaaaaaggtacagaaacctaacacgtatctcagccaggtgatcaacgtcaacattaacagtgataaattatgttgtagtatgcagccttgatgaaaatgtactttacctctg

SEQ ID NO: 924980 - DNA, 718 bp, Homo sapiens
taacagctgcactgccaactgaaagactctcagtggccaaagctggaacaatttgagcaacaaaacaaagtagtattggattataacccaaggtataaagtaaatatacatgagtccatactgacataagtaaataaatgggggagaacaggcaactctccagaacagaattccacaagattatgtagatactccaccaccttggaggaacagggtaacttcccagtccttacgtgtaggctgcacacagtgacttccttccaaagagttatgaaaagggagaaaaagagtaacttcaaagcagagaaacctagccacgtgcaatagctcacatctgtaataccagcactttggtaggctaaggcagacagattgcttgagsccaggagttcaagaccagcctgagcaacatggcgaaaacccgttctctacaaatatacaaatacaaaaaattattcgagcatggtgacgtggcctgtagtcccagctactcgggagggtgagatgagaggatcacccaggcccaggaggttgaagctgcagtaagccaaaatgacactactgcactccagcctggaagacatagtggaccctgtctccaaaaaaaaaaaaggtacagaaacctaacacgtatctcagccaggtgatcaacgtcaacattaacagtgataaattatgttgtagtatgcagccttgatgaaaatgtactttacctctg

SEQ ID NO: 924981 - DNA, 681 bp, Homo sapiens
aactcaacagatgtctgtgtgtcagactgaaggccccgatagagtgggttcatgaggggatctcctgacctgagggttgcaaaggtccatgggagaagcttgggttcctggggttgcacattcgctcatggcttctctgggcaggggagcttcccttggctccatgtcgctctgggtgggcagtcatcctcccttgctttttcactgttcttggtaggtcgagttgtttccttgattagtgccagtgtgagtacttggatgtttcagttgaaggtgctgtatttacttgtcccttccattcctytccgtgagagccacacacattatctgcttctagttggtcttcttggccactccccagagaaatttttaattttgatggtagagtttatcatatttttcttttatggttcttactttctgtgctccctcaaagtcacaaagatattttcctgttttcattgtatgctttatagttttagcttttctgtttaggtccatgatccatctcaaattaatttttgtgtacggtataaaactaggatcaaagttgttcacccatctccatgtaggtgctccttttttttttttttttttttttttgagacagggtctgactttttcacccaggtcagagtgcagtggcacgatctcggctcactacaacctctacctccctgg

SEQ ID NO: 924982 - DNA, 552 bp, Homo sapiens
aagaattctaagatgacccaccaacattcccagccattggtgtacacataccttctcccagttattcaatctaggtactgtggtgaaggggtttgcagatgtaattaagttctccaatcaattgacctagaaatagggattatttaggcaagcctgatctaatcacatgaacactttaaaagttttctcaggctttccgagtcctggcccacgggcgttgggtatgagcagcgccctccgccctccgccctaagggttcgtggcccaccgctccttcgcagtccctgccgccaccgtccacgctctgygttgtagagaagacagtgggtcggaagagcgccatcgccgccagtgtatgtggggccctttttatcaggtactgcatctacttttaccacaaaagacgaagtgaccccaatttcaagaacaggcttcgagaacgaagaaagaaacagaagcttcccaaggagagagctgggttttccaagttacctgaccttaaagatgctgacgctgttcagaaattcttccttgaagaaacacagcttggtg

SEQ ID NO: 924983 - DNA, 715 bp, Homo sapiens
aggccccgtccctgctctgccctgagctcaggcagcccaagaggctgctgtttggggaacacattaccagcatgtgctgcccttcccatggatggacgtggggcctggtgggcatccgtgtatgtctgtgtgtgtctgggcccacttctccgtacacaccagcagaagcatgaacaaaaacccacacacacacaggcttggcaagcatgctgccccagcagggccaacctcctcctctactcaccctgtgccctagactgagggccccctatgtgccaggcactatcgcacagggctagggcacagtgagaccctcagagggcagagggagctagccaaggccacttaaacaaacaggagggcaaggaggggctcaagacacgacccggtgatggcactgcacggtgcaggtggctgmaccaggagcccagccagcactcaccccctgggatggcaggtactcagacggaggggcagagcgggcccagggtcttgtggccggttagaaagaccacctccaccagactcccactcactcagcagcacactctgacttccaagcctgctacacttttcacccaaggcgcttctgctcaaaagccacctcttctaaggaaactttacacacacgtgcacatatatacacacacacacacgcaggcacacctgcccttagcaaaacatgcgccccctcccctctgaatgcctagcacag

SEQ ID NO: 924984 - DNA, 611 bp, Homo sapiens
ttttttcatatgtttgtgggcctcataaatgtcttcttatgaaaagtgtctattcatatccttcacccactttttgatggcgttctttgtttttttttcttgtaaatttgtttaagttctttatagattctgcatatcagccctttgtcagatggatagcttgtaaaaatttcctcccattctgtatgttgcttgttcactctaatgacagtttcttttgctgtgcagaagctctttagtttaattagatttcatttgtcaattttggcttctcttgccattgcttttggtgttttagtcatgaagtctttgcccaygcctatgatctgaatggcattgcctagattttcttctagggttttaatggttttagttcttatgtttaagtctttaattcattaatccatcttgagttaatttttgtataaggtgtaaggaaggggtccagtttcagttttctgcatatggctagccagttttcccaacaccatttattaaatatggaatcctttccccattgcatgtttttgtcaggtttgtcaaagatcagacggttgtagatgtgtagcattatttctgaggcctctgttctattccattggtctatgtat

SEQ ID NO: 924985 - DNA, 639 bp, Homo sapiens
aaattgaaagcgcaagctggttccaggcagatcaatgctcccaacccagaaggtttgggggttgttagaaagccttttcccagatagcctcacatctgagtcttaagtctggcagccacgctaatcgtttttttaactggccgacaagcaccctgtattttcctctgattctaaggaaggatagcaagcgaaagtagtccaatattactcaccgctttggagagtcccttcgtggttgccaaaatgttaccagggtgtccttgctcctagagctcccaagatgttggcggccacttccaagatggcagcaagcctcttgttctctgacctggggttcttggcctcacggattccaaggaatggaatcttgggccatgtggtgagtgttatagctctattagaagccatgggtcatggaasagaaccgtggaacccagcgactagtgttcagcttgattaggatgaacttgggcacttagctgtgcaggaacaatggcaagcctttagcccgatcgggagtggcaatgggtgcctcgctggatcaggagcacagtggacaccctgctggatctggaggggtggaagtcagcatcagcggcgggtctgcgatggcggcaaacaacagtggtggatggcaag

SEQ ID NO: 924986 - DNA, 734 bp, Homo sapiens
caggacgggcagctccaggcatcagctccctacaaggctgctgctggaccaggcatactgcaagcagcttccattggtggcaccagggaatgtggtggtgcctggaagcttggagacgccagggactgcagagccccaaagagtgagccatagccctggctcagggagctcctaggtctgggctccttgaagggccacagctcttctctccttctctttcctctctttccctctcgttgccctccatggggcaaacaaggggygtgtttcagccctgtttgtgttacagccctttcagctccgccatttagcgggtcctgagtttttgtcccacatccaggaagaatgaggtatgcggacaagtggagggtgagcaaggtgaaggagtgctttattgagtgacaaaacagctcagaggagactcatattgggtagctcctttccgcaggtaggccatcctgatgagcatccagctctcagcagagagcccacagagggtagttcctctccacaggcagggcatcctgatgagtgtttagccctcaggagagaggagacacacagtgggtagctcctctccataagcagggcatcctgatgagtgtcagctctcagcagaaaggagatccacagtgggtagctccattctgcagacaggtaatcctggcatctgcctaattctggctgagtcctgggtttttatggggttcagaggggaggaagtttgtgctgat

SEQ ID NO: 924987 - DNA, 784 bp, Homo sapiens
ctgatgagcatccagctctcagcagagagcccacagagggtagttcctctccacaggcagggcatcctgatgagtgtttagccctcaggagagaggagacacacagtgggtagctcctctccataagcagggcatcctgatgagtgtcagctctcagcagaaaggagatccacagtgggtagctccattctgcagacaggtaatcctggcatctgcctaattctggctgagtcctgggtttttatggggttcagaggggaggaagtttgtgctgattggtccatgggtggttatgggcaatcccggaaaaagcatcataagttcccactccagtccgtggaactggcagcccagcccccaggcgtcaggccctccctggcttgaaggtggggtttcaccggggaccrcccatttccgcccaggagcctgtctgcctcctgccactgtttatggtgcccagatgcccaggctgttcgtgctaagggcctcctgcaggccagtgccaagctgccctcagccagcacttatcctcccttctgtgctcattggtgcccaaagtctggagggggctgaggcagcagggtgctggcatgtcagcactgccctgagcatgcgcacacccggctgggttgcaacagcacgcaggctcggcctcaacttttctccaagattggagcaggcactggaatggggagaagccaggcggtggaagcagacacttccgagcctgcaggggctgggggcttcccaggcccccaagagtgtagagatgcctgggtctgca

SEQ ID NO: 924988 - DNA, 819 bp, Homo sapiens
tcatattgggtagctcctttccgcaggtaggccatcctgatgagcatccagctctcagcagagagcccacagagggtagttcctctccacaggcagggcatcctgatgagtgtttagccctcaggagagaggagacacacagtgggtagctcctctccataagcagggcatcctgatgagtgtcagctctcagcagaaaggagatccacagtgggtagctccattctgcagacaggtaatcctggcatctgcctaattctggctgagtcctgggtttttatggggttcagaggggaggaagtttgtgctgattggtccatgggtggttatgggcaatcccggaaaaagcatcataagttcccactccagtccgtggaactggcagcccagcccccaggcgtcaggccctccctggcttgaaggtggggtttcaccggggaccgcccatttccgcccaggagcctgtctgcctcctgccactgtttatggtgcccagatgcccaggctgttcgtgctaagggcctcctgcaggccagtgccaagctgccctcagccagcacttatcctcccttctgtgctcattggtgcccaaagtctggagggggctgaggcagcagggtgctggcatgtcagcactgccctgagcatgcgcacacccggmtgggttgcaacagcacgcaggctcggcctcaacttttctccaagattggagcaggcactggaatggggagaagccaggcggtggaagcagacacttccgagcctgcaggggctgggggcttcccaggcccccaagagtgtagagatgcctgggtctgc

SEQ ID NO: 924989 - DNA, 586 bp, Homo sapiens
ctcctggaagcttcctttgttgctcttggttggaagactgttgttatgatgctcttttaactacattcacagggtctaggattgggttagagaaagggtgagaggacaggtgggaggaaagaggctgaatgagtgctaggaagtgaggcatccgaagggactgccttcatggtcgtgtctagcctgatattcacagcattattgattttttttcttccaaaaattacatgtattttattttcagcatcttttgctaattctttctaattataatgtgctgttattttacagccacccattctcattttgtggatataattccctgctttagttttctgagcacaagaaatcaactttggctgcacattggaatatctgagaagcttaaaaatactgatgtttggaccrggtgcagtggctcacgcctgtaatcccagcactttgggaggcagaggcaggtggatcacgaggtcaggagatcgagaccacggtgaaaccctgtctccactaaaaatacaaaaaattagccgggcgtggtggcgggcgcctgtagtcccagctactcagagaggctgaggcaggagaa

SEQ ID NO: 924990 - DNA, 637 bp, Homo sapiens
aaatcattgcaaatttgaggaagaaccaaataggaatgagaattttaacatttaaaaacccaataaaaaatgaaaaagtcattcagataggtttaatagcaaattcaacacaggtaaagagataattaatgaactggaaggtagattagaagaaactacccagaatgaataagaaagagataaaacaatggaaaatataaaggtgagaaaaatacaatgagcagacttaacatatttctaggagtcctagaaagagaagttagaagaacagcaaagtcatctcctaaaaatatggaaaaaaggaagtacaaaaatcagagcaaaaattaatgaaacaaaaaaatacaatagacaagatttaaaaggtaacaatttttaccttttaaatgataaaattgataaacytctgctgagacagatgaagacaaaaaatgggaaaggcacagataactcatgtcagtaatgaaaaagagaacatctgtggagaaaggagaacccttgtacactgttgggagtgtatgttagtactgccatcatgaaaaactatttgaaagttactttaaaaactaaaactagattatcatatgaccaagtaactccacttctgggtgtttatccaaatattgaaatcagattg

SEQ ID NO: 924991 - DNA, 777 bp, Homo sapiens
aaaatctctggattcagtcagactcgggcagatgacaggatgacctgcttgtggagaggagctacccactctggatctcctctctgctgagggctgcacactcattgggatgacctgcctgcacatagaaggtactcactttggctctcctgaaatctgtactgtcactcagtaaagcatcacttcaccttgctcaccctctagtagtccacatctcttatttttcctggacatgggacaagaactcaggacctgctaaatggcagggctgaaagagctgtaacacaaacagtgctgraacacaccttcccctcgcttgccacattgcaggcaacaagaaggagaaaagagagaaggacagaagcactgtggccctttgggagcccagacataggagctccctgagccagggctgtgagaccctctttggggttctgtggttcctggcatctccaagcttctgggtgctgccacatttcccagtgaccacagtggaagccgcttgcggtatgtctggtccagttgcagcagggagacagtgcttacgctggtgcctggagctgcctgccccactgcagccagagtgtctggctgtgtgcagtggccagaccctgtactcgctgctcatgcaagcctcaccacaccattcctggcttacccttggcaggcatggtatccaggctggtagtgaaagcccagcgcagtctgccaggtcgaatgggtggaatgagcccagtgggccaagcaaaacttgggcaaaggtgccactggccacag

SEQ ID NO: 924992 - DNA, 586 bp, Homo sapiens
ccaaagtgctgggattacaggcgtgagccaccatgcctggcccaattgctatctttatcagttctggaaaattctcagtcattacttctttaaatattgctgcttctctactctcactattttcgttttctgtaaytacagttaaatgtattttagatcctctcactaccctcatgagttctaacttcccttccatgttgttcattgtttctgtttctctggccatatgttagatgtcatctgacatatctttcaaatcactaattcccttttaactatttctgtttattatcttctccttctagtttttagtttggttaatatatatttttatttataaaagttctgtttcatcttttaaaaacctgcttgttcagttttcatagtttcctgttctttgcagatactttttatgtggtcttttatttttttacataggggaagcatagttgttttacaatctgtatttgacagttccagtatttgcgggtgtgtttctgattctgattcatggaacctgtttttccttgtgtgcttaattgtgtactactctttgttcttaggaaatattaaggagggagaatct

SEQ ID NO: 924993 - DNA, 586 bp, Homo sapiens
ccaaagtgctgggattacaggcgtgagccaccatgcctggcccaattgctatctttatcagttctggaaaattctcagtcattacttctttaaatattgctgcttctctactctcactattttcgttttctgtaattacagttaaatgtattttagatcctctcactaccctcatgagttctaacttcccttccatgttgttcattgtttctgtttctctggccatatgttagatgtcatctgacatatctttcaaatcactaattcccttttaactatttctgtttattrtcttctccttctagtttttagtttggttaatatatatttttatttataaaagttctgtttcatcttttaaaaacctgcttgttcagttttcatagtttcctgttctttgcagatactttttatgtggtcttttatttttttacataggggaagcatagttgttttacaatctgtatttgacagttccagtatttgcgggtgtgtttctgattctgattcatggaacctgtttttccttgtgtgcttaattgtgtactactctttgttcttaggaaatattaaggagggagaatct

SEQ ID NO: 924994 - DNA, 612 bp, Homo sapiens
caaaagggagaaattagccaaaagaaaggggatacaggccctatacaagtctgaaacccaggagggcagtcattaaatcttaaagctccaaaataatctcctttgacaccatgtctcacatccagggcacactggtgtaagaagttggttccccaggccttccttgggcagctccaccccttgtggctttgcagggctcagtccccatagttgctctccagggctggcagtgagcactgcagcttttccaggtgcagggtccaagctgctggtggatctaccattttgggtctggaggacagtggccctcttctcacagtaatgctaggcagtgccccagyggggactctgtgtgggggctctaaccccacatttcccctctgcactgccctagtacaggttctccatgagggctctgtccctgcagcaggcttctgcctggacatccaggcttttctatacatcctctgaaatctaggtggaggcccccaagccttaactcttacactctgtgcacctgcaggcttaacaccaagaggaagctaccaaggcttatgactggcagccctgaagcaacatctcaagctgtacctgggcccctttgagccatgg

SEQ ID NO: 924995 - DNA, 635 bp, Homo sapiens
ctgtgtgtacaagaatgaggtctgctgagttttttagaaaacctttagttttagaatagttttagatttatagaaaatttgtaacattagcacagagttcccatttatccttctaattatttcctatattgttaacctcttacattartgtagcccatgttacaatttatgaaccaatattgatacactgttattaaatgactttcatactttattcagaatgtcttagtttttaccagatgtctttttttctgttccagggtcccattcagaatactacattacatttagtcacatcatcttaggctcctcttggctgtgacgtgtctcaaacttttcttgtttatgacttgagcagttttgaagagttctggtcaggtattttgtagaatgtccctcagttagggtttgtctgatgttttcgaaccatgactggactcagatcatgggtttggggaggaagaccacagaggtgacatgccattctcactccatcatgtcaagggcatataccaccgtggatgttgaccccgctcacctggctgatgcagtgtttgccaggtttctctgctcgaaagttagcaccgcctccctttccatactacagtctttgggaagaaatcactatagcagct

SEQ ID NO: 924996 - DNA, 583 bp, Homo sapiens
acacaaataccttccaagatggccgaatacgaacagctccggtctgcagctcccagtgtgatcgacacagaagatgggtgatttctgcatttccaactgaggcacctggttcgtctcactgggactggttggacagtgggtgcagcccacrgagggctagctgaagcagggcggggcatcttttcaccctggaagcacaaggggccagggcatttccctttcctagccaagggaagccttggcagaccacctggaaaaacgggacactccccacccaaatactgtgcttttctgaaggtattagctatctgcagacaaggtgattctctccccgtgcctggatcggcaggtcccacacccatggagcattgctcactgatagtgcagcagtctgagatccatctgtgagtcggcagcctggctgggggaggggcatgtgccattgctgaggcttgagtaggccaggaagctcaaaatgggcgacgccacagctcaacaaggcctactgcctctagcctccacctctatggtcagggaatagctgaacaaaaggcagcagacaacttctgcagacttaaacgtc

SEQ ID NO: 924997 - DNA, 583 bp, Homo sapiens
acacaaataccttccaagatggccgaatacgaacagctccggtctgcagctcccagtgtgatcgacacagaagatgggtgatttctgcatttccaactgaggcacctggttcgtctcactgggactggttggacagtgggtgcagcccacagagggctagctgaagcagggcggggcatcttttcaccctggaagcacaaggggccrgggcatttccctttcctagccaagggaagccttggcagaccacctggaaaaacgggacactccccacccaaatactgtgcttttctgaaggtattagctatctgcagacaaggtgattctctccccgtgcctggatcggcaggtcccacacccatggagcattgctcactgatagtgcagcagtctgagatccatctgtgagtcggcagcctggctgggggaggggcatgtgccattgctgaggcttgagtaggccaggaagctcaaaatgggcgacgccacagctcaacaaggcctactgcctctagcctccacctctatggtcagggaatagctgaacaaaaggcagcagacaacttctgcagacttaaacgtc

SEQ ID NO: 924998 - DNA, 583 bp, Homo sapiens
acacaaataccttccaagatggccgaatacgaacagctccggtctgcagctcccagtgtgatcgacacagaagatgggtgatttctgcatttccaactgaggcacctggttcgtctcactgggactggttggacagtgggtgcagcccacagagggctagctgaagcagggcggggcatcttttcaccctggaagcacaaggggccagggcatttccctttcctagccaagggaagccttggcagaccacctggaaaaacgggacactccccacccaaatactgtgcttttctgaaggtattagcwatctgcagacaaggtgattctctccccgtgcctggatcggcaggtcccacacccatggagcattgctcactgatagtgcagcagtctgagatccatctgtgagtcggcagcctggctgggggaggggcatgtgccattgctgaggcttgagtaggccaggaagctcaaaatgggcgacgccacagctcaacaaggcctactgcctctagcctccacctctatggtcagggaatagctgaacaaaaggcagcagacaacttctgcagacttaaacgtc

SEQ ID NO: 924999 - DNA, 583 bp, Homo sapiens
acacaaataccttccaagatggccgaatacgaacagctccggtctgcagctcccagtgtgatcgacacagaagatgggtgatttctgcatttccaactgaggcacctggttcgtctcactgggactggttggacagtgggtgcagcccacagagggctagctgaagcagggcggggcatcttttcaccctggaagcacaaggggccagggcatttccctttcctagccaagggaagccttggcagaccacctggaaaaacgggacactccccacccaaatactgtgcttttctgaaggtattagctatctgcagacaaggtgattctctccccgtgcctggatcrgcaggtcccacacccatggagcattgctcactgatagtgcagcagtctgagatccatctgtgagtcggcagcctggctgggggaggggcatgtgccattgctgaggcttgagtaggccaggaagctcaaaatgggcgacgccacagctcaacaaggcctactgcctctagcctccacctctatggtcagggaatagctgaacaaaaggcagcagacaacttctgcagacttaaacgtc

SEQ ID NO: 925000 - DNA, 579 bp, Homo sapiens
tcatggaaacaagaagtcttttaaactttaaagggcatatttaaccttttgagcatttattgagtgcttgctatgtatggaacacttgtgttagatgttgaagataaaaattgttctacattgccgtctgtgccctgaaggagtttaatggattttccctattcaccacctgtctattacaacaccaaggttggaattgaccatgcctttctttgtgccttgtaccttgcatgaacattaaattatttgttttcatgtctkccctcaattaataatctgtatctgtcaatgaatacttattaaagaatcatttcctatccaaagatatgagcaaatgcaaaaggcccagggagggaaggagcttggtatatggagaaacatatagtaggccagtgtgactaagacttggggaattaattcattgagatgaggtcaaagttaacggggccaggtcacatggaacaaagtttctgaacttcagcattattgacagttggaaatttttttgttggtggtagctttcctgtgcattgtaggctgtttatcagcatttctagtctctggccagtagaggcattt

SEQ ID NO: 925001 - DNA, 588 bp, Homo sapiens
cctgttaggaaacctgctgggttaagggaatagtggttaatgttaaatcatcttttttttttttttctttaggataattctgaactagtgaggtgtgctcacaatgaggtttcctctaaaagttattttttttactttcttgtgttagcaaagcagttgtcgctacagattgaatgcatctgggccaactgcaggttactgagttaaggattttttataggaaggctacgggttatcagtggtctcagtgctttcaggataygcccttgtttacactgacaacaaagtggtattggagtgttatagggttatggagaataacttcaattatcaattataggttttaaatttaccctggcttttaaaggaatagggtacaattttttttttaaactacttgtatatctctctccttctctcttcttgactccctctttgtctctctgtctcttcctctctgtctcttactctgtctctttacctcttttcctctctgtgtcttttttttctctctctctattggtctttccttgcctctgtcagccacttatgctgctgttctctcaaccactgtaggggggcgtctaa

SEQ ID NO: 925002 - DNA, 585 bp, Homo sapiens
tctctttctgacacctagagtgtaaagggttttgtcaggtcaggtagccccagggctggggcgatgagtttttaactcatgaaaagcttattgctattggttgtaatagatgtagtttatccaaattatatttttattaagtgtcacycaccaaaatattgactcaaatcctgcagctatttgatttcaagctttaaattgatcttgtattccccatgggactccagttgtgtctaaatagacgtgagagttgaaagacccataagaggcttctcttgctttatgatgtcttatttttcctccctctggttgatgaaatgccagggtaaaagggatagccaactggactaaagtacaaatgccacttaagttattcagcagagtgcccagtaaaggtccaccacaataccaccacacatccactagaggatgaacaagggctgactgattgataaactcttgaaaattcttaagcttactgcatcccttcaggtctccaaggaatgctaagttttctccctgtcatgagagacacaaagtgaacttagtgttgggagacggaggctggatggccctcaggcgtga

SEQ ID NO: 925003 - DNA, 585 bp, Homo sapiens
tctctttctgacacctagagtgtaaagggttttgtcaggtcaggtagccccagggctggggcgatgagtttttaactcatgaaaagcttattgctattggttgtaatagatgtagtttatccaaattatatttttattaagtgtcacccaccaaaatattgactcaaatcctgcagctatttgatttcaagctttaaattgatcttgtattccccatkggactccagttgtgtctaaatagacgtgagagttgaaagacccataagaggcttctcttgctttatgatgtcttatttttcctccctctggttgatgaaatgccagggtaaaagggatagccaactggactaaagtacaaatgccacttaagttattcagcagagtgcccagtaaaggtccaccacaataccaccacacatccactagaggatgaacaagggctgactgattgataaactcttgaaaattcttaagcttactgcatcccttcaggtctccaaggaatgctaagttttctccctgtcatgagagacacaaagtgaacttagtgttgggagacggaggctggatggccctcaggcgtga

SEQ ID NO: 925004 - DNA, 585 bp, Homo sapiens
tctctttctgacacctagagtgtaaagggttttgtcaggtcaggtagccccagggctggggcgatgagtttttaactcatgaaaagcttattgctattggttgtaatagatgtagtttatccaaattatatttttattaagtgtcacccaccaaaatattgactcaaatcctgcagctatttgatttcaagctttaaattgatcttgtattccccatgggactccagttgtgtctaaatagacgtgagagttgaaagacccataagaggcttctctwgctttatgatgtcttatttttcctccctctggttgatgaaatgccagggtaaaagggatagccaactggactaaagtacaaatgccacttaagttattcagcagagtgcccagtaaaggtccaccacaataccaccacacatccactagaggatgaacaagggctgactgattgataaactcttgaaaattcttaagcttactgcatcccttcaggtctccaaggaatgctaagttttctccctgtcatgagagacacaaagtgaacttagtgttgggagacggaggctggatggccctcaggcgtga

SEQ ID NO: 925005 - DNA, 693 bp, Homo sapiens
cctggaagtccctggagggcagcacccggggagggcatggaagctccataccctgtttcctatacctcgccctacgcatttcttcatctgtctcctttgtaatatgctttatagtgtgttgccctgagttctgtgaggcactctagcaaatcaattgaatccaaagagggggtcctgggaaccttaacttgaagccagttgatcagaagcaagttctggaggccggcacttgcaactggtttgtgtgtcaggggttagtcttggggactgagagcccaacctgtgggatctgacactatctccaggtagagtatgggaactgaattggaggacacccagttggtgtctgcagcttggtgagtggggaaaactcccacacatttggtcacagaartcttctgtgttgatgatggttgttctggtggtatgagatggaggaaaaagttagagttttccctacaaatatcttgataagcaagaaggtaatagaagcttaaaacaataagcaaggaagttatagtcagagatatttgattcccctgtggaaactaaagataacctctaaatgtcacagtaagtagctggtcggacatgagaggttgggagagagctcccccgactcccaccaggaacgtccagcaaacattaggtgatggtcaggaagttgttaagctctccctctaaaataataat

SEQ ID NO: 925006 - DNA, 590 bp, Homo sapiens
ctggcaaaatgtctctaatgacaaagacatcatctgctcactaaagtgtatgcatacccttcttcctgggtacgccacttgatacggtttggctctgtgtctccaccctaatctcatctcataactcccataattcccacacattgtgagaaggacgcagtgggagatgattgaattatgggggtgggtctttcctgtgctgttctcgtgacagtgaatgggctcacgagatctgacagttctaaaaacaggagttgccctgctcatgctctctctttgcctgctgccatccacaaaagatgggacttgctcytccttgccttccgccatgattgtgaggcctccccagccatgtggaactgtaagtccaattaaacctctttcttttgtaaattgcccagactcagttatgtctttatcagtagcatgaaaatgaactgatacaccactagactcaatataccagccccttttgcaattaggagcaggcttgtggttgacttttacagtagagtgggagcagtagtgatttacgccattcagggcaaggctttcaagaagagattgtttcttctccatactccatgttc

SEQ ID NO: 925007 - DNA, 639 bp, Homo sapiens
gtcatgtcagtgtcagcatttgtggtaatggtttgggatgtggaagggggagtgagaagggagataatccttcttcttctccttcttcttctgagacagggtcttgctttgctctctctcccaggttggagtgcagtagcatgatcatggctcactgcagccttgaactcctgggctcaagcaatcctcctggctcagcctcctgagtagctcaggctacaggcgtggaccaccccacctggataattttattttttactttgtaaagatagggcctcgctrtgttgcccaggctggtctcagactcctaggttcaaatgatcctacagccttggccactgcacccagtcttgatctgacttttgaagcactatgtatttaccgtactccagcctgggcaacagagagacatcctgtttctaaataagtgttatctcttagtgctatttctattcttgttgtcagcttgcaagttgatagctggggtcaaaagtgtgacagttgtttgagtcagatttggaccagaacattttctgccacttattccaaggagatggcaagggtcagcggggggtcctaaaagtctcggggccagacattaagtttctgccttctgtaagtcacccaaagatccccaaa

SEQ ID NO: 925008 - DNA, 626 bp, Homo sapiens
tcagcatttgtggtaatggtttgggatgtggaagggggagtgagaagggagataatccttcttcttctccttcttcttctgagacagggtcttgctttgctctctctcccaggttggagtgcagtagcatgatcatggctcactgcagccttgaactcctgggctcaagcaatcctcctggctcagcctcctgagtagctcaggctacaggcgtggaccaccccacctggataattttattttttactttgtaaagatagggcctcgctgtgttgcccaggctggtctcagactcctaggttcaaatgatcctacagccttggccactgcacccagtcttgatctgacttttgaagcactatgtatttaccgtactccagcctgggcaacagagagacatcctgtttctaaataagtgttatctcttagtgctatttctattcttgttgtcrgcttgcaagttgatagctggggtcaaaagtgtgacagttgtttgagtcagatttggaccagaacattttctgccacttattccaaggagatggcaagggtcagcggggggtcctaaaagtctcggggccagacattaagtttctgccttctgtaagtcacccaaagatccccaa

SEQ ID NO: 925009 - DNA, 769 bp, Homo sapiens
gcataaaacaccagactctaaatattatttacccagcatcaagcagatgtttgtttccaaagctacaatctcctctaattggctgatgctgtgctgcatagactccaatgcaagcttatgttctataatgaatgacaaatgcctagaagaatcctctgtgaattggcagcctcctcctctagcatgcaaattatgccgaaatcccatcagcagaygcagataagctcatctgcatgattggcaaactagtggataaacacaccccaggattcattgtccaaattcaatttggtggtttcatctccattttcagtgatcatttatttgttaatttattcattagccaacatgatgaagcagctattcggaaacaggcactgtcttaggctttaggaatacaaaggtaaataaagatatggtctcttccttcaagaagtccacaatgaaggaagtgagacgaggccgggaaagaaaacgaactaggaacaagtacaaaactagagatatgggcaaatgtcagtggtgatacagaggaggggtgatcaactctacctacaggggttggagatggtgccacagattttcatggtgtagcttagaggaagatgttagctagacagacaaactgtagaaaggggggtttccatcaagagtgttctcttgctgttgcaagaacacttgacgacgtgcgtcctgttctgggaaccacaggagttttatctggctaaagcagaaggtgccagtgtctgttctattttggctcctttaa

SEQ ID NO: 925010 - DNA, 641 bp, Homo sapiens
acacattcttctcatcagcacataaaacagtctccaggatagaccatatgttatgtcatgaaacaagtcttaataaatttttaaaaattgaaatcatatcgggtatcttaacatactgctgaacaacaaatgggtcaatggagaaattaaaaggaaatttaaaaattccttgaaacaaatgaaaacggaaacacaatataccaaaacctacgggatacagcaaaagtagctctaagagggaattttataaaaataaatgcctgtatcaaaaaagtaggaagatctcaaataaacaacttagtgatacacctcaaggaactagagaaacaagaacaaagccaacccaaaagtartagaaggaaagaaataataaaaactacagcagaaataaaactaaaaacaatacaaaagatcaatgaaaagaaagttattttttgaaaaataaaattgacaaaactttagcaagactaagaaaaaaaaagagaaggcccaaataaataaaatgagagatgaaaaaggagacattaaaactgataccacagataacacaaaggatcactagagactattctgaacaattacctgccaacaaattggtaagcctagaataaacagataaattcctgtacacatacaaccta

SEQ ID NO: 925011 - DNA, 756 bp, Homo sapiens
aatttttaaaaatcaaatttatatcaagtatcttctcaaaccacaatggaataaaactggaaattacctccaataggaaccctcaaaactataaaaatatatggacattaaataatctgctcttgaatgatctctggttcaacaatgaaatcgagatggaaattaaaaaattatttgagctgaacaataatagtgccacaacttatcaaaacctctgggatacagcaaaagtggtactaagaggaaagttcatactattaaatgcctaaatcaaaaagtctgaaagagcacaatctaaggtcacacctcaaggaactagagaaacaagaacaaaccaaactcaaaccccgcagaagaaaagaaataacaaagatcagagcagaaytaaaatggaaacaaccaaaaaaaaaaaaaccactacaaaagataaaagaaacaaaaagctggttgagaagataaacaaagctgatagactattagtgagattaaccaagaaaagagcagagaagatccaaataagtccagttagaaacgaaatgggagctattacaaccaataccacggaaatacaaaagatcattcaaggctactatgaacattgttacatgcataaactagaaaacctagaggaaatggataaattcctggaaatatacaacccttctagattacaagcagcaagattcaaatggtaaaaaacaaaaaaaacaagaaacaaaaacaaaaaactgcctgccaatgaagaaaagtccagga

SEQ ID NO: 925012 - DNA, 596 bp, Homo sapiens
tgttttggataggaatactattcatcttaagtgagctacagaaagaaggagttcaaagccactgatatgggtgtcaggtaaaggagtgttggaattagaagtgggaagaaaggaatggctaagaatgacattgcagatgtagaatccacagtgcttgcagaacctatggcataagtgatcatgagattaggagtctaaytgacccagaaatgtttatgtttgatgactaggagaaaggtaatgtaattaatagcacaaatgtcagctgcagaagttagtttgtgggatattctaaattcaaaacagagatagaagtattcactaaagaaaaaaatatttaaaaatatcatgggggtgaggagtggagttttgaaagaacacctacatttaagaagataagcctccttaaattcttcatggaacaaaggccaagtgcaaataagacacactgggtggacagacatataaatggataagtacatggaatgactgatttgggggtagattgagaagagacagtgaaaggtacaaatgaaagagtttgggagaacaaactgccaggaaagatgaaaagaaaatatttgcagctttgtaca

SEQ ID NO: 925013 - DNA, 647 bp, Homo sapiens
tgcttgggaggctgaggcaggagaatcgtttgtacctgggaggcagaagttgcattgagccgagatcacaccattgcactctattgcactctagcctgggtgacagggcaagactccatcccccccctccccccgccaaaaaaaaaaaaaagcattttaaaataacaggagcrttcactacaaactgacttaagagcctttgggccttatgagaacattggtggtagtctggcagtagccccccatggcctgtgtttgagttggccatggattgatgctcctctgcctttggacagtggtggaaagagtgggagggactgcatcttgtggtttgagcgacagccatagcacaataaaacactaggtagacttttacactttttgatctagccctgattcccagacagcacctttggatccacctggaggctaggagaacttgccatcctgaagggaaggacacagacctggctgtttttaccatgtgatgactgtagaaccccagggccttcagcaaactcctgcaatagctaaggagtggttacagcaggtcttgggcaagaccccgtgctgtgctggcctcaggtctgacccaatgcagtcatagtagtggtggccacagaggtgcttatgtcactcaaccccaa

SEQ ID NO: 925014 - DNA, 647 bp, Homo sapiens
tgcttgggaggctgaggcaggagaatcgtttgtacctgggaggcagaagttgcattgagccgagatcacaccattgcactctattgcactctagcctgggtgacagggcaagactccatcccccccctccccccgccaaaaaaaaaaaaaagcattttaaaataacaggagcgttcactacaaactgacttaagagcctttgggccttatgagaacattggtggtagtctggcagtagccccccatggcctgtgtttgagttggccatggattgatgctcctctgcctttggacagkggtggaaagagtgggagggactgcatcttgtggtttgagcgacagccatagcacaataaaacactaggtagacttttacactttttgatctagccctgattcccagacagcacctttggatccacctggaggctaggagaacttgccatcctgaagggaaggacacagacctggctgtttttaccatgtgatgactgtagaaccccagggccttcagcaaactcctgcaatagctaaggagtggttacagcaggtcttgggcaagaccccgtgctgtgctggcctcaggtctgacccaatgcagtcatagtagtggtggccacagaggtgcttatgtcactcaaccccaa

SEQ ID NO: 925015 - DNA, 611 bp, Homo sapiens
aacagcttgtgcagcagcctggacctattgcagagacttctgctcttctgggtccttcttaaacataatgaattttcagattgctcagcaaatgagctgatataagacacacaaagaggaagatgatgcctccaaattcccaagaggcctactgagcattgtgcctcatttttggtagtagaaggaaaaagatgcaagaacttacccttcacatgagaagggatatttcaacatgccccataccactggacccttagaaatttcatggaggcagaaggcccctgaattttagacaaatttatttcctaccctctgacactcaaatgttgtaccaacaagcccagagtggttgctacttctcgctcactaggtccaatcagcataatgtcatcaataaacagaacagwgtaatatctcatggaagagaaaggtaatcacatctctgtgaactaaattatgacttagagctggagaactgatagaaccccaaggaacaatagtgaggcatgttgctggccttgccagctaaaagcaaactgtttcttatgagcgttatggacaggcatggagaaaaatgaatttaccagataaatagctacatgtcagttctc

SEQ ID NO: 925016 - DNA, 796 bp, Homo sapiens
gctcccctacctcaccttcttaccagtttctggtaaccactatcacactctctatttctatgagatgaactgttttagattccacatatgagtgagatcatgcagtatttgtccttctgtgcttgacttatttcacttcacgtaacatcctctagttaatccatgatgtcacatgtgacaagattttattctttttatggctccataatattccgttgtgtatatataacacatttttaaatctattcatccattaaaggacacttacgtcgcttctatctcttggctattgtgaatagtgctgcaataaacatgggactgcagatatctctttaacatactgatttcatttcctttggctacatacccagcaktgggattgctgggtcatatggtagttctatttttaattttttgaagaacccccatattgttgtttataatggctgcactaatttacattcccgctaaaggtgtggagaaagggaaactcccctggcttttggtagcactgtgatgcccatccccaccccagtctcctcgcctcctgcccctcccccatgctggaatttccccaatctgcctgagcatgggctcccctttctccacatccccgccagcatttgttattttttgactttttggtaatgcagagaaattgaaagggtgaaatgaaaacaaaaagaaaatggcattcacacagtcaacctttatttgtctactgcagtaaaacttgatgaacctgctttatagagtagaagacggctgggttctagtatggactctccagcattgg

SEQ ID NO: 925017 - DNA, 710 bp, Homo sapiens
tgtcgatatagtcctgccatctaactcaacaccaatcattgtaaatgtcttttacagaaaaggatctatttcagagttggacatgctattagttgcaatattgcattcctgtcctacaacttaaaacaactccccaggcttatataagcttaacgtttttgaagactgtgcatttgttattttacaggatgactcttggtttggagccatctgatatttgctcatgatggtgtgcaggtctgaatctttggcaggaaaatcacagaagtgacgttctgctctcactgcaccctaaatgccagcacaagcttggacccctcctgctactcaggaggttaactttcrtcacctgatcaagggggtgtctctcaggcttctccatttttaactcactctttcatattttgtaatgaataaatatgctgtggggtggtgctttgacactataaatattctgtttcttaacaaacatgtaagttatttacttatttatttatcagtaggaacttgtattttccattttagtcaatggattataaaccattactgtcagcctttattttgatgttcaaatttccgtcatgtttatatcacatcataatatcgccaacacttcatgctggcttctgcatccatttgacatgttcctatccttttttaagaacctcattacttgctggtacaagatgtttcaggctgattttgttctt

SEQ ID NO: 925018 - DNA, 730 bp, Homo sapiens
gtgccagggcatttttcttttttcttttttttttttttgagacagagtctcactctgttgcccagcctggggtgcagtggcgcgatctcggctcactgcaagctccccctcccgggttcacaccattctcctgcctcagcctcctgagtagctgggactacaggcgcccgccaccacgcccggctaatttttttgtatttttagtagagacggagtttcaccatgttagccaggatggtttccatttcctgacctcgtgatccgcccaccttggcttccagagcatttttcaaggatccctctggcagctcactggagtcagggtgggagctggaagactggctgggggccatgggggttgcccagagaggtatggtgcccagactgggtggtggctgtgcaggctgtgagcagagggactgatgaggtttgaggtgagctggggggtgaggtggggggtcggggggtcgtacagggcaactgtggatttcagcttgggcagctaggcgggtggatgagcttggagtgagactggtctcggttttggccaygtggagttggacatctgagggtgaactgagtgaggagattggtgtgcaagggtctggagttgtgagtgatgcttctggcctgagggaaagggaatggggtgaatggaatagcagccagccttgagcctggagtgagaagcagagaccaggctggccagggtctgagggcttcctgcgga

SEQ ID NO: 925019 - DNA, 652 bp, Homo sapiens
gtttattttccctagggaagtgccctgaagtatacaagatgtgcaccttctcccaaaccagcagagttgagacaactgccaagattcactcctgctgttaagatctgtgtgctgactgtaggagcttgtgcaggccatcacaggtgtacacagtgcactgtccacctggggggtggtgcatgaggcactgagggtttacattgactggtttggggagtccacaggcaaggtttgtaggtgggccttttggtggagtctgcaagttagtcagcaggatctgtggcaggctgttgaattccacaccctggtttctgttactccctgcctcttcttcctgtgcctagctgctctcacascattcagttatgttgaacttctcagtgttctgggtaagaaaagacctacaaggggctcctggaagactggggaagccaggagctcacttcacttataccttgtttcatgggaaaaaaaatcacaactgagaggactcagcagagagagtattgaggagggaaaatatggataaaatttaacttcccttctttctctctttaatgtgtccactcttggattttttactttactggggtgctggaacttctcagctagcttttgaactcccacaaagatattctcatccatgaatgct

SEQ ID NO: 925020 - DNA, 804 bp, Homo sapiens
ctggggtgagagaggtattgtactgttgtctctgtatttttcctttttatagtgtcttttgtgagattcttaatttatatattttccttctttttattttccaatatattaaatggtgattatccttctcttcttactgctttgtcttctgtctgcagaatttttttttttttttttttttttgagacagggtctccctctgtcacccaggcttgagtgcagtggcgcagtctctctgcagcctcaaactcctgggctcaagcgatcctcctgccagttctgagtagatagaaccacaggtacccgccaccaagcctggctaatttttaaattttttgtagagacagaatctcaccatgttgctcaggctggtcttgaactcctaggtttctgccttggcctctcaaagtgttggaattataggcatgaggcaccacacctggcctgcagattttgatatgtagtttctaactaactatattctaactttatgtttgaattttttaaactgaagagttagtgtaaatatrttttaaaattttttagtggatttgttttaactactttttcactactaatctgtaacggtatagcacatactctgccatttggagtttattcaaatttcctgttacatgctacatggcattttgtgggggaagacacatgagtatttgaaaacaatgtcactttctgttttggggagctcactgttttatggatttattagttcaggctggtcatcagtgttatttaaattctgtatacacttactgattttttgtttatataatatagtagatt

SEQ ID NO: 925021 - DNA, 570 bp, Homo sapiens
aggttgcagttaacagagatcacgccactgcactctagcctggatgacaagagccagactccgtctcaaaataaataaataaataaataaataaataactagaacaagaaagaaagaaaaaggaaaagatgtggaaaaggtagaaataagtcagtgtattctgcgggactacataagacaaaaggacaagcacttctctctttccttctccatcacaaacaaacctttccgtcagatttagtgtaagttttatcaaactgtatgtcacagaatagtcagaatatcctgtagctgggaaattccttttattctgttttcttttgttgaaagcaaaactcgtatcacgttattaatgcacaatttcctgggtkaaaattaactttggggactccctgccaaaggaattcaagccccgctctatggaaggaaaaaaaaagaagtcaaattcccttctccgctagctcagaagaggaatgatgaaggtacgtgctgaagccgatctgtcggccacgtgcttttagcaccaagtggttcttgtgcagtctgtaaacacaggcagggtcctgtgac

SEQ ID NO: 925022 - DNA, 600 bp, Homo sapiens
aaatcctttatttctttctcttttctgattcctctagctgagactcccagtactatgttgaataacaggggtgaaagtgggcatccttgtcatgttccagatcttagaggaaaggctttcagcttttccccatttactgtgggtttgtcatatatggtttttattatattgatgtttgttccctctatattcaatttttgaggttttttttttcatgaaaggatggttgaattttatcaaatacttttcagcatcaattgatatgatcatatggtttttatccttcattctgatgatataatgtatacattgattgattcatatatgttgaaccatccttgcatccctgggagaaatcccacttggtcatgatggataatctttttaatgtattcttgaatttggwttgcaagtattttattaagtgtttttgcatcaatattcatcaaggatattggcctgtaatttctttttttttatgtgtctttgtctggttttggtatcagggtaatactggcctcatagaatgagtttggaagtattccttcctcctctatttttcagaacagtttgagtagggttagtattagttcttcttta

SEQ ID NO: 925023 - DNA, 573 bp, Homo sapiens
attagcaaaatagacagcaaggttaaatggtggtaaatgctatggagaaaatgaggcaaggaaatagtagcaagcagggctgcaatgttatatagaacaacgaggaaggtcctactgagaaggtgacagttgtgtaagattccaagaggtaagagagagatcagtcawatgcacaacaggtaagggtattccattccaggcagagatagtagcaaatacccaaagcagaaacatgcttcaggcatggaccagaaactctgaggccaggatggctggaacagagtgaataagtaaggagtagaaaggtgatagggcattataatgatgttgtacttttattatgaacaagaaaggaagccactgacactgtaaaagacttactccggctgttatgttcagcaaggtcgggaaagaaaagcagagaaaccagttaggagtctattagcaataagacaggcaagaaatgctgctgggttggactgcagtggtcacagaagaggtagtgagaagtagatggattttggaagcattttgaagatggagccaagtttaacgtaccagttataaaagtga

SEQ ID NO: 925024 - DNA, 619 bp, Homo sapiens
acctgctgagtgacacctctgggcttgaagactggcctgctcagcctattgtggccacttccaacatcaacacaccactcgggaccccgagaaacatcctgtcatttctacactctttgcccatggcacactgactgccaaggaggctgaaaatctgcctgtccactcaggccactactaactaccagcatccaagccagccatctrgaggcacaggtgccagcatacactaccctgggacacaaagacaagcatgctgaacacaacactgccagcactggggcctgaaaactaacctacctggcatcctagtccccagcacaacttcaccacagcctctactaataaccataccctaaaccactatggaaatcaggtaccattaatgctgtttacagccaaataaatcctacagaggctacactactgcatacgcccagaatcaaaaccaaagtgtccttcccatacaacaccatagattcatctttaggacaaagtcttcctctatgaaagtaaatgcaaaaatagaaagaagcaattgttacaccaggtacacagatatcaatgtaagggcataggaaacatgaaacaacaaggaaatatgatactttcaaaggaa

SEQ ID NO: 925025 - DNA, 612 bp, Homo sapiens
acagccaggttttctgttcccctgcccttaggggtgttggggcaggcaacagcaggttaccatttgtccacatacctggtcgaaggaggtcatccttagtgtgtatctgcaactcaatgggggtggtggcctagtgtaacaaggactccaccagggccaggctgcctttctgtggccatttattcaaggcttggagcatcagatcaaaactgggactccagtcttgcaaagatgggggtgtgacatgcaagcrtaactcattcttcaaaagcccattctattgcccaatcatacccacagcttgcaggttgtttggcacatggaatctcgactttatgtcatttgttgttccattgttgtacctgttgtctggtgaaatgtgttccctgtcactcacagtgaccagtgggtgaccatacagggcaataggtgtgcagtgcctggatggtgcactgttggtgggctacctgcaagggagggcgaacaacaggcatgtggccatgtccatagctgttagcatatgcatatacccttgtgactttggcagtggcctaatgtattctacttgccatttagtcaaaggcacacagcctagttgttacttgttgtgta

SEQ ID NO: 925026 - DNA, 582 bp, Homo sapiens
acggtatgcctgagcacgtgccgggcacttctgtcaagcctcccagatgtcttgcatgggcagggacagtccctaatgcttctcgacctgttgcatcagtttaccactgcatgtcccagttttcagtgtagcyacaaggtcccatctcatgtaggtgccaatctaaccattggaccttgaccaaggtgtctgcctcatcattgccaggagtggcaaaggctactgtcatgacacatgatatatagttacttctttctgataacccatttcccagaggtcttgccacatgacttggccccaaatgggttggtggctgactagctacttatttattttccaggtagttaaccaccaaggttaagccctgataggctactcaactatcggtacagattaccataggtatcacctccttgaagatcatactgctctgaagtcagcccattgactactctgtccacacccatttttaaaccatatgatgtcagtaccaggttggactgcaacagtggtccaggccagagcagtaccttggctagacccatctgtgtaccatgccccaccgggaatggggagatgccc

SEQ ID NO: 925027 - DNA, 582 bp, Homo sapiens
acggtatgcctgagcacgtgccgggcacttctgtcaagcctcccagatgtcttgcatgggcagggacagtccctaatgcttctcgacctgttgcatcagtttaccactgcatgtcccagttttcagtgtagctacaaggtcccatctcatgtaggtgccaatctaaccattggaccttgaccaaggtgtctgcctcatcattgccaggagtggcaaaggctactgtcatgacacatgatatatagttacttctttctgataacccatttcccagaggtcttgccacatgacttggccccaaatgggttggtggctgactagctacttatttattttccaggtagttaaccaccaagkttaagccctgataggctactcaactatcggtacagattaccataggtatcacctccttgaagatcatactgctctgaagtcagcccattgactactctgtccacacccatttttaaaccatatgatgtcagtaccaggttggactgcaacagtggtccaggccagagcagtaccttggctagacccatctgtgtaccatgccccaccgggaatggggagatgccc

SEQ ID NO: 925028 - DNA, 593 bp, Homo sapiens
taaatccaactctgaaatgcaggtctccagcattcttgctatttctcctgcattcttgctatttctagaactttgagcaagtgttttcctctctgaatctaagttcagtatgaataaatgaaagtaactccttataacacagtttgttgtgaagaataaagacaatatttagcacctgtaatataattggcacttaataagtttatctaaggagggcagtaattaggaagaaaaacaggtgagttgttatccatgtgtaaaatatgacggatttagtgaagtgaaaaccaaagcataatcaggtcctaattaatcatctttaaaaagatacataacattatattgaagaataagcaactatcaagaaatacctattacttagtacaacatttaaatatttgrtgttacaacttgtttgtaggaaatgagaaaggaacttatttgcatagcacacattattacatagaagatcaacagggagaattactgtttatgaaacgcttcagaataagtcatttctcatcatcacaaccactcttcgaggcaggcatttcatccctgttttacgggtggaaagtatgggctcagagagt

SEQ ID NO: 925029 - DNA, 594 bp, Homo sapiens
gccctagagatctgtggaactttgaacttgagagagatgatttagggtatctggtggaagaaatttctaagcagcaaagcattcaagaggaagtggagcataaaagtttggaaaatttgcagcctgacaatgcgatagaaaagaaaaccccttaactcgtcatttagcattaggtatatctcctaatgctatccctccaccaacatggcacatgtatacataggtaacaaacctgcacattgtgcacatgtaccctaaaatttaaagtataataataataaaattaaaaaawaaataaataaataaatgcaattaaaaaaataaataaaaagaaatttatttaaaaagccaaaaaaaaaaaaaaaagagaaaagaaaaccccttttctggggagaaattcaaaccagttgcaataatttgcataagcaacatgaagccaagtgttaatcatcaagacaatgggaaaaatgtctccaaggcacgtcagagaaattcacagcagcccctcctatcacaggcatggagacctaggacggaaaaacggttgccaggctcaaggcacccttttgttttgtgcagccttggaacttggtg

SEQ ID NO: 925030 - DNA, 526 bp, Homo sapiens
tgctgtaaagagttaaaactttggtggatgttggaaagacataattgtattttgcaatgtgagaaggacatgagatttgggaggagccaggggtggaatgatacggtttggacctgcgtccccactcaaatcttatgttgaattataatccccaatgttggaggtgggtcctggtggaaggtgattggatcatgggggcaggttttcccctttgatgctgttctcatgatagagttctcaggggatctgtttgtttaaaagtgtatagcatcttccccatgtctttctttatcctgctccagtcatgtaaaatgtgcctgcttcaccttcactccctgtcatgactgtgagtttcctgatatctcyccagaagctgctatgtttcctgtacagtctgcagaactatgagccaattaaaccttttttctttatacattacccagtccaggtatttctttataacagtgtgagaactgactaatacacagggcaattatattaaaatctctttgatcattcctcttgt

SEQ ID NO: 925031 - DNA, 638 bp, Homo sapiens
gctgatgccatggaggggacatgtagaccagccctagccatagggaattgcacatccatgtgcagaacactgagtttcagaagcctcaccaccgtgctctaagtgctgtgggtcctaaataacttgaagcttgtctagatacaaggctgcaactcctagcaaggcctagagctgtgctgggattgaagccagtggattttgggggcatgtgacctagtgctgtgctggcttcaggtctgatccattgcagtcccagtggtggtggcccaggggtgttttgtcacccctcctcaagctccaggcaggtcagcacagagagagagagagttccttttgtatgggggaaagtaagaaaaaaaaaaaaacactatctgtctggtaatccagataattacttcagtctcatccaagaccactaaggcagtacctctacaagwctgcaaggactacaatgttactggacttgaagttcaccctaaagaagatatggctgcaatgaccaaaatcttatatcgcagcacccaagtccatttgaatacctggaaagccttcccaagaaaatggtacagccaagcctgattgtgaagactacagtaatacctaattcttcaatgcctagacattgagaaacatccaca

SEQ ID NO: 925032 - DNA, 722 bp, Homo sapiens
gggcctctgggggtggcatcacatatgggtaggactgtgaagcccacctgagctgtaaaaccagcaagtttttattaaggatttcaaaaggggagggggtgtaagaacagggagtaggtcacaaagatcacatgcttcaaagggcaaaaaggagaacaaagatcmcatgcttctgaggaaacaggacaagggcaaaaccagaaactgataagagttcaacaaagatcacaaggcaaagggcaaaagcagaattactgataagggtctaggttcagcagtgcacgtattgtcttgataaacatcttaaacaacagaaaacagggtttgagagcagaaaactggtctgacctcaaatcagggtgggggtttttccccaccctaataagcctgagggtactgcaggagaccagggcatatttcaatccttatcccaactgcataagacagacactcccagagccaccatttatagaccttccccccaggaatgcattccttccccagggtattaattattaatattccttgctaggaaaagaatttagcaatatcttccctacttgcatgtccatttataggctctctgcaagatgaaaaatatgactattttgcccaaccctgcaagcagtcagaccctacggttgtcttcccttgttcccttaaaattgctgttattttgttctttttcaaggtgcaccgatttcatattgttcaaacacaca

SEQ ID NO: 925033 - DNA, 698 bp, Homo sapiens
accatttatagaccttccccccaggaatgcattccttccccagggtattaattattaatattccttgctaggaaaagaatttagcaatatcttccctacttgcatgtccatttataggctctctgcaagatgaaaaatatgactattttgcccaaccctgcaagcagtcagaccctacggttgtcttcccttgttcccttaaaatygctgttattttgttctttttcaaggtgcaccgatttcatattgttcaaacacacatgttttacaatcaatttgtacagttaacacaaataccatagtggtcctgaggtgacctacatcctcagcttatgaagataacaggattaagagattaaagtaagacaggcatcagaaattataagagtattatttggaaactgataaatgtccatgaaatcttcacaatttaggtacctctgctgtggctccagccggtccctccttttggggtccctgacttcccacaacacagcttccccatttccttaccccaggacacaccaggctgggtcccagctagaaaggcatacttttttacccattctgtttattctgcatggaatagcctgcacatctcttcttcacaccacttcctccttacctttccacattcaaaggtcacttggcctagaaagatttttctgactctcttctgggcccgtcttcatcccagc

SEQ ID NO: 925034 - DNA, 612 bp, Homo sapiens
ccagggcaataacaccaaaacagtgatgtttcatcagcaatacagactcattctggcatgagattttcaacagctttgagcttggcaagcatgccaataaatttcttcactgcttcgtgattagcagatgttttatcaccacacatcttttaaaatttaatgctgtgtcttttcttacatttctgcaaccaggctgttgaatgttcacagttcctttcaattttcagttcaacgtgatagatctttgcttgtttcataagcagtaytccattaagtggcaggtgttcactgcaatgctgatgaatccactctttcaatacacaattaggatcttcattttttgctttatgcggtgcttttctatttttcattaacgtctgttcattactttcagcacagatcttcaacggtttatccttctgtttcttcagctcatgtatggtggtcattccaacagggtactcttctgtttcacacttacatcattgtccagtttctccaacagcatgactttctgtgctatagataaatacaaatccttcctttttttcttatcactgttactcacaggggtatctgctgacctttttgacattttcaacactatcttta

SEQ ID NO: 925035 - DNA, 667 bp, Homo sapiens
attaggatcttcattttttgctttatgcggtgcttttctatttttcattaacgtctgttcattactttcagcacagatcttcaacggtttatccttctgtttcttcagctcatgtatggtggtcattccaacagggtactcttctgtttcacacttacatcattgtccagtttctccaacagcatgactttctgtgctatagataaatacaaatccttcctttttttcttatcactgttactcacaggggtatctgctgacctttttgacattttcaacactatctttacatcacataagaagacaattcttccccatccatgaacactgaacatttttccatttgtttgcatcttcttcaatttctgttatcaatggtttatagttctcagtgtacaggtgtttcactggcttggtaaaagttattcctgaaaattttatttttttttatttgtaaatggaactgttttcctaatttctttcttggatagctcattgtcagtatatagcaatgcaacgaataascaaaaaacatggtgagtaacgcacacacgtcttggccatgtggaacactgtagggaaactgccattggcacatccagcctgcacacatgacattttcttactctttgtgggtgtgtgtggggaaatctgtgcgtgtgcagaa

SEQ ID NO: 925036 - DNA, 513 bp, Homo sapiens
ggggcagcaatgttcgcagcagtcagggcccctagccgaggctgcgcaacaagtaaatggagggtaggggctgagatacggccgactgcaggcagcgcctggcagggacccccactcatgccccgggctccttagagtagcaggtgggcgttactcagcctagtcaggtgggtcacttaattaatgagaaaaggaaccagatgaacaccccggggagtagttcccacggcctggggttgttcaccgggtaagtgagttcttatttgtaaagcacgtaggtgaaggccacacaggcagggygaagtaaatgtttgcagaatggtcttgccacccatcacctggtaaggttttgaagctgttcatctttgacatggggtcaaggcatttctgcagacctgagtatcccgcatgtaaatcacccttcttatgtaaattattcccagaaatgtcctctaccgtttccagttgtagtttcaatgcgttgaatggagaacagaggacacgtgtggagcc

SEQ ID NO: 925037 - DNA, 601 bp, Homo sapiens
gggattcaggatgtcatgtcctgaggcttcacagagcagcaggaccctgggccttacccacaaaaccatttctgcctcccaggtcttcaggcctgtggtgggaggggctacagctaaggtctctgaaggcactttccccattgtcttgtctattaactttcagctcctgttatgcaaatttctgcaaccttctggrtttcctccttggaaaatgagtttttcttttctaccacatgatcatgctgcaaatttttcaaacttttatgctcttcttcccttttaaatataaattccaatttcaggtcatttctttgtttatgcagatgcgtgtaggcttttagaagcagccaggtcacatcttgaattattttctgcttagagatttcttctgccagataccctaaatcatcactttcatgttcaaagttccagatctctagagcaggggcctaaagctgcttgtcttttcactgaggcatagcaagagtgacctttaccccagttcccaaaaagcttctcatctccatctgagaccacaatgtgtccatatcattatcagcattttggacacaactatttagcaagtctctaggaagttcca

SEQ ID NO: 925038 - DNA, 601 bp, Homo sapiens
gggattcaggatgtcatgtcctgaggcttcacagagcagcaggaccctgggccttacccacaaaaccatttctgcctcccaggtcttcaggcctgtggtgggaggggctacagctaaggtctctgaaggcactttccccattgtcttgtctattaactttcagctcctgttatgcaaatttctgcaaccttctggatttcctccttggaaaatgagtttttcttttctaccacatgatcatgctgcaaatttttcaaacttttatgctcttcttcccttttaaatataaattccaatttcaggtcatttctttgtttatgcagatgcgtgtaggcttttagaagcagccaggtcacatyttgaattattttctgcttagagatttcttctgccagataccctaaatcatcactttcatgttcaaagttccagatctctagagcaggggcctaaagctgcttgtcttttcactgaggcatagcaagagtgacctttaccccagttcccaaaaagcttctcatctccatctgagaccacaatgtgtccatatcattatcagcattttggacacaactatttagcaagtctctaggaagttcca

SEQ ID NO: 925039 - DNA, 596 bp, Homo sapiens
ttctccctgtggtctttccccaattccactggcagtcctccccaaggacccctgtgagaaaaagtcagaaatggcttccctgggaatgagagtacccacagggctctccccactgcttcctctacccctgtattttgcttggctctcttaaattcatctcagctccaggtaaggtcaaatccatctcacaagatctggaccttcgggttccccttctcacactttggtygctcacagttttttggctgtctcacggagcctgcagtagcaagctgcttccatcaaagggtctgtggattctctcagcttttatgtttctgcagtatttcttggatcaaaagcccacgatgtgagtctctacaggctgctctgtccatccaagtcggagctgagagttagttctgcctcctacccgccattttttccccatcccttcttgtaagggcactaatctctttcatgaggggctccatttttataagctaatttcctccaaaggccccaccttctaataaatacgtcacatgggagattgaggcctcaatataggaattttgggggaacacaaacgttcactccacagcaacatcaaaaca

SEQ ID NO: 925040 - DNA, 579 bp, Homo sapiens
aggcgtccattaccacgccccgctaattttttgtatttttagtagagatggggtttcactgtgttagccaggatggtctggacctcctgacctcgtgatccacctgcctcggcctcccaaagtgctaggattacaggcatgagccatcacgcccggccaagcatcttttcacgtgtttatttgccatctatctatcttctttggtaaagtgtgtgttcaagatttttgcccattttaaattaggtttttagttttattattgagttttgagagttgtatatattctgcatacaagtcctttatcaaatctttgctttgcagatactttcctccaacctgwggcttttcttttcatccttttcacagtatctttttaaatgcagaggtttttaattttgatgaagtcaggtgtgttaattctttctttcatgggttgtgcttttggtgtcatattttttaaagtctttgcctaactcaaatttacaaatattttctccaatgttttcttctagaggttttatagttttaagtattacatttaggtatatgatccattttgagttaatttttagatataat

SEQ ID NO: 925041 - DNA, 768 bp, Homo sapiens
tgtccctgcaaaggacatgatctcactcctgttgatgacaacatagtattccatggtgtatatgtaccacattttctttagtctgtcattgatgggaatttaggctgattctgtgtctttgctattgtgactagtgctgcagtaaatacatgcgtgcatgtatctttctttataatagaatgatttatgttccattgggtatataccgagtagtgggattgctgggtcaaatggcatttctgattctaggtctttgaggaatcgccacactgccttccacartggttgaactaatttacattcccaccaacaatgtaaaagcattcctctcgctccacagccttgccagcatctgttgtttcatgacttttaaataattgccatttggactggtgtgagatggtatctcattgtggttttgatttgcatttctctgatgatcagtgatgttgagctttttttcataagtttattagccatataaatgtcttcttttgagaagagtctgttcatgtcccttgcccacttttttaatggggttgttttttttttcttgtaaatttgtttaagtttcttgttgactctgagtattagacctttgtcagatggatagattgcaaaaattttctccctttctgtagaatgtctgtttgctctgatgatagtttcttttcctgtgctgaagccctttagtttaatcagatcccatttgtcaatttttgctttggttgcaattgcttttgtcatcttcatcatgaaatctttgcc

SEQ ID NO: 925042 - DNA, 595 bp, Homo sapiens
tttttaatggggttgttttttttttcttgtaaatttgtttaagtttcttgttgactctgagtattagacctttgtcagatggatagattgcaaaaattttctccctttctgtagaatgtctgtttgctctgatgatagtttcttttcctgtgcwgaagccctttagtttaatcagatcccatttgtcaatttttgctttggttgcaattgcttttgtcatcttcatcatgaaatctttgcccatgcttatgtcctgaatggtattgcctagatttttttctagggtttttatagttttgggtttttcatttaagtctttaatccatcttgagttaatttttgcataaggtgtaaggaaggggtccagtttcagttttctgcatatggctagccagttctcccagcaccatttattaaatagggaatcctttccccattgcttgtttttgtcaggtttgtcaagatcagatggctgtagttgcacggacttatttctgagttctctattctgttccattggtctatgtgtctgtttttgtaacagtaccatgctattttggttactgtagccctgtagtatagtttgaagtcaggt

SEQ ID NO: 925043 - DNA, 757 bp, Homo sapiens
cactcttcggagcatctcattgaccagaaggacccatccagggaaaggtaatcaggaggaagggcagtgggcgtgcagaaagataagcacagcttaagcgctggaaagggctggatcagaatccagattcacttacctgctagctgcgtgacctgggcaaattacttaacctctttgagccgaagttttcccatgtctaaaaatcatcatcataataaaggttgctgtgagattgaaataggattagatgagataatgcatgtgtccagcaatcatttgcatgtgaaaccatgtcatataaagagtgattaaggcctggcatggtgtttcatgcctgtaatctgagcactttargaggccaaagcaggaggatcccttgggcccaggagtttgagagggcagcctgggcatcatagggagaccctgtctctacagaaaatttaaaaattagctgggcatgatggcacacacctgtagtcccagctacttgggaggctgaggtgggaggattgcttgagcccagaaggtagaggctgcattgagctatgattgcaccactgcactccagtctgggcaacagagcaacacctgtctcaaaaaaataaaaatggctgggccgggcaccgtggctcatgcctgtaatcccagcactttgggaggccgaggtaggcggatcacgaggtcaggagatcgagactgtagcaggacgagccgcagaaaaaacctctcagacaccgagttgtagaaggaagagctt

SEQ ID NO: 925044 - DNA, 715 bp, Homo sapiens
gaatgttgaatcaatgagaggatttcattactgaagagcttagaaaatgtcaaaggcttgggccggcacggtcgtcacgcctgtaatcccagcactttgggaggccgaggcaggtggatcacgaggtcaggagatygagaccatcctggctaacaaggtgaaaccccgtctctactaaaaatacaaaaaaattagccaggcgtggtggcggtcgcctatagtcccagctacttgggaggctgaggcaggagaatggcgtgaacccgggagacggagcttgcagcgagcccagatggcgccactgcactccagcctgggcgacagagcgagactccgtctcaaaaaaaagaaaaaagaaaatgtcaaaggcttcaaaagaaaataacatatgtaacatgcagctttagattggatgatgaaaaaaccgcactcagatcttcaagccttgttttccttgtgtcattaaaagtgacgagtaccccctccccgactgtcccctccgtcggtctcaggcccctggcctggctgctctccgtgacctgggtctccgcccctagtgcttccccgcagctccaccgtctgtggtcggcggggcctcagtgaccgcacgctctggaccagccccgcaacccgcttcgctacccctcccctccggaaaaccaacatgtgctcctcgcacgcgcgaccgggacccctccccgctcctccggcctct

SEQ ID NO: 925045 - DNA, 715 bp, Homo sapiens
gaatgttgaatcaatgagaggatttcattactgaagagcttagaaaatgtcaaaggcttgggccggcacggtcgtcacgcctgtaatcccagcactttgggaggccgaggcaggtggatcacgaggtcaggagattgagaccatcctggctaacaaggtgaaaccccrtctctactaaaaatacaaaaaaattagccaggcgtggtggcggtcgcctatagtcccagctacttgggaggctgaggcaggagaatggcgtgaacccgggagacggagcttgcagcgagcccagatggcgccactgcactccagcctgggcgacagagcgagactccgtctcaaaaaaaagaaaaaagaaaatgtcaaaggcttcaaaagaaaataacatatgtaacatgcagctttagattggatgatgaaaaaaccgcactcagatcttcaagccttgttttccttgtgtcattaaaagtgacgagtaccccctccccgactgtcccctccgtcggtctcaggcccctggcctggctgctctccgtgacctgggtctccgcccctagtgcttccccgcagctccaccgtctgtggtcggcggggcctcagtgaccgcacgctctggaccagccccgcaacccgcttcgctacccctcccctccggaaaaccaacatgtgctcctcgcacgcgcgaccgggacccctccccgctcctccggcctct

SEQ ID NO: 925046 - DNA, 715 bp, Homo sapiens
gaatgttgaatcaatgagaggatttcattactgaagagcttagaaaatgtcaaaggcttgggccggcacggtcgtcacgcctgtaatcccagcactttgggaggccgaggcaggtggatcacgaggtcaggagattgagaccatcctggctaacaaggtgaaaccccgtctctactaaaaatacaaaaaaatwagccaggcgtggtggcggtcgcctatagtcccagctacttgggaggctgaggcaggagaatggcgtgaacccgggagacggagcttgcagcgagcccagatggcgccactgcactccagcctgggcgacagagcgagactccgtctcaaaaaaaagaaaaaagaaaatgtcaaaggcttcaaaagaaaataacatatgtaacatgcagctttagattggatgatgaaaaaaccgcactcagatcttcaagccttgttttccttgtgtcattaaaagtgacgagtaccccctccccgactgtcccctccgtcggtctcaggcccctggcctggctgctctccgtgacctgggtctccgcccctagtgcttccccgcagctccaccgtctgtggtcggcggggcctcagtgaccgcacgctctggaccagccccgcaacccgcttcgctacccctcccctccggaaaaccaacatgtgctcctcgcacgcgcgaccgggacccctccccgctcctccggcctct

SEQ ID NO: 925047 - DNA, 715 bp, Homo sapiens
gaatgttgaatcaatgagaggatttcattactgaagagcttagaaaatgtcaaaggcttgggccggcacggtcgtcacgcctgtaatcccagcactttgggaggccgaggcaggtggatcacgaggtcaggagattgagaccatcctggctaacaaggtgaaaccccgtctctactaaaaatacaaaaaaattagccrggcgtggtggcggtcgcctatagtcccagctacttgggaggctgaggcaggagaatggcgtgaacccgggagacggagcttgcagcgagcccagatggcgccactgcactccagcctgggcgacagagcgagactccgtctcaaaaaaaagaaaaaagaaaatgtcaaaggcttcaaaagaaaataacatatgtaacatgcagctttagattggatgatgaaaaaaccgcactcagatcttcaagccttgttttccttgtgtcattaaaagtgacgagtaccccctccccgactgtcccctccgtcggtctcaggcccctggcctggctgctctccgtgacctgggtctccgcccctagtgcttccccgcagctccaccgtctgtggtcggcggggcctcagtgaccgcacgctctggaccagccccgcaacccgcttcgctacccctcccctccggaaaaccaacatgtgctcctcgcacgcgcgaccgggacccctccccgctcctccggcctct

SEQ ID NO: 925048 - DNA, 630 bp, Homo sapiens
acacccagccggcccttgccctgcctcggccctcaacttcagggctggctcaggcccaccgccatttctgtcatggagggcagaggaccacagtgttacagccttctctgtaccacgttcgatgggtcccatgctcttgtactgcatccaagaagaatgaggatatgttgacaatcagatagtgaggaggggctggrcacagtggctcaggcctgggaggctgaggtgggaggatcacttgagttcaaaagtctgagaccagcctggccaactggtgaaaccctgtctctactaaaaaaaaaaaaaaaaaaaaaaaaaaaaaaagccaggtgtggtgggcacctgtaattccagctacttgggaggctgaggcaagagaatcgcttgaacctgggatgtggaggttgcagtgagctgagatcacgccactgcactccagcctgggtgacagagtgagactctgtctcaaaaaataaaaatacaaaaattagccaggtgtggtggtgggcacctgtagtctcagctactcgggaggctgaggcaggtgaattggttgaacccaggaggtggttacagtgagccgaaattgtgtcactgcactccagcctgggtgacagagtgagactctgt

SEQ ID NO: 925049 - DNA, 666 bp, Homo sapiens
ctgcccagctcctctgctgctggccagtgggagtggcacgaggtggggctttgtgccagtaaaaccacaggctggatttgcctgcgggccatggtccctgtctagggcagcaattctcaaccttcttgctctcaggaccccaaagagctttcattgtatctattgatttttaccacattagcaattaaaactgagaaatgggccgggcacggtggctcacgcctgtaatcccagcactttgggaggccgaggcgggtggatcacctgagatcaggagttcaagaccagcctggccaacatggtgaaaccttgtctactaaaaatacaaaaaattagccaggcacagtggtgtgcactggtagtcccagttactcgggaggctgaggcaggaaaatcgcttgaacccaggaggcggacgttgcggtragccgagatcgcgccgctgattccagcctgggcgacaagagtgagactccatctcacacaaaaaaaaaataacaaaaaaactcagaaatgctaagtgtacttatttgttgaagaaacttgttacatattactaacatcttttttttttatgagaaatacttttcccataaccaaaaaattcagtgagcagaatggccttgcttgaggtttttgcaaatctctcgggtgtctggcttagtg

SEQ ID NO: 925050 - DNA, 571 bp, Homo sapiens
acgcctgaaatcccagcactttgggaggccgaggcaggtggatcacttgaggtcaggagtttgtgatcagcctggccaacaaggtgaaatataaaaaacatttttttaaatatttctttaacaaaaatataaaaaattagccgggcatggtggcacgctcctgtgataccagctactcaggaggctgaggcagrtgaatcagttaaacccaggaggcagtggctgcagtgagctgagatcaggccactgcactccagcctgggcaacaaagcaagaccctgtctcaaaaaacaaaaaccacaaaaaaccaagtactaggttctcaaccttaaatacggtaattaatcattttagagaatggtgaagtcatgaacttctgatccagcactaatgaagagaaatataataagtcacaagtgcaagccacatatgtgattaaaaatttactgagctgggtgtggtggctcacgcctgtaatcccagcactttgggaggctgaggcgggcggatcacgaggtcaagagattcagaccatcctagccaacatggtgaaaccccctctctactgaaa

SEQ ID NO: 925051 - DNA, 587 bp, Homo sapiens
caaacctagatggtatagcctactatacacctaggatatatggtaaagtctattgctcctaggctacaaacctgaactgcatgttactgtattgaatactgtaggcaattttaacacaatggtatttgtgtatctaaacatagctaaacatggaaatggtacagtaacaatatggtataaaatataaaagtggtatgcctgaataggcacttatgatgaacacagtttgcagaactagcagttgctctaggggtgagtgaatgtgaaggcctaggacattaccgtgcaccactgtagactctacaaatactgtacacataggctacactaaaattgttttttaaaaaccttttctttcttcaataataagttaaccttaatttactgtaactyttttttcctgcaaatgagttactatctccttattcttcatctattctttttttaattattataccttaagttctctgatacatgtgcagaacgtgcaggtttgttacataggtatacatgtgccatggtggtttgctgcacccatcaatccatcatctacattaggtatttctcctaatgctatccttccccta

SEQ ID NO: 925052 - DNA, 767 bp, Homo sapiens
  misc_feature 731, 732, 733, 734, 735, 736, 737, 738, 739, 740, 741, 742,743, 744, 745, 746, 747, 748, 749, 750, 751, 752, 753, 754,755, 756, 757, 758, 759, 760, 761, 762, 763, 764, 765, 766,767: n = A,T,C or G
tactttattaacgcacaatttttttgtgtgagataataatattgtggttatatagtaaaatgttctaattcttaggagatatatactcggtgcttaggggtaaagtttcatgatatctttaacttactttcaagtgatttaacaaaaaaatacagatagttagaggcagatagataagyaaatgctataaaagttaatgataggtgagtctaggtgaatggtatatcagtactcgttgtattattgttttcaactttttatagatttggcatttttcaaaataaaaaatttggaaggccaggcgcagtggtttatacctgtaatcccagcgctttgggatgccaaggtgggaggatcacttgagaccaggaattcaagagtttgagacaagtctgagcaacatagcaagatcctgtctctacaaaagtgaaaaaataagaccaggcgtgatggctcacacctgtaatcccagcactctgggaggccaaggagggcggatcacaaggtcaggagatcgagaccatcctggctaacacagtgaaaccccgtttctgctaaaaatataaaaaattagcctggcgtggttggcaggcgcctgtagttccagctactgaggaggctgaggcaggagaatggtgtgaacccacgaggcggaactggcagtgagccgagattgcgccactgcactccagcctgggggacagagcaagactcgtctcaaaaaaaaaaannnnnnnnnnnnnnnnnnnnnnnnnnnnnnnnnnnnn

SEQ ID NO: 925053 - DNA, 767 bp, Homo sapiens
  misc_feature 731, 732, 733, 734, 735, 736, 737, 738, 739, 740, 741, 742,743, 744, 745, 746, 747, 748, 749, 750, 751, 752, 753, 754,755, 756, 757, 758, 759, 760, 761, 762, 763, 764, 765, 766,767: n = A,T,C or G
tactttattaacgcacaatttttttgtgtgagataataatattgtggttatatagtaaaatgttctaattcttaggagatatatactcggtgcttaggggtaaagtttcatgatatctttaacttactttcaagtgatttaacaaaaaaatacagatagttagaggcagatagataagcaaatgctataaaagttaatgataggtgagtctaggtgaatggtatatcagtactcgttgtattattgttttcaactttttatagatttggcrtttttcaaaataaaaaatttggaaggccaggcgcagtggtttatacctgtaatcccagcgctttgggatgccaaggtgggaggatcacttgagaccaggaattcaagagtttgagacaagtctgagcaacatagcaagatcctgtctctacaaaagtgaaaaaataagaccaggcgtgatggctcacacctgtaatcccagcactctgggaggccaaggagggcggatcacaaggtcaggagatcgagaccatcctggctaacacagtgaaaccccgtttctgctaaaaatataaaaaattagcctggcgtggttggcaggcgcctgtagttccagctactgaggaggctgaggcaggagaatggtgtgaacccacgaggcggaactggcagtgagccgagattgcgccactgcactccagcctgggggacagagcaagactcgtctcaaaaaaaaaaannnnnnnnnnnnnnnnnnnnnnnnnnnnnnnnnnnnn

SEQ ID NO: 925054 - DNA, 752 bp, Homo sapiens
tgcaggctcccttttctctctgtctcttgcactctcttgctcttccaccttctgacaagcgataatgcagcaagaagaccttgaccagatgcagcccctcagtcttggacttcccagcctctagaaccatgagccaaataaatctccttccctgatacattacccagtctgtggtattctgttatagctgtggaaaacagactacaaaaattggtaccaagaagtggagctgttgctataacaaatgcttgaaaatttggaagtgtctttggaactggatgatgagtagaggcttgaagaatttggaggaacagrctagaaaaagcctggattgctgtgaatggagcataaagggagattctgatgaggactcaggagaagagctgtagggaaaactctttgagattaatcgatggctgtgatcagaacgttggtagaaatatgaatggtaaagcccattttgatgaggtctcaggcggaaatgaggaagaaggtgatggaaactgaagtaaaggccattcttgttatgcagttacaaaaatttggcaaaattgtgttagtgtccaagaactttatggaacgcagatcttaagagcaatgaactaggatatctggcaggaaaaaatatctgaacagcaaagcatctgggctgctatgtgtctacttttagtcacatacagtgagatgcaagaggaaagacattaacttaaatttataatttttttttggagatggagtctctctgtcatgca

SEQ ID NO: 925055 - DNA, 752 bp, Homo sapiens
tgcaggctcccttttctctctgtctcttgcactctcttgctcttccaccttctgacaagcgataatgcagcaagaagaccttgaccagatgcagcccctcagtcttggacttcccagcctctagaaccatgagccaaataaatctccttccctgatacattacccagtctgtggtattctgttatagctgtggaaaacagactacaaaaattggtaccaagaagtggagctgttgctataacaaatgcttgaaaatttggaagtgtctttggaactggatgatgagtagaggcttgaagaatttggaggaacagactagaaaaagcctggattgctgtgaatggagcataaagggagattctgatgaggactcaggagaagagctgtagggaaaactctttgagattaatcgatggctgtgatcagaacgttggtagaaatatgaatggtaaagcccattttgatgaggtctcaggcggaaatgaggaagaaggtgatggaaactgaagtaaaggccattcttgttaygcagttacaaaaatttggcaaaattgtgttagtgtccaagaactttatggaacgcagatcttaagagcaatgaactaggatatctggcaggaaaaaatatctgaacagcaaagcatctgggctgctatgtgtctacttttagtcacatacagtgagatgcaagaggaaagacattaacttaaatttataatttttttttggagatggagtctctctgtcatgca

SEQ ID NO: 925056 - DNA, 586 bp, Homo sapiens
caataacaaatgttggtgaggatgtggagaaaagggaaccctcatacactgttggtgagaatgtaaattagtataatcagtatggagaacagtttggaagttcctcaaaaaactagaaatagctaccataccagcaatcccactcctatgtacatatccaaaagaaaggaaaacagtrtatcaaagagatatctgcactcccatgtttctcgcagcactaaccataataaccaagatttggaaacaacctacgtgtccatcaacagacaaatggataaagaaaatgtggcagatatacacgatggagtgctattcagccatttaaaaaaaatgtgatcctgtcatttgcaacattaatggaattggaggtcattatgttaagtgaagtagtcaggcacagaaagacaaacttcatatgttctcacttatctgtgagagctaaaaaactaaaacaactgaactcatggagatagagagtagaaggatgattaccaggggctgggaagggtagtaagtggggagaagtggcaatggttaatgggtaaaaaaagatagttacaaagaatgaataagacctactatttcc

SEQ ID NO: 925057 - DNA, 593 bp, Homo sapiens
aactctcatacagtccagcatatattctgggcatatatcaaaggaaataagtatcttgaagagtatctgtatcttccttgtttattgtgatattattcacaatagaaagatatgaaatcaccctaagtatccatcagtaaatggatgtataaaggaaatgtggtacatatataatgaaatattattcagccatgaaaaaagaatcttgttatttrtgaaaacacagagaacatgaagtatgttatgctaagttaaataaaccagacagatagaagcagagtagaatggtggttaccaggggtatcagagagggtaatcataagatattggtcaaagtataaaactttcaggtgaataaaagcattgtggggatctaatataccacataggtgatgacggacatgttaattaattagattgtggtaatcgttacacaataatatacacatcaaatcatcacattgtacacctttaatatatataaactttatttttcaattaattatttaaaaataaatacataaattaacaaatatttgaatatcttagtgaagtatcaattcttactttgatgggaagaataatgtcttatt

SEQ ID NO: 925058 - DNA, 743 bp, Homo sapiens
gtggaaggggaaaaggaaacattcttcttgatgaggcggcaggagagagaagtgctgagcaaagggaggaaaagccccttataaaaccattaggccttgtgagaacttactgtcatgagaacagcatgaggttaaccatccctacgattcaatgaactcccaatgggtcccttccatgacacctggggattatgagattggggtggggacataccaaatctcatcatatcaaagcaaatcaatccatccctgccacctcccatatctcatattctcacatttcaagacacaataatgcctttccaacagtctccccaaaccttagcattaacccaaaaattccagcattaacccaaaagtccaaaaccaaagtctaatatgagacaaggcaagtcctttacacctatgagcctgtaaaatcaaaagcaagttagttacctcctagatacaataggggaacaggcattgggtaaatacacccattccgaatgggagaaattggccaaaacaaatgggctacaggcccataaaagtctgaaatccaataggttagtcattaaacctaaaagctccaaaatgatcttctttgaatccatgtcttaygtccaggtcatgctgatgcaagaggttggctcccgcagtcttggtcaactctgcccctgtagctttgcagggtacgattcctctacaggctgtcttcacaggctttgcactgagtttctccagcttttccaggcacatgg

SEQ ID NO: 925059 - DNA, 494 bp, Homo sapiens
ttcattctatcacagtctttcacaatgcaaaagttttaattttcatgacaatgaattaatcatttcttagtttatatatagtgcttttaatgtaatgtccaagaactcttctctaaccttaggttccaaagatattctcctaatttttccaatagttttatatttttacatttaaacccatgatacatttgagttaatttttgataaggtataaggtttaggttgggattaatttttttgcctatgcacacccagtgactccagtgccatgtgttcaaaaggctgtttctccattgaattgtgttaataactttgtcaaaaccaatttgttatatttgtatttgtctgtttctgkggtctctattctgttctattgatctttgtgtctattcccctgccaatactacgctgtcttgaatatagtatctataaagaaatccttaatattcaattcaaaattattcaattcaaatttcaattcaaaattcaattca

SEQ ID NO: 925060 - DNA, 592 bp, Homo sapiens
gacaaaggtagtccaatgatcagactatagtctgaatggaactaaacctctctgaagcatttaaaatcatcaatctttcctttgttctgtaaacattttatttcagagatgcttatattctcctgggtttccttctgtctcaggtacctcctctgattatttgatggattcttctttatagtcagtaaatgctgtactggctcaacattttctctctctttttctttgcctaggtaattgtgtccaaatataacagctttaaataccatctatatgctaatgactactaaatttatatcttcagtcccaacctcttccctgatttctccagagttatrtaatcaatcacgtacttgaaatgtccacttggatcccttacaggtatctcaaacctagcacaaccaaacaggatccttgattccttcttcacatagtagacttctcatttctacttcttgcccatcttaaacaatgggattaccattgaccaggttgctcagataaaacaatcttaagtattttctttgatttctctctctcagatttgtcatcaacacatcaacaagtctatcatgtttcccttcagaatatc

SEQ ID NO: 925061 - DNA, 711 bp, Homo sapiens
agtggctgggatgcaaggtgccatgttctgaggctgtacggagcattgggatcccgggcctggcccacaaaaccatttttccctcctaggtttctaggcctgtgataggaggggcttctgcaaaggtctctgacatgtcctggagacattttcctcattgtcttggctattaacattcagctcctcattacttaggcaaatttctgcaaccatcttgaatttctccctagatattgtattgttgcttttttgttttgttttgttttcttttctaccacagagtcaggatgcaaatttttcaaacttttatactctgcttttaaatatatgttccaatttcataccatctcctttccacatgtatgagcattctcttttagacacagacaggtcatgcaatacatatgactgcatgtttttaatcaaaagccaggttatatcttgaatgctttgatgcttagaaatttgtctggccagatatcctaaatcatctttttcaggttcaaagttccacagatacctagggcaakggcaaaatgttgccaatctctttgctaaagcatagcaagaatgacctttattctagttcccaatatttcttcatctccatctgagatgacctcagcctggactttactttccatatcactaccagcattttgatcaaaatcattcaaccagtctctaggaagaccttcccacatgctcctg

SEQ ID NO: 925062 - DNA, 731 bp, Homo sapiens
tataattccatgtggctggaagccctcacaatccatggcaggtggtaaaagtcacatcttacatggcagcagacaagagaagagagcttgtgcagggaaactcccgtttttatataaccctcagatctcctgagacttattcactatcatgagaacagcaagagaaagacctgatccaatgattcagttatctcccaccaggtctctcccacagcttgtgggaattcaagatragatttgggtggggacacaaccaaaccatatcagtacccattaatcaaactgtcttgattttcccatcctctctactttctcaggctctgctaaacacaagtctactgtttatctccatgagatcgacttttttaggtcccacataggagtgagaacttgagatatttgtctctctgttccagttttatgtgaatcaacataatgatttccaaagctatgcatgtcgctacgaattagagtctcatcgtgcgttttgggtgaagaatattccattgcagaaaatatacaacacatttttttatctatccattgatggacacttaggttgattctacatcttggctattgtgaacagcactgctttttttttttttttttttttttttttttttttgagatggagtctcgctctgtcacccaggctgcagtacagtggcccaatctcggctcactgcaagctctgcctcccaggttcatgccatcctcctgcctcagcc

SEQ ID NO: 925063 - DNA, 648 bp, Homo sapiens
aaacctttagaggaggagccagcaaggaggctgagaaagggcagccattgaggtggtaaaagaacaggagagtgttttgtcctggaagttaaaatgttgacatctttgaggaaggaggaagcatcaaatcctgctaagaagtcagttaggtctgagaactgatgcttcaatttagcaagatggaaccagtaatgactttgatataaatggatttatgactattgtggggatgagaacatgaaacaggttaaaatwtaaaaaatgaggtaataagggggagctaatgaaaatagacaattttcttagatttttggtaaagcaaaatagaataatgaggtaatagtggaaggaaaacatagggtcaggggacggttacttattttttctaagatgaaagatatactgtgcctgagttaaagttattcagtaaaaagcaagatagggcttgatattgcagaagagagaggagataactgcagaaggaaaatcattcaatggataactggtaatggagtctaggtaacaagtaaaaagttggtcttagaatggaataggaactttccttcattgccatgggagaatatactagtagacctggtagtaggaaaatgtggttttcatttgattgcttggattttctcaaaaaca

SEQ ID NO: 925064 - DNA, 648 bp, Homo sapiens
aaacctttagaggaggagccagcaaggaggctgagaaagggcagccattgaggtggtaaaagaacaggagagtgttttgtcctggaagttaaaatgttgacatctttgaggaaggaggaagcatcaaatcctgctaagaagtcagttaggtctgagaactgatgcttcaatttagcaagatggaaccagtaatgactttgatataaatggatttatgactattgtggggatgagaacatgaaacaggttaaaattwaaaaaatgaggtaataagggggagctaatgaaaatagacaattttcttagatttttggtaaagcaaaatagaataatgaggtaatagtggaaggaaaacatagggtcaggggacggttacttattttttctaagatgaaagatatactgtgcctgagttaaagttattcagtaaaaagcaagatagggcttgatattgcagaagagagaggagataactgcagaaggaaaatcattcaatggataactggtaatggagtctaggtaacaagtaaaaagttggtcttagaatggaataggaactttccttcattgccatgggagaatatactagtagacctggtagtaggaaaatgtggttttcatttgattgcttggattttctcaaaaaca

SEQ ID NO: 925065 - DNA, 790 bp, Homo sapiens
ttaaaattttacattctaatagatgacttctaggcaaaattttggtatgattaccattaaacaggaaaacataccatgatttactttctataacttgctaatcactgtttcttttatttcaatttttgatattgttgcacaagtttatgactctttggtctttatatycaaaatttattaagtatcaattctttctttcaacaaatatgtactgaacacatgctgtgttagaacaactgtcttgggtagtaaaaagaggggaacactacaaattataatggataatattaatgaagggtggcatgaaataatcaagctttctcaaatcctcttaatatgtgattttatcaagtgacattagaaaaactgacatcagttcttgtctaattatatgtgagctgcaactaaaagatgcttcctttacctaaattatagaactcactggatcgcccttcatctctctccctccatctgaaatgtatgaattaaatcaggactcagctaggactgaatcaaatgaaaaagaaattttcgattaattgcttcttcaatgttagacctatataagtgatgctaaatttacaccagcaaactcctatcagacagtttcaaggaggatttgactcatgcataacccaggaaacatttcaggaaacttttaagacaacagtgtggaacacaatcactcttacttctatttataaaaagcctatcaaaacagcaaaatcctgttgcaaattccaaagacatcactttgcagcaggtggaaaacagagaggttgttagactc

SEQ ID NO: 925066 - DNA, 569 bp, Homo sapiens
aggaaaattctcagccattattttttcaagattacttatgttctttctctttctcttctctttctaaatgctaattgcacatacattagaccttttgcctatgccccacatctctctctgttattttttatccccattatgtttttttccttctgtgttccatttgaatattttctgtgactatttttgaatctagcctggtgctgtaaccattcaaatagttcttaatttcagacatttcaacttgcatttctaaaatgtccatttgattcctattcatagattcaaatgatcggttaaagtactttttcatccatgttatccayctttccaattttttaaaacatactcatgatcattattttgaaatccttgtccactaactcttgtatctgaatcatctctgggtctgcttcttttactattttatctcctgattggttgtttcttcctttttctttttttgttgcatgttcagtgacttttttttgtatgctgtatatagtgattaatacagtggatgggctctagattatattcttctgaatgttgaatcttgttctagcagc

SEQ ID NO: 925067 - DNA, 731 bp, Homo sapiens
ttttggtatatacttttatgagttttaacacactcatgtatagattcatgtattcactgccacagtcaggatacagaatagttccatcacaccagtgcaagccctttgtaaacaaaccttccccctcctcctacacctggcaaccagtgatctgttgcctagagtccccgtagttttgcctttcccagaattcatgtgctagctgagtgcagttgcacttcatgtaaatttgagactggctttgtttacagaccctaaggccacctttcagattcatccatgtcattgtcaacagttctttcttttcactgtggagtcgatccatggcctggatagaccacagcttgcgtctccattcccctgtcaaaggacacttgggggtgtctccatttcggggtgattctgaatagagctgctgcagacatttgcctatgggtttgggttcctctcctcttaaaataagtcattatttctgtagggtaaatacctaggagtggkattgctgggtcatgaggtcagtgttagtttaactagataagacaccgcccaagtgtttgcactgtgatggatgggagttccgggtgctccatacatcgccgtaacttggcatcatcaggtcttattcccactgtgataggcacatagtggtatctcattgtgcttttaatttgcatttccatagtgggtaatgaggttgagcatatttcatgcttatttgctccctgtagatc

SEQ ID NO: 925068 - DNA, 601 bp, Homo sapiens
aaatatttgttgaataaatgaattggctggactgcagcagcacagaccttactgtccccagctttggcctgagaggacagtagcagccccaaatactcggggtacccatgggtcttcatgtggacatgaccctgctcccaaacccctttgtggcacccataggcacttggcgtgttggagacatccgctggccaccggatgctttcccatgcacaaggtcccacagaggccaccagggagttgggtattgtcctgcccagaaagcttccacttgggtcattaataacagtgcattttataaaaggaaagccagcttcaaagagctgtgggtttttgggaagagmcttggatggaagtcattatttttgctgccccatctcgccccccgttctctgtctcctctgtcttccattcagcccatgtttgatctcctgcctgtgctttcttctgttggctcagggtccagggagaatggactattgtgtctacagtgggaaggttggggaaaccctttgaactggcctttggtccgtgagaggcgacagacacaggaaggcggggtgggggagatctgaggtgtctggggtgtgagttgaaggca

SEQ ID NO: 925069 - DNA, 601 bp, Homo sapiens
aaatatttgttgaataaatgaattggctggactgcagcagcacagaccttactgtccccagctttggcctgagaggacagtagcagccccaaatactcggggtacccatgggtcttcatgtggacatgaccctgctcccaaacccctttgtggcacccataggcacttggcgtgttggagacatccgctggccaccggatgctttcccatgcacaaggtcccacagaggccaccagggagttgggtattgtcctgcccagaaagcttccacttgggtcattaataacagtgcattttataaaaggaaagccagcttcaaagagctgtgggtttttgggaagagccttggatggaagtcattatttttgctgccccatctcgcccsccgttctctgtctcctctgtcttccattcagcccatgtttgatctcctgcctgtgctttcttctgttggctcagggtccagggagaatggactattgtgtctacagtgggaaggttggggaaaccctttgaactggcctttggtccgtgagaggcgacagacacaggaaggcggggtgggggagatctgaggtgtctggggtgtgagttgaaggca

SEQ ID NO: 925070 - DNA, 735 bp, Homo sapiens
atgtacgccattatttaatttcctaaataagtaaccacgtaagatttttcttactttgaaacatagatggggccgggcacggtggctcacgcctgtaatcctaggactttgggaagccaaggcgggcagatcacgaggtcaggagatggagaccaacctggctaacaaggtgaaaccctgtctctactaaattagccaggcgtggtggcacatgcctgtagtcccagctactcgggaggctgaggcaggagaatcgcttgaaccaggttgctgtgatctgagatcacgccactgcactccaaccctggtgacagagtgagactctgtctcaaaaaaaaaaaaaaaaaagaaagaaagaaaagaaaaagaaaaagaaacctagaccagccaaggagtggtaaaatcattgagcaaggaagtgggggctgtgccttgccatcaacaatcccccccttgrtacccagtcctggcctacacaccttacagaatccctgtccccatcccccacaaaaagctgatgagatttagctctttctcacagagagcttgcaatgcagatggaggaatatgtggaaacaaatgtaaagcagcccgggaacccacagcactagaaagacacaaaatgcgggcggaggaagaactctcagagggcagagtcagcaaagagtgtgaacgatgggcctgggcttaagctgaaacttcaagggtcagtcagatgcagctagccaagcagag

SEQ ID NO: 925071 - DNA, 773 bp, Homo sapiens
ttggcctccaaaagagttgggattacaggcgtgagccaccgtgcctggcctagcctctttattttatcccatcacttgagactggctgatgttttaggttctcctttaaagtgcaactcttattaagcagagttttggtaaggaaacataaatgatactggaaactaaaatgacaactaaaataattgaagaactgaggaaaaataaagaagagatgaggttcttggacagcagaggttgaagacacttctaagtatttcaaagctctatctaagcaagttggtttttaggtaggaaatactaatgggggatgtaattttgctgaattagtttaaatagtaccacttacaacattttcaaattggtgcctcaacctccctaaagttcccttagtcaacaatatcaccccctcaccattttcctcatttactcggtgccgatttactgaatttccagaggataaaatattttggasaaacagagatgaataggacataattccaaggggcatacattttactaagagatttaaaccataaactactacatataataacgggggcaatgtaagcattcactgaaaattttaaaattttattctgagtttgacacaatcagaaatataagccttctatttagacagtctttagggtgtgactattttgacatattttgatgaagaatgaattttcttctataaggttatgtcttgaaatttacaaatttcaccttagtcaagtgaattacaatgtccttaccaagctgtcttgttc

SEQ ID NO: 925072 - DNA, 557 bp, Homo sapiens
caccaagtttagaaactagtattaatttgggaaaatataaagtttaaaatccaacaattcacttattttgtctcttttccttctctctccgccagatttaaggtctaaagagcagggattttatttttggcgggggtctgttttgttcactgctgtatccctagtgctcataactatgagtggaacacagtaggtaattaatattttgtggaataaatggttgtttaaagcagcccactagagcctgagactccttttgtgacaatcccgctctcctttaatgaaaaatgtctccgcaggctccaggctctgcacaagcgaagggtgakaacaaaggctccagacaatgcattagtgccagattctaggcccagtggtgtaggaagagcctacagccctcaaaatcaatagcaattatagaagcacatctactttgccaggaaaactacttaaatcagaaattagccaggaaactaacggccatgactgcgagcctaatgtcaatcaataccatagtttaatagctcaaagacacaagatgctaaatattgagactc

SEQ ID NO: 925073 - DNA, 581 bp, Homo sapiens
aggcatctctgcactcctgggggtcctgggaaagccccccttactgccacaggctcagaggtattattcccacgctgggcctcttcccactgtcccatcctctctgatcatggagcagagttcagaccaagcacaagcactgtcacagcctggcagggtgtgcacacacttggggcagcactgacatgccagccccctgctacttcaatcccctccagactttgtgcaccaacaagcatgggagggaggccaagggattgctgagaacagcccagactggcctgcaggtgtccctgggcatgaatattctaggcgccatgaacagcagcaggaggcagacaggcttctagatggaagggggtgggtcctcagtgaagccctaccktcaagctggggagggcctgaagcctggggaccaggctgcctgtcccacagaccagagggggagcttgtggtgctttaccctgggcccactcatggccacccatggaccacccagcatgtactttctcccctctgagatccataaaaaccccaggctcagtcagacttgaggagaagatggaaagatgatgggatag

SEQ ID NO: 925074 - DNA, 593 bp, Homo sapiens
gtgtagattggcttaaaaaaaagactgaagaaactatttggaagtatccactaatgctgaacacatgcatatcctatgaactagcaattctacacctaagaaatgcatatatatgctctcaaaaaatctacaatattgttcattcatagctgtgttatttgtaacagctacaacataaaaattatcaaaatatccrtctagagtaggattaatacattatggcatattaatagaagagaattctatttaacaataaaatagttgctctaagcaactgctatggtctaaatgtttgtgtctctgcaaaagtcatatgttgtaaacctaacctcagaggtgataatattaggaagtgaggacttaaaaaggtgattaggacaggaggcttctaccctcataaatgggattagtgcccttataaaagaagccccagagatctgccttctcccttccaccttatgtggatgtagctaggtgtcatctatgaaccagaaatgaaccctcaccagccactgaatctgctggtgccctgatattggactccccagcctccagaattgtgagcagtaaatttctgtttcttataagccatt

SEQ ID NO: 925075 - DNA, 532 bp, Homo sapiens
aatatgttatgtaagtaacatgttttatataaataaatgacatatgttacataaacatatatgtgttgtatacataagtttatatagatatatgttatttaaaatataaattcatatgttaatatattataaacagatctatgacatattaacataaccaataataaaaagacaactgttcttttaaaaatgtgataaatatgtaaacagttaattcgcaggtggtaattgaagggaccaaaatcattaaaacgtattacacctccccagttatcagggaaatgtaaattaataccaaaatgggatacctttttatgtttatcagatttgcatcaatctgacaatgccagtaaatgytgaatgaagtcgtggatcaatgagaagttttgtaaattctagtgtcttagcccaggctgctataacaaaataccttagactaggtgacttaaaccacagacatttatttctcacagttctggaggctgggaagtccaagatgaaggtgccaacagattctgttcttggtaagggc

SEQ ID NO: 925076 - DNA, 612 bp, Homo sapiens
gctcatgcctgtaatcccagcactttgggaggccgaggcagggggatcacttggggtcaggagttcaagaccagcctggccaacatgacaaaacctcatctctactaaaaatacaaaaattagccaggaacggtggtgtacacctgtagctccagctactcaggaggctgaagcatgagaaytgtgcttgaaccctgggagaccaaggttgcagtgagccgagatggcgtcactgcactgcagcctgggtgacagagcgagattctgtctcaaacaacaacaacaacaaacaaaacaaaactggaaacatgcagaaaacaatgttatctgttgaccagttgatgaaaatgttgtgaccagaggcttgtgggacctaagcctgtatttccccctaggagcaatacttcagtatttgttaattcaatgtttgagatgactttatacaacatatagatccccttctatatttgaggaattccccccgctctgggtcttggagaggcaaggagctacccttcactctagagtcagggcaggccagggggagccgggccctgtcaatcagaccaagtcacactcagagctagtgccacacagaagggaggagtttga

SEQ ID NO: 925077 - DNA, 664 bp, Homo sapiens
ccgggttcaagtgattctggtgcctcagtctcccgagtagctgggattacaagcacgcgccatcatgcccagctaatttttgcattttttagtagagacagttttcaccatgttggccatgctggtctcgaactcctgacctcaggtgwtctgcctgccttggcctcccaaagtgctgggattacaggtgtgaaccactgcacccagccaacagagtatatttagtcatctaaaatagtctttacagttaacattttttatataagtagagagaatacactctaaaataatgataagtagcataataaatacataaactagtaacatagtagtttattatcattatcgagtatcaggtactgtacctaatttttttttttttgagacagtgtctcactctgcactctgtcactttgtcatctaggctgtagtgcagtggtaggatcatggctcactgcagctacttcccaagtagctggacttaggaagcatggtagcatgccaccatgccagtctagttttgtattttttgtagacacagggtttcaccacattgcccaggctggtcttaaactcctggccttaagtgatccacccgccttggcctcccagagtgctttgattacaggcgtgagccaccatgcccagcctgtacatgttatac

SEQ ID NO: 925078 - DNA, 640 bp, Homo sapiens
gaggctgaggtgggaggatcactttatcccaggaggctgaggctgcagtaagctgtgattgtgccgctgcactccagcctgcataacagcaagaccctgtctcaaaaaaaaaaaaaaaaaaaaaaaaaaaaaaaaaaaaaaaaaggctggactaggttgtaggggagctcggctaaacccctcttcttgagaccccaractcctttctggggttcttgagctgaaactagggtcctgctgggaggcatcctgagggccactggcaacatggaagagcacggaagcttccctgagggcaggtgaggggcaggtgggcatggagccaggccttgggcgcttggcagggcggctccgtccctgggaggtgagggctgctgctgctggctgctgtgccagcccagggtccgttctctgttgctgctgggtcccggctggcctgccgcctgcccacagcttgcttgggctgccaggcctttgtcttcgtgagttcctggcttcgcccctgatttgggtggtggatacagatgactgacacagagcaatgctttctggacacacagggcactccctcctcctcttggagaacggagggtgtgtgccaggacagaggctgtgcctggcatgtgggagagagtgagcc

SEQ ID NO: 925079 - DNA, 718 bp, Homo sapiens
tgaggctcctgttacctgttctgtacagatcctttggcacttagagcatactgtctggccttgctgtgcaactaggctgtgaggccgccagccacctgcctgcactaccattgtacacaggaggtctttggtaagggatggctggctgtggatggtgatgaggcagtacaggaaagatccttggtgagtggagattattattattattattttgagacagagtctctgttgcccaggctggagtgcagtggcacaatcttggctcactgcaagctccgcctcccaggttcacaccattctcctgcctcagcctcctgagtagctgggactacaggcgcctgccaccacgcccggctaattttttgtgttttttagtaagagacggggtttcaccgtgttagccaggatggtctcgatctcctgmccttgtgatccgcccacctcggcctcccaaagtgctgggattacaggcatgagccatcgcacctggccgagtggagattatttttgcttactttggctttgtgtgttttgctatgggggagttaatggtattggtttctttggagaaattcatgacctaggagagctatggaggaagggccacagctcttttgtctctccctgatttccaaaataccacctcaccatggtactgccttgctttagaaacttcagtggctccccattgccttcagaatcacatctgaatggtgga

SEQ ID NO: 925080 - DNA, 718 bp, Homo sapiens
tgaggctcctgttacctgttctgtacagatcctttggcacttagagcatactgtctggccttgctgtgcaactaggctgtgaggccgccagccacctgcctgcactaccattgtacacaggaggtctttggtaagggatggctggctgtggatggtgatgaggcagtacaggaaagatccttggtgagtggagattattattattattattttgagacagagtctctgttgcccaggctggagtgcagtggcacaatcttggctcactgcaagctccgcctcccaggttcacaccattctcctgcctcagcctcctgagtagctgggactacaggcgcctgccaccacgcccggctaattttttgtgttttttagtaagagacggggtttcaccgtgttagccaggatggtctcgatctcctgaccttgtgatcygcccacctcggcctcccaaagtgctgggattacaggcatgagccatcgcacctggccgagtggagattatttttgcttactttggctttgtgtgttttgctatgggggagttaatggtattggtttctttggagaaattcatgacctaggagagctatggaggaagggccacagctcttttgtctctccctgatttccaaaataccacctcaccatggtactgccttgctttagaaacttcagtggctccccattgccttcagaatcacatctgaatggtgga

SEQ ID NO: 925081 - DNA, 718 bp, Homo sapiens
tgaggctcctgttacctgttctgtacagatcctttggcacttagagcatactgtctggccttgctgtgcaactaggctgtgaggccgccagccacctgcctgcactaccattgtacacaggaggtctttggtaagggatggctggctgtggatggtgatgaggcagtacaggaaagatccttggtgagtggagattattattattattattttgagacagagtctctgttgcccaggctggagtgcagtggcacaatcttggctcactgcaagctccgcctcccaggttcacaccattctcctgcctcagcctcctgagtagctgggactacaggcgcctgccaccacgcccggctaattttttgtgttttttagtaagagacggggtttcaccgtgttagccaggatggtctcgatctcctgaccttgtgatccgcccrcctcggcctcccaaagtgctgggattacaggcatgagccatcgcacctggccgagtggagattatttttgcttactttggctttgtgtgttttgctatgggggagttaatggtattggtttctttggagaaattcatgacctaggagagctatggaggaagggccacagctcttttgtctctccctgatttccaaaataccacctcaccatggtactgccttgctttagaaacttcagtggctccccattgccttcagaatcacatctgaatggtgga

SEQ ID NO: 925082 - DNA, 646 bp, Homo sapiens
ctctccctcccctcaacctgtggcaaccactgattctcactgtctccatagttttgccttttccagaatgtcatatggttggaatcatagagtacgtagcctttcagagtagcttcttcatttagtaatatgcgtttcatgttctcctatgcctttttgtggcttgatagctcattttttttgttttttttttttggtggtgaataacatttcattatctggatgtaccatggtttgtttatccactcttctactgaaagacatggtagttacttccaggttttggcaaatatgaataaagctgctataagtgtccrtaagtaggtttttgcatggttgtaagtttttaacttttttttagtaaataccaacgagcgcaattgctggatcatatgctaagagtatgtttagtttttttaagaatctgtcaaactgtcttctgaagtgatggtaccatgttgcattcccaccatcaataaatgagagttctgttgccctacatccttgccagcttttggtattgtcagtgttctggatttcggccattctaataggtgcgtagtggtatttcattgtgtttttaattttcattttcctgatgacctgtaatgtgaagcatcttttcatatgcttattggccatctct

SEQ ID NO: 925083 - DNA, 716 bp, Homo sapiens
gttatggagtggagttactggggcaatcatggtgctctgcttttccctcccttccctctgtacagtcagggaacagcaccctcttcctccctgccagggagcctgcacctggtgggaggccttctcctcctcgtttcctcccgcccgccagcgccttgctcttcaacgctggtcttgtccaccggcgtatgtgtgtttcccgatttcaagcgcatttgttaattatctagtttttaagtcaaaatagagggcagttttggtgattgcctggggcattggggatatttggggagcagtggcccagattatcttggtgaaagtggcagcagcttactttccttggaggagtgaaatcaagtcctcgttcttgccgtttgagggaactgtgttcacttcatcagactctgggagggagggtaggcacgaggttgctgtctgttgcgggraagctgcccctccctgcctgtcctcccaggctgtgcgggcactggcctctgtctgaagaaatgtgcttaggtctccatgcagagtaggggttggaataaatcgattcctacttgtcaactccagtggggaagggaataaataagggccagattctgagagggaaaaagaaaaatctaaagaagacatgactttccgtgcagaggaagttggcggtcaggctggcgcggcccacggtcgcttagatcatgaaaggcctctcagagcctgtg

SEQ ID NO: 925084 - DNA, 698 bp, Homo sapiens
aggagcatcaggcatcagccaaaccccgcagaaaagtgaaagcctcaggggtctggaagggttgccccatagatcattcctaagtaaattctttgctggcatcccataaacaagaacatctcattgtaacttcacgtctacaatctgattctaggttaaamctgaagtctgttccattccacattgatcatgtctattacaagcttcgcttcccaggtgcagaaaaaagacaagatgagatcagtcattcctccacctgcccagagacatctgcataattgattcttcctttacgcccttttttctcttcaaacattcattcaccttatcttatgtaaaatgcagatttactggcactaactagagtctcacaagaatgtaatcattcgccttacagcccacctgcccctcttccgagccttcccccctttaaggaaacatacaaatactaagcctcctgaaaacctctttagaaaaatagatacagatgtgtctgtggctggtatttttccagatgcaccctaaagctggcttaataaacgtcaacaattgagacctctgcctcagtcactcatctcagctatcagccacatgtcaccatataaaatttatattgccagccgggcgtggtggctcactcctgtaatcccagcactttgggaggccgaggcaagcggatcatgaggtcaggagatcaa

SEQ ID NO: 925085 - DNA, 685 bp, Homo sapiens
atcagccaaaccccgcagaaaagtgaaagcctcaggggtctggaagggttgccccatagatcattcctaagtaaattctttgctggcatcccataaacaagaacatctcattgtaacttcacgtctacaatctgattctaggttaaaactgaagtctgttccattccacattgatcatgtctattacaagcttygcttcccaggtgcagaaaaaagacaagatgagatcagtcattcctccacctgcccagagacatctgcataattgattcttcctttacgcccttttttctcttcaaacattcattcaccttatcttatgtaaaatgcagatttactggcactaactagagtctcacaagaatgtaatcattcgccttacagcccacctgcccctcttccgagccttcccccctttaaggaaacatacaaatactaagcctcctgaaaacctctttagaaaaatagatacagatgtgtctgtggctggtatttttccagatgcaccctaaagctggcttaataaacgtcaacaattgagacctctgcctcagtcactcatctcagctatcagccacatgtcaccatataaaatttatattgccagccgggcgtggtggctcactcctgtaatcccagcactttgggaggccgaggcaagcggatcatgaggtcaggagatcaa

SEQ ID NO: 925086 - DNA, 698 bp, Homo sapiens
aggagcatcaggcatcagccaaaccccgcagaaaagtgaaagcctcaggggtctggaagggttgccccatagatcattcctaagtaaattctttgctggcatcccataaacaagaacatctcattgtaacttcacgtctacaatctgattctaggttaaaactgaagtctgttccattccacattgatcatgtctattacaagcttcgcttcccaggtgcagaaaaaagacaagatgagatcagtcattcctccacctgcccagagacatctgcataattgattcttcctttacgcccttttttctcttcaaacattcattcaccttatcttatgtaaaatgcagatttactggcactaactagagtctcacaagaatgtaatcattcgccttacagcccacctgcccctcttccgagccttcccccctttaaggaaacatayaaatactaagcctcctgaaaacctctttagaaaaatagatacagatgtgtctgtggctggtatttttccagatgcaccctaaagctggcttaataaacgtcaacaattgagacctctgcctcagtcactcatctcagctatcagccacatgtcaccatataaaatttatattgccagccgggcgtggtggctcactcctgtaatcccagcactttgggaggccgaggcaagcggatcatgaggtcaggagatcaa

SEQ ID NO: 925087 - DNA, 573 bp, Homo sapiens
cagccacagtagaacaagacaccaggtagatttctaaggtttttgactccagtccctggcttactgactgcatttctggacccacccagagctttgggaaacttgctgccctgacgaaaaggatataagcctggctrcatttggaacctgctggttttagagccctagggccttaagcaaatatagccagcagccaggtagcggttatagtgggctttggtcgagacccagtgcagtcccagtgctactggccacagtggtgcttgtgtcaccctatccccacctccaggtggctcagctccctttgtttgggagaaagtaaaagaagagaacaagagcctctgcctggtaatccagataattcttctggatgttatccaagaccactaaggcagtacctctatgagtctgcaagaaccgtagcagaccgggtgtggtggctcacgcctgtaatcccaacactctgggaggctgaggtgaatggatcacttgaggcccagagtttgagaccagcctggccaacatgatgaaacctagtctctgctaaaatcacaaagattagccaggcgtggt

SEQ ID NO: 925088 - DNA, 573 bp, Homo sapiens
cagccacagtagaacaagacaccaggtagatttctaaggtttttgactccagtccctggcttactgactgcatttctggacccacccagagctttgggaaacttgctgccctgacgaaaaggatataagcctggctacatttggarcctgctggttttagagccctagggccttaagcaaatatagccagcagccaggtagcggttatagtgggctttggtcgagacccagtgcagtcccagtgctactggccacagtggtgcttgtgtcaccctatccccacctccaggtggctcagctccctttgtttgggagaaagtaaaagaagagaacaagagcctctgcctggtaatccagataattcttctggatgttatccaagaccactaaggcagtacctctatgagtctgcaagaaccgtagcagaccgggtgtggtggctcacgcctgtaatcccaacactctgggaggctgaggtgaatggatcacttgaggcccagagtttgagaccagcctggccaacatgatgaaacctagtctctgctaaaatcacaaagattagccaggcgtggt

SEQ ID NO: 925089 - DNA, 573 bp, Homo sapiens
cagccacagtagaacaagacaccaggtagatttctaaggtttttgactccagtccctggcttactgactgcatttctggacccacccagagctttgggaaacttgctgccctgacgaaaaggatataagcctggctacatttggaacctgctggttttagagccctagggccttaagcaaatatagccagcagccaggtagcgsttatagtgggctttggtcgagacccagtgcagtcccagtgctactggccacagtggtgcttgtgtcaccctatccccacctccaggtggctcagctccctttgtttgggagaaagtaaaagaagagaacaagagcctctgcctggtaatccagataattcttctggatgttatccaagaccactaaggcagtacctctatgagtctgcaagaaccgtagcagaccgggtgtggtggctcacgcctgtaatcccaacactctgggaggctgaggtgaatggatcacttgaggcccagagtttgagaccagcctggccaacatgatgaaacctagtctctgctaaaatcacaaagattagccaggcgtggt

SEQ ID NO: 925090 - DNA, 704 bp, Homo sapiens
cgattttcttgcctcagcctcctgagtagctgggattacaggcacgcaccaccacacctggctaatttttgtatttttagtagagatggggttttaccatgttggccaggctggtctcaaactcctgacctcaagtgatccacccacctcggtctcccaaactgctaggattataggcgtgagccatcacgcccggccagatatatgtcttttaagtctcttttaacctgcagttccctcctccatcccttttattcctttaaaatttttttttttttttttttttttttgagatggagtcttgctctgtcaccaaggctggagtgcagtggtgcaatctcagctcactgcaacctctgcctcccaggatcaagtgattctccggcctcagcctcccaagtatgtgggactacaggcacacaccaccacgtccggctcatttttgtatttttttgtagagatgggatttctccatgttgggcaggctggtctcaaactcctgacctcargtgatctgcccgcctcggcctcccaaagtgctggaatcacagatgtgagccactgcccccagcctatttcttacaatttatctgttgaagaatgtaggttgttagccttgtagagttcctctctgtctggatttttctgatcacacacttacggtctaattcagcatttatttgtctctcctctgtgtttcctgg

SEQ ID NO: 925091 - DNA, 686 bp, Homo sapiens
tctgcctctgagtggtgtgaagttgtgaatactatgagccctagttcttccagggaattaaaattactccctccaagatgcagaggtgaatcagacctggagtctttcctggggagcccctcggctgctgggggagacacagagtcacagccagggtgataggggttaaggtagcagtatgggagctatggaggtccacaggaagtgctcagaatctgtttagaacattcaggagaaacttcctgaaggaggagcatttgagatgggtcttgaagtatgcatagaagtctgccagttgaaggatatctgcaggcaygtaccatcactcattcattcaataggcatttctcaacgcctaccatacatcaggccctatatcaggctgtgctacagacctggatctaactctgatgggattctagtttgaaggggctctcagtctggtggggagactcatgggcagagacagtcccagcccaaggtgactggagttgggacagaggagaaagagaagacgggtcaggaaacttcccacaggggagcctaatgctaagtctggaaaaataaaaggtttttttcaaataaaataggaaagtagagatagagatgaatacagctaaaggcagaggaaggaccagagattgcagggcctcaatgcctgactgagaggcatggactttgtctag

SEQ ID NO: 925092 - DNA, 591 bp, Homo sapiens
cccatccataagcatgggatgtgtttccatttgtttgtatcacctgtgatttctttcagcagtgttttgtagctttccttgtagagatctttcacctcctttgttaggtatattcctaagtattttattttttttgcagctgttgtaaaagaggttgagttcttgwtttgattctcagcttggtcgctgttggtgtatagcagcgctactggttagtgatcatttattttgtatcctgaaactttgctgaattcatttatcaaatctgggagctttttttgatgagtttttagaggttactaagtatacgatcatatcatcagtgaaccgtgaaaatttgacttcctctttactgatttagatgtcttttatttatttctcttgtctgattgctctggctaggacttccagtgctatgttgaatagaagtggtgaaagtgggcatccttgtcttgttccagttctcagggcgaatgctttcaacttttccccatttagtataatgttggatgtgggtttgtcatagatggcctttattaccttgaggtatattccttctatgccaattttgctgagggttttaatcataaa

SEQ ID NO: 925093 - DNA, 577 bp, Homo sapiens
caccaaagtcatttcaaatatctggaaagctttcccaagaagaagagcttcaaataagccaagacagtgaagactgcaataagcgtctaactcttcaatgcccagactctgaagaatgcctacaaacatcaacaccatccaggaaaacatgacctcaccaaatgaactatgtacaacaccagggaccaatgctggagaaacagagatatgtaacctttcagacagaaaattcaaaatagctgagtcgaggaaacgcaaagaaattcaagataktacagaaaaaaattcagaattctatcagataaacttaactaaaatattaaaattaaagaaacaatcagaaattctgaagctgaaaaatgcagttggcatgctaaagaatgcactagagtcctttaatagcagaatggatcaagcagaagaaaaaatttagtgagcttgaagacaggctatttgaaaatacacagaggagaccaaagaaaaaagaataaaaaactgtaagcacacctacaggatctagaaaatagcctcaaatggacatataagagttattgaccttaaacagaaggtagaaaaa

SEQ ID NO: 925094 - DNA, 787 bp, Homo sapiens
ttggttctctgcttggatgttgttggtgtatagaaaggctactgatttttgtacattgattttgtatcctgaaactttgctgaagttatcagatctaggagcttttgggtagagactatggggttttttaggtatagatcatattgtctgcagagatagtttgacttcttctcttcctatttagatgccttttatttctttctcttgcctgattgctctggctaggactttcagtactatgtgaatagaggtggtgagagtgggcatccttggcttgctgtggttctcaaagggaatgcttctagcttttgcctattcagtatgattttggctatgggtttatcatagatagctcttattatttrgaggtatgttctttcaatgcctagaggatttttaacatgaataaatgttgaattttatcaaaagccttttctgcatctattgaaatgatcatgtggtttttagttctgtttatatagtgtatcacatttattaatttgtgtatgttgaaccaaccgtgcatccctgggataaagcctacttgatcatggtgggttagctttttgatgtgctgctggattcagtttgctagtattttgttgagaatttttgcatctgtgttcatcaaggatattagcatgaagttttcttcttttgttgtgtctctgccaagttttggtatcaggatgatgctgtcatcatacaatgagttaggaatgtgtcctcctcctcaagtttttgaagtagtttcattaggaatggtaccagttctttatgcatctgg

SEQ ID NO: 925095 - DNA, 793 bp, Homo sapiens
atgttcttgatttggttctctgcttggatgttgttggtgtatagaaaggctactgatttttgtacattgattttgtatcctgaaactttgctgaagttatcagatctaggagcttttgggtagagactatggggttttttaggtatagatcatattgtctgcagagatagtttgacttcttctcttcctatttagatgccttttatttctttctcttgcctgattgctctggctaggactttcagtactatgtgaatagaggtggtgagagtgggcatccttggcttgctgtggttctcaaagggaatgcttctagcttttgcctattcagtatgattttggctatgggtttatcatagatagctcttattatttggaggtatgttctttcaatgcctagaggatttttaacatgaataaatgttgaattttatcaaaagccttttctgcatctattgaaatgatcatgtggtttttagttctgtttatatagtgtatcacatttattaatttgtgtatgttgaaccaaccgtgcatcccwgggataaagcctacttgatcatggtgggttagctttttgatgtgctgctggattcagtttgctagtattttgttgagaatttttgcatctgtgttcatcaaggatattagcatgaagttttcttcttttgttgtgtctctgccaagttttggtatcaggatgatgctgtcatcatacaatgagttaggaatgtgtcctcctcctcaagtttttgaagtagtttcattaggaatggtaccagttctttatgca

SEQ ID NO: 925096 - DNA, 646 bp, Homo sapiens
agaatttgtcaggtttctctcctgtgaaattattcttttccctcgtttccatactgtattctttggaaggaagtcactatgcacagcctcaatacttccttgagggcagagtatctacataaagtacttgaaattctcctgcatggaagatttgtctattcttcctttcttttatttttaaatatgtttacctctacctggaatgctgaaataacacaatttcaaaatgtcagtggcttaacacgcattttattccttattcattccaaaatgcctatcacagtttagcaagtggctctgctccacatagtcactcagacgctcaggctgccggaggttccaccatcaggtagctagctacactttctgaaacatacaacttcatcagttgccaaggaaaagtaagagcactggagtgttttgcaccagcagttaaatgtttcagcttagaaatgacatttctacccatagctcattgcctagacttagctayatcactccgcctaactctacaaggggacagggaagtataatcctcctctgtgcctggaaggagagggaactagatatgggtgagtattggaagtttctaccacaagtcttctaccccacttgtccactaaacaaaattctattcttcccccaa

SEQ ID NO: 925097 - DNA, 686 bp, Homo sapiens
tgctggagaaaaattcacaagcatgctgacaggtctcactttaaattcataaccataaatctcaaatgagccctcaagtctgcctgaccattttagttacttctctacaatccttccatttttatgtccctagtctccaaaatgactgttactattttacttttcctcttctctcttcaaagcctcaagacacacattcagcctcctcctctgcccccttatcctccaccctcctctgctctcagcagataacctggcctcatattacacttctaaaacaaaagcaacttcataccaagctttcccytctacatcccaaagcagcagtcataccttcccacaggcccatccttccttccttccctcctattatcaggatgaagagcctctgctcctgccaacagcactgactccacatgcagtttccctcccatccctctcactactccaagttaggctgtttcctgcatccctagtttgtcccttttagctggatcacctccatcattctacagtctgcccttagtaaccttcaatcttacaacaaatactccactgaccctacataatcctccaactgcaactccattctctgctccctttacagcaagactcctggggaagtatgtctgtacttaccaactccatgacctcacctcccagtgtcttttcaaccctctctaatc

SEQ ID NO: 925098 - DNA, 686 bp, Homo sapiens
tgctggagaaaaattcacaagcatgctgacaggtctcactttaaattcataaccataaatctcaaatgagccctcaagtctgcctgaccattttagttacttctctacaatccttccatttttatgtccctagtctccaaaatgactgttactattttacttttcctcttctctcttcaaagcctcaagacacacattcagcctcctcctctgcccccttatcctccaccctcctctgctctcagcagataacctggcctcatattacacttctaaaacaaaagcaacttcataccaagctttcccctctacatcccaaagcagcagtcataccttcccacaggcccatccttccttccttccctcctattatcaggatgaagagcctctgctcctgccaacagcactgactccacatgcagtttccctcccatccctctcactactccaagtyaggctgtttcctgcatccctagtttgtcccttttagctggatcacctccatcattctacagtctgcccttagtaaccttcaatcttacaacaaatactccactgaccctacataatcctccaactgcaactccattctctgctccctttacagcaagactcctggggaagtatgtctgtacttaccaactccatgacctcacctcccagtgtcttttcaaccctctctaatc

SEQ ID NO: 925099 - DNA, 592 bp, Homo sapiens
tgacctggtccaagcagcatcttgacttagatgaaaaagtaacagttatccccattcaattatcccccacttggttgcctgaagcaaaaccactgactccatgggaccgttgattcacagaagtttctctaatgcctgggcctggttcactgatggttcaactaaactgaaacccagtagtgtctactggaatgctgcagctattcgacctcaccaccagctatgcagaagcaaaaatgaatgtggctccacttaatgggcagagtcaaggccattctcatagctccgaccaatacttcctttgatgaaccttgttatggttttactgacttcttgactattgcsgatggcctatttgtttggtttgccacatggaaaatgatagcctgacagtttaaagacatctttctctggggccatgtactgtggaaacaaatggctggctgatcaaaccatctgggtcactcatgtagatgcccatggaaaggcctgttctctgatgagaccaagcaagctgctaatcaaacctgcactgcccagattaccatcattgctgcctggactagacacggcaagacagccaccctcataa

SEQ ID NO: 925100 - DNA, 466 bp, Homo sapiens
tgatgaacacatcatattggaccacagtaaacactgatttccattacataaactacaggcatatctcatttcattgtgctttgctttattgcctttcacaatatactttttacaaattgaaggcttgtggcaaccttgygtgaagccaagtctatcggtgccatttttccaacagcatgtgctcactttgtgtctctgtgtcacatttgatgattcattattattatatctgctatggtcatctgtgatcagtgatctttgttgttactaatgtaattgttttgcgtgccatgaaccacacttacataaaatgatgaacttaatccacaaatgttatgtgtgttctgactgctccattgaccacccattccccagtctctctttgggccttctctgaaaaacaatattgaacataagccagctaataaccctacattggcctctaagtgttcaaatgaaaggaaga

SEQ ID NO: 925101 - DNA, 466 bp, Homo sapiens
tgatgaacacatcatattggaccacagtaaacactgatttccattacataaactacaggcatatctcatttcattgtgctttgctttattgcctttcacaatatactttttacaaattgaaggcttgtggcaaccttgcgtgaagccaagtctatcggtgccatttttccaacagcatgtgctcactttgtgtctctgtgtcacatttgatgattcattattattatatctgctatggtcatctgtgatcagtgatctttgttgttactaatgtaattgttttgcgtgccatgaaccacacttacataaaatgatgaacttaatccayaaatgttatgtgtgttctgactgctccattgaccacccattccccagtctctctttgggccttctctgaaaaacaatattgaacataagccagctaataaccctacattggcctctaagtgttcaaatgaaaggaaga

SEQ ID NO: 925102 - DNA, 579 bp, Homo sapiens
ttatccaagggatgcaaggattttttttttttgagacggagccttgcactgtcacatggactggagttcagtggcatgatctcagctcactgtaacctctggctcccaggttcaagcaattctcctgcctcagcctcctgagtagctgggattacagatgcctgccaccatgcctggctaattttttgtatttttagtggagacagggtttcactatgttggccaggctggtcttgaaagcctgaccttgtgaaacacccgccttggcctcccaaagtactaggattacaggcgtgagccactgcacccagccaatgatakttaacatctacaacttcaaccaaattaaggataaaaccatgtgatcatttcagtagatgcagaataagcattcaataacattcagcatcactccatgataaaaatcctccacaaactaggcatagaaggaacatatctcaacataataaagaccatatacaacaagcctacagccaacatcacacttaatgtggaaaagttgaaagcctttcctctaacaactgggacaagacaaggatgcccactttaaccattctt

SEQ ID NO: 925103 - DNA, 766 bp, Homo sapiens
gccaccacgcctggctaatattttttttttgtatttttagtggagacggggtttcactgtagccaggatggtctccatcgcctgacctcgtgatctgcctgcctcggcctccgaaagtactgggattacaggtgtgagccaccacgcctggccctattttttttttttttccagagacggagtttcactgtcttgtccaggctcgtgttgaacccctgagctcaagtgatctacctgcttcggtctttttttttctttaattgaacaaaaggagagggagcagctccatttctttgtttttaaaaaaattatggtaaaatrtacacaacatgaattgtactgttaaccattttcaagtgtacagttcaggggcactaagtacatttataatgttgcgcagccctcactgctgtctcgttccaggacctttcatcccccaaaagctcatagccactaagcagtcactccccatccttctacctccctctcccagcccctcagaaccactaatctcctgtctgtctgtatggatttgcctcttctggacatttcgcataaatggaatcacgtggccttttgtgactagcatgtctttagagttcacccgtgttgtaggatggatgaacttcatccctttttgtggctgaatagtgttccattgtatggaaggaccacagtttatccacctgttcatccgctgttggggacgtatccaggagtggaattgctggctcatgggaattccgtggtaactcattgaggaacc

SEQ ID NO: 925104 - DNA, 720 bp, Homo sapiens
agaatgtaagcttcctgagcacagggattcctcttttaaaaaaacttaatttttttagttgagatataagtcacataccttaaaatccaccctttaaaagtgtacaattcagtggtttttagtatattcacgaggtgcttgtgcaacagtcactgcttagcctcccgagtagctgggattacaggcgtgcatcgccacacccacctaatttttgtatttttggtagaggcggggtttccccttgttggccagcttggtctcgaactcctgacctaaagtgatctacccgccttggcctcccaamgtgctaggattacagtcgtgagtcacagagcccagcctaattctgtactatttttatcacctccaaaagaaatccctcattcctttctcccccaggttcctgatgaccactaatctttctgtgtgtatgtatgtgcctattttggacatcttatatagatagaatcatacaatatgtggtcttctatgtctggcttcttttttcttttctttcgctttcttttctttcttttctagagacagggtcttgctctgtcgctcaggctggagtgcagtggcacagtcatgactcattgaaaccatgacctcctgggctcaggtgatcttcccacctcagcctcctcagtaactgggactacagccatgtgccaccacacctggctaatttttaaaatttcttgtagagataagatctca

SEQ ID NO: 925105 - DNA, 700 bp, Homo sapiens
gttgctgattgtcacctgttcaccatctggcccagacaccccgggttatgtgtgtgcaagcatgtgtgtgcatttagccgttcattctctgactctgtttgcttacttgaggcacttactatgccccttgcttgggccttctcagtccatatgctcgtggagttcatggtctaatgcaggacacacgtgggtaagtcattagagcacatgttctttactatcaggatagacatgttgtctaaacactagaaatgccagaaaactgaatgtcagactttagaggaaagccagggaaggtttagagaagaggagacattggagtttggtgttaatgaattagttcccmcaagccaggcaagaacaattgaggtgtgctagcacatatgtacataaagactaaggatgtccgtgacattttcagaggctgctgtgtaaggccttcgggatccccagatttcatcaaaaaggcctttcccccaaataacattccatgaaagtcacaagtttcacatcagcgtttcatatcacaaattaacctcctttccaaatttctcttaagttttaatcctcttgtttaagtggctttatttcttaaggtttgaagtgcctttattcacattgtatagactcgaacattcctcaaataaatttaccaaatttctgctttctggcttgaaaatcatcacttttttagattttc

SEQ ID NO: 925106 - DNA, 551 bp, Homo sapiens
gaacaatacaaaaattaggctgggtgcggtttttgggaggctgaggtgggcggaccgcctgaggttgggagttcgagaccagcctggccaacatggtgaaactccacctctactaaaaatacaaaaatgagccaggcgtggtggtgcacatctgtaatcccagctacttgggaggctgaggcatgagaattgcttgaacccgggaggcagagattgcagtgagccaaaattgcgccaccgcattccagcctgggtgacaaagtgagaccctgcctcaaaaaaaaaaaaaaaaaaaaaggtaaattgtaacagttatgawaatagtaacaacaatggtgattgctttctcctgggtcctatccatattaggttctatatattcgctatttcatttaaccctcaccataacctaacgaagtcattattatccattccatttcacagatgaacaaactgaggctgagagtggctaagtgcttgggctctggagtcagacaatctaggtacatacccagctccaccgctgtctaatctgtgtgatcttgggcaaa

SEQ ID NO: 925107 - DNA, 551 bp, Homo sapiens
gaacaatacaaaaattaggctgggtgcggtttttgggaggctgaggtgggcggaccgcctgaggttgggagttcgagaccagcctggccaacatggtgaaactccacctctactaaaaatacaaaaatgagccaggcgtggtggtgcacatctgtaatcccagctacttgggaggctgaggcatgagaattgcttgaacccgggaggcagagattgcagtgagccaaaattgcgccaccgcattccagcctgggtgacaaagtgagaccctgcctcaaaaaaaaaaaaaaaaaaaaaggtaaattgtaacagttatgataayagtaacaacaatggtgattgctttctcctgggtcctatccatattaggttctatatattcgctatttcatttaaccctcaccataacctaacgaagtcattattatccattccatttcacagatgaacaaactgaggctgagagtggctaagtgcttgggctctggagtcagacaatctaggtacatacccagctccaccgctgtctaatctgtgtgatcttgggcaaa

SEQ ID NO: 925108 - DNA, 592 bp, Homo sapiens
tgtgcatagatgcagggcacaggggcagcctgcaggaggccatggcaacaatcaatccaggctggaggcgacgggggctgggacagggagtagccatgagggcagagataagttttcagattctggataggagtgggggccacagcattgatgtggggcgtgatgtagggggtgaggagaggggaggagtggaaggtgtcaccaaggcatttgtcctgagtgacaggaagatggggaaggctttgggaaaagcaggcatccaggggaaggggcaggagcttggttttgtacatgtgaagtctgaggtgcctatgagacttcctcatgcagaccctcactaggcaaccggaaattctagtctagaattcaagagagagatccaggatagagatgtaaaygttagagtaatcatcataaaatatcgcattcaaagctttgaggctgcctgagaccctgagggagcagggtagaaagagaagagtcggccttttgcaggatcaagcaggctgtagaaacgcctgggtgggtggtggcctggacaccaagggaagaaggtgttttggggcaggtgggagagggaaggaaccgttgt

SEQ ID NO: 925109 - DNA, 817 bp, Homo sapiens
taatcctgtcaagttgatacctaaaattaaccatcagagtatacaatatttttttacgtttttgataattggaatcttaaatactatttgttttcaagttgtatactacatactgtaacataagtcatctttcaaatgaaatactttctgtaaatcttactgctttatgcatctgtatgttaaactgtgtaatacatttattatctcataaaatttattcactgcatggttcatttttttaatttatgcaatcttgtgttgtcaccaaacttaagtagttttaattgataatttcacaaagtagctatgaagtgcaataaggatgttggagatacctgagtttgttttttcttccccttttctgctgttccttttaattaaagatccatagtaattttttttccaaactaagccccctggcttgataattcacatttttgcataaaattgtatgttttttgctttttcttgaaatatgtgtacattacacataagttttattggcttacaatatcaaaatcggagtatagagctatgttgagtctcctaacttatgctgttaaaaagtacagtgccgttttgcaacgtcgagtccyggcctttctgcttcctatgggttggtagctttatatattatttagattcatttttcaacattgatattgcattgggcaccttccagtctttgctgatttcgcctgcagtgttctattaagtatttttgctaagagttgttcagtctgtgttctggtttctcttaaattctgaaaattccaaaatgatattctactgaaccaaggtgattacatgctttgaa

SEQ ID NO: 925110 - DNA, 738 bp, Homo sapiens
tttttttttttttttgaggagtattcctattaacataaatgaaatcaggcttcagcacggtccgcagcaagttaggaggccaaatatattttttttacatgggagatacttagatgttgatagtattttagcaggaaagaaaagttaataacatgggagaaaaagttgtaggaacaarttagttgtttagatgggagggggtaagactgtaaaaatgatgggttgaatttagataggaaccaagaaagtctatcccatattattccaaggaaagcaaagaatataagtgaagatacagtgaaattatacaaaaaaaagtaaaaaaaaagagaagagagaacaggtgtggtaggtttgggaagaaagaaaaactatgaaataatcatcttggagaagaggagagaaaattgatcagagaaactagcacaagattgctgagtagtgctggaggctcacttggtacttttttacttaaatctgtattaaaagcgggcgtgagtccttggttttctgtaatcacatttggctgcatgggtgatggcacaaagcagaaagaaaactggatttaaccagacctggggtgctgccaggtgaaaatgataggtggggagacaggcagaaaaagttgaagctgcatgttagggagtaattgcagtgttcactagaccactagaccattaaatctgaatggtttaggaagtaaaataatttcaggagggaggtatggacaatgtaaag

SEQ ID NO: 925111 - DNA, 503 bp, Homo sapiens
cctgggtcaagtagggtctcagaaagctgtgaaacttactcatttcctgcatcaggacttctttcggtcctggatgaataagattgaagatatatgcttaaaatattcctaacaccggggtttgtgcatgtgttttcttccccaagaaagctataaacagcacaaattttgctctaagtttccctgtgtcctctctccctctctcccttccccctcccctgaaactaaagtaaaaagaatgctaactgcccatttttctgtgaccagcggaccttatctatactcccaattccaattccttgtaaacatactttgtaaagtcctgtaagatcctgtctcctttgccatgcygctacaaggccataaagtagataaaacctaagttgcaattccagtcttcctcaaatctaagacatgtcacaaaataatttactgcctttgtttcttgctcctgtaacaagcttcctgcctcacgtatctcccaccttaaaatgtttaaaagg

SEQ ID NO: 925112 - DNA, 694 bp, Homo sapiens
tataaaatcctggtgaattgtcaattaagtaaatcctttttaaaattttgttttcttttatcttcttttgtttcttttctattatttagtcctttattacctgcactacacagatgtaaaagtaggtaacttttgaattaaactatacagtgtgtgatccacggaaaacttacatcatgctacattcacctgcaagtttttggcaaatgtgaatttattagtcattgaaataagccagaaaaaatgaaacatactggttttgtcttaagcttccctagcccttctctctccttggttcaaatgagtcactgacctgctctagtacacatcttggaatcttcgtaacttcataactttatcttttgtgagttctttcatgcctggtttgaaactaaggaagtggaagcagggaagatagaagtggaaaataatggaattgctggaagaaaagaaaactaagagaagagtcacttaccaggacccatcattccttttacattactgtctcstacatgaacagatctggactcttgggctgcagagaaaggaaagcattcattcagcgttcattccactaacatggactaagcaccttccacgagcctggcactgggggcagactcagagattgtagtttcatgggggaggcagagcagtaaaaaaaagaaattacagtatagtgtggcaagtgcta

SEQ ID NO: 925113 - DNA, 596 bp, Homo sapiens
tatcaagtgatctgcctgccttggcctcccaaagtgctgggattacaggcgtaagccactgtgcctagctagctatgaatattcttgtacaaatttttttttagtggggggatgtatgccctcatttctcttgggtgtatacctaggagtaaaatctctgggttgtaggttatgattatgtttaactttaaaagaaaatgtcaagcagttttctaaagcagttggctaataytcccactagcaatgtttgagagcccagttgcttcacatactttccaatacttgggaaggatggttagtcctttcaatgttagccattctcagggatgtgtactggtatcacactgtagttttaatttgcagttccctggtgattattagtattaagtatgtttttatatgcttattagctattcatatattcttcttttataaggtgcctaagtccattgcccaactttttttgaagcagggtcttgctctgttgcccaggctggagtgcagtggcataatcacagctcacttcagccttgatctcctgggcttacgtgattcttcctcctcagcctcccaaggagctaggactacaggtgtgc

SEQ ID NO: 925114 - DNA, 694 bp, Homo sapiens
tataaaatcctggtgaattgtcaattaagtaaatcctttttaaaattttgttttcttttatcttcttttgtttcttttctattatttagtcctttattacctgcactacacagatgtaaaagtaggtaacttttgaattaaactatacagtgtgtgatccacggaaaacttacatcatgctacattcacctgcaagtttttggcaaatgtgaatttattagtcattgaaataagccagaaaraatgaaacatactggttttgtcttaagcttccctagcccttctctctccttggttcaaatgagtcactgacctgctctagtacacatcttggaatcttcgtaacttcataactttatcttttgtgagttctttcatgcctggtttgaaactaaggaagtggaagcagggaagatagaagtggaaaataatggaattgctggaagaaaagaaaactaagagaagagtcacttaccaggacccatcattccttttacattactgtctcctacatgaacagatctggactcttgggctgcagagaaaggaaagcattcattcagcgttcattccactaacatggactaagcaccttccacgagcctggcactgggggcagactcagagattgtagtttcatgggggaggcagagcagtaaaaaaaagaaattacagtatagtgtggcaagtgcta

SEQ ID NO: 925115 - DNA, 615 bp, Homo sapiens
tgctttatttgggggactaaatcacatccaaggagataaagatcttagacaccacgcaaagctgtggaaggagctgttgggatttccattcctacccacagagaggggaccttcgaacctcagaagatgcagcctgtcagcgagtgccagmtagcacgcttcaagatcagcaatgtgggaaatgacctgtgacctcgtggggcagggtacccccttctctatgcctcagtttcctcatttataaaatatctgacatacataatttaaaaaaaaaagctaatacctacaaaagatttttacaatttgcaaagcactttcccaagcattatatcaattaatactgtgatatatcatttttcttctctttatggctaatatgttacaccagaaagtcatatacatgaaaactctttataaactgattttaaaactataattggaaaaagaattatggtaacaaataaagagccatgaaaaactttaaaaatttgtatctggtgatattattatggggtttttaatggggagcaaggaggaggtggtggatggaaaggaagatcttttccctactgagtgttctctgcatattttaaactatatttagcctacattatg

SEQ ID NO: 925116 - DNA, 603 bp, Homo sapiens
gtgttgctcaagagacatgattttgttttttttttcattgctgcatagtattccatcatttatatgtgtaccatattttctttatccaggccaccattgttgggcatatagattgattccatgtttttgctattatgaatagtactgtgatgctgttgataaacgtaggtgtgcatgtrtctttctggtagaacaacttacagtcctttgggtatatacccagtaatgggattgatgggtaaaatggtaattctgttttaggttatttgaaaaatcttcaaactgctttctacagtggctgaactaatttacattcccacgaacagtgtatgagcatcctcttttctccctaatcttgccaacacctgtcattttgtgctttttaataatattcattctgactagtgggagatggtatcttatagtggtttttatgattttcatttctctgatgattagtaatgttgagtattttttcatatgcttgttggccatgtgtacttattcttgagaagtgtctgttctcttttggccactctttagtgggatttttcttttttgcttgttaatttgtttaagttccttctagattctaaacattag

SEQ ID NO: 925117 - DNA, 603 bp, Homo sapiens
gtgttgctcaagagacatgattttgttttttttttcattgctgcatagtattccatcatttatatgtgtaccatattttctttatccaggccaccattgttgggcatatagattgattccatgtttttgctattatgaatagtactgtgatgctgttgataaacgtaggtgtgcatgtgtctttctggtagaacaacttacagtcctttgggtatatacccagtaatgsgattgatgggtaaaatggtaattctgttttaggttatttgaaaaatcttcaaactgctttctacagtggctgaactaatttacattcccacgaacagtgtatgagcatcctcttttctccctaatcttgccaacacctgtcattttgtgctttttaataatattcattctgactagtgggagatggtatcttatagtggtttttatgattttcatttctctgatgattagtaatgttgagtattttttcatatgcttgttggccatgtgtacttattcttgagaagtgtctgttctcttttggccactctttagtgggatttttcttttttgcttgttaatttgtttaagttccttctagattctaaacattag

SEQ ID NO: 925118 - DNA, 603 bp, Homo sapiens
gtgttgctcaagagacatgattttgttttttttttcattgctgcatagtattccatcatttatatgtgtaccatattttctttatccaggccaccattgttgggcatatagattgattccatgtttttgctattatgaatagtactgtgatgctgttgataaacgtaggtgtgcatgtgtctttctggtagaacaacttacagtcctttgggtatatacccagtaatgggattgatgggtaaaatggtaattctrttttaggttatttgaaaaatcttcaaactgctttctacagtggctgaactaatttacattcccacgaacagtgtatgagcatcctcttttctccctaatcttgccaacacctgtcattttgtgctttttaataatattcattctgactagtgggagatggtatcttatagtggtttttatgattttcatttctctgatgattagtaatgttgagtattttttcatatgcttgttggccatgtgtacttattcttgagaagtgtctgttctcttttggccactctttagtgggatttttcttttttgcttgttaatttgtttaagttccttctagattctaaacattag

SEQ ID NO: 925119 - DNA, 603 bp, Homo sapiens
gtgttgctcaagagacatgattttgttttttttttcattgctgcatagtattccatcatttatatgtgtaccatattttctttatccaggccaccattgttgggcatatagattgattccatgtttttgctattatgaatagtactgtgatgctgttgataaacgtaggtgtgcatgtgtctttctggtagaacaacttacagtcctttgggtatatacccagtaatgggattgatgggtaaaatggtaattctgttttaggttatttgaaaaatcttcaaactgctttctacagtggctgaactaatttacattcccacgaacagtgtatgagcatcctcttttctccctaatcttgccaacacctgtcattttgtgctttttaatratattcattctgactagtgggagatggtatcttatagtggtttttatgattttcatttctctgatgattagtaatgttgagtattttttcatatgcttgttggccatgtgtacttattcttgagaagtgtctgttctcttttggccactctttagtgggatttttcttttttgcttgttaatttgtttaagttccttctagattctaaacattag

SEQ ID NO: 925120 - DNA, 609 bp, Homo sapiens
aaacaaataataatgggcaagggattgatgggagttaatttgaatcacggggactgtttcttccatactgttctcattatagtgaatgagtctcatgagatctgatggttttatctggggtttccacttttgcatcttccacattttctgttgctgctaccatgtaagaagtgccrttcacctcctgctctgattctgaggcctccccagccatgaggaactttaagtctaattaagcctccttttctttctttttttttttttttttttgagacagagtctcgctctgtcccccaggttggagtgcagtggcgcaatcacggctcactgcaaactctgccccccgggttcatggcattctcctgcctcagcctcccgagtagctgggactacaggcgcccaccaaggcgtctggctaattttttgtattttgagtagagatggggtttcaccgtgttagccaggatggtctcaatctcctgacctcatgatctgcacgtcttggcctcccaaagtgctgggattacaggtgtgagtcaccacacctggccaagcctctttttcttcacagtatctggtttgtctttatcaacagtgtgaaaacagaaa

SEQ ID NO: 925121 - DNA, 609 bp, Homo sapiens
aaacaaataataatgggcaagggattgatgggagttaatttgaatcacggggactgtttcttccatactgttctcattatagtgaatgagtctcatgagatctgatggttttatctggggtttccacttttgcatcttccacattttctgttgctgctaccatgtaagaagtgccgttcacctcctgctctgattctgaggcctccccagccatgaggaactttaagtctaattaagcctccttttctttctttttttttttttttttttgagacagagtctcgctctgtcccccaggttggagtgcagtggcgcratcacggctcactgcaaactctgccccccgggttcatggcattctcctgcctcagcctcccgagtagctgggactacaggcgcccaccaaggcgtctggctaattttttgtattttgagtagagatggggtttcaccgtgttagccaggatggtctcaatctcctgacctcatgatctgcacgtcttggcctcccaaagtgctgggattacaggtgtgagtcaccacacctggccaagcctctttttcttcacagtatctggtttgtctttatcaacagtgtgaaaacagaaa

SEQ ID NO: 925122 - DNA, 597 bp, Homo sapiens
gcttctttgtcttgttttataacatgctcctttagctcagtgtagtttgttattaccaaccttctgaagctgacttttgtaaattcagccatctcagacttggctaagttaggtgcccttgctggagagttgtttcaatcatttcaagaagargcactctggctttttaaattttcaacgtttttgcattgattctttctcaactttgttgaggttgctgacctttgaacgggttttttatgggcgttttttttttttttgttcatgttgttgctgtagctttctatttgtttgtttttcttttaacagtcaagccctccttctatagggctactgctgtttgctacggttcaatccagactctaataccctctgttacaggctgaaagaatgagggtcctgaccaactcagtataccactggagcaaacagaaaactgttctcatgaaagcaggatttggaaaactgatgactgtgtctgcccccagaaagagtgctgagggcagtcacaccccaagcacagtgttccttgtgattacctatagaagtatctgaagcctgttgtacaaagaaagcaattaagtgtacctgtgataa

SEQ ID NO: 925123 - DNA, 606 bp, Homo sapiens
acctctccctccctcctatttctaccttataaatacgaagggctgtagaagcttagatcccttgttcactagaaacaaggagccccctgtcaccttcttttaaaacagatctttctgtctctgtcttcatttctctattcatcccccttcattcaatcctgtagcaactggcagtgacaagtggtgcccaggacagggacatgagcaaagaaggtctgctggagcagagaaagtgaaactgaccagatgagcaagaaaccttgggacaagtctrctggcagctaatataaggttagtgccctaaagaggtactgggaatgggaagttttctgaatcagggtaacatggggcagaatctatctattcaggagcaatattatgtgcagttgcttaaagttttacttaaacaatctggtgctcaggttagttctcaaacattaactaagatgctgaagaaggtcactgtacataacccatggtttccacagatgggcactctcgatgtggaaatttggaacagaataggagaaggattaaaacgagctcatcaaaaaggtcttaaagttgacctttctgatttctccacttggagtttgtttcttactg

SEQ ID NO: 925124 - DNA, 606 bp, Homo sapiens
acctctccctccctcctatttctaccttataaatacgaagggctgtagaagcttagatcccttgttcactagaaacaaggagccccctgtcaccttcttttaaaacagatctttctgtctctgtcttcatttctctattcatcccccttcattcaatcctgtagcaactggcagtgacaagtggtgcccaggacagggacatgagcaaagaaggtctgctggagcagagaaagtgaaactgaccagatgagcaagaaaccttgggacaagtctgctggcagctaatataaggttagtgccctaaagaggtactgggaatgggaagttttctgaatcagggtaacatggggcagaatctatctattcaggagcaayattatgtgcagttgcttaaagttttacttaaacaatctggtgctcaggttagttctcaaacattaactaagatgctgaagaaggtcactgtacataacccatggtttccacagatgggcactctcgatgtggaaatttggaacagaataggagaaggattaaaacgagctcatcaaaaaggtcttaaagttgacctttctgatttctccacttggagtttgtttcttactg

SEQ ID NO: 925125 - DNA, 660 bp, Homo sapiens
agggtgctgcaggagaccagggtgtatttcatccctatcttcaactcataagacagacattcccagagcggccattttagagacctccccctgggaatgcattcctttcccaggattattccttgctgagaaaagaattcagtgatatttctcctattcgctttctgcaagaagagaaatatgactctgttctgcctggccctgcaggcagtcagaccttatggttatctcccttgttccgtgaacatcactgttatcctgttctttttcagggtgcccagatttcatattgttcaaacacacatgttttacaaagaatttgtacagataatgcaatcatcatagggtcctgaggtgacatacatcctcagtttacaaagatgatgggattaagagatttaagtaaagacaggcataggaaattataagagtmttgattggggaagtgataaatgtccatgaaatcttcacaatttatgttcagaaattgcagtaaagactagtgtaagaaattataaaaatattaattggggaactaacaaatgtccatgaaaacttcacaatttatgttcttctgccatggcttcagcaggtccctccattcggggtccctgacttcctgcaacaaaagtttattgcctttaatgtaaaaacatgaat

SEQ ID NO: 925126 - DNA, 678 bp, Homo sapiens
agtatggcttttaatggaaattttaagcaagtgaggtaaaaatgctgaaggattacttcaaataattgtaacaggagatgaaacatgtctttaccagtatgatcctatggacaaaacacaatcgtctttaccagtatgatcctacggacaaaacaaaatcaaagcaatggctaccagaggtgaaagtagtctagtcaaagtaaaagcagactggtcgaaagcaaaggtcatggcaacaatttgggrgatgctcaaagttgttttccttgctgactttctggagaaccaagaaacaataacatttcctatggatgagaatattttaagaaagttaaccaaagcattagcaaaagacactttggaaagcttcaccagagtccttcttcaccgtgacaatgcccctgctcattcctctcatcaaataagggaaattttgtaaaagtatctttgagaaatcattagacatccactatgtagccttgatttggctccttttgacttcttttagttttccgaccttgaaaaagtattcaaatggcattgattttttttttattagtaatgtaacaaaaactgcattgacatagttaaatttccaggaacctcagttctttagggatagactaaatggctggtatgattgcttacaaaagtgactagaagctgatgaaaattatt

SEQ ID NO: 925127 - DNA, 631 bp, Homo sapiens
tcattcaggatgagagaaaagccgcgaaggaatacctgaagtaaaatgatgtcatggctcagatctgtcgtgacacttgccatggtaaccaccacctagagatgcagcatcttcctgtcaaggtgctatgcttagaagaatcaccaggcagattaaaaaagtcctggtayggcaggataaattaacttattgagtctgttagttcaggtaaatactatcagtagttaatactgaaagcctgcttcctatgtgccagacagcttcttaagaatatacattcagtgtttcatgctgatatttcaaaattactattcccgtgtgtgctagtctatttgggttgctatatatcatagagaaggtggcttataaacaacagacatttatttctcacagttctggaaactgagttcacatttaaagccccagaaaattcagtctggtaaggaaattcagtcaggtaaataaactcagaatggtaaaggttcgttttctggttcacaggtcgttgccttctcactgtgtcctcacatggtggaagaggcaaaacagttctcttgcatctcttttataaaggcacttattccattcatgagggctgcacactcatagcctaatcacctgactgaaaaac

SEQ ID NO: 925128 - DNA, 766 bp, Homo sapiens
agaaaggggaatggcccttggttgggattacctaatgcagcaatcctttgaaagagactggtctcttcttttttttttcctttttttaattatactttaagttctagggtacacgtgcaccatgtgcaggtttgatacataggtatacatgtgccatgttggtttgctgcatcygtcaactcatcatttacattaggtatttctcctaatgctatcccttccccagctccccaccccctgacaggccccagtgtgtgatgttccccaccctgtgtccaagtgatctcattgttcaattcccacctatgagtgagaacatgcggtgttggttttctgtccttttgatagtttgctgagaatggtttccagcttcatccacgtccctgcaaaggacatgaactcatcattgtttatggctgcatagtattccatggtgtatatgtaccaaattttcttaatccagtctatcattgatggacatttgggttggttccaagtctttgctattaggaactgtgctgcaataaacatatgtgtgcatgtgtctttatagcagcatgatttataatcctttgggtatatacctagtaatggaatcactgggtcaaatggtaattctagttgtagatccttgaggaatcaccacactgtcttccacaatggttgaactagtttacagtcccaccaacagcgtaaaagtgttcctatttctccacatcctctccagcacctgttgtttcctgactttttaatgatcgccattcta

SEQ ID NO: 925129 - DNA, 766 bp, Homo sapiens
agaaaggggaatggcccttggttgggattacctaatgcagcaatcctttgaaagagactggtctcttcttttttttttcctttttttaattatactttaagttctagggtacacgtgcaccatgtgcaggtttgatacataggtatacatgtgccatgttggtttgctgcatctgtcaactcatcatttacattaggtatttctcctaatgctatcccttccccagctccccaccccctgacaggccccagtgtgtgatgttccccaccctgtgtccaagtgatctcattgttcaattcccacctatgagtgagaacatgcggtgttggttttctgtccttttgatagtttgctgagaatggtttccagcttcatccacgtccctgcaaaggacatgaactcatcattktttatggctgcatagtattccatggtgtatatgtaccaaattttcttaatccagtctatcattgatggacatttgggttggttccaagtctttgctattaggaactgtgctgcaataaacatatgtgtgcatgtgtctttatagcagcatgatttataatcctttgggtatatacctagtaatggaatcactgggtcaaatggtaattctagttgtagatccttgaggaatcaccacactgtcttccacaatggttgaactagtttacagtcccaccaacagcgtaaaagtgttcctatttctccacatcctctccagcacctgttgtttcctgactttttaatgatcgccattcta

SEQ ID NO: 925130 - DNA, 766 bp, Homo sapiens
agaaaggggaatggcccttggttgggattacctaatgcagcaatcctttgaaagagactggtctcttcttttttttttcctttttttaattatactttaagttctagggtacacgtgcaccatgtgcaggtttgatacataggtatacatgtgccatgttggtttgctgcatctgtcaactcatcatttacattaggtatttctcctaatgctatcccttccccagctccccaccccctgacaggccccagtgtgtgatgttccccaccctgtgtccaagtgatctcattgttcaattcccacctatgagtgagaacatgcggtgttggttttctgtccttttgatagtttgctgagaatggtttccagcttcatccacgtccctgcaaaggacatgaactcatcattgtttatggctgcatagtattccatggtgtatatgtaccaaattttcttaatccagtctatcattgatggacatttgggttggttccaagtctttgstattaggaactgtgctgcaataaacatatgtgtgcatgtgtctttatagcagcatgatttataatcctttgggtatatacctagtaatggaatcactgggtcaaatggtaattctagttgtagatccttgaggaatcaccacactgtcttccacaatggttgaactagtttacagtcccaccaacagcgtaaaagtgttcctatttctccacatcctctccagcacctgttgtttcctgactttttaatgatcgccattcta

SEQ ID NO: 925131 - DNA, 622 bp, Homo sapiens
ctataatgtttgtaataacagctttattaagatataattcacataccataaaattcacctttttaaagtgtagaattattttattttcttatttttttcattcttatgtatttacccacgttggtttttataatgcatacttttgcaaccatcattattaactaattttaaaacattttcacctcctgcaaaataaattccttactaattaacagttactcttcatttctccctttccacagcacctggtggccactaatctactttctgtctctatcatctctatggatttatctattctaaacatttcatataagtgcarttatacaaaatatggccatttgtgcctggcttctttcacttaacgtaacatttttttttggaggtgaatatttttcttttctttttaaattatacttcaagttatagagtacctgtgcacaacatgcaggtttgttacatatgtatacatgtgccatgttggtgtgctgcacccattaactcatcatttacattaggtatttcttctaatgctatcccttccccacccccaaccccatgacaggccccggtgtgtgatgttccccaccctgtatgcaagtgttctcattgttcaattccc

SEQ ID NO: 925132 - DNA, 667 bp, Homo sapiens
gttgatttctataatgtttgtaataacagctttattaagatataattcacataccataaaattcacctttttaaagtgtagaattattttattttcttatttttttcattcttatgtatttacccacgttggtttttataatgcatacttttgcaaccatcattattaactaattttaaaacattttcacctcctgcaaaataaattccttactaattaacagttactcttcatttctccctttccacagcacctggtggccactaatctactttctgtctctatcatctctatggatttatctattctaaacatttcatataagtgcaattatacaaaatatggccatttgtgcctggcttctttcacttaacgtaacatttttttttggaggtgaatatttttcttttctttttaaattatacttcaagttatagagtacctgtgcacaacatgcaggtttgttacatatgtatacatgtgccatgttggtgtgctgcacccattaactcrtcatttacattaggtatttcttctaatgctatcccttccccacccccaaccccatgacaggccccggtgtgtgatgttccccaccctgtatgcaagtgttctcattgttcaattcccatctatgagtgagaacacgtggtgtttggttttcttt

SEQ ID NO: 925133 - DNA, 609 bp, Homo sapiens
tattcccaataacagtctcttatcatctgtatgatttgcaagtatttcccccattctgtgggttttcacttttttgatggtgttctttgcagcgcaagttttaaattttgatagagaagtttatctaattttccttttatgcttatgctttkgctttgatgtaatactgatttggcgtcactttggttgcttatggttttggtgtcatatctaagaaactattgcctaatccaaggtcatgaagatttactcttaagttttcttctaagggtttcagagtttttagctcttatgtttacattggtgatctattatttcatattttaaatatttgtgtgaagtaggagttcattctcattctttttgcatgtagatattcagttgttccagcctcatttgttgaaaagactgttctttccctactgaatgtcatgacactgtcattggaaatcaactgaccataaatgtaaagactgggtgttgactgacaccgactgattctctgacaccaacttggcatctaacaatttaaatcaatttgaaacttaactcctggaattagcgtcagaccccacaggttgaaggctcagttctgtaagactgacctca

SEQ ID NO: 925134 - DNA, 640 bp, Homo sapiens
aggtggatcacctgagttcaggaattcaagaccagcctggccaacatagtgaaaccctgtctctactaaaaatacaaaaaattagccaggcgtggtggcaggtgcctgtaatcacagctacttgggaggctgaggcaggagaatcgcttgaacccaggaggtggaggttgcagtgagctgagatcrcgccagtgcactccagcctggcaacagagcaagactccaactcaaaaaaaaaaaaagatcagagcagaactaaatgaaattgtattaaaaaaatacaaaagataaatgaaacaaaaagccgactttttgacaagacaaacaaaattgatagaccattaacaagattaatcaagaagagagaagatccaaaataagctcaattagaaatgtaatgggaggtattacgaccaaccccacagaaatacgaaagatcattcaagaccactatgaacacctttatgtgcacaaactggaaaatctggaggagatgtataaattcctggaaatatgcaaccctcctagattaaatcaggaagaaatagaaactgaacagacaaataacaagtaatgagattgaaacaataataaaaaataaaaaaacctgccaaccaaaaatagtccaggaccagacaga

SEQ ID NO: 925135 - DNA, 793 bp, Homo sapiens
acttgctattctttctttctctgtgttccaaatgtagactaaaaaacttttaactatgactagcagcaatgaaaagaatataaatgatattactgtgttaagaaggcagagaccacttttttgttttgttttgttttgtttttttgagacagagtccccctctgtcacccaggctggagtgcagtggtatgatctcggctcactgcaacctctgcctcccgagttcaagtgattctgctgcctcagcctcttgagtagctgggcttacrggtgtgtgccaccatgcctggctaatttttctatgtttagttgagatgggggtttcaccatgttggccaggctggtctcaaactcctgacctcaagtgatctgcctgccttggcttcccaaagtgctgagattacgggcatgagccaccacgcccatcccagaccacatgttttaaactagaaccaatgtccccatttgtttaagcccttgaaaaggccctagagtcctgcttaaatcttctatgtctttatctgtttgtctgttgtctacttaagtctaatgttcttctttttataatatctgtgttcaagataaagagaatctaatatttctatttgtcaaatctttaaaaaagtatgcattcatattattgtatattatattgtattttatagatagcactgtctctgtgaaagactgttctatttcaaataactgacatagcaatctttgaaagcagtttttttctttactgatttgttcatgtatttaatttttcccatttattccctgaatagttact

SEQ ID NO: 925136 - DNA, 605 bp, Homo sapiens
ctgttaggttatcaagaaattattatcaagaataacaagcggccacgtgtggtggctcacgtctgtaatcccagcctgggtaatatggtgaaacaccatctttaccaaaagcaacaacaacaataacagtaacaacaaacaaaaattatcagggcacagtgattcatgcctgtaattctggcagtttggaaggctgaggcraaaggatgacttaagcttagaagtgtgagaccagcttggccaacatggtaaaaccctgttggtacaaaaattacaaaaattagccggatgtggtggtatgtgcctgtggtcccagcttcttgggaggctgaagtgggaggattgcttgagcccagaagttcaaggctgcagtgagccatgattgtgccactgtactccagcctaggcaacagagtgagagaccctgtctcaaaaaaaaaaaaaaaaaggaaaaataagaaataaaaaacattggtcagggtgaggagaaagggaacccttgtacactctgttgggaatgtagatgggtgtagccactgtggaaaacagtatggtggttcctaaacaaatcaaaaatagaacaaccatatgatccagtaatccct

SEQ ID NO: 925137 - DNA, 605 bp, Homo sapiens
ctgttaggttatcaagaaattattatcaagaataacaagcggccacgtgtggtggctcacgtctgtaatcccagcctgggtaatatggtgaaacaccatctttaccaaaagcaacaacaacaataacagtaacaacaaacaaaaattatcagggcacagtgattcatgcctgtaattctggcagtttggaaggctgaggcaaaaggatgacttaagcttagaagtgtgagaccagcttrgccaacatggtaaaaccctgttggtacaaaaattacaaaaattagccggatgtggtggtatgtgcctgtggtcccagcttcttgggaggctgaagtgggaggattgcttgagcccagaagttcaaggctgcagtgagccatgattgtgccactgtactccagcctaggcaacagagtgagagaccctgtctcaaaaaaaaaaaaaaaaaggaaaaataagaaataaaaaacattggtcagggtgaggagaaagggaacccttgtacactctgttgggaatgtagatgggtgtagccactgtggaaaacagtatggtggttcctaaacaaatcaaaaatagaacaaccatatgatccagtaatccct

SEQ ID NO: 925138 - DNA, 614 bp, Homo sapiens
ataaataaaaacatctgtatataactataaagcttacactctcatagctcgcacagagtttttgcaaaagcaaaaagataaaactttagctctttgtaggtatgatttttgagttgagatggcaggaaaatttagtgagattttgatataagagtaacaaaagggagcctctagggacaaagcagataatacattgagagtgaacrgaaattatttctcagcctggctctgccatggcagttcttgtcccttccctataattaattattttctggtttaactgagaaaacatgagacaatctcaaatttcctcagagctagattacaatattccattttatcagccctagaacaacatgaacagaagctttagtggtagtgttatagtctatgctgaggtttgttagcagtgcatcattacctaagagatcgctgcttagttcagccagttaactggagctcaccaaaatgttctgctcttgaaagagaaagcgggggagaaagggtgggcagagagagagagcaagacagagctccttcacagagcaattcatgtaaatgcattgtccaatggccctgagatccattaattaaattaattagacttcatagca

SEQ ID NO: 925139 - DNA, 614 bp, Homo sapiens
ataaataaaaacatctgtatataactataaagcttacactctcatagctcgcacagagtttttgcaaaagcaaaaagataaaactttagctctttgtaggtatgatttttgagttgagatggcaggaaaatttagtgagattttgatataagagtaacaaaagggagcctctagggacaaagcagataatacattgagagtgaacagaaattatttctcagcctggctctgccatggcagttcttgtcccttccctrtaattaattattttctggtttaactgagaaaacatgagacaatctcaaatttcctcagagctagattacaatattccattttatcagccctagaacaacatgaacagaagctttagtggtagtgttatagtctatgctgaggtttgttagcagtgcatcattacctaagagatcgctgcttagttcagccagttaactggagctcaccaaaatgttctgctcttgaaagagaaagcgggggagaaagggtgggcagagagagagagcaagacagagctccttcacagagcaattcatgtaaatgcattgtccaatggccctgagatccattaattaaattaattagacttcatagca

SEQ ID NO: 925140 - DNA, 625 bp, Homo sapiens
gagcaatggacacattgggcccagtgggtacctcacttggtcgctcagaactgggggttgttagaagctctacttcagatcccactcctgacaccattaaaatgttaaaataaaataaaataaaaactttaaaataaaatacaaactttagccaaattcagagtttaattgagcaaagaatgataatcaaggaagactgaatcaagcagtctcctgagccagagtagtctcagagactccagtgcagccatgtggtggaagatgacttatgaacagaaaaagaaagtgacatacggaaaaggaagtgacatacagaaacagccagattgtttacagttygatgtttgccttatttgaacgtagtatgaacagttggccacctttaattggccaaaacttggtgattggcacaagggtagactacagtctatatacaactccatttaggttatataggtcacaatatacagataaatttttaggctgaacttaaaatacataaagaggtagctttaggctaaacttgatttaacacccagtgtctactacaaagttgaaagagaggagtggggatgatgtgatatggctgggattgaggctgagaaagcagacagactgtagaggt

SEQ ID NO: 925141 - DNA, 625 bp, Homo sapiens
gagcaatggacacattgggcccagtgggtacctcacttggtcgctcagaactgggggttgttagaagctctacttcagatcccactcctgacaccattaaaatgttaaaataaaataaaataaaaactttaaaataaaatacaaactttagccaaattcagagtttaattgagcaaagaatgataatcaaggaagactgaatcaagcagtctcctgagccagagtagtctcagagactccagtgcagccatgtggtggaagatgacttatgaacagaaaaagaaagtgacatacggaaaaggaagtgacatacagaaacagccagattgtttacagtttgatgtttgccttatttgaacgtagtatgaacagttggccacctttaattggccaaaacttggtgattggcacaagggtagactacagtctatatacaactccatttaggttatataggtcacaatatacagakaaatttttaggctgaacttaaaatacataaagaggtagctttaggctaaacttgatttaacacccagtgtctactacaaagttgaaagagaggagtggggatgatgtgatatggctgggattgaggctgagaaagcagacagactgtagaggt

SEQ ID NO: 925142 - DNA, 641 bp, Homo sapiens
gaggcaggagaattgcttgaaccaaggaggcagaggttgcagtgagccaagatcacaccattgcactccagcctgggcgacaaaagagaaactctgtctcaaaaaaaaaaaaatctgttattaattattttttaatgagattactggatttgcccctcagaaaaaagatgcagttatctgccatcttaaagttgtatttctaacacagatatgtgatctattactccgtttaaaaatctttaggtcaggagcggtggctcatgcctgtaatcccagcactttgggaggtggaagtgggtgaatcacctgaagtcaggagttcgaggccagcctggccaacatgacgaaaccccgtctctactaaaaaatacaaaaattagccgggtgtggtggtgcatgcctgtaatcccagctactcaggaggctgaggcaggasaatcgcttgaacctgggagacggaggttgcagtgagctgtgatcacaccactgtactccagcctgggtgacagcgagactctgtctcaaaaaaaaaaaaaaactttaatggcatacagttaccttcatgataaaagtaaaattgtttaacatgatcttatgaagtcctcataaattttttcagcttcattatttccattttgtgc

SEQ ID NO: 925143 - DNA, 753 bp, Homo sapiens
caaagaagaattagtacaatgttactgaaactattccaaaagagaaagaaagagggactcctccctaaatcattctatgaagtcagtatcaccctaataccaaaaacaggaaagggcatttaaaaaaaaaaaaaagaaagaaagaaagaaaactggctgggcgcagtggctcacacctgtaatctcagcactttgggaggtggaggcgggcggatcacgagktcaggagattgagaccatcctggctaacatggtgaaaccccatctctactaaaaatacaaaaaattaaccgggcacagtggcgggcacctgtagtcccagctactcgggaggctgaggcaggagaatggcgtgaacccaggaggcggagcttgcagtgagccgagattgagccactgcaccccagcctgggtgacagagtgagacgccgtctcaaaaaaaaaagaaagaaaaaaaactaacgaccaatatccctgataaacatagatgaaaaatcctcaacaaacctcaacaaaatactagctaaccgaatctgacagtatattaaaaagatgataatccaccatgatcaagtaggtttcataccagggattcagggatggtttaacatactcaagtcaatgaatgaaatatatcacataaacagaattaaaaacaaaaattacacgatcatctcaatagatgcaaaaaagcatttgacaaaatccagcatccatttttgattaaaaccctcagcaaaattggcatagaag

SEQ ID NO: 925144 - DNA, 764 bp, Homo sapiens
ttgtttttgcaacttcacccaaaagaaacaattagatttattagatgtaatattaattgtaccaactaagttttataacaccttctaattcatttctaataaggatggttttgtacctactataccatattttgtattttagggaccatttttttttccttttcaacttttattttagaatcaggggtacatgtgcaggtttgttgcaaaagtatttctcacgatgctgaggtttgggttatggctgaacttgtcacccaggtagtgagcatagtacccaataggtaatttttcaacccttgccctccttcctctctccctcctctttttttttttttttttttttttttgagacagagtcttgctctgtcgcccaggctggagtgctgtggcacratcttggctcactgcaacctctgcctcctgggttcatgccattctcctgcctcaacctcctgagtagctgggactgcaggcgcccgccaccacacccagctaattttttgtattttttagtagagacgaggttcaccttgttagccaggatggtctcgatctcctgacttcgtgatccacccgcctcagcctcccaaagtgctgggattacaggcctgagccaccgcgcccggcctcctctctctctcctttagtagaccccagtatctattgtttccatctttatgtccatgtggacctaatgtttagctcccacttacatgcgagaacatatggtatttggttttttgttcctgcattaatttgtt

SEQ ID NO: 925145 - DNA, 764 bp, Homo sapiens
ttgtttttgcaacttcacccaaaagaaacaattagatttattagatgtaatattaattgtaccaactaagttttataacaccttctaattcatttctaataaggatggttttgtacctactataccatattttgtattttagggaccatttttttttccttttcaacttttattttagaatcaggggtacatgtgcaggtttgttgcaaaagtatttctcacgatgctgaggtttgggttatggctgaacttgtcacccaggtagtgagcatagtacccaataggtaatttttcaacccttgccctccttcctctctccctcctctttttttttttttttttttttttttgagacagagtcttgctctgtcgcccaggctggagtgctgtggcacgatcttggctcactgcaacctctgcctcctgggttcaygccattctcctgcctcaacctcctgagtagctgggactgcaggcgcccgccaccacacccagctaattttttgtattttttagtagagacgaggttcaccttgttagccaggatggtctcgatctcctgacttcgtgatccacccgcctcagcctcccaaagtgctgggattacaggcctgagccaccgcgcccggcctcctctctctctcctttagtagaccccagtatctattgtttccatctttatgtccatgtggacctaatgtttagctcccacttacatgcgagaacatatggtatttggttttttgttcctgcattaatttgtt

SEQ ID NO: 925146 - DNA, 764 bp, Homo sapiens
ttgtttttgcaacttcacccaaaagaaacaattagatttattagatgtaatattaattgtaccaactaagttttataacaccttctaattcatttctaataaggatggttttgtacctactataccatattttgtattttagggaccatttttttttccttttcaacttttattttagaatcaggggtacatgtgcaggtttgttgcaaaagtatttctcacgatgctgaggtttgggttatggctgaacttgtcacccaggtagtgagcatagtacccaataggtaatttttcaacccttgccctccttcctctctccctcctctttttttttttttttttttttttttgagacagagtcttgctctgtcgcccaggctggagtgctgtggcacgatcttggctcactgcaacctctgcctcctgggttcatgccattctcctgcctcaacctccygagtagctgggactgcaggcgcccgccaccacacccagctaattttttgtattttttagtagagacgaggttcaccttgttagccaggatggtctcgatctcctgacttcgtgatccacccgcctcagcctcccaaagtgctgggattacaggcctgagccaccgcgcccggcctcctctctctctcctttagtagaccccagtatctattgtttccatctttatgtccatgtggacctaatgtttagctcccacttacatgcgagaacatatggtatttggttttttgttcctgcattaatttgtt

SEQ ID NO: 925147 - DNA, 764 bp, Homo sapiens
ttgtttttgcaacttcacccaaaagaaacaattagatttattagatgtaatattaattgtaccaactaagttttataacaccttctaattcatttctaataaggatggttttgtacctactataccatattttgtattttagggaccatttttttttccttttcaacttttattttagaatcaggggtacatgtgcaggtttgttgcaaaagtatttctcacgatgctgaggtttgggttatggctgaacttgtcacccaggtagtgagcatagtacccaataggtaatttttcaacccttgccctccttcctctctccctcctctttttttttttttttttttttttttgagacagagtcttgctctgtcgcccaggctggagtgctgtggcacgatcttggctcactgcaacctctgcctcctgggttcatgccattctcctgcctcaacctcctgagtagctgggactgcaggcgcccgccaccacacccagctaattttttgtattttttagtagagacgaggttcaccttgttagccaggatggtctcgatctcctgacttcgtgatccacccgcctcagcctcccaaagtgctgggattacaggcstgagccaccgcgcccggcctcctctctctctcctttagtagaccccagtatctattgtttccatctttatgtccatgtggacctaatgtttagctcccacttacatgcgagaacatatggtatttggttttttgttcctgcattaatttgtt

SEQ ID NO: 925148 - DNA, 762 bp, Homo sapiens
gaagctgggtgatttctgcatttccaactgaggtacccagctcatcagattgggactggttcggagggcaagacgaagcagggtggggcgtcacttcacccaggaagcgcaaggtgtcagggaactccctcccctatccaagggaagctgtgagagactgtgccctgaggaacggtgcactccagcccagatactgtgtttttcccatgatcttcgcaacccgcagaccaggagattccctcaggtgactacaccacgagggccctgggtttcaagcacaaaactgggcagccatttgggcagacaccaagctagctgcaggagttttttttcatactccagtggtgcctggagtgccagtgagacagaaccgtttcctcccctagaaagggggctgaagccagggagccaagtggtctagctcagtggatcccacactcatggagtccagcaagctaagatccactggcttgaaattgtcactgccagcacagcagtctgaagtcgacttgggtgctcaagcttggtggggggaggggygtccaccattactaaggcttgagcaagcggttttccctcacagtgtaagcaaagctgctgggaagtttgaactgggtggagcccaccgtagctcagcaaaaccatgtagccagactccctgtctagattcttcctcactgggcagggcatctctgaaagaaaggcagcagccccagtcatgggattatagacaaaactcccatctccctgggacagagcacc

SEQ ID NO: 925149 - DNA, 628 bp, Homo sapiens
ggacctgatagacatctacagaactctccaccccaaatcaacagaatatacattattctcagccccacactgcacttattccaaaattgaccacatagttggaggtaaagcactcctcagcaaatgtaaaagaacagaaattatarcaaactatctctcaaaccacagtgcaatcaaactagaactcaggattaagaaaatcactcaaaaccgctcaactacatggaaactgaacaacctgctcctgaatgactgctcggtacataactaaatgaaggcagaaataaagatgttttttgaaaccaatgagaacaaagacacaacaaactagaatctctgggacacatttaaagcagtgcgttgagggaaatttatagcactaaatgcccacaagagaaagcaggaaagatctaaaactgacaccctaacatcacaattaaaagaactagagaagcaagagcaaacacattcaaagcgagcagaaggcaagaaataactaagatcagagcagaattgaaggaaatagagacacaaaaaacccttcaaaaaatcaatgaatccaggagctttttattgaaaaaaaaaaaaaacttttttgaaaagatcagcaaaattgatagaccactag

SEQ ID NO: 925150 - DNA, 628 bp, Homo sapiens
ggacctgatagacatctacagaactctccaccccaaatcaacagaatatacattattctcagccccacactgcacttattccaaaattgaccacatagttggaggtaaagcactcctcagcaaatgtaaaagaacagaaattatagcaaactatctctcaaaccacagtgcaatcaaactagaactcaggattaagaaaatcactcaaaaccgctcaactacatggaaactgaacaacctgctcctgaatgactgctsggtacataactaaatgaaggcagaaataaagatgttttttgaaaccaatgagaacaaagacacaacaaactagaatctctgggacacatttaaagcagtgcgttgagggaaatttatagcactaaatgcccacaagagaaagcaggaaagatctaaaactgacaccctaacatcacaattaaaagaactagagaagcaagagcaaacacattcaaagcgagcagaaggcaagaaataactaagatcagagcagaattgaaggaaatagagacacaaaaaacccttcaaaaaatcaatgaatccaggagctttttattgaaaaaaaaaaaaaacttttttgaaaagatcagcaaaattgatagaccactag

SEQ ID NO: 925151 - DNA, 628 bp, Homo sapiens
ggacctgatagacatctacagaactctccaccccaaatcaacagaatatacattattctcagccccacactgcacttattccaaaattgaccacatagttggaggtaaagcactcctcagcaaatgtaaaagaacagaaattatagcaaactatctctcaaaccacagtgcaatcaaactagaactcaggattaagaaaatcactcaaaaccgctcaactacatggaaactgaacaacctgctcctgaatgactgctcggtacataackaaatgaaggcagaaataaagatgttttttgaaaccaatgagaacaaagacacaacaaactagaatctctgggacacatttaaagcagtgcgttgagggaaatttatagcactaaatgcccacaagagaaagcaggaaagatctaaaactgacaccctaacatcacaattaaaagaactagagaagcaagagcaaacacattcaaagcgagcagaaggcaagaaataactaagatcagagcagaattgaaggaaatagagacacaaaaaacccttcaaaaaatcaatgaatccaggagctttttattgaaaaaaaaaaaaaacttttttgaaaagatcagcaaaattgatagaccactag

SEQ ID NO: 925152 - DNA, 652 bp, Homo sapiens
tacattattctcagccccacactgcacttattccaaaattgaccacatagttggaggtaaagcactcctcagcaaatgtaaaagaacagaaattatagcaaactatctctcaaaccacagtgcaatcaaactagaactcaggattaagaaaatcactcaaaaccgctcaactacatggaaactgaacaacctgctcctgaatgactgctcggtacataactaaatgaaggcagaaataaagatgttttttgaaaccaatgagaacaaagacacaacaaactagaatctctgggacacatttaaagcagtgcgttgagggaaatktatagcactaaatgcccacaagagaaagcaggaaagatctaaaactgacaccctaacatcacaattaaaagaactagagaagcaagagcaaacacattcaaagcgagcagaaggcaagaaataactaagatcagagcagaattgaaggaaatagagacacaaaaaacccttcaaaaaatcaatgaatccaggagctttttattgaaaaaaaaaaaaaacttttttgaaaagatcagcaaaattgatagaccactagcaatactaataaagaagaaaagagagaagattcaaatagatgcaataaaaaatgacaaaggggatatcaccc

SEQ ID NO: 925153 - DNA, 434 bp, Homo sapiens
ttcttcctgaaactatcccacataactgagaaggagagactcctccctaactcattctatgaagccagcatcatcctgacaccaaaacctggcagagacacaacaacaaaaaacttcaggccaatattttttatgaacattgatgcacaaattctcaaaaaaatactggcaaaacaaatccagcagcacatcaaaatgcttatccaccataatcaagtaggctttatccakgagatgtaaggttggttcaacatacacaaataaataaatgtgattcatcacataaacagaactaaagacaaaacccacataattatttcaatagatgcagaaaaggcattcaataaaactcaacactctttcatgttaaaaacttttgataaactaggtattgaaggaacatacctaaaaataataggagccatctatgacaa

SEQ ID NO: 925154 - DNA, 584 bp, Homo sapiens
taaggtactgtggactaaagatatgtgctctcctaaaattcatctgttgaagccttaagccccagtgtgatggtatttggaggtggggcctaattagacttagaagaagtcacgaaggtcgagtccccatgatgccttagtgcctttctaagaaggtgtagagaccagagctctgtgtctcagctttattaggattcggcaagaaggtggctctctgcaaaccaggacacttatcagacactgactttgcagacaccttgattttagatttcccagttccagaactgtgaaatacatttttacgttacccactgtgtgatattttgttaggcagcctaaactaagacayaagagaaggatggcctctctcaccatttctaaccaacgtcttactagatttttttagtgtgatagaaaagaaaaggaaataaatggtacacagattgagaggaagaaataaaactcttttattcttacctgacatacttttctatgtaaaaatcccaaaaatcaacacaaaatcctctttgaaataataagcaaatatagaaaggtcacaagattaataaaaagataattgcttt

SEQ ID NO: 925155 - DNA, 817 bp, Homo sapiens
  misc_feature 804, 805, 806, 807, 808, 809, 810, 811, 812, 813, 814, 815,816, 817: n = A,T,C or G
ggccaagagctgtctctcaaaaggagagtagttgtcttcagaagatggcagggccttgctccaaaatcctggaggtgtccgctgagattcacctatgggggcctgccaaaggctgcaaacagcatttctatctgccactgatacctcaaggaccattggatctactgagtcatatggcccaagtggcagagcagtttgcactgcagcctggagttattgcagagccttctcctcttctggaccccacttcaaaccgtcagccttttgggtcacttgattaatgggccaragtaacacatcgaaatgcagaatgtgttgcttccaaaatccaatgggcccactaggcgttatacctctttcttggctgtaaaaggggccaaattcagcaacttatcttttaccttagaaggcatatcttgacaggcctgacaacactggacccctagaaattttacagaggtagaaagtccctgaattttagtcagatttatttcccatcctctggcaaacaaatgtctcaccaataagtccagtgtgtttgctaattcttgctcactggatccaatcagcatgatgtcatcaatgtaatggaccagtgtgatatcttgcagaagagaaaagtgattaagttctctctgaataacattagaacacaaaactggagagttgatatacccctgaggtaggacagtaaaggtatattactggccttgcatctgaatgcaaattgtttctggtcgggcttatggacaggaatggagaaaaagacatttgccaagtcaatggctgcatacaggtacaggnnnnnnnnnnnnnn

SEQ ID NO: 925156 - DNA, 608 bp, Homo sapiens
  misc_feature 593, 594, 595, 596, 597, 598, 599, 600, 601, 602, 603, 604,605, 606, 607, 608: n = A,T,C or G
agttattgcagagccttctcctcttctggaccccacttcaaaccgtcagccttttgggtcacttgattaatgggccaaagtaacacatcgaaatgcagaatgtgttgcttccaaaatccaatgggcccactaggcgttatacctctttcttggctgtaaaaggggccaaattcagcaacttatcttttaccttagaaggcatatcttgacaggcctgacamcactggacccctagaaattttacagaggtagaaagtccctgaattttagtcagatttatttcccatcctctggcaaacaaatgtctcaccaataagtccagtgtgtttgctaattcttgctcactggatccaatcagcatgatgtcatcaatgtaatggaccagtgtgatatcttgcagaagagaaaagtgattaagttctctctgaataacattagaacacaaaactggagagttgatatacccctgaggtaggacagtaaaggtatattactggccttgcatctgaatgcaaattgtttctggtcgggcttatggacaggaatggagaaaaagacatttgccaagtcaatggctgcatacaggtacaggnnnnnnnnnnnnnnnn

SEQ ID NO: 925157 - DNA, 605 bp, Homo sapiens
aacaaatgccaattcttcctgggagcaagtgtctttcagtcgcgttcctggctgttttcttcaaaagcaggcgtttctcctggtagcaccgcttgttggcgacgtcggattcttttccgtggcagtactggtcgtttcatggagtggccggtttctcactcgcactgtgccagctggcagttattccgtggaggcgcagctctcagccgcttcccttggttctcggtgtcggctgtccctgtacctgcgtttgtggcggtatttctgtcacaatcgagtctgtgttttwtcgatgacaacgccattcatttctctaaaacaggctatgtttggaattggcaatttttctttgtcagagtccttggtttcgcagagcctgttgttccaggttactggactgctgtttgctccgtgctagcaatgttgcacccagtaccgttaggtgctccctgttggagttttgagacagcgttttgagataggtgcaccagcactccagacctggcacctgaagaaagcattatcatttcaagctcagtaggggcaatagaatgagtggtgttagagaaagcaagcagatgcttgaagaaagggccactccacag

SEQ ID NO: 925158 - DNA, 647 bp, Homo sapiens
ttacagccttctttgtacccgtgttaggtggatcctgagttgttgtcctgcatccaagaagaatgaggttatgctgaaaatcaaaaagtgaggagggcagagaggagttttattgagccacaaaacagttctcagtggagaggggattcgaggatggttycccaccagaagttgggtggtctctctcccaatgtggcagggtctggggcttttataggctcagaatgggggagtgcatgctgattggtttgtgcatatgcaaaaaaggctaaaacaaaagcaccactcaaaggtgggcacaactgtgtaaaaaaacaattagggaagggcaggtatatgtaaaataggtgaagtgtggggatcaatcagaggaaagtgcactaagtgaagtgtgtggatcaatcagagggaagtgtgctaaaggggaagagagattcttaatccggtccatggatttactggagacttgtagcttggctttcatgctttaaactgtctttggtttgaaggtggggtttcaccagggacccacccttgtctccctaggatttgtctgcctcctgccactatcattaagatggtatctaaagtctcaaatttcaccacacttttggatattcagttctttctatgatgcctccatgcac

SEQ ID NO: 925159 - DNA, 841 bp, Homo sapiens
ggaatgtgtgtcctatgtggttgagataaggactgagatacaccttggtctcctgcagtaccctcaggcttactaggattgggaaactccatcctggtaaatttttggtcacaccagttctctgctgtcaaactctactttctgttaagatgtctatcaagacaatacatgcactgctgaacatagacccttatcaggagtttctgcctttttccctttgtcctgtttcctcagaagcatgtgatctttgctgtggtttttgccccctgaarcatgtgacctactccctgtttgtacactccttccccttttgagatccttaataaaagcttgatggatttgtggctcaggtggacatcacagtctgattatggaaaatagaaagaacctacattgaaatattggaggtgggattccctgatatttggcacaccaatgtggttttctttttcctaagtgcatgtgggaacctgattccctttggtaggtgtggtgaaacgttcatcagtctggtccacagaaatgcttgtttgctccctgaaaattggtgagttgtctgtgtattgtctggggtaactatgggtcatgcagaatctaaacattatgcttatctctggtatattaaacttctgttaaaatcaggtggagttcaggttcccatgaaaaatatggtcactctattcagggcagtggaagaacactgtccttgtttcctgaaaaggcaatgttagatgtggaactatgggatcatgttggtgcaaaattctggggaactggtcccgacaggaaactatgttcccatcactgtttggggtgattgggacttggtacgtgacatcct

SEQ ID NO: 925160 - DNA, 549 bp, Homo sapiens
aagatataggctaggaggctaggcttgtctcgcctcttcacatttttctgcctgctttgtattcactggtggcttattagatggtgcccacctgattaagggtgggtctgccttccccagcccactgactcaaacgttaatctcctttggcaacaccctcacagacacacccaggatcaatacttgcatccttcaatccaatcaagttgacactcaatattaaccattacaagtccaccacttgtcaacttcaacccatacacatctcctgagatcacacacagtcttcaaataaagacaataaggtcaaaattatgcctaacacaatacagctrtccttcatacaaccagaaacccaccaatccccaacccaaatactattacataaagttaacaatacttaaatgctgatatgaagttagtaaatcttatgtcacatgataaaggaaaagaaaatgaagatatattttcttagtacaggtatatacatgcacaaacatgtttttaacaaaagaaggaggaaatactcatggtagttacagtcctcgt

SEQ ID NO: 925161 - DNA, 484 bp, Homo sapiens
aagactgatggtgagtccttgagccaaaacacctatcagaagaatcccacgtctcccagaaacaggctttgggcacagtggctcacacctgtaatcccagcactttgggaggctcaggcaggaagatcacttgaggctaggccttctagaccagcctgggcaacacagcaagccaccatctttacaaaaaaaaaaatcgtgttttaattagctggtatattagtctgttcttgcagtgctataaagaactacctgagactgggtaatttataaagaaaagaagttcgattggctcatggttccacaggctgtacaggaagcatggctggggaggcttcaggagatayacgatcatggtggaaggtgaaggggaaggaggcatgtcccacatggctgcagtgggacaaagaaagtgaagggggaggtgctacacacttttagacaaacagatctcactcactatcacactatcacgagatcatca

SEQ ID NO: 925162 - DNA, 791 bp, Homo sapiens
acacttcaaaagtccaccttaggcccggagcaaaacttaggagccctattgaacttggcaacctcagttttttataataaagatcaggaggagcaggtggaatgggacaaacgggattaaaaaaaaggtcactgctttagtcatggccctcaggcaagcggactttggaggctctggaaaagggaaaagctgggcaaattgaatgcctaatagggcttgcttccagtgcagtctacaaggacacttttacaragattgtttaaatagaaataagccgcccccttgtccatgccccttatgtcaagggaatcactggaaggcccactgccccaggggatgaaagttctctgagtcagaagccactaaccagatgatccagcagcaggactgagggtgcctgcagcaagcaccagcccatgccatcaccctcacagagccccgggtatgcttgaccattgagggccaggaagttaactgtctgctggacactggtgcagccttctcagtcttactctcctatcccagacaactgtcctccagatctgtcactatccgaggggtcctaggacagccagtcactagatacttctcccagcactaagctgtgactggggaacattactcttttcacatgcttttctaattatgcctgaaaaccccactcccttgttagggagagacattgtagcaaaagcaggtgccattatacacctgaacacaggagaaggaacacccgtttgttgtcccctgcttgaggaaggaattaatcttgaagtctgggcaacagaagg

SEQ ID NO: 925163 - DNA, 397 bp, Homo sapiens
acattagaaagacacttcaaaagtccaccttaggcccggagcaaaacttaggagccctattgaacttggcaacctcagttttttataataaagatcaggaggagcaggtggaatgggacaaacgggattaaaaaaaaggtcactgctttagtcatggccctcaggcaagcggactttggaggctctggaaaagggaaaagctgggcaaattgaatgcctaatagggcttgcttccagtgcagtctacaaggacacttttacaaagattgtttaaatagaaataagccgcccccttgtccatgccccttatgtcaagggaatcactggaaggcccactgccccaggggatgaaagtyctctgagtcagaagccactaaccagatgatccagcagcagg

SEQ ID NO: 925164 - DNA, 567 bp, Homo sapiens
aacaaaacaaggcactcgggagaggaaggaagtgaggaggagaggaaagaaagagcgagagaaggcagatatgatcagatacaagctacagatgtgactgcctaactctcccacctggaaaagtaggctgctctggcagaaggctctgaaaggcctgttcagcacccaggccgagttacattttcctacctcaaaagctcctcaggccttctggtggtctttaacagaagctcatacaggaacagagcctgcragaagagaatgatcgttagcactgatggcacactcagcgtgtgcccaacactgtgaggccctatcaggaaggcattccacaatcccattttacagatggggaaatggaggcttaacaggctatgtgagttacctaggactagaccattgctaagtggcagtgcctggatttgaaccagtgtcaaggtaattccagagccccactctcacactccagatgattctctacaccccatgaggcagatgagaggcaaagacattggtggcagggctggagttttacttcctgtgctttaggaagctgctgaccagttg

SEQ ID NO: 925165 - DNA, 733 bp, Homo sapiens
gaagacatttgtgacagaaggctagagatttcatctacagaacaatcttgagattaagagggagggttttccaaggacctggacaaaataggaaacagggtctaagatgttgtctgataggaaagaatggcaatggaaagaaggctgctctaaggagcaggccttctcaactttgttgctaatgacattttgggcccaaattattacctgccatgggagctccctctctttttttttttttttttttttttttttgtttttttgkgagtgagacggagtctcgctctgtcacccaggctggagtgcagtggcacgatctcggctcactgcaagctccgcctcccgggttcacgccattctcctgcctcagcctccagagtagctgggactgcaggcgcctgccaccacgcccagctaattttttctatattttagtagagacggggtttcactgtgttagccagaatggtctcgatctcctgacctcgtgatccgcctacctcggcctcccaaagtgctgggattacaggcatgagccaccgcgcccagcccatgggagctctcttgtacgttgtaggacacacacagcatccccggcctccacccactatacgccaagagcacccccaaatttgaataaccaaaaatgtttgccggcattgccaaatgtgtctcttaggtgggggtgcaaaactgccccagttgagaactatttgacagacaaacagttttt

SEQ ID NO: 925166 - DNA, 733 bp, Homo sapiens
gaagacatttgtgacagaaggctagagatttcatctacagaacaatcttgagattaagagggagggttttccaaggacctggacaaaataggaaacagggtctaagatgttgtctgataggaaagaatggcaatggaaagaaggctgctctaaggagcaggccttctcaactttgttgctaatgacattttgggcccaaattattacctgccatgggagctccctctctttttttttttttttttttttttttttgtttttttgtgagtgagacggagtctcgctctgtcacccaggctggagtgcagtggcacgatctcggctcactgcaagctccgcctcccgggttcacgccattctcctgcctcagcctccaragtagctgggactgcaggcgcctgccaccacgcccagctaattttttctatattttagtagagacggggtttcactgtgttagccagaatggtctcgatctcctgacctcgtgatccgcctacctcggcctcccaaagtgctgggattacaggcatgagccaccgcgcccagcccatgggagctctcttgtacgttgtaggacacacacagcatccccggcctccacccactatacgccaagagcacccccaaatttgaataaccaaaaatgtttgccggcattgccaaatgtgtctcttaggtgggggtgcaaaactgccccagttgagaactatttgacagacaaacagttttt

SEQ ID NO: 925167 - DNA, 622 bp, Homo sapiens
ggggtcccaaggcgttgggcagccccttcactggctggcattgagtgcctgaggcttttccatatgcagaggacaagctgtcgatggatctaccattctggggactggaggacagttgccttcttttcacagctccactatgcagtgccccagtggggactctgtgtgggggccacgccccacactttcctttcacactgtcctagcagagtttctccatgagggctccacccatgaagcagacttctgcctggacatccaggcatttccatacatcctctgaaatctaggcagaggttcccaaacctcagttcttgacttttgtgcacctgcaggtccaacaccatggggagaccagaaaggcttgcagcttgcaccctctgaaacaacaatctgagctgtaccttgaccccttttagttatggctgggacacagggtgccaaaccctaaggctgcacaragcagcactggggccctgggcccagcccatgaaaccattttttccctgctaggttctgggtctgtgatgagaggggctgtcttgaaggtctctgacatgccctggagacacagacaccttccccattgtcttggtgattaacagtggggtgctaatgactt

SEQ ID NO: 925168 - DNA, 713 bp, Homo sapiens
gagcaccctttctctgcagaggagctctccagagctgcctcccaccgccagctccctctgttctctggctgatcccacgggtcatttccacttctagctgtgtgaccttagacatgttggttgactttgccaagactccattgcttcacctgtraactgggggcagtaatagcctctttctcttaggactgttgtattaaataaaacccttgaagcagtgtctgatatcatataagtgccatgcaagtgttagctactatgattattgttattttcccattttttcccttcctggagaaccctttgtgccctgaagccttttatcccagtacccaggcctgcctagtatagagttagttcgttcctgcttcatctctggctggctgcctctcagtcatcccaggcctcacatgcagggcccacgctcagaatcatcacaggggctctgggagtcctctgccccagtaccctcatgtcccctttaccatttctgtgagctcctccccacctttgaggtgaatgtgcctctgaccacctcacattcaattctctggatgacttctctggaactgctgagccagttgtctggagttgacatccctggggtggccttggccaatgaccaagggctggagtgtgaaagcccagctcccttgcccccagtcgggacaattaggaagcatgatcatgtcccagagctccccatgcaggat

SEQ ID NO: 925169 - DNA, 437 bp, Homo sapiens
agggtcagagtggtcggtagaaatgtcaatcacatattttaatcctctgctcaaattgcccaatgacttcccatctcacgtccaataaaatgcacactcttcgctgggccatgatctagcccctgcctacstccccagctccccacatagcccaccaccttccagccttctttcctttccacacacaccccaagatcctccctgcctcagggtctttttccttgctcttccctctgcctggtatggttttctttcttgtcctgtagatctcggctgttcagagaggacttccctgaccaacctgatctaaatcagcatcactgtctgcctggttgttttgtttccttcacaggtcttgtcacagtaatctccaattgtcttgtgtatggatctgtccctggcatatttgctgcttcccactggaatggaagctcctg

SEQ ID NO: 925170 - DNA, 608 bp, Homo sapiens
aatgtgctgatcactcccaaagtcagcatgtctcagagcccaaggcccacagcatagtccctgggtattgctgctggttattcaggggccaaggactctttagtcagcaggtggtgaatcctgccaggactgggtctttcctttccaggcagcatgttttcttttcatccagagtgygtctagaaatttcatccatgagtgagggcctggaatggggtcctcaaaactctgcccactgacctatcctactgtggctaagctggtgtccaagatgcaagacaaagtcctctttactctttgctctgccctccttaagcagaaggaaggagttactttagttgctgcaaggtgtactgcctagggttgggggagggatggcataatcactcccttagttgccctagctagtatccctctaggtcacatgccagcctagtccactggctcgaagcccagactagcactaggagttgcctaggaattgcagtccttttgtcctaggctgcctttcaagtttacctaggaccacagagccctttggcctgtagtggcaaggcttgtggagaaactcaaattatgaccattgggatgagcaattcccttctggc

SEQ ID NO: 925171 - DNA, 608 bp, Homo sapiens
aatgtgctgatcactcccaaagtcagcatgtctcagagcccaaggcccacagcatagtccctgggtattgctgctggttattcaggggccaaggactctttagtcagcaggtggtgaatcctgccaggactgggtctttcctttccaggcagcatgttttcttttcatccagagtgtgtctagaaatttcatccatgagtgagggcctggaatggggtcctcaaaactctgcccactgacctatcctactgtggctaagctggtgtccaagatgcaagacaaagtcctctttactctttgctctgccctccttaagcagaaggaaggagttactttagttgctgcamggtgtactgcctagggttgggggagggatggcataatcactcccttagttgccctagctagtatccctctaggtcacatgccagcctagtccactggctcgaagcccagactagcactaggagttgcctaggaattgcagtccttttgtcctaggctgcctttcaagtttacctaggaccacagagccctttggcctgtagtggcaaggcttgtggagaaactcaaattatgaccattgggatgagcaattcccttctggc

SEQ ID NO: 925172 - DNA, 623 bp, Homo sapiens
ttctgaagcctacttctgtcaactcgtcaaactcattctctgtccagttttgtttcattgctggtgaggagttgtgatcctttagaggaaaagaggcattctggtttttggaattttcagactttctgctctggtttctccctactttgtagttttatctacctttggtctttgatgttggtgacctacagatggggttttgtggtgtgaatgtcctttttgttgatgttratgctattcctttctgtttgtcagttttccttctaaaagacaggtccctcagctgcaggtctgttggagtttgctggaggtccactccagaacctgtttgcttaggtatcaccagtggaggctgcagaatagcaaatattgctgcctgatccttcctctggaagcttcatcccagaggggcacctgcctgtataaggagtctgtcagcccctactgggaggtgtctcccagttgggttacacggggtcaggaacccacttgaggaggcagtctgtcctttatcggaggccaaacgccacgctgggagaaccacagctctcttcagagctgtcaggcagggacgtttaagtctggagatgctgtctgctgccttttgttgatatgtgccctgc

SEQ ID NO: 925173 - DNA, 623 bp, Homo sapiens
ttctgaagcctacttctgtcaactcgtcaaactcattctctgtccagttttgtttcattgctggtgaggagttgtgatcctttagaggaaaagaggcattctggtttttggaattttcagactttctgctctggtttctccctactttgtagttttatctacctttggtctttgatgttggtgacctacagatggggttttgtggtgtgaatgtcctttttgttgatgttaatgctattcctttctgtttgtcagttttccttctaaaagacaggtccctcagctgcaggtctgttggagtttgctggaggtccactccagaacctgtttgcttaggtatcaccagtggaggctgcagaatagcaaatattgctgcctgatccttcctctggaagcttcatcccagaggggcacctgcctgtataaggagtctgtcrgcccctactgggaggtgtctcccagttgggttacacggggtcaggaacccacttgaggaggcagtctgtcctttatcggaggccaaacgccacgctgggagaaccacagctctcttcagagctgtcaggcagggacgtttaagtctggagatgctgtctgctgccttttgttgatatgtgccctgc

SEQ ID NO: 925174 - DNA, 775 bp, Homo sapiens
ctgcctcttagaacctctcatttcctttccatcatggaaatctttcctcagggaaatcacttctcagtgttccatctgctattctgctactcctcaggagtttctcaggcccttcccttccctacacatcaagctcggggatttgcccccgcccaggactggcaaattaactttactcacatgcctcaagtcaggaaactaaaatacctcttggtctaggtagatactttcactgaatgggtagaggcctttcccacagggtctgagaaggccactgcrgtcatttcttcccttctgtcagatataattcctcggtttggccttcccacctctatacagcccgataacggactggccattattagtcaaatcacccaagcagtttttcaggctcttggtattcagtaaaacctttatatcccttacagtcctcagtcttcaggaaaggtaggatgaagtaatggtcttttaaaaacacacctcaccaagctcagccaccaacttaaaaaggactggacaatacttttatcactttcccttctcagaagtcgggcctgtcctcggaatgctacagggtacagcccatttaagctcctgtatagacgctcctttttattagtccccagtctcattccagacaccagaccaacttgggctgtgccccaaaaaacttgtcatcctactatcttctgtctagtcatactcctattcaccattctcaactacttataaatgccctgctcttatttacactgctggtttacgctgtttctcc

SEQ ID NO: 925175 - DNA, 620 bp, Homo sapiens
aagcacagtggctcacgtttgtaatcctagcacttctgggaggctgaggcaagtgaatcacaaggtcaggagttcaagactagcctggccaaaatggtgaaaccctgtctctacttaaaacacaaaaattagccgggcgtggtggcaggcacctgtaatcccaggtacttgggaggatgaggcagagaactgcttgaacccgggaggcagagaactgcttgaacctgggaggcagaggtggcagtgagccgagatcgcaccactgcactccagcctgggtgacagagggagagtccatctcaaaaaaagaaagaaaaaaaaaagtgtttgtgtgtgcgtatatatatagagagagagagagwgaagagagagagaatgtattctgatgtgatgcaccaaggacatagcatttctaccaaaaattcactatctgaatccaatgaggaaaactccaacaaacccatgttacaaatttaacagttaaatctaaaactatcagttaaagactagagacctgataaataattgcaatttgtaatcctccattagatcaagagcctggaaaaacaattttttttcccatttgctccaaggaacataggagcaacaacttataaatt

SEQ ID NO: 925176 - DNA, 620 bp, Homo sapiens
aagcacagtggctcacgtttgtaatcctagcacttctgggaggctgaggcaagtgaatcacaaggtcaggagttcaagactagcctggccaaaatggtgaaaccctgtctctacttaaaacacaaaaattagccgggcgtggtggcaggcacctgtaatcccaggtacttgggaggatgaggcagagaactgcttgaacccgggaggcagagaactgcttgaacctgggaggcagaggtggcagtgagccgagatcgcaccactgcactccagcctgggtgacagagggagagtccatctcaaaaaaagaaagaaaaaaaaaagtgtttgtgtgtgcgtatatatatagagagagagagagtgaagagagagagaatgtattctgatgtgatgcaccaaggacatagcatttctaccaaaaattcactatctgaatccaatgaggaaaactccaacaaacccatkttacaaatttaacagttaaatctaaaactatcagttaaagactagagacctgataaataattgcaatttgtaatcctccattagatcaagagcctggaaaaacaattttttttcccatttgctccaaggaacataggagcaacaacttataaatt

SEQ ID NO: 925177 - DNA, 607 bp, Homo sapiens
cagttaaaaatgaataattaaataagtgaggtagaacagacaaatctcccatgcagaatttcaaataatttatgtaggtactctgtccttatggaggtggagcataactcccggttccttcattaaatgtgagctatacgtaatgacttccttcaaaagattacaataaggaaaaggaaggtatgagtaactttacagtggagaggactgacagactacttcagcctgatgatcaaggtcaacataaaaagtgaagtcatgttaatagcatgtacctccggtatgtaactgcccagtggcttcaccttgcccatttcctagacagagccaatttataaagacaggcgaattgtaatagagaaagagtaattcacgtagaacaggctgtgcaggagaccagagttttatcattactcaaatctgtctcctggagcaytcggggatcagagtttttaaggataatatggtgggtgggggaaggacagtgtgtcgagtgttgattggttaggtcagagataaaatcatagggaattaaagcctcttgcacggagtcagttcctgggtgggggccacaagatcagatgagccagtttatcgatctgggtgg

SEQ ID NO: 925178 - DNA, 598 bp, Homo sapiens
tttagggaagagaggaagagagaaataaaatcatgggctgggtgcagtggctcacgcctgtaatctcagcactttgggaggccaaagcgggtggatcacctgaggtcaggagttcgagaccagcctggccaaaatggtgaaacctcttctctactaaaaatacaaaaattagccaggcatggtggcaggcaccagtaatcccagctacttgggaggctgaggcaggagaatcgcttgaacctgggaggtggaggttgcggtgagccgagatcgcaccagtgcactccagcctgggtgacagagtgagactccatctcaaacaaacaaacaaacaaaaaccacaaaaatcagccaggcttggtggtgggcgcctgtaatcycagctactctggaggctgaggcaggagaattgcttgaactcgggaggtggaggttgcagtaagctgagatcttgccattgcactccagcctgagcaacagactccgtctcaaataaataaataaataaataaaatcatgtttcgttgggctgtatgtataaggatcagcatcagatcttgacagtgaagtgaacccagggtccttaattgagatagat

SEQ ID NO: 925179 - DNA, 690 bp, Homo sapiens
acaatcctagagttcaaatacttgcttgatttggagtattttccacatatgttaaatttgtcttcaccttgatatattagtccattctcacattgctataaagaaatacctgagactgggtcatttataaagaaaagaggtgtaattkgctcatgattccacaggctgtacagaaagcatgacgctggcatctgctcggcttctgcaaaggcctcgtgtcacttacaattgtggcaggaggtgaaggagaaacacacacatcacatgtttggaataggagcaagagggtggggggaaggtgctacacactttcatacaacaagatctcatgataactcacttgtacaccgtcatgagaacagcaccaaggagatggtgctaaaccattcaggaaggaccaacttcatgatccaatcacctcccatcaagacccacaaccaacactgaggattaccatttgacatgagatttgggtggggacacaaatccaaaccctatcacttggtgagtatcaagtagtgggaatgccactggatgggatcttggtggatgaacggttacttcctccataagttagccattctcaaaggtgctctaactgttacagaatcctcaagtacccttttaacaagctttcccaagtggtctcacgatcctaaagctttaggacccaattagcagaatttatct

SEQ ID NO: 925180 - DNA, 579 bp, Homo sapiens
aaaagggtttaaaggctccatgcaagtccgaaatcgaatacggcagtcattaaaccttaaagatccaaaaagatctccattgactccatgtctcacatctggttcatgctgatgcaagaggttggctcccacggccttgggcagttccatccttgtggctctctggggtacagcccttttccttgctgctttcatggcctggcattgagtgtcttcagcttttccaggcacacagcgcaaactgtcagtggatctaccattctggggtctaaaggatgatgggcctcttctcacagatcgactaggcagtgccccagtggggactctgtgtggggrctccaatcccacatttcccttctgcactgccctagcagaggttctccatgagggcaccaccactgcagcaaaattttacctagacacccaggcatttccatacatcctctaaaatctaggtggaggttcgtaaacctcaatttttggcttctgtttgcaactgcaggctcaacaccacgcggaaactgccaaggcttggggcttgcaccctctgaacccactacctgagctgtactttggccc

SEQ ID NO: 925181 - DNA, 579 bp, Homo sapiens
aaaagggtttaaaggctccatgcaagtccgaaatcgaatacggcagtcattaaaccttaaagatccaaaaagatctccattgactccatgtctcacatctggttcatgctgatgcaagaggttggctcccacggccttgggcagttccatccttgtggctctctggggtacagcccttttccttgctgctttcatggcctggcattgagtgtcttcagcttttccaggcacacagcgcaaactgtcagtggatctaccattctggggtctaaaggatgatgggcctcttctcacagatcgactaggcagtgccccagtggggactctgtgtgggggctccaatcccacatttcccttctgcactgccctagcagaggttctccatgagggcaccaccmctgcagcaaaattttacctagacacccaggcatttccatacatcctctaaaatctaggtggaggttcgtaaacctcaatttttggcttctgtttgcaactgcaggctcaacaccacgcggaaactgccaaggcttggggcttgcaccctctgaacccactacctgagctgtactttggccc

SEQ ID NO: 925182 - DNA, 484 bp, Homo sapiens
ttttgctggagactgggatgccaagtgagccagtcttcaagactcagtggtagtagcagtaggctgaatgtgcatgtccctgggccccagggcagcatatgctggtattggtattagtgggtccaagcaggccaaatattgggcttccaaggagtttactcaaatgccagtagtgacaatggtgggctaggtggatgggtgggttagtgggccccttgacagctgatgtaatttgggcaatggcaatggcagtgggaggtcaaccctctagttcccaagtggtgcatgctggtgatggtggtggctgcaattggctaagcaggccaatctccaggcccataratggtgtgtgccagtagatgccagctgaagtagtaacaactgagtgactaggtccaccttcagatcctggaaggagtgttcatgtgccaatgatgatggaatgggttgggcaattccctgatccccagactgtgtgctccga

SEQ ID NO: 925183 - DNA, 455 bp, Homo sapiens
ttttctaagttgggatagcctaattttaatttttttcattgatcaagagaacctagtgaaaatgcttctgtttaaaatgatatttctttaaagaaaattagttgtcttctttgcagattgtctttttgagagtaaatgaatagatatcatattatytgcccatatatatttagatctatggccctggattttctttcttataaatatcttgttcattaataaatgggaatgttttttaatgtgcctattgttaggaaaataattttaaagtataatagtggataaactgataccaaatgctttatatgtattatgttatttaaccaggaaaatgtcaaataattagccacagttacatggcaagcagtaggaacttttagatagcacagccgggtgtatgtaaagtttatgacacaccgtgttctaactgctgtttatattgaaaatatatgatt

SEQ ID NO: 925184 - DNA, 563 bp, Homo sapiens
tatctctgttgtttacaatatcttaacataaaccttaattatgattgatagcatatactcagacattagaatttttagaaatcccatataagtttgcaatatatattagcattattcaccaagataaaacctaaagaaggttgtgcatcggccaggcgtggtggctcacacctgtaatcccagcactttgggaggccaaggcgggcggatcatgaggtcaggagatggagaccatcctggctaacacggtgaaaccccatctctactaaaaaatagaaaaaaytagctgggcatggtggtgggcgcctgtagtcccagctacccaggaggctgaggcaggagaatggtgtgaacccgggaggcagagcttgcagtgagctgagatcttgccactgcactccagcctgggcgacagagcgagactccgtctcaaaaaaagaaaaaaaaaaaaaagaaaaaaaaaaggattgagcatcattttggcaatcccatgtacctgaacatgtcaaataatcctgtttacctttcttttctggaaattccacgggccctttgaagaattc

SEQ ID NO: 925185 - DNA, 563 bp, Homo sapiens
tatctctgttgtttacaatatcttaacataaaccttaattatgattgatagcatatactcagacattagaatttttagaaatcccatataagtttgcaatatatattagcattattcaccaagataaaacctaaagaaggttgtgcatcggccaggcgtggtggctcacacctgtaatcccagcactttgggaggccaaggcgggcggatcatgaggtcaggagatggagaccatcctggctaacacggtgaaaccccatctctactaaaaaatagaaaaaactagctgggcatggtggtgggcgcctgtagtcccagctacccaggaggctgaggcaggagaatggtgtgaacccgggaggcagagcttgcagtgagctgagatcktgccactgcactccagcctgggcgacagagcgagactccgtctcaaaaaaagaaaaaaaaaaaaaagaaaaaaaaaaggattgagcatcattttggcaatcccatgtacctgaacatgtcaaataatcctgtttacctttcttttctggaaattccacgggccctttgaagaattc

SEQ ID NO: 925186 - DNA, 576 bp, Homo sapiens
aggatctggtaccattttttcagaagctattccagacaactgaaaaggagggacttctccctaactcattttatgaggccaatatcaccctgataccaaaatctggcagagatgcaacaaaaaaggaaaactttargccaatatctctgatgagcatcgatgaaaaaatcctcaataatatactggcaaagcaaatccagaagcacattgaaaagcttatccatcatgatctagtcggcttcatctctggtctgcagggttggttcaacatacacaaatcaataagtgtaattcatcatgtaaacagaactaaagacaaaaaccacatgattatctcaaagatgcagaaaagggcatcggtaaaagtcaacatcccttcatgttaaaaactctcaataaattaggcattgatggagcatatctcaaaataataagagccatttatggcaaactcacagccaatatcatactgaatgggcaaaaactggaagcattccccattaaaaccggcacaagacaaggatgccctttctcaccactcctattcaacatagtattggaagttctggccagggc

SEQ ID NO: 925187 - DNA, 625 bp, Homo sapiens
ccttcccttggaggagaaagcaagggcgatgggaagactagtctcatttgcagcctggcttccatccatgtaccaacaatgacacaactccctcctccgatgagcactttccaatctccactgagatctgttggatgagaagccagtttccatcacagccacgcacaggcagctatgggtgggggtgtggatatagctctcgtcaccccaagatctgggaagagagagctcatctgttcaccagccagaaacccagccaagcataacagggctgctgtgagggtctttgaggaaccaaaggggaaaygacccaatggccaggactgtgaaagctacggtcataagagaagcatgctcctctagccctgctgatggaattgtcccaaagggaaagatttaacttgttttaggaactagtcagagcctggcttgggcatgccgccagtgtattacgagaacaatctctgggaaatgaggaatgaatgtattgccaagcagattgtagccctggagcctaacaatcagtggcccctgacattcagccagcccccaattccttgggacctccctgaccactaccagtgccagacaagctgatccctgattctcattcactcaacatatg

SEQ ID NO: 925188 - DNA, 561 bp, Homo sapiens
gtccatatgttctcatcatttagctcccacttacaagtgagagcatgtggaatttgttttctgttcctgcattagtttgctaagggtaatggcctccagctccgtccatgttactgcaaaggacatgatcttgttcttttttatggctgcataatattccatcatgtacatgtaccacattttcattatccagtctatcattgatgggcatttaggttgattctacrtctttgttattgtgaatagtgctgcaatgcacatacatgtgcatgtgtctttataacagaacaatttatattcctttgcatatatacccagtaatgggattcctggggcaaatggtatttctgtctttgtctttgaggagtcaccacactgtcttccacaacgattgaagtaacttacactgccattgtgatggttaatactgagtgtcaactggactggattgaaggatgcaaagtattgatcctgggtgtgtttgtgagggtgttgccaaaggagaataacatttgagtcagtgggctgggagaggcagacccatccttaatctgagtgggc

SEQ ID NO: 925189 - DNA, 661 bp, Homo sapiens
gcgagactctgtctcaaaaaaaaaaaaaaaaaaagtctatccaaaggtaccaaaggtacttgctgtatgaggcatcataacttcctgtgaaaatgaaagctatgcactttttgaattaaaaacaatggtgcacagatatacatacactcctgagcatgcatcaggtgtgccgcacacattcacacacacgcctcctcycccccaacacacattatcttagagtgtgccttggcatccttcttcacgtagacatacgacattgttgaagagacccagctctgtgtggtcagtctgtgtgcccagcatcacctttgtccctccacagctatgtgcccactttgtgtggtctttatatttttctgaagaagactcaggttactcattcactttatttgtgtacacacttcaaaaaatatatattataacatttctataatatccaataaaaggatgaaattagaggatgtgacttctgacccaataaaggacaaaataaaatggtaataagctaaaataaaacaaacacaaacaaggtagacagaataaaagtgatatgaacagcaagtatactaacagaaagtacaatataagatgacagaaatgagtccacaaacacaatggatacaaacagattaaactctataatgaaaagataaagaca

SEQ ID NO: 925190 - DNA, 672 bp, Homo sapiens
atttttgtatttttagtagagatggatttcactgtattggccaggctggtctcgaactcctgacctcatgatctgcttgccttggcctcccaaagtgctggggttacaggtgtaagccatcacccctggcccgcatctatttttttgtttagttggttggttttgggaattttttgagatggagttttctctttgtgtgtgtgtgtgtgtgtgtgagagagagagagagagagagagagagagagagagacagagtctctcttgtcacccaggctggagtgcaatggtgcaatcttggttcactgcaacctccgcctcccaggktcaagggattctcctacctcagcctcacgagtagctgggattacaggcgtgcgccaccatgcccagcaaatttttgtgttttcagtacagacaggctttcaccatgttggccaggatggtctcaaactcctgacttcagggtgatccatttgccttggcctcccaaagtgcgagaatacaggggtgagccactgtgcctggccaagatggagttttgctatgttgcccaggctgatctccaattcccgggctcaaacaatccttccgcttcagtctgccaagtagctgagactacagcgctaccatgcctggcttgttatttagcaattatttcactaaactcttact

SEQ ID NO: 925191 - DNA, 589 bp, Homo sapiens
aattacctttaagtttaaaaaaaaatttttttttaatagagacagggtctcactatgttgccgagcctggtcttgaactcctcggctaacgtgatcctcccaccttggccttccaaagtgctgggattacaggtgcgagccaccactcttgaccctaaaaacattattgactctgtatttctccaagtatgaaagtcaagaatgttgtttgtaacgttcttccactgtaagaggaggaatttaacatgctttcctccccccgtccatgtcctcttcccagcctctcacctcactgcccactttactggccttaatttaatctggtattatagggctatgtcactgtgacatctgttgaatcattgtatattattatttttgtaattttgggtaaaatttsttaatcacctttacaatgaattatttaatggattttgaggagcttgccctgtccttttatacccaagtgccctcactgagaagctgctgagtttcatccatcggctggagtgcctgagtcagtttcccatgaaaggattgcatgcgtcaaaaaacgccccagggccccggaaagagggtgctgttgtgc

SEQ ID NO: 925192 - DNA, 581 bp, Homo sapiens
atactcaaaggaaatcagcatcttatagagatatctgtgccccttcatgtgttgattgcagcatcgttctacaacagccatgacatgaaaaacaatctaagtgtcggttaataaatgaataaagaaattctgagacagatagataactacatatacatgtatgtattatttaggctaaaaraagaaggaagcccttccattttatggcaacatggatgaacctggaggacattatgcttagtgaaataaaccaggcacagaaagacaaatattacatgatctcacttacatgtagaagcttaaaaataattgaactcatagaggcagagagtagaatggtggataccagggacacaggagtgagagaaaaggggagctactggtcaaattatacagtttcatccctggggagggtttatggcatggggcagttttgagttctgagcacagactacctggaagcttgctagctgctactagtggaatactgcaggtatgaggcctgctttgccaaatgcgtgggagctgggtggggtttactgccacctgctactccccactccccatgtggattcttttgt

SEQ ID NO: 925193 - DNA, 581 bp, Homo sapiens
atactcaaaggaaatcagcatcttatagagatatctgtgccccttcatgtgttgattgcagcatcgttctacaacagccatgacatgaaaaacaatctaagtgtcggttaataaatgaataaagaaattctgagacagatagataactacatatacatgtatgtattatttaggctaaaagaagaaggaagcccttccattttatggcaacatggatgaacctggaggacattatgcttagtgaaataaaccaggcacagaaagacaaatattacatgatctcacttacatgtrgaagcttaaaaataattgaactcatagaggcagagagtagaatggtggataccagggacacaggagtgagagaaaaggggagctactggtcaaattatacagtttcatccctggggagggtttatggcatggggcagttttgagttctgagcacagactacctggaagcttgctagctgctactagtggaatactgcaggtatgaggcctgctttgccaaatgcgtgggagctgggtggggtttactgccacctgctactccccactccccatgtggattcttttgt

SEQ ID NO: 925194 - DNA, 658 bp, Homo sapiens
taaggcaggcctgatggtgacaaaatctctcagcatttgcttgtctgtaaaggattttatttctcctttgcttatgaagcttagtttggctggatatgaaattctgggttgaaaattcttctctttaagaatgttgaatattggcccctactctcttctagcttatagggcttctgcagagagatctgctgttagtctgatgagcttcctttgtgggtaacccacctcttctctctggctgcccttaaaactttttccttcatttcaaccctggtgaatctgatgattaygtgtctttgggttgctcttcttgaggagtatctttgtggtgttctctgtatttcctgaatttgaatgttggcctgtctttctaagttggagaagttctcctggataatatcctgaagtttgttttccaacctggttccattctccccatcactttcaggtacaccaatcaaatgtagatgtggtcttttcacactgtcccatatttcttggagtctttctttgtccttttcattactttttctcttacgttgtcttcttgctttatttcattaagttgatcttcaatctctaatatcctttcttctgcttgatcgatttggctattgatacttgtgtatgcttcacaaagttctcatgctgtgctttc

SEQ ID NO: 925195 - DNA, 658 bp, Homo sapiens
taaggcaggcctgatggtgacaaaatctctcagcatttgcttgtctgtaaaggattttatttctcctttgcttatgaagcttagtttggctggatatgaaattctgggttgaaaattcttctctttaagaatgttgaatattggcccctactctcttctagcttatagggcttctgcagagagatctgctgttagtctgatgagcttcctttgtgggtaacccacctcttctctctggctgcccttaaaactttttccttcatttcaaccctggtgaatctgatgattatgtgtctttgggttgctcttcttgaggagtatctttgtggtgttctctgtatttcctgaatttgaatgttggcctgtctttctaagttggagaagttctcctggataatatcctgaartttgttttccaacctggttccattctccccatcactttcaggtacaccaatcaaatgtagatgtggtcttttcacactgtcccatatttcttggagtctttctttgtccttttcattactttttctcttacgttgtcttcttgctttatttcattaagttgatcttcaatctctaatatcctttcttctgcttgatcgatttggctattgatacttgtgtatgcttcacaaagttctcatgctgtgctttc

SEQ ID NO: 925196 - DNA, 786 bp, Homo sapiens
ccagaatgaagtaggccccatggccttgcccaggatcgcaagaaggaaggaaggaaatatttaatgagcacctattgtatccccatatggaaagaagtcgatactgtattccagtagatgttactgatgaagttcatttttccctcataccatctctaaggaagagattttattgtcgtcctccttttacagatcagaaaatggagattccagggttaaagtggcttccccaaggtggtatggttggcgacagacccatgattcaaaccactcatgccacctgccctggggcaaacctgaggcagaagcagtggcctcacctgtcctcctgcatgcccttctcatcctcctctgactgctccctccacccagggcccaaacttaaccactcacctccccaccagaaatgacytgctgtgtgtcccagttctgtgtctctaagctgacatcccctcaggagaaggcttccatgcatgtgcaggtgactgatgacaaagatccctaacactctagaatcagcccattacatgggcagccagactctccccactccccatcaacaaggggggcttctgtgtgccctcccctttatttgggcagatgctgtgacccacagaagatggtagaggtactgtgccattttccagccccaggccttaaaaacctggcagcttccacctcctgtctcttgaaatggtctctctggggaccctaagcccttcagtcagaagtctggccaagtagccatgctggagaggcagttgtaggtgctcactctggccggca

SEQ ID NO: 925197 - DNA, 620 bp, Homo sapiens
aataaaatccactatttacagaacacttaccatgtgccaggaaaacaccatctcatctaatctttacagtgttataaagttggtgttcatattcccattttacagatgaagaaactgagattagactgcgtgttagttgtctatttatgtctatgctgcataaaaaatcaccccaaaacatagtgattaaaacaacaataggcagttactgtgggtsagggattcaggagaagcttggctgagtggttctggcttgaggtctcttaggacggctagttaaatattggctgggctgcaggattctgcaggcttgactgagcttggaggacctctttccaaggtggcttgctcacatggttggcaagttggtgtaggctgttgactggaggcctccatccttctccacatgggtctctccccagggctgactgagtgaccccaccacctggtagctggcttcccccacagcaaatggcccaagagagcaaagtggaagctgcaatgctgtttatggcctggccttgactcactcactagtactgctgccatagtctactggtcacactggccagctctactttagcacgagagagaggattatacaagtttggtgaggcccc

SEQ ID NO: 925198 - DNA, 721 bp, Homo sapiens
taaaaggctatcaatgggacaataattgatgatcaactatgaagaaataggctcaaatacactgttttattatatttttatcattctttatataccttttctcatcattctttgtcccaatagtatgctatgattatgcacgtagaaaatcccaaaataacaacaaaatcactggaactaataaactactgtagaaaggttgcaggatacaaggttaatatacaaattgtcaacttccttcctatgtatcagtaatgaacaactgaaattagaaattaaaataataccatatacattagcaacaacaacaaaaaacattcaccaaaaatgtagayataaatctaacaaaatatgtacaagatctctatgaggatcactataaaactctgattcaagaaatcaaagaaagtctaaataaatgagatcattcaagagtagaaaaaaattcgtattgttaaatgtcagttcttccaaccttgatctataaattcaatgcaatcccaatcaaaattctggatagttattttgtggatatgacaaactgattttaaagtatacacagaaagacccaggagaaccaacacgataccgaaggagaacaaagttggaggacaaaacctacccaacttcaagacattataaaactatactaatcaatacagtgtgataatggtgaaagaacagacaaatcaagggaacaaaacagagcccagaaataggc

SEQ ID NO: 925199 - DNA, 596 bp, Homo sapiens
cggtcagaacctgagtaccagcaagcctcaccaccaagggctaaaatgctctggagtctcaaacttaaaagccagtctaggccacaaggactgcaatcctttggcatgtcctggtgctgtgctgggctcagagccactggacatgtggggcacatgtcctaagaggacagcattttgggtggccaaggaagtgtttgtgtcacccctcctccaaacctgagcagtgcagcttgcagctccaggagagacttcttacctcttcttgaarataggaaaggggatagtaaagaggactttgccttgcaacttggataccagttcagccacattagaataggataccaggcagagtcctgaggtccacattccaggccctagctcccagacaactctagacatacactgggccagaagagaacccactgccttcaagggaagaacttagtcctagcagatttcatcaactgctgactaaagaaccttgggccctgaagaatcagcaatgggaaccaggcagtactctctatgggccttgggtcagaatcagagctgggctagcaccacgtgcgacacagcacatttccagctgtggtagc

SEQ ID NO: 925200 - DNA, 583 bp, Homo sapiens
tccattaataagttaaggagattttactctaaaaaatatattcagaattcaactacttgtctctacctccaccactatctccttaatctaggcaaccaccatctctcatattaaccatggcaataaccttctaacaggtctcagtgtgccatttacacacccctacacacagtctatagtagtcagtgatatatttgaacttagattattgtcctcctatgattaaaagtgtttgaagagcagccattgccattagataatattaaacacaaactgttattgtcatcttctgggccctatatgatctagtccctatctacttctcaaaatcaatytcaaacttctcattctcccacttactacactccaggaacattaaaatattgactgctgttagaacaacaagcatccaatgtgcttcaggaacttttatattctatcctacctcactggcatgttcataccgccagttctggcattactagctctttttcatccatttggtttcagcttacatgaaatcttctcagagatttccctgatcactctaagtagcattttctactattgccagtttgttgaa

SEQ ID NO: 925201 - DNA, 563 bp, Homo sapiens
ttgtacccaaagcggatcgtcagaaagctcagttcctcccttccctctaatgggagctgtgaagagctgacagaccacgaggggtggcagggagtccacagctccttaatgtcctgaaggaagagtagtggtaggctccatcctttgagctccagcatgccttgtgaaaggggtgctatgaacatgaattaaatatgaatgcagtgatwaaacattttattctttttaaggctctgaagagctatacttgtcagaatgatttctgcaccagggaatcatttagattggtcttcaaagagtgaaaatttggaactgagttctataatggccaacatggaatgtaaaattgacatatataagctttgaaagagtaattttcaagagatttttttgactgcatgttctaatacccttaaattatgtctgaacataattgaaagcagattcagataaagtgtaggttttaactttagagggtggaaggtggctgtgcttaatccatgtatcttctgtgtcttaccagcttctgtttaaaagtgtgagggctggggtgatcgtgtttc

SEQ ID NO: 925202 - DNA, 617 bp, Homo sapiens
acaactccccaaatccttagaatctcccaagaaatgtgttttgtatgctaatgagctgactgatggctggcagtccctaggtaggtttaggatggggccagtgaccagaaagatcaaggcaggatcaaggggttgagacttttagccccacccccaaccactggggagcagaaagagactgaagattaagctgatcaccaatggccaatggtttaatcaatcatacccacatagtgaagtttccataaaaacccaaaaggattgggttcagagagcttccggacaggtgaggatgagcagggccccggaggcaggtgccagggagggctyggaagctccacttcctcccacaggccttgccctgtgcatcactttatctggatattttgcaatatcctttataataaaccagtaaaggtaagtttcactgagttctgtgagatgttctagcacattaaccaaacacaaatagggggttgtgggactcctaacttgaagctggctgagggcctggacttgtgactggtggcaagtgcggggcagtcttggagactgagccctcaacccgtgagggctgacgctatctccaggtggacagtgtcataattgaattagag

SEQ ID NO: 925203 - DNA, 617 bp, Homo sapiens
acaactccccaaatccttagaatctcccaagaaatgtgttttgtatgctaatgagctgactgatggctggcagtccctaggtaggtttaggatggggccagtgaccagaaagatcaaggcaggatcaaggggttgagacttttagccccacccccaaccactggggagcagaaagagactgaagattaagctgatcaccaatggccaatggtttaatcaatcatacccacatagtgaagtttccataaaaacccaaaaggattgggttcagagagcttccggacaggtgaggatgagcagggccccggaggcaggtgccagggagggctcggaagctccacttcctcccacaggccttgccctgtgcatcactttatctggatattttgcaatatcctttataataaaccagtaaaggtaagtttcactgagttctgtgagatgttctagsacattaaccaaacacaaatagggggttgtgggactcctaacttgaagctggctgagggcctggacttgtgactggtggcaagtgcggggcagtcttggagactgagccctcaacccgtgagggctgacgctatctccaggtggacagtgtcataattgaattagag

SEQ ID NO: 925204 - DNA, 506 bp, Homo sapiens
gtaagaggatttcaatgttttgaattctgaaaacaatgatgttgccttacccttatgtgtgcaagctaattttctgctggtcccttatcccaactgtgaatgcagaaccctcatacctcctgccaatgtttcttcagctcatcagctatatctaggggcatcagaagatgcttcacacatgctaaggagcaggcccagtccagtctctggccagtcatcctgtgatgcccattttctttccctattccaattctagaaaaccctaggtactcccttttccatttggcgtgtttctccattggataccattgatatccattactgscaggtactgcacccgatctggcccctacctaccaagtcaaaaaggtgccactaccattccatctagcccaagaggaccaaagctgcacagtggccagtggcacagggaggagatattcactttatccttttgtacagacccatatctaagaaggccaaaagtatggctgctttaccatgtc

SEQ ID NO: 925205 - DNA, 728 bp, Homo sapiens
gtactgggttccacctgaagacaacatatctcaaagtatcaccccaggctgacctgttctacctgcacattgctgctggctcttcagggcctgcaagctctttaatcagcaggtgataaatccttccaggactgggtccttcgttcaaagcagtgggttttcttcaggcccagagtgtgtctagaaaggtcatatgggaactggggcctagaagggggtctcacaactttgcctggtgccctatcctattgtggctaagygggtgtccacaaagctagaaaaaagtcctctttactcttccctctcctcccctcccacacaaggaaggaatcccttttgttgccgtaagctgcactgccaagcaaaccattaggtttcctgattctggaccttagttcttgaatggcatttctggacctaccctgggcccactgggtagcccactgccctgaagggtgagtcccaggcctagcaatttactccactatttaattacatggcataagcacccccttggacaccccggcttgtgtctgtctcactagatcatgtgccctgcaaatccactggctttgagcccaggacagcactaacacttgcttagaaattgcagtccttgtggactacactgtctttcaagtttattaaggactcaagagcacgttagtctgtaatggtgaggcttgtgggatctcaagttctgacttctgggatggatgattccctat

SEQ ID NO: 925206 - DNA, 540 bp, Homo sapiens
gcctgtgaatatcaggtgtttgcctaagcaaaaatcttaaacacataggcatttttgctgataattcagaaaaattagctgttcttatggaaccaacaatgttaaatttgtcttatttatcaaaaaagtcattcaaagaaagaggattctgtttttggttgagtttacggtcttataatacycatgtcaaatccttgctctttaaaatatctagcaaaggcaaatataaaactcatctaattagtaaacccagacaaaaatgtatgcctacaattctgaagacatttctatttttattttgtcagtaattttaaggcaagcttattattaaagattactaaattcacataaatttgaaaagcatttgggctttcttactaaatttatgagcactcatttacttataaaccaatgtggtgccattgtagacataacagataatacatgtaacatacacagaaagacgtatccatacacacaaagatcaaatggatgttactgtgaaactctagccatgacatggcatcagaaactcattat

SEQ ID NO: 925207 - DNA, 626 bp, Homo sapiens
ttacagccttctttgtacccgtgttaggtggatcccgagttgttgtcctgcatccaagaagaatgaggttatgctgaaaatcaaaaagtgaggagggcagagaggagttttattgagccacaaaacagttctcagtggagaggggattcgaggatggttycccaccagaagttgggtggtctctctcccaatgtggcagggtctggggcttttataggctcagaatgggggagtgcatgctgattggtttgtgcatatgcaaaaaaggctaaaacaaaagcaccactcaaaggtgggcacaactgtgtaaaaaaacaattagggaagggcaggtatatgtaaaataggtgaagtgtggggatcaatcagaggaaagtgcactaagtgaagtgtgtggatcaatcagagggaagtgtgctaaaggggaagagagattcttaatccggtccgtggatttactggagacttgtagcttggctttcatgctttaaactgtctttggtttgaaggtggggtttcaccagggacccacccttgtctccctaggatttgtctgcctcctgccactatcattaagatggtatctaaagtctcaaatttcaccacacttttggatattcagttct

SEQ ID NO: 925208 - DNA, 757 bp, Homo sapiens
cagcacctgttctggtgcaggtagcaggggaatgaagtggactctgtgagggtcctgggttgtatttttgtttagtgcactggttttgtgttggttggcctccagccaggaggtggtgctttcaagagcacatcagctatggtaatatagggaggatgtagattgccctagggccacctgtttgtattcaggtttctcaggtggtgggcaggaccatagaactcccaagagattatgacctttgtcttccgctgccagggtgggtagagaaagaccatcaggtaagggcagggataggcttgtctgagctcagactttccttgggcagggctygctgtggctgttgtgggggatgggggtgtgattcctaggccaatggagttagattctcagggaattatggctgcctctgctgagtcatacaggttgccagggaagtaggggaaggccagcatcacaggcctcaccctgctcccatgcagccaacaatcctaaaggctggtctcattcccactgtgcttctacagtagcaacgagtttatttccaggcagccgatgcccagggctcagaatttgccccagaccatgagcttccctgctgagaaagcaagcctactcatagtttttcggtatctcaggaagcctgcagcagtgatccagttctttagattctctcggcattcctggtatgttcctgcagtagttcctggaggaaaagttcttgatgtgagtctccacatgctgccctgtctatctg

SEQ ID NO: 925209 - DNA, 757 bp, Homo sapiens
cagcacctgttctggtgcaggtagcaggggaatgaagtggactctgtgagggtcctgggttgtatttttgtttagtgcactggttttgtgttggttggcctccagccaggaggtggtgctttcaagagcacatcagctatggtaatatagggaggatgtagattgccctagggccacctgtttgtattcaggtttctcaggtggtgggcaggaccatagaactcccaagagattatgacctttgtcttccgctgccagggtgggtagagaaagaccatcaggtaagggcagggataggcttgtctgagctcagactttccttgggcagggctcgctgtggctgttgtgggggatgggggtgtgattcctaggccaatggagttagattctcagggaattatggctgcctctgctgagtcatacaggttgccagggaagtaggggaaggccagcatcacaggcctcaccctgctcccatgcagccaacaatcctaaaggctggtctcattcccactgtgcttctacagtagcaacgagtttatttccaggcagccgatgcccagggctcagaatttgccccagaccatragcttccctgctgagaaagcaagcctactcatagtttttcggtatctcaggaagcctgcagcagtgatccagttctttagattctctcggcattcctggtatgttcctgcagtagttcctggaggaaaagttcttgatgtgagtctccacatgctgccctgtctatctg

SEQ ID NO: 925210 - DNA, 592 bp, Homo sapiens
gacatctatgcttggtgaaccctagtcagcctctccacacttccttgtttcaataaatggccccaatattcacctagtttttcagactcaaggcataggagatatttttactcttttctttacaccacacatccaactcatcagaaacttccatttattccaccttcaaaatttatttcaaacttcaccactgtttaccactttcactgctgctatctataccaaagaaaccatctttgttcacctaaatccctgcggtaggcttgcacctggactccctgattccttttatactcttaagtggtcaggtctccagatagcaactagaatgatctgcctaaaacataaatcagataatgcctcacccctgcctcaaagtcctacataacactttggattttggttgttgtttttgttttgttttttgagatarggtcttgctctgtcacacaggatggagtacagtagcataatcacagcttactgcagcctcgacctcctggctcaagcagtcctcctgtctcagcaacctgagtagctgggactacaagtgtgcaacgtcaagccaggctaattttttatttttcgtaga

SEQ ID NO: 925211 - DNA, 542 bp, Homo sapiens
tggatcgggtggggacttggagaacttttgcgtctagctaaaggattgtaaacacaccaatcagcactctgtaaaaatgcaccaatcagtgctctgtgtctagctaaaggattgtaaatacaccaatcagcactctgtaaaaataaaccaatcagcgctctgtgtctagctaaaggattgtaaacgcaccaatcaaccctctgtaaaatggaccaatcagcactctgtaaaatggaccaatcagctctctgtaaaatggaccaatcagcaggacgtgggtggggccaaataggggactaaaagctggccaccagagccagcagcggcaaccygcttgggtccccttccgcactatggaagctttgttctttcgctctttgtaataaatcttgctgctgctcactctttgggtccgcactacctttatgagctgcaacactcactgcgagggtctgcagcttcattcctgaagtcagtgagaccaccaacccacagggaggaacaaacagctcctgacgctccacctttatgagctgtaacgc

SEQ ID NO: 925212 - DNA, 615 bp, Homo sapiens
tttagcatcttttctttctttctttttttttttttttttttttttttttttgagacaaggtcttgctctgtcttccaggctggagagcagtggcacaatcatggctcactgcagcctcaaactcctgggctaaagccatcctcccacctcagcttcctgagtagctgggactatgggcgtgtgccaccatgcccggctaatttttaaaattttttttgtagagacagggtttcactatgttgcccaggctggtctcaaactcctgggctcaagcaatcctcccagtttggcctcccaaagtgctgggattacaggcataagccaccacgcctgccctctgcatttagttcttgaagtacctcagytttctggtacattggttcctgcataagtctgtctgtagctcataaaaattctctttttttaatgtcctaatttatgactttactcaatgtaacttgattgtatttaaaattaacaagcaacagtacaaacataacaagttatgcaagtgttctcataaacaaaaaagatgtctatatgtagaaatatatttttatgaagctaaaataaaaggagctctcaaaagcttagaacaattccattaatccagca

SEQ ID NO: 925213 - DNA, 733 bp, Homo sapiens
agccaacttagacgttcctgcctgctggctctgaaaagaacagtggatctcccagcacagcgcttgagctctgctaagaaacagactgcctcctcaagtgggttcctggcccccatgcctcctgactaggagacacctcccaggagtggtcaacagacacctcatacaggagagctctggctggcatctgtcaggtgtccctctgggacgaagctttcagaggaaaaaacaggcagtaatctttgctgttctgcagcctccattggtgatacccttgcaaacagggtctggagtggacctccagcaaactccagcagaccggcagcagaggggcctgactgttagaaagaaaactaacaaacaaaaaggaatagcatcaacatcaacaaaaaggatgtccacacaaaaacctcatcctaagatcaccaacgtcaataaccaaaggtagataaatccacaaaaatgaagaaaaaccagtgcaaaaagggttaaaagtataaaaaycagaatacctcttctccaaaggatcacaactcctcacctgcaaggaaacaaaactggatggagaatgagtttgacaaactgacaaaagtaggcttcagaggtgggtaataacaaactcctccaagctaaagtagcatgttctaacccaatgcaaggaaggtaagaaccttgaaaaaaggttagaggatttgctaacaagaataaccagtttagagaagaatataaatga

SEQ ID NO: 925214 - DNA, 598 bp, Homo sapiens
cgtgagctggcactgagtatctgaagctttttcagtgcacagtgagagatctcagtggatctaccattctaggatctggaggatggtggccctcttctcacagcttcactagctggtgccccagtagggactctgtgtgagggctccaaccccacattacccttctgtgctgccctagcagagattctccataagggccccaaccctgcagcaaacttctgcctggatattcaggcrtttccatacatcttctgaaatctaggtggaggtccccaaaccccaattcttgccttctctgcattcgcaggctcaacaccacatgaaagctgccaaggtttgggaattgcaccctctgaagccacagcccaagctctacattggcctctttcagccatggctagagtggctgggactcagggcaccaactacctaggctgcacacagcacagggacctttgtcctggcccacaaaaccacattttcctcctaggtctctgggtctgtgatgagaggggctgccatgaagacctccgacatgctctggagacatttttcccattttcttggggattaacatttgtctactcattatttatgc

SEQ ID NO: 925215 - DNA, 651 bp, Homo sapiens
tagcaatagtgaatgggagtccattcatgatttggctctctgcttgcctgttgtttgtgtaaaggaatgcttgtacctctgtgttgcaggaagtcagggaccctgaatggagagaccggctgaagccatggcagaagaacataaattatgaagatttcatggacatttattagttccccaaattaatacttttataatttcttaggcctgtctttactgcaatctctgaacataaattgtgaagatttcatggacacttatcacttccccaatcaatactcttgtgatttcctatgcctgtctttactctaatctcttaatcctgtcatcttcataagctgaggaggatgtatctcgcctcaggaccctgtgatgattgcgttaactgcacaaattgtttgtagagcatgtgtgtttgaacaatatgaaatctgggcaccttgaaaaaagaacagggtaacagcaatgttcagggaacaagagagataaccttaaactctgactgccggtgwgccaggcagaacagagccatatttctcttctttcaaaagcaaatgggagaaatatcgctgaattatttttctcagcaaggaacatccctgagaaagagaatgcatccctgaaggtaggcctctgaaatggccgcttcag

SEQ ID NO: 925216 - DNA, 804 bp, Homo sapiens
aaacagtcttgcaaccaccagccatgtcaaaaaagagaacattccagcatcccaggaaccccctctcatactcctttcccttctaaaagtaaccaatatcctgacttttatgggaatcatttacttgtttttcattataatatgatacatatatcctatatatcaccaaactatgcattcctaagcactatggtttaacttttcctaactttgagttttacagtgtaacaccacagtgcatactcttttgtgtgtaactttttttcctgaatattttgtctgtgtttcagccatgttgcatgcagccgtagttcattcattttcatggctgtatagtatttgcactcattgaattgtgtcccccaaaaagttcacatccacatagaacctcagaaagtgacctcatttggaaacaggacctttgcagatgtaatcagttaaaatgattcataccggattggggggcccttaatctgatgactgttgtctttataagatgttcatgtgaagacattgagagaaacagggagagtaccatgtgaagatgggggcagagatgggagtgatgacagctacaagccagggaatgccaaggattgcaggcaaagaccagaagctgggagacaggcatggagcagattctccccgagaacctccagaagraaccaaccctcctgataccttgattttacacttctagcctcctcaattgtgaaatgataaattcctgttattttaagccacacagtttgtactaatttgttatggcagccctaggaaatgaatatagtattccactgtata

SEQ ID NO: 925217 - DNA, 608 bp, Homo sapiens
gagtggaagaggtggggtgttgaatgccctgccattctggcttgttggaggacacaggtgggctgaggtttcattgggtctgcataactgtgtggcttctgcctctgcccattctgttgcttctccttccccttcccagrtgttgacccctcatgaacaccttgcactccagtatatttctaagtgcttctgagagcccggcctgcaacaccacttctcccctctgcctccagcctagagatgggaatggcttcctgctggtgctaatctctaggtggcctcaccatgtcccatttggacactctgctcttgcatcatccatgtaatcaattaactgcattaaatccccatctctttaaataaagtaggttctgacacagccaacattatactgaatggggaaaagttgaaagcgttcctcctgagaactggaacaagacaaggatgttcactttcaccacttctattcaacatagtactggaagtcctagccagagcaatcagacaagagaaggcaataaaggacatccaaaaaagtaaagaggaagtcaaactgtcactgtttgctgatgatatgattgtatacctagaaaaccctaagaacttat

SEQ ID NO: 925218 - DNA, 608 bp, Homo sapiens
gagtggaagaggtggggtgttgaatgccctgccattctggcttgttggaggacacaggtgggctgaggtttcattgggtctgcataactgtgtggcttctgcctctgcccattctgttgcttctccttccccttcccagatgttgacccctcatgaacaccttgcactccagtatatttctaagtgcttctgagarcccggcctgcaacaccacttctcccctctgcctccagcctagagatgggaatggcttcctgctggtgctaatctctaggtggcctcaccatgtcccatttggacactctgctcttgcatcatccatgtaatcaattaactgcattaaatccccatctctttaaataaagtaggttctgacacagccaacattatactgaatggggaaaagttgaaagcgttcctcctgagaactggaacaagacaaggatgttcactttcaccacttctattcaacatagtactggaagtcctagccagagcaatcagacaagagaaggcaataaaggacatccaaaaaagtaaagaggaagtcaaactgtcactgtttgctgatgatatgattgtatacctagaaaaccctaagaacttat

SEQ ID NO: 925219 - DNA, 608 bp, Homo sapiens
gagtggaagaggtggggtgttgaatgccctgccattctggcttgttggaggacacaggtgggctgaggtttcattgggtctgcataactgtgtggcttctgcctctgcccattctgttgcttctccttccccttcccagatgttgacccctcatgaacaccttgcactccagtatatttctaagtgcttctgagagcccrgcctgcaacaccacttctcccctctgcctccagcctagagatgggaatggcttcctgctggtgctaatctctaggtggcctcaccatgtcccatttggacactctgctcttgcatcatccatgtaatcaattaactgcattaaatccccatctctttaaataaagtaggttctgacacagccaacattatactgaatggggaaaagttgaaagcgttcctcctgagaactggaacaagacaaggatgttcactttcaccacttctattcaacatagtactggaagtcctagccagagcaatcagacaagagaaggcaataaaggacatccaaaaaagtaaagaggaagtcaaactgtcactgtttgctgatgatatgattgtatacctagaaaaccctaagaacttat

SEQ ID NO: 925220 - DNA, 608 bp, Homo sapiens
gagtggaagaggtggggtgttgaatgccctgccattctggcttgttggaggacacaggtgggctgaggtttcattgggtctgcataactgtgtggcttctgcctctgcccattctgttgcttctccttccccttcccagatgttgacccctcatgaacaccttgcactccagtatatttctaagtgcttctgagagcccggcctgcaacaccacttctcccctctgcctccagcctagagatgggaatggcttcctgctggtgctaatctctaggtggcctcaccatgtcccatttggacactctgctcttgcatcatccatgtaatcaattaactgcattaaatccccatctctttaaataaagtaggttctgacacagccaacattatactgaatggggaaaagttgaaagcgttcctcctgagaactggaacaagacaaggatgytcactttcaccacttctattcaacatagtactggaagtcctagccagagcaatcagacaagagaaggcaataaaggacatccaaaaaagtaaagaggaagtcaaactgtcactgtttgctgatgatatgattgtatacctagaaaaccctaagaacttat

SEQ ID NO: 925221 - DNA, 717 bp, Homo sapiens
acaccacctcccttcagcccaccaagtggcacctcttgtgttctctcacagatggtctccttgcttcccattgctacttccaagacattttccaacattctctcttcaaaatccccagctactctgaagttcatgcttctgaactagaccactccaactcatttgtggtcgtgtcctctaacaacccttaagtgatcccgtgaatcatgcaagtttctggcacctgactccctatttttctcttcaccctggctctgaaacccttcttggcaatgactcacgcaacacttggctcctgtgttctttcacttcttcacctccatttcagtttccttccaatgccccccagctatcctcaccattgtcagtctcctgaccttgtcaccactaataaaagcacaattcagaaaactttctgctaactctactcagacagcccactccaacccaataagcytgcatcttcacagagaccttcaatccagaagccactgtttctttatccattagcccccttcagtcctaaccctccttttcccctcatcgttccattccctgcccagcaatctccccaccccctcacccctctctctttctctcatatgctcacctgattcaatctcaattcagattaagcccaaccatccacccactccatacctccacttgagtagcagattcctgttggagaaaaatgcataactggtctcacaaaaa

SEQ ID NO: 925222 - DNA, 552 bp, Homo sapiens
tatgacctcaaaagcagaggcaaagaaagaggaaaaatagacaaattactagaactgactctttctatgaaaatagtgaaacaaaacttatactgcatttatgaaacaattatagtttatgaaacctctcaagattgaactagtaagaaatagaactgggccaggtgcggtggctcacgcctgtaatcccagaactttgggaggcwgagaagggcagatcatgaggtcaggggatcaagaccatcctggccaatgtggtgaaaccccgtctctactaaaaatacaaacaattagccaggcgcactggtgggtgcctgtagtcccagctactcgggaggctgagaaggagaatggtgtgaacccgggaggcagagcttgcagtgagccgagatcgcgccactgcataccagcctgggtgaccgagcaagactctgtcaaaaaaaaaaaaaaaaagaaaaagaaatagaaccctaagcagactaataatgagcaataaaatctaatcagtaataaaaaatatcccaaggaaaataaggtccataactagatgga

SEQ ID NO: 925223 - DNA, 552 bp, Homo sapiens
tatgacctcaaaagcagaggcaaagaaagaggaaaaatagacaaattactagaactgactctttctatgaaaatagtgaaacaaaacttatactgcatttatgaaacaattatagtttatgaaacctctcaagattgaactagtaagaaatagaactgggccaggtgcggtggctcacgcctgtaatcccagaactttgggaggctgagaagggcagatcatgaggtcaggggatcaagaccatcctggccaaygtggtgaaaccccgtctctactaaaaatacaaacaattagccaggcgcactggtgggtgcctgtagtcccagctactcgggaggctgagaaggagaatggtgtgaacccgggaggcagagcttgcagtgagccgagatcgcgccactgcataccagcctgggtgaccgagcaagactctgtcaaaaaaaaaaaaaaaaagaaaaagaaatagaaccctaagcagactaataatgagcaataaaatctaatcagtaataaaaaatatcccaaggaaaataaggtccataactagatgga

SEQ ID NO: 925224 - DNA, 545 bp, Homo sapiens
tctataacaatgatttaatccttctaggccttcatattgttctgtacacctgtgttcacttccatagtgttggcaatcctttccatagagtaccatatgtaatgagccttacaagtacttatgacatctgatctagaggctgatttagagatgttttgtttggggacaagtacactaatttgatacctttggttttaaattcatggggttaagagtggtcaaaggcattttctcatatcataaaagctttaaaaggcagtcccttactggcaaggtactttctgacttcagagacaaggcgctgatggaaccagtccagaaaaaaaaaaaaaaaattaatsgtcttgtttttcaggcctgcttgttgtatatctcaaagactgacagctaatgtttgttttgtcttctcaaggcttggggattagcagctttataaatgcagaaagtgctgctcacaaagctaatcgtgtttataccaaatagtagttagcctatcccttgctgccttaaactttagtgctcacatttttttcctcactaataaa

SEQ ID NO: 925225 - DNA, 730 bp, Homo sapiens
gagcctctgctgttttggaaaggtgacaaggatgtggtcacatcaccccagagacaaatctcaaagtttcttctggactttgcagcagcagttccgcctaacacacccggcatgaccttctttccttcaggtcctcctaaactgaagaactgaatgtgattcaagagttttgtccatctgacgtgccagcccagacttggcaattcagcactcccatctcccccagcagtttctggaaggttccacaagcagcccaaagtgcctgaagrgttcattaacttctctttggccagaagcacctccactttgctggacaggctggagaaaccaaagtccatctgcgtgaaatactgacacagccccttcctgagcaacagctttactcctaaaaggacatgtatctacggccatcggtaatacctgcaacaggcatgtgccagccggtactgcaccactgatgcacattcacaaaatcaacaatcaatcagctcaagaataggcttcccccaactggtcagcagcccacaaactgtctcccctccataggaagaatcaaaatcacctgttgtaacaatcgcagtttcaattctgttgaatagagtaaggaagattctgttctatgatctaaaattaataattccacaaccaacaactcaaagcattttaggagtttatacaataataattagcagggtatgttctgggctgggctttctgttggacagccact

SEQ ID NO: 925226 - DNA, 730 bp, Homo sapiens
gagcctctgctgttttggaaaggtgacaaggatgtggtcacatcaccccagagacaaatctcaaagtttcttctggactttgcagcagcagttccgcctaacacacccggcatgaccttctttccttcaggtcctcctaaactgaagaactgaatgtgattcaagagttttgtccatctgacgtgccagcccagacttggcaattcagcactcccatctcccccagcagtttctggaaggttccacaagcagcccaaagtgcctgaagggttcattaacttctctttggccagaagcacctccactttgctggacaggctggagaaaccaaagtccatctgcgtgaaatactgacacagccccttcctgagcaacagctttactcctaaaaggacatgtatctacggccatcggtaatacctgcaacaggcatgtgccagccggtastgcaccactgatgcacattcacaaaatcaacaatcaatcagctcaagaataggcttcccccaactggtcagcagcccacaaactgtctcccctccataggaagaatcaaaatcacctgttgtaacaatcgcagtttcaattctgttgaatagagtaaggaagattctgttctatgatctaaaattaataattccacaaccaacaactcaaagcattttaggagtttatacaataataattagcagggtatgttctgggctgggctttctgttggacagccact

SEQ ID NO: 925227 - DNA, 859 bp, Homo sapiens
ggaaaaggtaagtttgatcaatcagattctctccttctgggatttgaattgggaaacatggatagaaagaagcagttagccatgggagctgaagctgaaaggatggcatacaatggagtggagccatggaggattatagcaaaccaaaactatgaggaagcagaaccatgtgataagaaggcagaatttatgaataagcagcaattctgaggtagagaaaatacatgaaaagtaaacagaattttttagttggaataagacagcaagaagcaaacctgcaaagagtcgcaagaaatgagaagtggtgcacaattgtcattaagatcctatcatctggctcaactaagagccagtttcagatcacccggatttactaaggctcctgtgctcttcatcagatttaccccagctttccaggtttccatgctggtatttcttgggctcctactatgagctaggcacagttctaggtgtttgggatctaagggcaaatgaaacaggaaaatacttaaacccctcataacttgcggcagggtctctgtttcaaagggccaagttaaaataactactcttgccttcaccatttcccatggtccagttggtgtcattatgttgtcattatgagtctacacccactttggcattcagttcatatatatcacctccmctgctagggtgggtaactggagaatcaggaaaagagaaaataaaaaacagaagttgggagatgggacatgaaggaagtcagatgatgtatgataatggcagcagagtggctgaatgcccaggctttaaattaacttgcattcaaaattttgctctatcacttattcattatgcggcttttttggcaggtcag

SEQ ID NO: 925228 - DNA, 568 bp, Homo sapiens
atgtattttgcatttcattcaataaatttttcagttccagaatttgtttggttgtttgtttgttttaatgatctttatatttttggtaaatttctcactcatatcctatattgttttttctaaattgttcatactgcttaccagtagtctcttgtatctcacttgagattctttcaaatcaacattttgaattctttttctgggctttcataaatctgtcttttactggaattgttgttagagaattattgttgtccttcggaaatgtcatgtttccttgctttttcatatttcctgcatccttacattgttttttgcatatcttgtataacatgtgcttcttcctgttcttttaatttgtttttgtaagggaggacstttccctgaagatgtatctatggtgttggttgggtagggcactttggctttgattccgggtgtgtgcaatagtgtagtcattatatgatttattgagctataaatagcatcagtggtatctgtgctttcctaagtgggttaggatgtggtttttagtggaggatgtggtgacattttcctgagaactaag

SEQ ID NO: 925229 - DNA, 798 bp, Homo sapiens
cagccaagggagtactggcattacccctcttctaaccctaggctgcacagcttgcagctccagagatcccttccttccacttgaggagagaagagggaagagtggggagaattttgtcttgcatcttgtataccagctcagccacagcaggatagggtactggtcagagccatgaggtccctgccccaggccctagctcttagatgacatttctagacataccctgggccagaagggagccctctgccttgaagtaaaggacccagtcctgccagcattcatcaactgaagagccatttggccctaaataaccagagatactacagataaccagacactacattgaagaccttggtgagcctccgagacttgctggcttcgggtaccagcactgtcacaggggcgtagagcaccaagygggcttttgggtccctgattccaggattttattcttaaatggcatttctggacctgccctgggccagaggggagcccactgctttgaagggtgagtcccaggccaggcagcattcaccacaagttgacttaagagaccttgggcctgaagggaacatcagtggtaatatggcagtactcctcatggcctggggtggtggtggctacagcatgaggctcctgtgcctttggaaaggggagggaagagtgagaagaactgcatcttatgatttgagtgccaagtcagccacaatacaatagaatatcaggcagaattctaaggtttttgactctagtcactgactccaggatgacacttctggacccactcgaggcccagag

SEQ ID NO: 925230 - DNA, 555 bp, Homo sapiens
aataagctatcatactaaggatacaggaaggtttcaggagacaggctaatatacaaaagtcgattattctcctatatatcagcaatgaatgtgaaatttaaaattaaaaatgcaatactatttaaatgagcaccctccaaaatgaaatacctaggtaaaaatctaacaaaatatatacaagatctayaagagtaaaactaaaaactctcatactaagtcaaaaaagaactaaatgaatagagaaatattcaaggacagaaagactcagtattatcaagatgtcagttattcccaacttgatctacagattaaacacaaacccaataaaaatcccttcaagttattttgtagatgttgacaaactaattataaagtttatatggagaggcaaaagacccagaataaacaacataatattgaaggaaaagaacaaaattggaggacttacaccgaccaacttctagacttactgtaaaaagatacaatcatgaagacagtgtggtattggtgaaagaacagacaaatagattaatggaagaggatagagagtccaga

SEQ ID NO: 925231 - DNA, 553 bp, Homo sapiens
cctcgtgaccttatcacctcccaagggccccacctcctaagcccaagccactggggattagggtgtcaatgtatgaatttgggaaagacacaaacatttagtccatagcagacacccagaacaaaatacaaccattggctggctcaaacagcagagaaattcgttttcccacaatcctgaaggccagaagaaatcaaggagttcacctagagatcaaggtgctggcaggggtggttgtttctcaggcccctcttattggctgggagatgactgtcttcctctgggtcctcacgtggtcttccctctgtgagtgtctgtgtcctaatctcttcttcttataaggacagcagtcatattggattaggscccacctatgtgaccttgttttatcttaattacctctttaaagactatatcaaccagatatggttacattctggggttctggaggttaagatttcaacatgtgaattttggaggaagacaattcagtctgcaacagaagataaagtccccggccctaggggaccgggggtgggggtatgtgggggga

SEQ ID NO: 925232 - DNA, 553 bp, Homo sapiens
cctcgtgaccttatcacctcccaagggccccacctcctaagcccaagccactggggattagggtgtcaatgtatgaatttgggaaagacacaaacatttagtccatagcagacacccagaacaaaatacaaccattggctggctcaaacagcagagaaattcgttttcccacaatcctgaaggccagaagaaatcaaggagttcacctagagatcaaggtgctggcaggggtggttgtttctcaggcccctcttattggctgggagatgactgtcttcctctgggtcctcacgtggtcttccctctgtgagtgtctgtgtcctaatctcttcttcttataaggacagcagtcatattggattagggcccacctatgtgaccttgttttatcttaattacctctttaaagactrtatcaaccagatatggttacattctggggttctggaggttaagatttcaacatgtgaattttggaggaagacaattcagtctgcaacagaagataaagtccccggccctaggggaccgggggtgggggtatgtgggggga

SEQ ID NO: 925233 - DNA, 588 bp, Homo sapiens
cccggcaccgaagctgcgactctctcgcctctggccttcaatggtcaccagcaccatggctgccacacaggcatcgattatgctgggggccccgggctggccccacgctgacttgttctctttattctactgcaaaaccctcagctcccggcagcttcagagatggctccttctattcccggggctcggctctgactaccacatggaaggttctccattagacgcagcgtggatggacactaactgggagggagggacgcctgggtttctttcttgtttttttttttttttgagacggagtctcgctctgtcgcccaggctggagtgcggtggcgcgatctcggctcactgcaaccttcgcctcccgggttcacgccattctcctgcctcagcctcccragtagctgggactacaggcaggtgccaccacgcccggctaattttttgtatttttagtagaaacggggttttaccgtgttagccaggatggtctcatctcctgacctcgtgatccgtccgccttggcctcccaaattgctgggattacaggcacgagccaccacgcccaggcaggtttcacttctgaaa

SEQ ID NO: 925234 - DNA, 588 bp, Homo sapiens
cccggcaccgaagctgcgactctctcgcctctggccttcaatggtcaccagcaccatggctgccacacaggcatcgattatgctgggggccccgggctggccccacgctgacttgttctctttattctactgcaaaaccctcagctcccggcagcttcagagatggctccttctattcccggggctcggctctgactaccacatggaaggttctccattagacgcagcgtggatggacactaactgggagggagggacgcctgggtttctttcttgtttttttttttttttgagacggagtctcgctctgtcgcccaggctggagtgcggtggcgcgatctcggctcactgcaaccttcgcctcccgggttcacgccattctcctgcctcagcctcccgagtagctgggactacaggcaggtgccaccacgccyggctaattttttgtatttttagtagaaacggggttttaccgtgttagccaggatggtctcatctcctgacctcgtgatccgtccgccttggcctcccaaattgctgggattacaggcacgagccaccacgcccaggcaggtttcacttctgaaa

SEQ ID NO: 925235 - DNA, 850 bp, Homo sapiens
ccgggcccgtcaaacaccaaagccccacgcctcccccagccccgggcagcctccactctacatctgtctctgggactccgactactccagtggagtcacacactatttgtccttcacgcctggcttttctccctcagcacaacgtcctccaggtccgttcacgtggtagcgcgcgtcagaatctccttcccgtgtaaggctgaatactattgcgttatatgtatcactgcattttgcttgttcttccatcaaagctgggttttttggctgggcgcggtggctcacgcctgcaatcccagcactttgggaggccaaggtgggtggatcatgaggtcaggagttcaagaccaggcctggccaacatgkcgaaaccctgtctcgactaaaaatacaaaaattagtctggcatggtggcacatgcccgtaatcccagctacttgggaagctgaggcaggagaatcttttgaacccgggaggcggaggttgcagtgaacacagatcacgccactgcactccagcctgggcgacagagcgagaccttgtctaaaaccaacaacaacaacaacaaagctgggctttttaaatgtgtttctgtggactttcctcccctctgacacgtcccagtgcctgaccactgttttcctcttacctcacaataaagtcttgaagaaggtgcaagaccaagaaatagaataatgtgaatatgtgtttgcggggccaggtgagacaaaggggagaagggagggtggaaatcagcaggggggaggaggtgggagccggagtcagtcatcaggtgagcagcatggaggtgggtgggggacctggcagggccacgggtggattctccagt

SEQ ID NO: 925236 - DNA, 838 bp, Homo sapiens
taaccacatccacattttgaactgcccagttcctttgaccttcaggacaacccattctccttgattttattcccatctatctaagtagttccttctcagtatcttttgccactgtctcaacccatacttaagtgtttaatattggaatatttgaactccctgtcctcagctctcttaccatatctctcttmcaaaataatttcatctcttagcatagcatcaattaacatccacagggtaacaattcctaaacttttatctccagcccattccacccttctaagtccaaaacattatttcaaattgtttactagatatctccatgtggacattgcattggcactcaaaactcagtatttccaaaaaagaaaccattgatccttccccactaacgtgcccttcatacaatgacggcatccccacaaatgctcaagccaggggtctaggaactatttgactccttcctttccctcgttacccatattcaatcactaaacttgtcattcttcaccttaaataactcttaaaattgcccagtgctattcatccctacttacctctcactggtccctggcaccatcaacacttacatgactgaggtaatagccacctaatttccccaagtcccccctgttttgcctctacaatgcactctctgcattgcaagccagggaaagtttctgcaaatgcaagtgccactcatccatttgaaaccactcagtgaatcctcattgggcttctatcaagttacatctgtattttcttaacagggcctacagaatcctacgtgacttgtctcttgcccgcctcttcagcttcatcactttcccatattttt

SEQ ID NO: 925237 - DNA, 579 bp, Homo sapiens
aatagacaaaagggactatattaaacataaaagcttctgcacagcaaaagaaacattcaataagtgaagagacaactgcttgaataggagaaactgtttgcaaactactcattcaaaagggggctgtatccagaatatataaggaactcaaacaactcaacagtaaaaaaccaatagtcccattaaaaattgggctaagacatgaatagacrtttctcaagaagaaatacaagtggccaagaggtatatgacaaaatgctcaagatcactaatcatcagggaaatgcaagtcaaaactacaatgagatatcacctcacctcagttacaatggcttttatttaaaaatcacaaaataacagatgctggtgagaatccagagaaaagggaactattaaacactgttggtgaaatgtaaattatgcagccactataaaaagcagtgtggagatttctcaataaactaaaaatagtactaccacatgatccagaaatcccactgacaggtgaagccagttggacttcctgggtcagtggggacttggagaacttttctgttttacaagaggattgtaaaacgc

SEQ ID NO: 925238 - DNA, 755 bp, Homo sapiens
gttatagtacttaacctgcttgggtggcccaaatctttattcctgaagtctgggatattcgtagttctgctagattgggttgttttgtgtttccattgaccgtaatcacagagcatggtaatactaagagccagccctaaggggtcttccagacatacgcttccttacttccattagtagtccagttgccccttggtaatcaggatcaatcactccagccaacatcacaacgcccttttttgtctgttgactcaaaggcataaggaacctcaaagggccaggtggcagttttgatttccagttcaatggaataattgttcctcctggtggaagctgtcctccttttaaaaataagacctccaggccagcagagtataaggtcatagaaagcaaaaattttgctgatgggtcactaggggtaaaagcaagcagtgctacttccatttccccccattgattcctggacctgtgtwtcctggctatgggagaaacaggaccatatattgacactgattcagagcatacccagcctcccagagaaccctgctccagtcctgcaaagtattgccacctagctggcactgtaactgaccttcaaaaggccattccaccactctatcaagccagatgcttcaggatggtgtgaaacatggtaagaccagtgaatctcatgagccttgtttgatcagaagtaatgctttatggaatactatgatggcagataaggcatttcataagtccacagatggtagttt

SEQ ID NO: 925239 - DNA, 600 bp, Homo sapiens
tcactataggcctcaatgaactcagaaatgtgcctttgtagattattcattaagaatgtttccaacctgatgaatcaaaacacaagctccattctgtgagatgaatctacacatcacaaagcattttcacagacatctttagtttttatcrtggaatatttgattattcactataggactctatgggctcggaaacgaccctttgtagatattacaaaagactgtttctaacctcgtgaatcaaatcacaggtttcattctgtgagatgaatccacatatcagagagcattttcaccaacaccttgtttctagcttttatcatgggatattcagttttacactatgagcctcagtgggctcggaaatgtccaattgtagattctacaaaaagagtgtttccaaccttgtgaatcaaaacacaggtttcattctgtgagatgaatccacccatcacaaaccatttttacagatagcttgtttctagtttttaattgtgggatattcagtttttcattatgggcctcagtgaacacagaaatgtcccttcatagattcttcagaaagagcgtttccatcttggtgaatcaaaaccaggttct

SEQ ID NO: 925240 - DNA, 600 bp, Homo sapiens
tcactataggcctcaatgaactcagaaatgtgcctttgtagattattcattaagaatgtttccaacctgatgaatcaaaacacaagctccattctgtgagatgaatctacacatcacaaagcattttcacagacatctttagtttttatcatggaatatttgattattcactataggactctatgggctcggaaacgaccctttgtagatattacaaaagactgtttctaacctsgtgaatcaaatcacaggtttcattctgtgagatgaatccacatatcagagagcattttcaccaacaccttgtttctagcttttatcatgggatattcagttttacactatgagcctcagtgggctcggaaatgtccaattgtagattctacaaaaagagtgtttccaaccttgtgaatcaaaacacaggtttcattctgtgagatgaatccacccatcacaaaccatttttacagatagcttgtttctagtttttaattgtgggatattcagtttttcattatgggcctcagtgaacacagaaatgtcccttcatagattcttcagaaagagcgtttccatcttggtgaatcaaaaccaggttct

SEQ ID NO: 925241 - DNA, 646 bp, Homo sapiens
tggcctattgtgggatttcattttgtgattgtgtcagtcaatcctccttaacaaactcccttttatgtatacgtctatcctattagttgtgtccctctagagaactctaatacaatgaatttcttttttgtttttttaattctggaggtcagaaatctgaaataagttttaccagtggaaagtcaatgtgtcatcattgctagtttgttgttgttttccaaaggccctgaggggagaatggattttcttggcttttgtgatcttctggtgaagctgcctgtttcctgggctcttaggccctttctccagcttcagagagcgtcactctgacacccgctttcatcatcacrttgccttctcttctgaggctgatttctgatgcgttccccttgtaaagacaattatgattacattaggccaacacagatcaagatacttaatcacatctgcaaagtcctttttgccacataatgttacattcccaggttccagagattaagacatggtcatatttcaggaaatgagcgttttattcagtttaccatagcctgtaagccaaattcaccaatacttttgtattctggttcacgtatcccatttttatgagcctccttttgcctattcctagaatgtttaatgacccttt

SEQ ID NO: 925242 - DNA, 631 bp, Homo sapiens
gagacccacatgtgggggaactgaggcctcctgccaacagccatgtgagtgagcatcttggaagcagatcctgcagtcccagtcagatcttcagatgaccgttgccttggttgacatcttgactgcagcttcatgagagactcccagccagtagccactactacccacaaccatccagctaagctgttcctgaattgatgaccacagaaactgagataatacatgtatgttgttttagctgctaggttttagggtagtttgtaacacagcgatagatgactaaatatttcttccttcaaaattcagctcaggccttaccttctgaggaagccttctttgctctgtgctgggtttggtgcctccttgatacccccaagctccagttcttcccgtatagcagtctccatccctctgggtttgtactgcctgaccctccckaccctcatgctatgaacttccaagggcagggaccattctgattcactatgggatcccctgcaccttgcatggggattcggtaagaaggtagaaggaaggaggatcagtcaagtctgatgacttgaactgaataagggtcggactgggaggagcggggcagaccgtccctcagtagcagattatattttccaaa

SEQ ID NO: 925243 - DNA, 624 bp, Homo sapiens
agaacaagactccgtctcaaaaaaaaaaaaaaaaaaaaggaagaagaagagaagaagatacaatagtggaatttcaaactgcaccaactttaaaaaaaacagaaggaactgggaattagggggaatttgcccatgttgttaagggatcaactgcccatccaagggcagttgaggtgtctcyggtagagactggagggggacaatatttcatatataaacttttaattatcattgttatgatgcggttactgagaaccccatgtaaaaggagttagccacttctctcttcagcttaatatccattgcctccacttgattttccatcttccctcaattttcagaacttttgtcttttctccaaaaccagtgcctactgtcccttagagccacttctctccatcctcagcagggaccttgcccttgcgatattcctctcgctcttgcatttttgccgcgagagcggtcctttctcctctgtcttctacgttgtgtgtaactgtctcctaaaagggccaacccttccctggaccttgccgcttcctctatctccttcctttcttctgtcttctagtctgcctcctggaacaaggacctgtgcctgtcgcctcatttccttccccaccg

SEQ ID NO: 925244 - DNA, 568 bp, Homo sapiens
aggaaatagagacaaaaaacccttaaaaaaatcaatgaatccaggagctggttttttgaaaagatcaacaaaattgatagactgctagtaagactaataaagaagaaaagagagaacaatcaaatagatgcaataaaaatgataaaggggatatcaccaccgatcccacaaaaatacaaattaccatcagagaatactataaacaactctacggatataaactagaaaatctagaagaaatgsataaattactcaacacatccacccttccaagactaaaccagggagaagtttaatctctgaatagaccaataacaggttctgaaattgaggcaataattaatagcctaccaaccaaaaaaagttcaggaccagacagattcacagctgaattctaccagaggtacaaagaggagttgataccattccttctgaaactattccaatcaatagaaaaagagggaaacctccctaactcattttatgaggccagcatcatcttgataccaaagcctggcagagacacaacaaaaaaagagaattttagaccaatatccctgatgaacat

SEQ ID NO: 925245 - DNA, 590 bp, Homo sapiens
aacgtccttgtctgacagctctgaagagaacagtggttctcccagcacagtgtttgacctctgagaacagagagactgcctcttcaagtgggtccctgacccccaggtagcctaaatgggagacacctccctgtaggggctgacagacacctcatataggcagctgactctctgggacaaagcttccagaggaaggatcaggcagcaatatttgcggttcwgcaatatttgctgttctgcagcctctgctggtgatacccaggcaaacagcatctggagtggaactccagcaaactccaaagacctgcagctgagggatctgactgttagaaggaaaactaacaaacagaaaggaatagcattgacgtcaacaaaaaggtcatctacaccataaccccatctgtaggtcaccaacatcaaagaccaaaggtagataaaaccacaaagatggggagaaaccagagcagaaaagctgaaaattctaaatatcagagcacctcttctcctccaaaggatcgcagctccttgccaacaacaaaacaaagctggacagacaatgactttgatgagttgacagaagtaggcctcag

SEQ ID NO: 925246 - DNA, 614 bp, Homo sapiens
tgagggatctgactgttagaaggaaaactaacaaacagaaaggaatagcattgacgtcaacaaaaaggtcatctacaccataaccccatctgtaggtcaccaacatcaaagaccaaaggtagataaaaccacaaagatggggagaaaccagagcagaaaagctgaaaattctaaatatcagagcacctcttctcctccaaaggatcgcagctccttgccaacaacaaaacaaagctggacagacaatgactttgatgagttgacagaagtaggcctcagaaggtcagtaataacagacttctccaactaaaggaagatgttcaaacccatcgcaagaaagataaaaaccttgaaaaagattagacgaatggctaactagaataaagagtgtagagaagacattaaacgacctgatggagctgaaaaccatggcacgagratttcgtgatgcatgcacaagcttcagtagctgattcaatcaagtagaagaaagggtataagtgattgaagatcaaattaatgaaataaagcaagaagacaaggatagagaaaaagagtaaaaagaaatgaacaaagcctccaagaaatatgggactatgggaaaagaccaaatc

SEQ ID NO: 925247 - DNA, 498 bp, Homo sapiens
atggggggtggttgcttggtgtaacaatgcctttacagggcgagctgcctttctgtggccacttatttaaggtttggagcaccaggtttagcctggaactttagccctgcaaagaagggggtgtgacatgcaagtgtaacttattttttaagagccctttatgtttttaaattatacccacagtttgcgggttgtacggcacatggaattcccactttatgtttatttgttgtgcccagtgttgtacctgttgtttagtaaaatgtgttttcctgttacttttaacagccagggggaaccatacagggcacataagtgttgaagggctggratggtgtgctgttggtcagccaccctacaagggtaggtgaacaacaggcctgtgaccgtgtttaccgctgttagcgcatgcttatacctttgagacgttggcagtagcccgatgtagtttgcttgccacctggttaagggcacttgctgtattgttacttgtgtaac

SEQ ID NO: 925248 - DNA, 664 bp, Homo sapiens
ggggaggtctctgtgcagctcccaaggtgacaatatcaccgggagtcatacaacattcaagaatggctgtaggccgggcgtggtggctcacgcctgtaatcccggcactttgggaggccgaggcgggcggatcacaaggtcaggagatcgagaccatcctggctaacacggtgaaaccctgtctctactaaaaaatacaaaaaattagccaggcgtggtggcgggcacctgtagtcccagctactcgggaggctgaggcaggagaatggcgtgaacccgggaggcggagcttgcagtgagctgagattgtgccacggcactccagcctgggcgacagagcgagactccgtctcaaaaaaaaaaaaaaaaaaaaaaaaaaagaatggctgtaatcctggccctatggtgccgctgttgggattttccyggggtttcagggcagtccgagctcaggtgcatcctggctgcaggtgcagggggtgggcaggaggaaagccccatatgctccccacatgagaaccccacttgggttctgtcccagctcagcatatggatttcttgttctctttctccaagttcccctttgtcaggctgagtctattgagccagaaaatcagccgtgttctggggatggccaagtcacagggacctggcttcccatggt

SEQ ID NO: 925249 - DNA, 664 bp, Homo sapiens
ggggaggtctctgtgcagctcccaaggtgacaatatcaccgggagtcatacaacattcaagaatggctgtaggccgggcgtggtggctcacgcctgtaatcccggcactttgggaggccgaggcgggcggatcacaaggtcaggagatcgagaccatcctggctaacacggtgaaaccctgtctctactaaaaaatacaaaaaattagccaggcgtggtggcgggcacctgtagtcccagctactcgggaggctgaggcaggagaatggcgtgaacccgggaggcggagcttgcagtgagctgagattgtgccacggcactccagcctgggcgacagagcgagactccgtctcaaaaaaaaaaaaaaaaaaaaaaaaaaagaatggctgtaatcctggccctatggtgccgctgttgggattttcctggggtttcagggcagtccgagctcaggtgcatcctggctgcaggtgcagggggtgggcaggaggaaagccccatatgctccccacrtgagaaccccacttgggttctgtcccagctcagcatatggatttcttgttctctttctccaagttcccctttgtcaggctgagtctattgagccagaaaatcagccgtgttctggggatggccaagtcacagggacctggcttcccatggt

SEQ ID NO: 925250 - DNA, 434 bp, Homo sapiens
gaatcccccaacacctgtaatcccagcactttgggaggccgaggtgggcagatcacgaggtcaggagattgagaccatcctggctaacacagtgaaaccccgtctctactaaaaatacaaaaaaattagctgggcatggtrgtggtgggtgcctgtagtcccagctattcaggaggctgaggcaggagaatggcatgaacccgggaggcggagcttacagtgagccgagatcacaccactgcactccagcctgggcgacagagcaagactctgtctcaaaaaaaaaaaaaaaaaaaaaaagaatcccccaaattcacaaacccagggcaggggcgattgtgccataaaaaataactcttattcttacaaaagtgttatgtggtggccccagggccactccaggggaccaacagagcagagatccctgacgctgg

SEQ ID NO: 925251 - DNA, 646 bp, Homo sapiens
ttcaaaccccgccatagctttaaaaactaagtttatgcaatattccaaatctgttatgtcatcaatgttcacaacattttcaccagaagtagatatcatctcaagaaaccactttgtttgctcatacataaaaagaaatctctcatccattaaatttttatcataaaattgcagcaattcagttatatcttcaggcactacttctagttctcttgctatttacacataggcagttacttcctccactgaagtctttaacctctcaaagtcatccatgagggttggaatcaacttcttccaaactccagttaatgtcaacattttgaattcttcccatgaatcacaaacgttcttaatggcatctataatggtgaatcttttccaraatgtttttaatttacttttcccatatccatcagaagaattactatgtatggcagcaataaccttatgaaatattactcttaaatgataagacttcaaagtcaaaattactccttgatctatgagctgcagaatggctgttgtgataacaggcatgaaaacaacattaatttatgtacatcttcatcagagttcttagttgaccaggtgcattgccaatgagcagtgatattttagaagaaatatttttttctgagtagta

SEQ ID NO: 925252 - DNA, 646 bp, Homo sapiens
ttcaaaccccgccatagctttaaaaactaagtttatgcaatattccaaatctgttatgtcatcaatgttcacaacattttcaccagaagtagatatcatctcaagaaaccactttgtttgctcatacataaaaagaaatctctcatccattaaatttttatcataaaattgcagcaattcagttatatcttcaggcactacttctagttctcttgctatttacacataggcagttacttcctccactgaagtctttaacctctcaaagtcatccatgagggttggaatcaacttcttccaaactccagttaatgtcaacattttgaattcttcccatgaatcacaaacgttcttaatggcatctataatggtgaatcttttccaaaatgtttttaatttacttttcccatatccatcagaagaattactatgtatggcagcaataaccttatgaaatattactcttaaatgataagacttyaaagtcaaaattactccttgatctatgagctgcagaatggctgttgtgataacaggcatgaaaacaacattaatttatgtacatcttcatcagagttcttagttgaccaggtgcattgccaatgagcagtgatattttagaagaaatatttttttctgagtagta

SEQ ID NO: 925253 - DNA, 611 bp, Homo sapiens
gcatatagtcatcagattgtccaaggtcaatgtgaacaacaacaacaaaaatcttaaaggcagcgacagagaagggacaggttatatacaaaggtaatgtcagcagtctaacagtgaatttttcaggagaaaccttactagctagaagagattgggagcctatattcagcatccttaacaaaaagcattccaacaaagaatttcatatccacccaaactaagctacaaaagtgaaggggaaataaaatccatttcagacaagtaaatgctaaggtaattgtttacaaccagatctgccttacaagaggtcctkaagggagagttaaacacagaaacttccaccacaaaaacatatttaagtacataccccactgacactataaagcaactatacaatcaaggctacataataaccaacttacaacatgatgacaggttcaaatcctcacataccaatattgaacttgaatggaaatggactaaaaactccactcaaaaggcatcaagtggcaagttgaataaagaagcaagaccaactgtatgctgtcttcaatagacccatatcatctgcagtgaccctacaggctgaaaataaagggataaagaaggat

SEQ ID NO: 925254 - DNA, 572 bp, Homo sapiens
accgagtccggagtttcttgcttccgatgcgttcgtggtctaacttcacaaacatacccgcggacctttgcggcaagtgttacagctcttaaagacggtgcgtccggatgctccggtgagtttgtagtctcactgacttcacgaataaacccgcggaccctcacggtaagtgtgacagctcttaaaggtgatrtggtgaattttaaagcccttaaaagtggtatggacccaaacggtgagcagcagcaagatttactgtcacgagcaaaataacaaagcctccgcaatgcggaagacaaccggagcagactgcagaggcctgcgtgcgtggccagcttttattcccttatttggccccacccatgccctgcttattggtccattttacagagtgctgattggtccattttacagagtgctgattggtccattttacagagtgctgattggtccatttttacagaatgctgattggtgcatttacaatcctctagctagacacagagcactgattggtgcatttacaatcctctagctaggcagaaaagttctccaagtccccacaaaaccca

SEQ ID NO: 925255 - DNA, 572 bp, Homo sapiens
accgagtccggagtttcttgcttccgatgcgttcgtggtctaacttcacaaacatacccgcggacctttgcggcaagtgttacagctcttaaagacggtgcgtccggatgctccggtgagtttgtagtctcactgacttcacgaataaacccgcggaccctcacggtaagtgtgacagctcttaaaggtgatgtggtgaattttaaagcccttaaaagtggtatggacccaaacggtgascagcagcaagatttactgtcacgagcaaaataacaaagcctccgcaatgcggaagacaaccggagcagactgcagaggcctgcgtgcgtggccagcttttattcccttatttggccccacccatgccctgcttattggtccattttacagagtgctgattggtccattttacagagtgctgattggtccattttacagagtgctgattggtccatttttacagaatgctgattggtgcatttacaatcctctagctagacacagagcactgattggtgcatttacaatcctctagctaggcagaaaagttctccaagtccccacaaaaccca

SEQ ID NO: 925256 - DNA, 572 bp, Homo sapiens
accgagtccggagtttcttgcttccgatgcgttcgtggtctaacttcacaaacatacccgcggacctttgcggcaagtgttacagctcttaaagacggtgcgtccggatgctccggtgagtttgtagtctcactgacttcacgaataaacccgcggaccctcacggtaagtgtgacagctcttaaaggtgatgtggtgaattttaaagcccttaaaagtggtatggacccaaacggtgagcagcagcaagatttactgtcacgagcaaaataacaaagcctccgcaaygcggaagacaaccggagcagactgcagaggcctgcgtgcgtggccagcttttattcccttatttggccccacccatgccctgcttattggtccattttacagagtgctgattggtccattttacagagtgctgattggtccattttacagagtgctgattggtccatttttacagaatgctgattggtgcatttacaatcctctagctagacacagagcactgattggtgcatttacaatcctctagctaggcagaaaagttctccaagtccccacaaaaccca

SEQ ID NO: 925257 - DNA, 572 bp, Homo sapiens
accgagtccggagtttcttgcttccgatgcgttcgtggtctaacttcacaaacatacccgcggacctttgcggcaagtgttacagctcttaaagacggtgcgtccggatgctccggtgagtttgtagtctcactgacttcacgaataaacccgcggaccctcacggtaagtgtgacagctcttaaaggtgatgtggtgaattttaaagcccttaaaagtggtatggacccaaacggtgagcagcagcaagatttactgtcacgagcaaaataacaaagcctccgcaatgcggaagwcaaccggagcagactgcagaggcctgcgtgcgtggccagcttttattcccttatttggccccacccatgccctgcttattggtccattttacagagtgctgattggtccattttacagagtgctgattggtccattttacagagtgctgattggtccatttttacagaatgctgattggtgcatttacaatcctctagctagacacagagcactgattggtgcatttacaatcctctagctaggcagaaaagttctccaagtccccacaaaaccca

SEQ ID NO: 925258 - DNA, 601 bp, Homo sapiens
ttggaaggccaaggtgggaggatcacttgagcctaggagtttgagaccaatctgggcaacatggcaaaaccccgtctctacaaaaaatacaaaaattagccaggcatggcggtgtacacctgtagccccagatactcaggaggctgaggtgggagggtcaattgagcctggaaggtcgaggctgcagtgaggcatgattgcgcsactgcactccagcctgagtgacagagcaagaccttgtctcaaaaaaaaaaaaaaaaaaaaaaagggagatgtagggcacaaagttgcagttatgtaggataagtctagagatctaatgtacactatgagaatatgagaactatagttaataatatcgtactgtacactggaaatctgctaagagagtagattttaggtactcttaacctttctgccccactccacggacaaaggtaactatgagaggtgatgcatgtattaatttgcttgactgtagcaatcatttcactaagtacatatatagcaaaacatcatgttatctaccttatagacatttttttaaataaagaaacccttgagatcacatgtatttcagaattcagaacttatcagattt

SEQ ID NO: 925259 - DNA, 622 bp, Homo sapiens
atcaaaaataaatataaaataaaaatactgaaaaaaaataaaataaaataactgctgcataggccaaaaaaataaaaaataaaaaaggatctgttaccccccgccaaaaaaaaaagaaaaagaaaaaagaaaaacctgctctggcctgacactgcaggagagagaagctccagccgctcctgcctcctgtggcattacctgagccttagcgctaccgtcatcagaagtggaggctgtttatggtacatcccaagtcctgggctggatacttgagaaacgccgtacacagtgggttaataagaatttggagaaggaggaactgcatctcatatagcctggaagcccgcctgctctgtccatggcttccctttgctctctgctctctccctgaggatgactgcagacagsggctatcagagatgaacattcaatggatccctactatctgcggggcaaggacctcacctttcagacaggaggcatggctggtgtcccgggcccaacccagcctcccctgaccttctgcctcatgacctctgcatagagcccaccaaagcagaatacacctcctctcccaaacatgcccatattgttccacgtccacggggaagccatggccaat

SEQ ID NO: 925260 - DNA, 621 bp, Homo sapiens
aatacgctttatttctttctttttcctgattgtcctggccagaacttccagtactatgttgaataagagtggtgagagagggcatctttgtcttgcaccagttttcaaagggaatgcttccagcttttgcccattcaatatgatatcggctgtgggtttgtcataaacagctcttattattttgagatatattctatcaatacctagtttattgagagtttttaacaggatgggatgttcaattttatcaaagcccttttctgtatctatygagagagtcatgtggtttttgtctttggttctgtttatgtgatggattatgtttctgatttgcatatgttgaaccagccttgcatcccagggatgaagccaacttgattgtggtggataagttttttgatgtgctgctgtatttgatttgccagtattttattgaggattttcgcatcgatgttcatcaggaatcttagcctgaagttttatttttttgttgtgtctcttcccagtttcggtatcaagataatgctggcttcataaaaggagttagagagaagtccctttcttttcagttgtttggaataatttcagaaagaatggtaccagctcctctttgtacttctg

SEQ ID NO: 925261 - DNA, 621 bp, Homo sapiens
aatacgctttatttctttctttttcctgattgtcctggccagaacttccagtactatgttgaataagagtggtgagagagggcatctttgtcttgcaccagttttcaaagggaatgcttccagcttttgcccattcaatatgatatcggctgtgggtttgtcataaacagctcttattattttgagatatattctatcaatacctagtttattgagagtttttaacaggatgggatgttcaattttatcaaagcccttttctgtatctatcgagagagtcatgtggtttttgtctttggttctgtttatgtgatggattatgtttctgatttgcatatgttgaaccagccttgcatcccagggatgaagccaacttgattgtggtggataagttttttgatgtgctgytgtatttgatttgccagtattttattgaggattttcgcatcgatgttcatcaggaatcttagcctgaagttttatttttttgttgtgtctcttcccagtttcggtatcaagataatgctggcttcataaaaggagttagagagaagtccctttcttttcagttgtttggaataatttcagaaagaatggtaccagctcctctttgtacttctg

SEQ ID NO: 925262 - DNA, 634 bp, Homo sapiens
cattctcagcaaactaatacaagaacagaaaaccaaacactgcatgttctcactcataaagtgggagttgaacaatgagaacacatggacacagggtggaaaatatcacacatcagggcctattggggtaaggggctggggagggataacattaggagaaatacctaatgtaggtgacggrttgatgggtgtagtaaaccaccatggcacgtatataactatgtaacaagactgcactttctgcacatgtacccccgaacttaaagtataaaaaaaaacccagcatcttcaatggtgaaacacccaagtacacgcactggggctcatcaagaaaacaactccacccacagagaatggagaaaagcaaggcagggtgaccacacccctgggagcaacacagagccaggtaaacatcccctgcccagagaagcagtgagtgagtgagtgaccccagggacagacacttctctcatggatctttgcaacccttgagtcaggagatccccttgagaacccaccccatgagggccttcagtctgatacacagagctctgctgggtcttagcagagcagccactcaggcacacacagcaacccaagagtttagatacctgggcttcccagcaaaagcagc

SEQ ID NO: 925263 - DNA, 663 bp, Homo sapiens
cccagtggtggttgcagacctgggcatccctgcactcttgggggccaggaaagcccccatgcctccacaggctcaggagtgtctgcccccactgcctggcctatccccactcccagaacccactctgattgtggagtaaagctgaggccaagaccaggtgatattacaacctggctaggtgtgtacattcttggggcagtgctgacacaccagccccctgctgccttggccccctccaggctttggacaccmatgaccacaggagggaggccaagggtgggggttgagggcagctcagcacaggtctgcaggtgcccctcggcaggaatagcctgggtgccatggacatgattgatggtgacaggaggcagacaggcttctgggtggaaaggggcacatccctggtgaagccctacctttaagtcagggatagcctgaagtatgggggctgggctgtcaattctgggtggagtccgcagactggagtgacaacttagtgctttttccaggcctggccatgcacttcctaccttctgagaccataaataccccaaactcagccagactcagacatcaggaggatctgcctatagataggagctaccaactttgggtctcctgagagctgttctgtcactcaatgaggctcctctctgccttgct

SEQ ID NO: 925264 - DNA, 648 bp, Homo sapiens
agtggtggttgcagacctgggcatccctgcactcttgggggccaggaaagcccccatgcctccacaggctcaggagtgtctgcccccactgcctggcctatccccactcccagaacccactctgattgtggagtaaagctgaggccaagaccaggtgatattacaacctggctaggtgtgtacattcttggggcagtgctgacacaccagccccctgctgccttggccccctccaggctttggacacccatgaccacaggagggaggccaagggtgggggttgagggcagctcagcacaggyctgcaggtgcccctcggcaggaatagcctgggtgccatggacatgattgatggtgacaggaggcagacaggcttctgggtggaaaggggcacatccctggtgaagccctacctttaagtcagggatagcctgaagtatgggggctgggctgtcaattctgggtggagtccgcagactggagtgacaacttagtgctttttccaggcctggccatgcacttcctaccttctgagaccataaataccccaaactcagccagactcagacatcaggaggatctgcctatagataggagctaccaactttgggtctcctgagagctgttctgtcactcaatgaggctcct

SEQ ID NO: 925265 - DNA, 663 bp, Homo sapiens
cccagtggtggttgcagacctgggcatccctgcactcttgggggccaggaaagcccccatgcctccacaggctcaggagtgtctgcccccactgcctggcctatccccactcccagaacccactctgattgtggagtaaagctgaggccaagaccaggtgatattacaacctggctaggtgtgtacattcttggggcagtgctgacacaccagccccctgctgccttggccccctccaggctttggacacccatgaccacaggagggaggccaagggtgggggttgagggcagctcagcacaggtctgcaggtrcccctcggcaggaatagcctgggtgccatggacatgattgatggtgacaggaggcagacaggcttctgggtggaaaggggcacatccctggtgaagccctacctttaagtcagggatagcctgaagtatgggggctgggctgtcaattctgggtggagtccgcagactggagtgacaacttagtgctttttccaggcctggccatgcacttcctaccttctgagaccataaataccccaaactcagccagactcagacatcaggaggatctgcctatagataggagctaccaactttgggtctcctgagagctgttctgtcactcaatgaggctcctctctgccttgct

SEQ ID NO: 925266 - DNA, 650 bp, Homo sapiens
aggaggcagacaggcttctgggtggaaaggggcacatccctggtgaagccctacctttaagtcagggatagcctgaagtatgggggctgggctgtcaattctgggtggagtccgcagactggagtgacaacttagtgctttttccaggcctggccatgcacttcctaccttctgagaccataaataccccaaactcagccagactcagacatcaggaggatctgcctatagataggagctaccaactttgggtctcctgagagctgttctgtcactcaatgaggctcctctctgccttgctcacactccagttgtccacatacctcatttttcctggatatgggacaagaactagggacccaccaaatggtgaaatttaaaaagctgtaacacaaaaagtgctgaaacacgctccctgctcaccatgttgtgggtgatgagaaggagagaacaacttcagccctttggggagcccaggcctaggaggtccctaagccagggctgttatacmctttttggggctctgcagttcctagtgtctgcaagcttctgggtgccaccgcgttcccctcatccagatgcaggtgcttgcagcagaagccacgtgcagtaaatctggtccagttgcagcctcacatggagcaaacacc

SEQ ID NO: 925267 - DNA, 606 bp, Homo sapiens
aagaccacttccctcccaaaactgtagcaaacataaataagatgggtaggcacaggtcatccaagatgatattaagcatatataaaatatgggccatgtgcggaggttcaagccaggcacagtggctcacacctgtaatcccagcactttgggaggccgagacgggcagatcactcgyggtcaggagtttgagactagcctggccaacatggtgaaaccccatctctactaaaagtacaaagattagtgaggcgtggtggtgggtgcctgtaatcctagctactcgggaagttgagacagcagaatcacttgaactcaggaggcagaggttgtaatgagctgagattgcgccactgcactccagcctgggcaacagaacaagaccctgtctcaaaaataaataaatatatatatattcatatatattcatatatatgttcataaatattcatatatttttatatatattcatacttatattcatacatatattcatacatatagtcatacatatagtcatatatatgcatatattcatatatatgcatatatatgcatatattcatatatatgcatatatatgcatatatatatatgaatagatat

SEQ ID NO: 925268 - DNA, 627 bp, Homo sapiens
acaagactaggacaaggctgtctcttggatggagctcattggatgcaaaatttagagacaccctcactcccagggtcatgcaggtgcagagttgctcagggattacattttatttcaaagtaaaacatttttaaaaatacaagtgaccctcaaatgctacatcatacttttaacttggtgaaratgccttaagcaaaaattcagaatcaaaatttagattaaatttcaatcctatatgatggcataaatgcaaataatttaagtgagatatcaattcaataaataaataagtctagattctaactcaggctttctggctccaaaggccctgctctttccatgggtacaatgtttgaagacaattcctgcagtagggttacactgtgaatctacattttggttcttatagttttctctccatgaatcaataggtcagctgagtggagctctgaccctagaaacagaagttagacattaaaaaaaaaaattaaagtaccctcccaacccttttcaagatatcattatcaaattttataaaaataattcaattaagtaccatgtagccccgttttattttttaggagctcagttaaatccttcagaattatctggtgtatgtgagtgtgt

SEQ ID NO: 925269 - DNA, 744 bp, Homo sapiens
tggacagtgagtgcagcccagggagggtgagctgaagcagggcggggtgacacctcacccagggaagcgcaaggggtcaggggatttccctttcctagccaagggaagccatgacagactgtacctggaaaatcgggacattgccacccaaatactgcgcttttccaacagtcttaacaaacggcacaccaggagattatatcccgctccttgcttagcgagtcccacacccatggagccttattcactgctagcgcagcagtccaagatccaacttcaaggaggcagcctgactgggggaggggcgtctgccattgctgaggctggagtaggtaaacaaaatggccgggaagctcgaactgggtagagcccactgcagctcaaggaggcctgcctgcctccgtagactccacctctgggggcagggcatagctgaataaaaggcagcagaaacttctgcagtcttaaacgttcctgactgatagctctgaagagagcagtggttttcccagaatggtgtctgagctctgagaatagacagactgcctcctcaagtgggtctctgactcctgtgtagcctaagtgggagatacctcccrgtaggtgccgactgacaactcatacagccaggtgcccctctgagacgaagcttccagaggaaggatcaggcagcaatgtttgctgttctgcagcctctgctggtgataccaaggcaaacagcatctggagtggacctccagcaaa

SEQ ID NO: 925270 - DNA, 630 bp, Homo sapiens
aacacatacccaaaacacacacacacacacacacacacaaatgctgtgggccatggcaaagcctggagaaaggtttaccaattcggagcacttaagtaaatctctgtcatgatcatcattagctaaatcccaagctaactgaccagagatttcagtaactgtatacaaaaaatgtagactttacagacttattccaggaaagtcaccaagcaaataaacagcagcaatgacaacaacaaaacatgatggggagaagtaggattctgatttctggttatcttattttaaatgtccagttctctacagaaaaatatgaggcacacaaggaaacagaaaactatggctcatamatagaaagaaaatagcagtcaatataacttttttctgagcaaccaaagacattgcatttactacataacgactttaacagctattattcagagctaaacttaactgtgttaacttcagagaaccaaacaactgtgatggttaatactgagtgtcaacttgactggattgaagaatacaaagtattgatgccaggtgtgtctgtgagagtgtggccaaaggggattaacatttgagtctctggtctgggaaagacagacccacccttaatatgggtgggca

SEQ ID NO: 925271 - DNA, 590 bp, Homo sapiens
catcacattttttaatgcagtcatccatcgataaacacctagattgattacatgaccttgctactgtgaatagtgctgcaataaatatacaagtgcaggtgtctttttggattaaagacataaatgtaagatctgaaactataaaaattcccagaagaaaacctaggaaatcctcttctggacattggctgatgcaaaggatttatgaataaggcctcaaaagtaaatgcggcaaaaacacgcatagaaaaatgagacttaaagagattatgtggagcaaagaaatgatcaacagaataagcagacaacctacagaatggggggaaaatatttacaaactatgcatttaacaaaggagtaatatccagaatctgcgaagaactcwaacaacaggaaaaaaaaaacctaacaacctctttacaaagtgggcagaggacatgaacagacatttctcaaaagaagacatacgagcagccaacaaacattaaaaaatgctccacatcactaatcataagagaaatgcaaattaaaaccacagtgagacaccatctcacaccagccagaatggctattattaaaaagccagaaaa

SEQ ID NO: 925272 - DNA, 570 bp, Homo sapiens
acactacacatcagccacacaaacaagtctgcatataaccagctaacatcatgatgacaggatcaaatccacatataacaatcctaaccttgaaggtaaatgggctaaatgtcccaatcaaaagacacagagtggcaagctggataaagaactatgacccattggcatgctgtcttcaagagacccatctcacatgcaatgacaccaacaggctcaaaataaagatctggaggaaaatctaccaagcaaatggagaacagaaaaaagcaaaggttgcaatcttaatttcagacaaaacagactttaaaccaacaaagaccaaagaaggcaaagaagggccttacataagggtaaagggttcaattcaacaagacctaactatmctaaatatatatatgcacccaacacaggagcacccacattcctaaagcaagttcttagagacctttaaagagacttttactcccacacaataatagtgagagacttcaacaccccaatgacagtattagatagatcatcaaaccaaaaattaacaaagatatcccagattggaactcatcactggat

SEQ ID NO: 925273 - DNA, 570 bp, Homo sapiens
acactacacatcagccacacaaacaagtctgcatataaccagctaacatcatgatgacaggatcaaatccacatataacaatcctaaccttgaaggtaaatgggctaaatgtcccaatcaaaagacacagagtggcaagctggataaagaactatgacccattggcatgctgtcttcaagagacccatctcacatgcaatgacaccaacaggctcaaaataaagatctggaggaaaatctaccaagcaaatggagaacagaaaaaagcaaaggttgcaatcttaatttcagacaaaacagactttaaaccaacaaagaccaaagaaggcaaagaagggccttacataagggtaaagggttcaattcaacaagacctaactatactaaatatatatatgcacccaacacargagcacccacattcctaaagcaagttcttagagacctttaaagagacttttactcccacacaataatagtgagagacttcaacaccccaatgacagtattagatagatcatcaaaccaaaaattaacaaagatatcccagattggaactcatcactggat

SEQ ID NO: 925274 - DNA, 570 bp, Homo sapiens
acactacacatcagccacacaaacaagtctgcatataaccagctaacatcatgatgacaggatcaaatccacatataacaatcctaaccttgaaggtaaatgggctaaatgtcccaatcaaaagacacagagtggcaagctggataaagaactatgacccattggcatgctgtcttcaagagacccatctcacatgcaatgacaccaacaggctcaaaataaagatctggaggaaaatctaccaagcaaatggagaacagaaaaaagcaaaggttgcaatcttaatttcagacaaaacagactttaaaccaacaaagaccaaagaaggcaaagaagggccttacataagggtaaagggttcaattcaacaagacctaactatactaaatatatatatgcacccaacacaggagcacccasattcctaaagcaagttcttagagacctttaaagagacttttactcccacacaataatagtgagagacttcaacaccccaatgacagtattagatagatcatcaaaccaaaaattaacaaagatatcccagattggaactcatcactggat

SEQ ID NO: 925275 - DNA, 559 bp, Homo sapiens
tttcacagttcttgatcccaaagaggacatatggaatctgtcagtctgtggttttccaagtggcatgccaaacacctaggccactgggaacagcctaagagtcaataaaaatgtaacaaagttcaccaaggactatactggccagatcagtgagaatggccttgagctgtgcccacatacttgagagaaccacattcattttctgcatagctgccactgagattcaacagccccagcagccttgctgatattgttgtaattcaactcagccaaaccatcagtgaaccagccataggcatttaggggaccactgtggactgaaggctccactgaggtagcagcttagcctcaggtgacagaaagggagacaaagtttctaccaaaaagatagttaccatgttgtatgtaaagttgctrccaggatgctaagatactgctcaggccagcctggatgcattcataaatatgctgcttccttttgccagccaaggctcggtgggcccttcccaacttgtcattgattccaaacagacccgcccgctgcccaatgtggatatca

SEQ ID NO: 925276 - DNA, 736 bp, Homo sapiens
gactttttttggttggtaagctattaattattgcctcaatctcagagcctgttattggtctattcagagattcaacttcttcctggtttagtcttgggagggtgtatgtgtcaaggaatttatccatttcttctaattttctagtttatttgcgtagaggtgtttatagtattctctgatggtagtttytatttctgtgggatcagtggtgatgtgtctggaatttgtgggttcttggtctcagtgacttcaaaaatgaagctgcagaccctcacagtgagtgtcacatttcttaaaggcggtgtgtctggagtttgttcattctgatgctcagatgtgttcggagtttcttccttctggtagtttcatggtctggctggcttcaggagtgaagctgcagaccttcgcggtgaatgttacagctcttaaaggcagttgtggacccaaagagtgagcagcagcaagatttactgcaatgagtgaaagaacaaagcttccacagcatgcaagggcacccaagtgagttgccactgctggctcaggaagcctgcttttattctcttatgtggtcccacccacatcctgctgattggtccattttacagagagccaattggtccattttacagagaggtgattggtccattttgacaggatagtgattggcgcatttacaatccttgagctagacacaaaagttctccacgtccccactagattagctagatacagagtg

SEQ ID NO: 925277 - DNA, 736 bp, Homo sapiens
gactttttttggttggtaagctattaattattgcctcaatctcagagcctgttattggtctattcagagattcaacttcttcctggtttagtcttgggagggtgtatgtgtcaaggaatttatccatttcttctaattttctagtttatttgcgtagaggtgtttatagtattctctgatggtagtttctatttctgtgggatcagtggtgatgtgtctggaatttgtgggttcttggtctcagtgacttcaaaaatgaagctgcagaccctcacagtgagtgtcacatttcttaaaggyggtgtgtctggagtttgttcattctgatgctcagatgtgttcggagtttcttccttctggtagtttcatggtctggctggcttcaggagtgaagctgcagaccttcgcggtgaatgttacagctcttaaaggcagttgtggacccaaagagtgagcagcagcaagatttactgcaatgagtgaaagaacaaagcttccacagcatgcaagggcacccaagtgagttgccactgctggctcaggaagcctgcttttattctcttatgtggtcccacccacatcctgctgattggtccattttacagagagccaattggtccattttacagagaggtgattggtccattttgacaggatagtgattggcgcatttacaatccttgagctagacacaaaagttctccacgtccccactagattagctagatacagagtg

SEQ ID NO: 925278 - DNA, 736 bp, Homo sapiens
gactttttttggttggtaagctattaattattgcctcaatctcagagcctgttattggtctattcagagattcaacttcttcctggtttagtcttgggagggtgtatgtgtcaaggaatttatccatttcttctaattttctagtttatttgcgtagaggtgtttatagtattctctgatggtagtttctatttctgtgggatcagtggtgatgtgtctggaatttgtgggttcttggtctcagtgacttcaaaaatgaagctgcagaccctcacagtgagtgtcacatttcttaaaggcggtgtgtcyggagtttgttcattctgatgctcagatgtgttcggagtttcttccttctggtagtttcatggtctggctggcttcaggagtgaagctgcagaccttcgcggtgaatgttacagctcttaaaggcagttgtggacccaaagagtgagcagcagcaagatttactgcaatgagtgaaagaacaaagcttccacagcatgcaagggcacccaagtgagttgccactgctggctcaggaagcctgcttttattctcttatgtggtcccacccacatcctgctgattggtccattttacagagagccaattggtccattttacagagaggtgattggtccattttgacaggatagtgattggcgcatttacaatccttgagctagacacaaaagttctccacgtccccactagattagctagatacagagtg

SEQ ID NO: 925279 - DNA, 736 bp, Homo sapiens
gactttttttggttggtaagctattaattattgcctcaatctcagagcctgttattggtctattcagagattcaacttcttcctggtttagtcttgggagggtgtatgtgtcaaggaatttatccatttcttctaattttctagtttatttgcgtagaggtgtttatagtattctctgatggtagtttctatttctgtgggatcagtggtgatgtgtctggaatttgtgggttcttggtctcagtgacttcaaaaatgaagctgcagaccctcacagtgagtgtcacatttcttaaaggcggtgtgtctggagtttgttcattctgatgctcagatgtgttcggagtttcttccttctggtagtttcatggtctggctggcttcaggagtgaagctgcagaccttcgcggtgaatgttacagctcttaaaggcagttgtggacccaaagagtgagcagcagcaagatttaytgcaatgagtgaaagaacaaagcttccacagcatgcaagggcacccaagtgagttgccactgctggctcaggaagcctgcttttattctcttatgtggtcccacccacatcctgctgattggtccattttacagagagccaattggtccattttacagagaggtgattggtccattttgacaggatagtgattggcgcatttacaatccttgagctagacacaaaagttctccacgtccccactagattagctagatacagagtg

SEQ ID NO: 925280 - DNA, 596 bp, Homo sapiens
aagggcacccaagtgagttgccactgctggctcaggaagcctgcttttattctcttatgtggtcccacccacatcctgctgattggtccattttacagagagccaattggtccattttacagagaggtgattggtccattttgacaggatagtgattggcgcatttacaatccttgagctagacacaaaagttctccacgtccccactagattagctagatacagagtgttgacacaaaggttctccaagtccccaccagagtagctagagagtgtcgattggtgcatttacaatcccttagctagacataaakgttctccaagtccccaccagactcagaagcccagttggcttcacctagtggatcctgcagcaaggctgcaggtggagttgcctgccagtcctgtgccatgtgcctgcactcctcagcccttgagtggtcgatgggactgggcgccgtggagcagggagcagcactcttcagggaggctcaggctgtgcaggagcccacagtgagggggaggctcaggcatggcggactgcaggtcccaagctctgccccgtggggaggcagctaaggcctggcaggaagttg

SEQ ID NO: 925281 - DNA, 581 bp, Homo sapiens
tggagctacattcaaacacccccagtggatgcctgaaaccacagattacactgaacctgatatacactaccttttcctatatgtacacacctaaaataaagtttaatttataaattaggcaaagtaagaaactaacaacaataactaattataaaatagaacaattataataatattttgtaatgaaatatatattaatgttgtctctcatctcaaaatatctcattgtactgcactcactcttcttgtaatgatataataaaatgcctacatggtgaggtaagtgtgtgactagtgttggcattgtaacataaatttgaaaatacagaaataaacaattctcragttttaaattgtgcattgttctgagtggtataataaaatctcacaccatcctgctttattctgctcagatttttcttactcagtaggtatattggttgtcaactcaactatctcactatcacagtgcttggtgttcaagtagccatttaaaaaaatgtattatactttaagttctgggatacacgtgcagaacgtgcaggtttgttacacaggtatacacgtgccatggtggtttg

SEQ ID NO: 925282 - DNA, 552 bp, Homo sapiens
caaaaacacaggcaacaaaaacaaaaatagacaaaactgactgtgctaaactattttgattctgcatagcaaaggaaactatgaatagggtgaagagaaagtatttacaaactcttcatcctacaagggactagtatccagcatatacaaggaactcaaacaacttggcagaaaaaaaaatttgaaagtagacaaattatcttaatagacatttctcaagagaagacatattaatggccagcaagtatatgaaaaaatgctcatccttaattattagggaattacaagtcaaaaccacactatgatatcatcttatccaagatagattatttgttataaaaaagacagaaaaataaatgctcttaaggatgcagagaataaggaactcatattrttaatgggaacattaattggtagagccattatggaaaacagcatgggggatttcaaaaaagtgaaaatagaggtaccataagatccagaaatattgtcactgggtatttattcaaaggaaaggaaacatgtatatcaaagagattcctgcacccccat

SEQ ID NO: 925283 - DNA, 619 bp, Homo sapiens
tcctacttataaaaatactaagaatggaaaactatgtacagtcacgagccacataataacggtggcctcgtaagattataatggagctgaaaattcttatcacctagtgatatcgtagctatcgtaatgttagcacaacacatcactcacgtgtttgtggtgatgctggtgtaaacacacctactgcactgccagtcatataaaagtctagcacatgcagttrtgtacagtacataatacttgataacgataatgaatatgttactggtttatatatttactatactatatttttattgctattttagagtgtaccctttctatttatatataaaaaagaagttaactataaagcagcctctgacaggttcatcaggaggtattccaaaagaaggcactgttatcgtaggagatgacagctctgtacgtgttactgcccctgaagaccttccagtgggacagatgtggagatgaaagacagtgatattgatgatcctgaccctgtgtaagcctaggctaatgtgagtgtttgtgtcttagtttttaacacaagaattttaaaagtaaaaatacaaattttaataggcaaaaagtagagaataaggatataaagaaaaat

SEQ ID NO: 925284 - DNA, 573 bp, Homo sapiens
cattgatgttcatcagggataaaactggctagccatatacagaaaacagaaactgtaccccttccttacaccttatacaaaaattagctcaagatggactaaagacttaaatgtaaaacctaaaaccataaaaacctgagaggaaaacctaggcaataccattcaggatataggcatgggcaaagacttcatgactaaaacaccaaaagcaatggcaacaaaagycaaaattgacaaatggcctctaattaaactaaagagcttctgcacagcaaaagaaactatcatccaagtgaacaggcagcctagagaatgggagaaaatttttgcaatctatccatctgacaaaagtctagtatccagaatctaaaggaacttagacaaattacaagaaaaaaaaaacccatcaaaaagtgggcaaaggatatgaacagacgcttctcagaagaagacatttatgtggccaaaaaacatatgataaaaagctcatcaccactgttaattagaacaatgcaaatcaaaaccacaatgagataccatctcatgccagttagagtggtgatcaaaaaagtc

SEQ ID NO: 925285 - DNA, 572 bp, Homo sapiens
gctcaagttatcctcccacctcagcctcctgagtagctggaactacaggtgcacaccacctcacccagctgatttttgtattttttgtagagacatggttttgccatgttgcccaggctggtctcaaactcctggactcaagtgatctgcccgcctcagcctcccaaaatgctgggattacagtcatgagccactgcacattgcctgttttattgcattatttgtctttttctcattgatttttaaaaactcygtataggctggattgaagccttctgtaaactcttaagtgtcacaattatcttctcatgctccatttcttctctacactctcttaatggggtatttattttgcctatctttaaaaaaattgtcattgcaatgtataacatacctacacataacacacatacaaaagatatataactcaataatttattacaaaaagaactatcaggtaaacaacccaggtcaagaaatgggatattagtgcttcgaaggccctctcttgactgcttcaaaccattgactgttcctccctcaaaacaaccaccagtataagttctatggta

SEQ ID NO: 925286 - DNA, 707 bp, Homo sapiens
cccatcaatgaatttgtccactttgtgatcagcagttgctttatcacaagtctttacagatttaatgctacgtcttttcttaaatttctgcaaccagcctgttgaatagtcaccgttcccttcaattttcagttcattgtgatagatctatgcttatttcataatcaacatactattaaatggtatacgttcattgtgacactgatccattattttaatataggaccaagatcttcagtttcagctttatgcagtatttatctgtttttcactaacctccatacatcactttcagcacagaacttcaacagtttattcttctgttcttcaggtcatatatagtggtcattccaaaactatactcttctgtaagatgtttcaggcttacactgctgcatattttctccagcaacttggctttctgtgctgtagrtaaacataaacacttcctctttttcttatcattgttacccatagggatatctgcagacatttttgacattttccacatctttataccagaaagcagaaaataagcaaaaacaataataacaacaacaacaacaaaaagtgagtaatgcacataggtcttggccccacgtagggcatcatgtggaacctagcattggcatgtcccgcctgcatatgtgtatgtgccattttattagcctttgtgagtgtgctgacataggggagtctgggcatgt

SEQ ID NO: 925287 - DNA, 707 bp, Homo sapiens
cccatcaatgaatttgtccactttgtgatcagcagttgctttatcacaagtctttacagatttaatgctacgtcttttcttaaatttctgcaaccagcctgttgaatagtcaccgttcccttcaattttcagttcattgtgatagatctatgcttatttcataatcaacatactattaaatggtatacgttcattgtgacactgatccattattttaatataggaccaagatcttcagtttcagctttatgcagtatttatctgtttttcactaacctccatacatcactttcagcacagaacttcaacagtttattcttctgttcttcaggtcatatatagtggtcattccaaaactatactcttctgtaagatgtttcaggcttacactgctgcatattttctccagcaacttggctttctgtgctgtaggtaaacataaacacttcytctttttcttatcattgttacccatagggatatctgcagacatttttgacattttccacatctttataccagaaagcagaaaataagcaaaaacaataataacaacaacaacaacaaaaagtgagtaatgcacataggtcttggccccacgtagggcatcatgtggaacctagcattggcatgtcccgcctgcatatgtgtatgtgccattttattagcctttgtgagtgtgctgacataggggagtctgggcatgt

SEQ ID NO: 925288 - DNA, 608 bp, Homo sapiens
tgaatgggtaatgaattttgtcaaaggcattctcaggatctatagaaatagacatataaattttccttagatttatcaatatagcgtattgtataaatagatttcctaatgttgagccaacttgtatcctttaaatatatgctatttcgtcatattgtattattattattattattattattattatgtatatattttttgmgacagagtctctctctgttgccaggctggagtgtagtggtgccatctcaggtcactgcaatctcctcttcctgggttcaagtgattccctagcctcagcctcccgagtagctgggactacaggggcacgccaccacattcagctaattttatttgtattttaatagagaacggggtttcaccctgttggccaggatggtctcgatttcctgacctcatgatccacccaccttggcctcccaaagtgctgggattacaggcgtgagccaccacattgggcctgtatcattctttttaatgtggtagtggattctatttgctaatattttgtttgctgattcccttaacttttgccacacctttaaaaagaccccatcccaatttttttttttttttttcaaaatccc

SEQ ID NO: 925289 - DNA, 592 bp, Homo sapiens
ggataagttttcttgattatttcaaccaacagaaaataacaaaagcaatgctatgtggctttaaaggccatagagcctctgagttgtttgcttattcttgaagtattctgctgtcatagaagcaatctgactggcctgagaccaccatgctatgagaaagaccaaactagctcatatggaaataccagactagcacatggcarggccctgagattacataaagagagagatgcctagccaaccttcagctgatttggctctctgttactttagctctaaccattatttggcagaaaccacatgagaaaccctaagccacaacttcttagctgatttctttccaaattactgactcacataaaccttgcaaaataataaaatgattcttgttaagtcactaagtttctgggtgatttaatatgcatcaatagatcactgaaacacatggctcttcagaatttgggcaaaagatctctattttatgtgcctacatctacccatcattgaataaggactgatctgaaattcaggagtgacgttgggcaaggtggctttcttcaacctagggcaattctcaaaaagtgttgatatc

SEQ ID NO: 925290 - DNA, 706 bp, Homo sapiens
cttgctttatgaatctgggtgttcctgtattgggtgcatatatatttgggatagttagctcttcttgttgaattgatccctttaccattatgtaatggccttctttgtctcttttgatctttgttagtttaaagtctgttttatcagagacaggattgcaacccctgcctttttttgttttccatttgcttggtagatcttcctccatccctttattttgagcctatgtgtgtctctgcacgtgagatgggtttcctgaatatagygcactgatgggttctttactctttatccaatttgccagtctgtgttttttaattggagcatttagcccatttacatttaaggttaatattgttatgtttgaatttgatcctgtcattatgatgttagctggtgattttgctcgttagttgatgcagtttcttcctagtctcgatggtctttacaatttggcatgtttttgcagtgactggtaccggttgtgcctttccgtgtttagtgcttccttcaggagctcttttagggcagacctggtggtgacaaaatctctcagcatttgcttgtctgtaaaatattttatttctccttcacttatgaagcttagtttggctggatatgaaattctgggttgaaaattctttcctttaagaatgttgaatattggtccccactctcttctggcttgtggggtttctgccgagag

SEQ ID NO: 925291 - DNA, 595 bp, Homo sapiens
tgtgggtcacagacatcaagtactttacaaggtaatatcacaaggcaagtggaggcagggcaagatcacaggaccacagaaccggggcaaaattaaaattgctaatgaagtttcaggcaccattgtcattgataacatcttatcaggagacagggtttttgagatcaaccggtctgaccaaaatttattaggggggaatttcctcttcctaataagcctaggagtgctatgggagactggggtctatttcacccctgcagtcttgaccataagagacaggtgcacytgggggggggggggctttttataagcctatacctccaggtgcatgttctctttcccagggatcttccatgctgagaaaaagaattcagtgatatttctcccatttgcttttgaaagaagagaaatatggctctgttccgcccagctcaccaccggtcagagtttaaggttatctctcttgtttcctaaacattgctgttatcctgttcttttttcaaggtgcccaaatttcatattgctcaaacacacacgctgtacaatttgtgcagttaatgcaattattacagggtcctgaggcgatatacatcct

SEQ ID NO: 925292 - DNA, 553 bp, Homo sapiens
accattggagctcagaaaacagggagttttcatttctgagagctgactccctagtctgcggtagatagagagcagaggtggggctgggagtgtggagaaagagcattcagaattggcccacactggcaagtttccaggctctgaacaaggttgggaggaaaatgatttgatgagcttttcaatcctgttccatttcagccttgctcagggracgtatgttgagggaattttttttccagaagtacatatggaaatggcaaggttggtgtttgatggtgtgacagagaaagccacactggggaaatagtgtgctttgaaatcaggtcacttagaaaaaaataaatccagaaaagtcaaagcttaaatgaagctatcaatttagggacttttcacagccttacttactgggttctctttctaacttaaaaactaggaaaggcacttctgagtctctatcttggtaaagtttgtttgaatctcttttatttttacagtgcacacattgatctcaagttttaagatcctttttatcactgtagctagaagtaaaaaa

SEQ ID NO: 925293 - DNA, 564 bp, Homo sapiens
tcttcactgacaatatgattttatacctagataaccccaaagactccaccaaaatgctcctggaactgacaaataactttagtaaagtttcaggatacaaaatcaatgtacaaaaatcaatagcatttttatacattaataatattcaagctaagagccaaatcaagaatgcaatcctatttacacttgccacagaaaaactaggaatacttctaaccaagatggtaaaagatctctccaaggagaactacaaaatattgctgaaataaaccttagataacacaaaaagaattccatctcatggattggaagaatcaatatcattaaagtaaccatactgcctayggcaatctatagatccaatgctattcctatcaagctatcaacataattttagaaaaaattattctctaattcatgtggaaccaaaatgagcctgagtagccaaagcaatcttaagcaaaaagggcaaagctggaggcatcatattaccagactttaaactgtgctgtaaggctacagtaaccaaaatagcatggtactggtacaaaaacaggtacatag

SEQ ID NO: 925294 - DNA, 543 bp, Homo sapiens
gcttcagcagacttaaaccttcctgcctgctggatctgaagagagcagcgaatctcccagcacagcgcttgagctctgctaagggacagacttcctcctcaagcgggtccctgacccctgtgcctcctgaccaggagacacctcccagcaggggtcaacagayacctcatacaggagagctccggctggtatctagtgggtgcccctctgggacgaagcttccagaggaaggagcaggcagcaaactttgctgttctgcagcccccactggtgatacccaggcaaacagggcctagagtggacctccagcaaactacagcagacatgcagaagagaggcctgactgtagagggaaaactaacaaacagaaagcaataacattgacatcaacaaaaaggatgcccatgcaaaaaccccattcaaaggtcatcagcatcaaagatcaaaggtagataaatccatgaagatgaggaaaaaccagtgcaaaaatgctgaaaattccagaaaccagaattcctcttctcctccaaaggatcacaactc

SEQ ID NO: 925295 - DNA, 543 bp, Homo sapiens
gcttcagcagacttaaaccttcctgcctgctggatctgaagagagcagcgaatctcccagcacagcgcttgagctctgctaagggacagacttcctcctcaagcgggtccctgacccctgtgcctcctgaccaggagacacctcccagcaggggtcaacagacacctcatacaggagagctccggctggtatctagtgggtgcccctctgggacgaagcttccagaggaaggagcaggcagcaaactttgctgttctgcagcccccactggtgatacccaggcaaacagggcctagagtggacctccagcaaactacagcagacatgcagaagagrggcctgactgtagagggaaaactaacaaacagaaagcaataacattgacatcaacaaaaaggatgcccatgcaaaaaccccattcaaaggtcatcagcatcaaagatcaaaggtagataaatccatgaagatgaggaaaaaccagtgcaaaaatgctgaaaattccagaaaccagaattcctcttctcctccaaaggatcacaactc

SEQ ID NO: 925296 - DNA, 750 bp, Homo sapiens
tcttcaaattgttcttaaatttatttttgatttgactgtgtttttttctttaatttcttcttttccctcttaaggatctgactttaatgtttatcatttattatagcctaatttgattcttaatgcttttagtggggaagactctgtaggagttccttaaagagagtttttgtgcgctggctttcccagacgctggttgcagtaaccatgcatttggcctgtgggtaagttcactgtctcctgtagggttggaatggctaggatctcttgaagcttatctcattctcccatggtgtacacctttttatttatttaattttttcccagtattttatttactaagctgatgattcagccttcaggccaataggagaggtatccctggggtaggtattggtggtagctaaagagatgcrtagatatatctaatggtgggcagaggtcccagccttgatgaaggtgcctgggggagctctaaattaaatgtgctgaggttttatcagagtgaagggtggaagccacctcagctcccctgccaggcaagcaggaaagctatccaccttcctgtcccagtattccagctattcagatcagacaggtaactctttgcatctgtaggaatgttgatgttccaagtagagaggagttgtgactctgcaagcctgaatttgagaagtgctcctcctgtggggatgcaatcaccctaaattgttcctggaaggccatctatatgtgcatctacactgcatt

SEQ ID NO: 925297 - DNA, 639 bp, Homo sapiens
acctcacatcacacatacacaagtatttgaaatgaaacataaacaaaacataaaagctaaaactacaaaacccaagaagaaaactttaagataaagtcttcatgatattggaatattcaaggatttattagcacacagaaggcactacccatataataataaattaataaattcattttttacctgactcaaaaacttttgtttttcaaaatcaccaagaaaaatatgaagtgagccacaggcayttgcaatacatttatctgacaagagacttgacaaaaaattcaatgtaaaaaatgagcaaaagactcaatgaacattttggaaaaaaaattcatgaatgatcaataaacaaacttttaacatctcaatatcactcttcaccagagaaaccaaaatgaattactaccgcatacccactcgagtgatttaaatgacagacaaaatttcccaacatcagttactgccgaggctgtggagctcctgaagcattcataccaatgtcggcaggggtgtaaaattgcacacccactttcaataatgttatactactttttaaagaagcttaaaccgtgtgcctaccctgtgactcctagtaattccaacaaaagtgatgaaaatataaagttgtgtaaacaa

SEQ ID NO: 925298 - DNA, 674 bp, Homo sapiens
cttttctctacaggtctttatttggaagcctctttcctctccatcttcataaataatccaaaacaggcactttcagcagctcctctttcatgcacgtaattgaagtgggcctctctgagataagacatctctctaaatcattcatcagataaggaaacacacagagaggggcactattccttctcctgcaatattctgccattagacacagtacaasctcgcgtgtcctgcagatgtggcaggactccactcaggagcaggactccacttgggggctccactctgtcccagtgaccgactcagccagattccccgaattgcagggaggtactgccctccccagcttcttaagatgtttttgacaccctgaggaatcagaaggatggaataaagctgaatgctagtttagctaccaggtcacagtacacgccaaccagagcaagtttggcagcaaggtcctgggcttcagatattcaggcttgggtttgagttctggctctgccacttcttagctgtgtgacttgggaaagttacttaacactttcttcccccaacctcgccaaagtctgttgtctcatgttttaaagttaattttttttttttttaagaatgagcggataaaagaaactacctgtccagttgcactaaggattaaaaggcataggggcaaaaac

SEQ ID NO: 925299 - DNA, 628 bp, Homo sapiens
tccttagcatccacgtcaaccccgcctcccagccgctttcccagcacccacctcttgtctcattttgcacataactaacaggatgatattccaaagcccagctaaggaaggtgctagtttgtccgaataatgtctggcactcagggcccctttctagctgcttcccctcctctgcttctctgtgtggctcctagaccctggcttggggaggcatgccaccttgcctggggctgtccccctgccacctggctccacctgagggcccctagccatccttctccagctcggtagctgctccacatggagccctccagaggcagtgaggacacacttgcccccgttcctagagatcgctcgccctgaccrtgcaccctctggcccagaggttactggggctgaaagttacaagtgccttgggaccatgtctcactcatttaaggcacccacagtgcccagacctagtaggtgctcaagaaatgcttgttggtctgttactgacagcagcctcctgggctgggtgctcctcaggtgtggcttcattaatctccacgttcccagaacctggaaccctgccaggctgagagtcatcactcaattcgtgcgtgttgagtgaataggcagtgaatga

SEQ ID NO: 925300 - DNA, 785 bp, Homo sapiens
tacccagtaatgggatggctgggtcaaatggtatttctagttctagatccctgaggaatcgccacactgacttccacaatggttgaactagtttacagtcccaccaacagtgtaaaagtgttccgatttctccacatcctctccagcacctgttgtttcctgactttttaatgattgccattctaactggtgtgagatgatatgctcgcttttctctctcctgtcttctctctgctttctctccaactgccagccaatcggctcaggcaagtccatcccatcctgagagccccaggcccccctttgacctctaaacagattcctcctcttctcagagacttccctttccaagcctgcctgggcggctgttctgtgacttggcagtggctcccccagccccaaaggcagcccccttcatctgtgacttcgtctattgttgcggtgagctgacacatccaggtgtgaccgttgctgaaaacttgtgcccccctctgtggtatgcccctgccctgttctagaaatatctacaaatacccatatacatatacacacacacacacacacacacacacacacacayacacctacatgtggccaaccgcctcgcctctagcgctgggaatcagtcaccgtgctgtccttttggagtcttgtggccaaacaagagaaagctaacccctgacattgcccctccaaagtgcgctaccttcagtgagcctccctgtcacgcccagcctatggagagacacaccccgccatccctcccgccccccccccccccacca

SEQ ID NO: 925301 - DNA, 580 bp, Homo sapiens
tttgtaattctctttgtagacatctttcacccccctggttagctatgttcctagatattttatttttttgtggcttttgtgaatgggattgcattcttgatttggctgtcagcttggacattgttggtgtatagaaatgccactgatttttgtatcctgaaactttgctgaaggtgtttatctgatccagcagcttttgggcagagattatggggttttctagatataaaatcctatagtctgtgaaaagakgtagtttaacttcctttcttcttattttaatggttttaattttgtttccttgcctgattgctgtaactagggcactatgtggaataggaatggtaagaataggtattcttgtcttgttacagttcacaaggggaatgcttgtgaacagtttttgcctgttcagtatgatgttagctagtggtatgtcatagatggctcttattattttaaggtacattctttcaatgccattttgttgatggttattatgtttagagatgttgaatttcatcaaaagcttcttctgcattgagataatcatgtagcttttgtttttagtactgtttaa

SEQ ID NO: 925302 - DNA, 660 bp, Homo sapiens
cggtcaggagtgggggtcacaaggtactcagtgggggagcttttgagccaggatgagccaggagaaggaatttcacaagacagtgtcatcagttaaggcaggaacaggccattttcacttcttttgtggtggaatgtcatcagttaaggcaggaaccggccatctggatgtgtatgtgtaggtcacaggggatatgatggcttagcttgggctcagaggcctgacattcctgtcttcttatataaatatgaaaaataaaacgacatagtggtaaagtgttggggcggtgaaartttttggggacggtatggagagataatgggcgatgtttctcagagctgcttcgagtgggattggggtggcgtgggaacctagagtgggagagattaagctgaaggaagattttgtggtaaggggtgatattgtggggttgttagaagaaacatttatcatttagaatgattggtgatggcctgggtacagttttgtatgaattgaaaaacggaataagagaaggagaaaagcaggtataaagggtctaagaattgggaggtcctaggacatttaattagagtgcctaaggaggttcagcatagccttgccagtaaagattatttatttacttcaagagtttagagtggcagtttggggatagcacca

SEQ ID NO: 925303 - DNA, 660 bp, Homo sapiens
cggtcaggagtgggggtcacaaggtactcagtgggggagcttttgagccaggatgagccaggagaaggaatttcacaagacagtgtcatcagttaaggcaggaacaggccattttcacttcttttgtggtggaatgtcatcagttaaggcaggaaccggccatctggatgtgtatgtgtaggtcacaggggatatgatggcttagcttgggctcagaggcctgacattcctgtcttcttatataaatatgaaaaataaaacgacatagtggtaaagtgttggggcggtgaaaatttttggggacggtatggagagakaatgggcgatgtttctcagagctgcttcgagtgggattggggtggcgtgggaacctagagtgggagagattaagctgaaggaagattttgtggtaaggggtgatattgtggggttgttagaagaaacatttatcatttagaatgattggtgatggcctgggtacagttttgtatgaattgaaaaacggaataagagaaggagaaaagcaggtataaagggtctaagaattgggaggtcctaggacatttaattagagtgcctaaggaggttcagcatagccttgccagtaaagattatttatttacttcaagagtttagagtggcagtttggggatagcacca

SEQ ID NO: 925304 - DNA, 660 bp, Homo sapiens
cggtcaggagtgggggtcacaaggtactcagtgggggagcttttgagccaggatgagccaggagaaggaatttcacaagacagtgtcatcagttaaggcaggaacaggccattttcacttcttttgtggtggaatgtcatcagttaaggcaggaaccggccatctggatgtgtatgtgtaggtcacaggggatatgatggcttagcttgggctcagaggcctgacattcctgtcttcttatataaatatgaaaaataaaacgacatagtggtaaagtgttggggcggtgaaaatttttggggacggtatggagagataatgggcgatgtttctcagagctgcttcgagtgggattggggtggcgtgggaacctrgagtgggagagattaagctgaaggaagattttgtggtaaggggtgatattgtggggttgttagaagaaacatttatcatttagaatgattggtgatggcctgggtacagttttgtatgaattgaaaaacggaataagagaaggagaaaagcaggtataaagggtctaagaattgggaggtcctaggacatttaattagagtgcctaaggaggttcagcatagccttgccagtaaagattatttatttacttcaagagtttagagtggcagtttggggatagcacca

SEQ ID NO: 925305 - DNA, 660 bp, Homo sapiens
cggtcaggagtgggggtcacaaggtactcagtgggggagcttttgagccaggatgagccaggagaaggaatttcacaagacagtgtcatcagttaaggcaggaacaggccattttcacttcttttgtggtggaatgtcatcagttaaggcaggaaccggccatctggatgtgtatgtgtaggtcacaggggatatgatggcttagcttgggctcagaggcctgacattcctgtcttcttatataaatatgaaaaataaaacgacatagtggtaaagtgttggggcggtgaaaatttttggggacggtatggagagataatgggcgatgtttctcagagctgcttcgagtgggattggggtggcgtgggaacctagagtgggagagrttaagctgaaggaagattttgtggtaaggggtgatattgtggggttgttagaagaaacatttatcatttagaatgattggtgatggcctgggtacagttttgtatgaattgaaaaacggaataagagaaggagaaaagcaggtataaagggtctaagaattgggaggtcctaggacatttaattagagtgcctaaggaggttcagcatagccttgccagtaaagattatttatttacttcaagagtttagagtggcagtttggggatagcacca

SEQ ID NO: 925306 - DNA, 841 bp, Homo sapiens
ctggctgttttggatttccaataatgagtcagcactacccctatcagacagtgtagcaagacccaggaaagcagagtcttcactggagtgggactccaggaacagataaacagatgatcaagtacaaaggctaagtgagaaaaagacttcttaattctttgcaaactggttgtggcttayttaatgttgagtttagctatattggcaaagtgtgtaccgatttgttcagcaagcccttattttttattttttttttattttttatttttttttttttgagacggagtctcgctctgtcgcccaggctggactgcggactgcagtggcgcaatctcagctcactgcaagctccgcttcccgggttcacgccattctcctgcctcagcctcccgagtagctgggactacaggcgcccgccaccgcgcccggctaattttttgtatttttagtagagacggggtttcaccttgttagccaggatggtctcgatctcctgacctcatgatccacccgcctcggcctcccaaagtgctgggattacaggcgtgagccaccgcgcccggcctcagcaagcccttattgataacattgctgggttctgtgggagggtatcaaacaaacaacaaaaaagatccatcattgccagcaggattaaatgctgtgaaacaactggactcatacatacacatcatttaattctttattatttttaagacaccattttctttcaaagcactcaagttctaacctaatagtcaatgctatttgtaccttacttctagcatttattttgttgccatatccagtttcatagtttgcttacctatttgctggtttattt

SEQ ID NO: 925307 - DNA, 841 bp, Homo sapiens
ctggctgttttggatttccaataatgagtcagcactacccctatcagacagtgtagcaagacccaggaaagcagagtcttcactggagtgggactccaggaacagataaacagatgatcaagtacaaaggctaagtgagaaaaagacttcttaattctttgcaaactggttgtggcttacttaatgttgagtttagctatattggcaaagtgtgtaccgatttgttcagcaagcccttattttttattttttttttattttttatttttttttttttgagacggagtctcgctctgtcgcccaggctggactgcggactgcagtggcgcaatctcrgctcactgcaagctccgcttcccgggttcacgccattctcctgcctcagcctcccgagtagctgggactacaggcgcccgccaccgcgcccggctaattttttgtatttttagtagagacggggtttcaccttgttagccaggatggtctcgatctcctgacctcatgatccacccgcctcggcctcccaaagtgctgggattacaggcgtgagccaccgcgcccggcctcagcaagcccttattgataacattgctgggttctgtgggagggtatcaaacaaacaacaaaaaagatccatcattgccagcaggattaaatgctgtgaaacaactggactcatacatacacatcatttaattctttattatttttaagacaccattttctttcaaagcactcaagttctaacctaatagtcaatgctatttgtaccttacttctagcatttattttgttgccatatccagtttcatagtttgcttacctatttgctggtttattt

SEQ ID NO: 925308 - DNA, 607 bp, Homo sapiens
ttgttattacccaccttctgaagcctacttctgtcaatttgttaaactcattctccatccagttttgttcccttgctggcaaggagttgtgatcctttggaggagaagaggtgttctggtttttggaattttcagcctttttgtgctggtttctccctatcttcatggatttatctacttttggtcttgatgttggtgaccttcrggtggggtctctgagtagacaccctttttgttgatgttgatgctcttcctttcagtttgttagttttccttctaagagtcaggcccctctgctgcaggtctgctggagtttgctggagtttcactccagaccctgtttgcctgggtatcaccagcagaggctccagaacagcaaagattcctgcctgtttcttcctctggaagcttcaccccagagggacacccaccagagctctcccgtatgagatgtctgtcggtccctactgggaggtgtttcccagtctggatacatgggggtcagggacccacttgaagaggtagtctggcccttatcagaactcgaactctgtactgggagatctgctgctctcttcagggctgtcaggcagggaggtttaaatct

SEQ ID NO: 925309 - DNA, 548 bp, Homo sapiens
ttttctctggtgcctccttgagtagcttaatgattgactttctgaattgtttttctggcaattcagggatttcttcttggtttggatctattactgatgagctagtgtgatcttttgggggtgttaaagaaacttgttttgacatgttgccagaattgtttttctagttccttctcattttggtaggctacatcagagggaagatctggggctcatgagctgctattcagattcttttattccacagggtgcttgctggatgtgggtgctcagggatgtggcttcctgagaaccaaactgaagtgactgttatttctcttctggatctagctgcccagtggagctaycgggctctgggctggtactggggtgtgtctgccaagactcctgtgatgtcatccatcttcaggtctctcagccctgtataccagtacctgctctggggaagataacagtggtatgaagtggatctgtgagggtccttggttgcattttttttattgtgctagttttcggttagtttgactccagccagaaggtggcacttt

SEQ ID NO: 925310 - DNA, 470 bp, Homo sapiens
ctgccagccggctctcccttgccttcagggtcagcagcttaactatttctctctctggtaacgagtgcacctgtacagtgttggcagggcattatactttttacagacaatagtggtgtagagccaagtgatgaccttcccrttttatggcttgatagctgtttatacattatatatggaattgtgtgcctgtgctccaaactcactgagtcatgcaggatgtttacctcagcctctcctgcctggctgcagtgcagccatattcctcacaagatgctagcgaggttacagagaaaaaaggaatgcttttatactcttggtgggagtggaaattagttcaacaattgaggaagaccgtgtggtgattccttaaagatctagggacagaaataccatttgacccagcaatcccattactgggcatatacccaaaggaatataaatcattcttttacaaagacacttgcatg

SEQ ID NO: 925311 - DNA, 810 bp, Homo sapiens
caggagataaggggctccatcagggcccacatagaagctttaaggtaatgtatgtagtgcttgaggcaggaattcaattcactgtgctcatcattttatttccatattttgtccaggaaactctagaagcaaccagccaatgccattttatttgttagtttgacaataatgtttaaaagtatcatatacacagttactcagatccttatktataagtggttggttaggagtgtgcaatggtaatatttttctagtctctattgccacatcataccatgaactactagctttcttattactggaaatagagctattggcatatttaagtattatcatattacatatccaattacagaaaccccagacccaattcagaaaatttatctttaaaattttattattctagaaccactcttggtacttaaatatgtatcagtcaaagttttccaagaaacagaatgaatagaatacagatagataaacagatagtagataggtaaaaatataggatatatatatatatgtatataataggatataaatgacaaaataatggaatatatatatgtatacatgctcacaaaagatttactataaaaaattggtttacatgattatggagcctgatgagccccaagatttgcaaggtacatttgcaaagaagacctaggagagccgtggtgtattccagtccaaaggctggcagtcttgaaaaccaggaataagcaatgcttcagttcaagtttgaagaaaagaaaaagtgaatgttccagtttaaaggtagtcagccaggaggaatttcctttaact

SEQ ID NO: 925312 - DNA, 709 bp, Homo sapiens
gtccactccagaccctgtttgcctgggtatcagcagcagtggctgcagaacagcggatattggtgaactgcaaatgctgctgcctgatcgttcctctggaagttttgtctcagaggagtacccggccatgtgaggtgtcagtctgtccctactgggggcctcccagttagkctactcggagatcagggacccactggaggaggcagtctgcctgttctcagatctcaagctgcatgctgggagaaccactactctcttcaaagctgtcagacagggacatctaagtctgcagaggttattgctgtcttttgtttgtctgtgccctgcccccagaggtggagcctacagaggcaggcaggcctccttgagctgtggtgggcttcactcagttggagcttcctggcagctttgtttacctactcaagacagagcaatggcgggcacccctcccccagcctccctgccgccttgcagtttgatctcagactgctgtgccagcactgagcaaggctccatgggtgtaggactctctgagccaaggtgcgggatataatctcctggtgtgccgtttgttaagcccattggaaaagcacagtattagggtgggagtttttttcccagaatcatctttgccttctgtctttgcagaagtgaggaaagtttactatgggctgaacttcagcaaactggcttagatgttgttgtggca

SEQ ID NO: 925313 - DNA, 709 bp, Homo sapiens
gtccactccagaccctgtttgcctgggtatcagcagcagtggctgcagaacagcggatattggtgaactgcaaatgctgctgcctgatcgttcctctggaagttttgtctcagaggagtacccggccatgtgaggtgtcagtctgtccctactgggggcctcccagttaggctactcggagatcagggacccactggaggaggcagtctgcctgttctcagatctcaagctgcatgctgggagaaccactactctcttcaaagctgtcagacagggacatctaagtctgcagaggttattgctgtcttttgtttgtctgtgccctgcccccagaggtggagcctacagaggcaggcaggcctccttgagctgtggtgggcttcactcagttggagcttcctggcagctttgtttacctactcaagacagagcaatggcgggcacccctcccccagcctccctgccgccttgcagtttgatctcagactgctgtgccagcactgagcaaggctccatgggygtaggactctctgagccaaggtgcgggatataatctcctggtgtgccgtttgttaagcccattggaaaagcacagtattagggtgggagtttttttcccagaatcatctttgccttctgtctttgcagaagtgaggaaagtttactatgggctgaacttcagcaaactggcttagatgttgttgtggca

SEQ ID NO: 925314 - DNA, 552 bp, Homo sapiens
gactgcccgattgcctcggaagcctacaggaccaccacagatgctctgggtaactctcacaggaaggtaagtccgtccccttcttaatcaatatggaggcaacccactccacattaccttcttttcaaagacctgtttcccttgcctccataactgttgtaggtactgacrgccaggcttctaaacctcttaaaatttcccaactctaactctggtgccaacttagaaaatactcttttaagcactcctgtttagttatccccacctgcccagttcccttattaggccaggacactttagctaaattatctgcttccctgactattcctgggctacatgccgccttttcctccagttcaaagcctccttcacatcctcgccttgtaactccccaccttagcccacaagtgtaagatacctctactccctccttggcgaccgataatgcaccccttaccatctcattaaaacctaatcacccttaccgcgctcaagaccaatatcccatcccacagcacgctttagaaggattaaagcctgttatgacttgcc

SEQ ID NO: 925315 - DNA, 552 bp, Homo sapiens
gactgcccgattgcctcggaagcctacaggaccaccacagatgctctgggtaactctcacaggaaggtaagtccgtccccttcttaatcaatatggaggcaacccactccacattaccttcttttcaaagacctgtttcccttgcctccataactgttgtaggtactgacggccaggcttctaaacctcttaaaatttcccaactctaactctggtgccaacttagaaaatactcttttaagcactcctgtttagttatccccacctgcccagttcccttattrggccaggacactttagctaaattatctgcttccctgactattcctgggctacatgccgccttttcctccagttcaaagcctccttcacatcctcgccttgtaactccccaccttagcccacaagtgtaagatacctctactccctccttggcgaccgataatgcaccccttaccatctcattaaaacctaatcacccttaccgcgctcaagaccaatatcccatcccacagcacgctttagaaggattaaagcctgttatgacttgcc

SEQ ID NO: 925316 - DNA, 677 bp, Homo sapiens
tctggctggctaggtgggtgtccccttcctctctcaccgctccacgtgcgtccctcccaaagtgcgcgctctgtcaaagaggacgatcatccctgatagacgaggaccagtctttggtcaagggtacacgagtagctgtgctctcctgctagaaccttcaaacaagctctcaaggtccatgtccctgcaaaggaaatgaactcatccttttttatggctgcatagtattccatggtctatatgtgccacattttctttatccagtctatcattgatgggcatttgggatggttccaagtctttgctattatgaacagtgctgcaataaacatatgtgtgcatgtgtgtttgcagtagaatgatttataatcttttgggtatataccaagtaatgggattgctgggtcacatggtatttctgattttagatccttgaggaatcaccacacygtcttccacaatggttgaactaatttacactcccaccaacagtgtaaaagcattcctatttctccacattctctccagcatctgttgtttgctgacttgttaatgatcgccattctaactggtatgagatggtatctcattgtggttttgatttgcatttctctaatgaccagtgattatgagcttttttcatatgtttgttggccccagaagtgtctgttcatatc

SEQ ID NO: 925317 - DNA, 741 bp, Homo sapiens
ttttccaaccttttatgttctgcttcccctataaaattgaatgcctttaacagcacccaaatcacctcttgaatgctttgctgcttagaaatttcctccaccagataccctaaatcatctctctcaagtttaaaaatccacaaatctctagggcagggggcaaaatgctccyggtctttttgctaaaacataaccacagtcccctttgctcaagttctcaacaagttcctcatctccatatgagaccacctcagcctggaccttattgttcatatcactaccagcatttatgtcaaagccattcaacaagtctctaggaagttgcaaactttcccaaattttcctgcctttttctgagccccccaaattgttccaacctctgcttgttactcagttccaaagttgtttccacatttttgggtatcttttcagcaatgccccactctactggtaccaatttactgtattagtccattttcatgctgctgataaaggcatacctgggactgggcaatttacaaaagaaagaggtttaatggacttacagttccatgtggctagggagggctctcaattatggcctaaggtgaaaggcatatctcacatggtggcaaacaaaaggaagagagcttgtgcagggaaacgtccctttttaaagccatcaaatctcatgagacttattcactatcacaaaaacagcacggaaaagacctgcccccatgattcaattacctcccactg

SEQ ID NO: 925318 - DNA, 755 bp, Homo sapiens
tttccaaccttttatgttctgcttcccctataaaattgaatgcctttaacagcacccaaatcacctcttgaatgctttgctgcttagaaatttcctccaccagataccctaaatcatctctctcaagtttaaaaatccacaaatctctagggcagggggcaaaatgctcccggtctttttgctaaaacataaccacagtcccctttgctcaagttctcaacaagttcctcatctccatatgagaccacctcagcctggaccttattgttcatatcactaccagcatttatgtcaaagccattcaacaagtctctaggaagtygcaaactttcccaaattttcctgcctttttctgagccccccaaattgttccaacctctgcttgttactcagttccaaagttgtttccacatttttgggtatcttttcagcaatgccccactctactggtaccaatttactgtattagtccattttcatgctgctgataaaggcatacctgggactgggcaatttacaaaagaaagaggtttaatggacttacagttccatgtggctagggagggctctcaattatggcctaaggtgaaaggcatatctcacatggtggcaaacaaaaggaagagagcttgtgcagggaaacgtccctttttaaagccatcaaatctcatgagacttattcactatcacaaaaacagcacggaaaagacctgcccccatgattcaattacctcccactgcgtcccccacataac

SEQ ID NO: 925319 - DNA, 609 bp, Homo sapiens
cacatacaattatgtacactatattttataaagataagaaatgatgttactggtttacacacttactatactatactttttattgtttttttagtgtactactctacttacattttaaaaaattttaactgtaaaatagcctgaggtaggtccttcaggaggtattccggaagaaggcattattattataggagatgacagctccatacatgttttgcccttgaagaccgtttagtgggacaagatgtggaggtaaatcagtgatatggatgatcgtagccctgtttgagcctaccctgatgtgtatgcttgtgtcttggtttttattgttttatttttatttttatgttttttcagacagggtctcgctctgtcacccagggcctaaagtgcagtggcatgatcagcttggacctcctgggctcaagygatcatcctatctcaggtgggaacacaggtgcatgccaccacaactggcttttttttttttttttttttttttttaacgtttgtagagaggaggtttaactatgctgcccaggctggtcttgaagtcttgggctaaagtgatcctcctacctcggcctcccaaagtgcaaggattaagcc

SEQ ID NO: 925320 - DNA, 692 bp, Homo sapiens
gcctcctatggagatgttcccacgggggtcttttcctgctggagtttcccagaggctgtagcacaccaggaagaagaataaatcaaaaaggagtgctggccgggcacggtggctcatgcctgtaatcctagcaccttcggaggctaaggtgggtggatcactcgaggtcaggagttcgagaccagcctggtcaacatggtgaaaccccatctctactaaaaatacaaaaattagctgggtatggtggygcaggcctgtaatctcagctacttgggaggctgaggccagagaattgcagtgagctgagatcgtgccactgcactccagcttgggcaacagagcgacactccatctcaaaaaaaataaaaaaaataaaaaagagtactgctgggcgcagtggctcattcctgtaatctcagcactttgcaaggccgaggcaggcagattacgaggtcaagagttcgagaccagcctggccaacatgttgaaaccctgtctctactaaaaatacaaaaattagccgggcatggtggcacgtgcctgtagtcccagctacttgggaggctgaggcaggaggatcgcttgaacctgggaagcagaggttgcagtgagccgagatcacgccactgcactccagcctgggcaacagagtgagactccatctcaaaaaaaaaaggagtgttaatggaaca

SEQ ID NO: 925321 - DNA, 798 bp, Homo sapiens
cagtgagctgagatcgtgctgctacactccagcctgggtgacagagcaagattgcatttaaaaaataaaataaaacaaaatgcactgtgttaaaaagaactgtctgggcacagtggctcacacctgtaatccaagtactttgggaggctgaggtgggaggatcacttgagcccaggagtttgagaccagcctgggcaagatagtgggaccctatctctacaaaaaattaaaacaaatgttttaatatattatgtctgaaaactaactcatagtttcatatcccccaccaaacctgctcttatcacattttccccacttttgtaaatgacaagttcactctgtcatgtgctcagggcaaaaatcttgggctcatccctaactttcctttttttctcttaaaccctgcatccaagccattggcaaaccctgtcagtttcaccttgtaacataattagaatttgttcattcaacaaaaacttattgaggctgggtgcaatggttcatgcctgtaatcccagaagctgtgcgaggccaaggcagacagaggcttgagtccaggagtttgagaacagcctggcaacatggcgaaaccygtctctacaaaaaatgcaaaaataagccaggcatggtggcacatgcatgtagtcccagctactccggagggtgaggtgggagaatcacctgagctcttggaggtcaaggctgctgtgagccatgattacactgcactccagcctggaagacagagtgggcccctgctcaaaaaaaaaaaaaaaaaaaaaaaagtattgctggggt

SEQ ID NO: 925322 - DNA, 686 bp, Homo sapiens
tggacttcctgcttccacgcctgcctcttttcatcctgttctccacacagcagccagagggatctttcaaaattaaagtagatcattaatgtgtcctcttctaaaacttctactgacatgccattgttcttggaataaaatccaaacttttaacctttaccttttaccttacataaatgggccaawcctattcaccaacttggtttctttccacatttcttccctcacttaatttgacctacaaacactgttctctcttgatgtgctaggtttggtctgactttagagtcttgagttggctgttccacctatctgagtgcctgcattgttctttcctcagatcattacaagcctggctgttcctcattcttcaagcctcagcataagtatccctccctcaggaagattgcttgggatccctctatctatccctctatccctttaaattccttgctagttactatcctattccactacattttccttcttcacaatacttactactctttgagatagcttgtttattagtttactttttgttatttaaatatcaccaccagattataaattcccataggtgagggatctttctggagttgtccatcatttatttctgatgcctgtattggtgcttggcatattgtaggaagtaaaacaaaattagttgaaggaaaggaagaatgaat

SEQ ID NO: 925323 - DNA, 686 bp, Homo sapiens
tggacttcctgcttccacgcctgcctcttttcatcctgttctccacacagcagccagagggatctttcaaaattaaagtagatcattaatgtgtcctcttctaaaacttctactgacatgccattgttcttggaataaaatccaaacttttaacctttaccttttaccttacataaatgggccaaacctattcaccaacttggtttctttccacatttcttccctcacttaatttgacctacaaacactgtyctctcttgatgtgctaggtttggtctgactttagagtcttgagttggctgttccacctatctgagtgcctgcattgttctttcctcagatcattacaagcctggctgttcctcattcttcaagcctcagcataagtatccctccctcaggaagattgcttgggatccctctatctatccctctatccctttaaattccttgctagttactatcctattccactacattttccttcttcacaatacttactactctttgagatagcttgtttattagtttactttttgttatttaaatatcaccaccagattataaattcccataggtgagggatctttctggagttgtccatcatttatttctgatgcctgtattggtgcttggcatattgtaggaagtaaaacaaaattagttgaaggaaaggaagaatgaat

SEQ ID NO: 925324 - DNA, 787 bp, Homo sapiens
tcctgtctgaaaatctgagaatatcaggtacaggacccagcacagtgcctggtacatggaaaagtttggggctccctgtccttccctagcaataagccctaattttgccttcaggcctagaatgaggacttctaaaaggatgaagaggggaggttgagccaagatggccgaacaggaacagctccggtctacagctcccagcgtgagcactgcagaagatgggtgatttctgcatttccatctgaggtaccgggttcatctcactagggagtgccagacagtgggtgcaggacagtgggtgcagcacaccgtgcgcaagctgaagcagggtgaggcattgcctcacttgggaagtgcaaggggtcagggagttccctttcctagtcaaagaaagaggtgacagagagcacctggaaaatcaggtcactcccaccctaatactgcgcttttctgacaggcttaaaaaacggtgcaccatgagattatatcccgcacctggctcggagggtcctacgcccacggagtctcgctgattgctagcacagcagtctgagatcaaactgcaaggyggcagcaaggctgggggaggggcgcccgacactgcccaggcttgcttaggtaaacaaagcagccgggaagctccaactgggtggagcccaccacagctcaaggaggcctgcctgcctctgtaggctccacctccgggggcagtgcacagacaaacaaaaagacagcagtaacctctgcagacttaaatgtcccagtctgacagctttgaagagagcag

SEQ ID NO: 925325 - DNA, 848 bp, Homo sapiens
acctatggcccccagccagccttctcagcccagcccagtgccttctctgccatgccatgttggtcttcgcagccacatccattcctgtctgcctccatgattacacttataagaatctgtgctattatcattactttcttccatatgccaccctctactctccccaccccaattctacttgccttggattccaccaggacttcttttactcttcacctcctctcctatcctcagcaaggagactttctttgtccttggattgcctttgagtccttgtgtcttctcccaagagctgtttgcccacatgtatttatttagtccaccaatgtgtgttgaacacctactacatgccagatcctctgccagctctgggcattcataaataagatgtggtctcagctctaacagtgtttgaggtttagtggcaaatagatgtaaaacccttcctatatgccagacattgctataagtgctttccagaagcaaattcaattaatacattatcagtctcattttatagataaagcaaccaaggcaaagaagtttaggtaagctcctcgaggtcacacagctacaagtggtacagccaagatttgaacacatggaaggtagtgccagggtctagccatgaagaaaatcgtcatgtaagcaaacaaagmaagatcagtgcgatgaagactgtgagacccacagctcagcagactatgggaacccaaagaggaagaatgttcagggaagactgcctggaggaagggacctttgagctgagtcatgaggatggttagaacttagccaggtgaattagacacgtgttttccagacaaaagaaaaaccacatgaaaatgtca

SEQ ID NO: 925326 - DNA, 644 bp, Homo sapiens
aaatgtatggcctgcagtgcaggggattatttctttggcacacttcacagcccctgactatcttcttgatagttttgaaaaggcctggtccagtaaataataatttggccatctgatgggtgctatcaatgcctaagtggaaggtttggtgaagggttttaagtaatttctgttggttagctgcaggtgaaagtatttttccttcctcagtggctagccatctggaggggaggaaagtatgtccttgtgaggtttcctattctatttttcctgctgagtactggggcttggtttcccagaggggattaccctatactaggcatccttctataagcatttctaatggaaggtcctgccttgtgctcttttgacttcaatatccacttggcagttcctttctacttccctttcctttctgatgaccctggcagtgtaagactgtcacctctttaggtttctgtacargcagttataatctcctaatagcttcctgatgtttgactggtgttcccttggaagttaggaattccctttctctccatattgctgcatgggcatgaaggactaggcaagcatacttagaggctgtatatatatttacccttttcccttctcctaattctagttcctgagtgagagctatt

SEQ ID NO: 925327 - DNA, 552 bp, Homo sapiens
tcatcatacctgggaatccatattcggcagaaacctgttacgccaaggaaccatcatagttgctttagggttttgggataaggataggccagtataggctggatacgttcctcactgagggccttggtgtctttggataattttagccctaagtatttaacgtgctgtgagcagagctgagcctttcrtctggaaacctgtagccacaggtagcgagaaaatttaagagtgcttgggtggcttgatggcacaaggtttcttaacaggtggctaaaattaaatcatctctgtaccaaaggacaagagtgtccaggtatgagagttggctcaagtcttgggctaatgcctggccaaatagatgggggctatacttgaacccttggggtaaaacagtccacgtgagttgagacgttgggttcaaaggatctttaaaggcaaatgagaattgagagtcaggatgtacagggatgcagaaaaaggcatccttaaggtccagaactgtaaaccactctgcttcctctggtatttgggaaagcagagtataagggctag

SEQ ID NO: 925328 - DNA, 552 bp, Homo sapiens
tcatcatacctgggaatccatattcggcagaaacctgttacgccaaggaaccatcatagttgctttagggttttgggataaggataggccagtataggctggatacgttcctcactgagggccttggtgtctttggataattttagccctaagtatttaacgtgctgtgagcagagctgagcctttcatctggaaacctgtrgccacaggtagcgagaaaatttaagagtgcttgggtggcttgatggcacaaggtttcttaacaggtggctaaaattaaatcatctctgtaccaaaggacaagagtgtccaggtatgagagttggctcaagtcttgggctaatgcctggccaaatagatgggggctatacttgaacccttggggtaaaacagtccacgtgagttgagacgttgggttcaaaggatctttaaaggcaaatgagaattgagagtcaggatgtacagggatgcagaaaaaggcatccttaaggtccagaactgtaaaccactctgcttcctctggtatttgggaaagcagagtataagggctag

SEQ ID NO: 925329 - DNA, 775 bp, Homo sapiens
aagtgggaagtcaatgctcatttaccattctgaatatcctagggcacttaagaatgatgctaaatcttttctgcctgtgcactacaaacggaacgacaaagcctggacgacagtgcatctgtttataacatggtttactgaatattttaagcccactgttgagacctactgcttagaataaaaggtttctttcaaaatatttctgctcattgacaatgcatctgatcacccaagagccctgatggagctgtccaaggagattaatgtttttgtgtttgccaacacaacatccattccacagcccatggatcaaaaactaattttgactttcaagtcttattacctaagaaatatatttcataaggctatagctgccatacagagtgattcctctgatggatctgggcaaagtaaattgaaaaccttctgaagaggattcactattctatatgtcaatatttgtgattcaagagaggaggtcaaaatatcracattaacaggagtttggaagaagttgattccaactctcatgtatgatgttgaggggcttaagacttcagcagaggaagtaactatagatgtgttggaaacagcaagagaattaaaattagaattggagcctgaagatgtgactgaattgttgccatgttatggcaaaacgaacggatgaggaactgcttcttattcatgaacaaagaaagtggtttcttgagatggaaactactcctggtgaagatgctgtgaacatcactgaaatggcaacaaaggatttgga

SEQ ID NO: 925330 - DNA, 503 bp, Homo sapiens
cctggagatgttcatgatatggacttttccaagaggaagagaccaactggaaagatgtacctgattcttaggcttctgtttgggtcttttttttttttttttttttgccttttgaaaggggtgcagcattcctggagggtactgcaataccaggtcaacatgtagagtgaacagagcaagctcttattscatctccctgctcccaaaatccatttaatatgttgtcctcagatggaggacgtatcagatattaagacgataagaacagataccacacttgatcttagccaaaaggctgagaagtgatgctgcctatgtcttgagttcattctctccccactgatattattttcttccccttggcaggaagatgatgtctgttaggaagcctctgaggttcctgttcctttctgctggatttatgccgctgccagcatcggagcagtttctaccacccacacatttccttgttaaatagccaggcctcttcccatggggaatgc

SEQ ID NO: 925331 - DNA, 456 bp, Homo sapiens
ttttatcagacagcaactcagcttcacaagatatttcccaccagaaacataactgaagctttcagcaggccctttcacccttgaccaagccaagtgcttctcagcaatgaggcacatgacaagaccatgggtgtgtgcctgtgtttctgcacttactttgtggtaaaatgtgcccccccgaccacaggcgatattatgtagtatattgtgacaatgaagaaaacatttttagatacatgaatgttggtttcagcrtaactggagtacaaatctaccactataaaaacaaagctatgcgtatctagggaatggtaaaatacagttaggtagctggctacccctgaaccaccttgaaagtggtgctgtaacaggatttcagttttggtctatgttgttggtagtctgagcagtcagcaatggcaccagccaattgaggggaagaccatgattttgaaa

SEQ ID NO: 925332 - DNA, 456 bp, Homo sapiens
ttttatcagacagcaactcagcttcacaagatatttcccaccagaaacataactgaagctttcagcaggccctttcacccttgaccaagccaagtgcttctcagcaatgaggcacatgacaagaccatgggtgtgtgcctgtgtttctgcacttactttgtggtaaaatgtgcccccccgaccacaggcgatattatgtagtatattgtgacaatgaagaaaacatttttagatacatgaatgttggtttcagcgtaactggagtacaaatctaccactataaaaacaaagctatgcstatctagggaatggtaaaatacagttaggtagctggctacccctgaaccaccttgaaagtggtgctgtaacaggatttcagttttggtctatgttgttggtagtctgagcagtcagcaatggcaccagccaattgaggggaagaccatgattttgaaa

SEQ ID NO: 925333 - DNA, 620 bp, Homo sapiens
gaattctaccagaggtacaaagaagaactggtaccacttctactgaaactactccctaactcctccctaattcatttgatgaggccagcatcatcctaataccaaaacctggcagagacacaataaaaaaagaaaacttcaggccaatatccctgatgaatggtaatgcaaaaatcctcaataaaatactggcaaaccgaatccagcagcacatcaaaaagttyacctgtcatgataaacttagcttcagcctggtatgcaaggtagttcaacatatgcaaatcaataaacgtaattcatcacataaacagaactaaagacagaaaccatatgattatttcaattgatgcagaaaaaggcctttgatgaaattcaatatccctttatgtttttatgttaaaaactctcaataaactaggtattaatgaaacatacctcaaaacaataagccatataagacaaactcacagccaatatcatactgaattagcaaaagctggaagcgttacccttgaaaaccagcacaagacaagggtgccctctctcagcactcctattcaacatagtattggaagatctggccagggcaatcaggcaagagaaacaaaaataaagaatat

SEQ ID NO: 925334 - DNA, 561 bp, Homo sapiens
aaaagttcacctgtcatgataaacttagcttcagcctggtatgcaaggtagttcaacatatgcaaatcaataaacgtaattcatcacataaacagaactaaagacagaaaccatatgattatytcaattgatgcagaaaaaggcctttgatgaaattcaatatccctttatgtttttatgttaaaaactctcaataaactaggtattaatgaaacatacctcaaaacaataagccatataagacaaactcacagccaatatcatactgaattagcaaaagctggaagcgttacccttgaaaaccagcacaagacaagggtgccctctctcagcactcctattcaacatagtattggaagatctggccagggcaatcaggcaagagaaacaaaaataaagaatattcaaataagaagagaggaagtcaaattatctgtgtttgcagatgacatgatcctatatctagaaaaccccattgtctcagcccaatagcttcttaagctgattaacaacttcagcaaagtctcaggatacaaaatcaatgtgcaaaaactgctagca

SEQ ID NO: 925335 - DNA, 561 bp, Homo sapiens
aaaagttcacctgtcatgataaacttagcttcagcctggtatgcaaggtagttcaacatatgcaaatcaataaacgtaattcatcacataaacagaactaaagacagaaaccatatgattatttcaattgatgcagaaaaaggcctttgatgaaattcaatatccctttatgtttttatgttaaaaactctcaataaactaggtattaatgaaacatacctcaaaacaataagccatatawgacaaactcacagccaatatcatactgaattagcaaaagctggaagcgttacccttgaaaaccagcacaagacaagggtgccctctctcagcactcctattcaacatagtattggaagatctggccagggcaatcaggcaagagaaacaaaaataaagaatattcaaataagaagagaggaagtcaaattatctgtgtttgcagatgacatgatcctatatctagaaaaccccattgtctcagcccaatagcttcttaagctgattaacaacttcagcaaagtctcaggatacaaaatcaatgtgcaaaaactgctagca

SEQ ID NO: 925336 - DNA, 762 bp, Homo sapiens
gacccatgaacactgtgggggctaagtgtgcctactccccacatattcaaaaatctgagtaaaaattttgactccccaaaaacttaactactaatagcctgctgttgacgagaagcattaccaagaacatacagttgattagcatgtattttttatgttatatgtattatatactgtgttattacaactatgtaagctacagaaagaaaatgttattaagaaaatcataagaaacagaaaatatatttactattcattaagtgaaagtggatcatcgtaaaggtctttacatctgtttacatttctctcaattgtaaataatgcctgtatagtctttgtttgtgtacctaagttttaataaattttaaaattttatcatatattcctgtatattttatagcacyaaatgataaaacagactagtatctacatatatttgatggattcatggcatattaaacctttccttcatttttttcaatatttctaggctgcagttcatctgtgaattttttcagattattgcaaatctccaaaacatgttctaatacatttattgagaaaaatctgcatgtaggaggactctcacagttcaaactcgtgttgctcaaggatcaactgcatttgtattttgttttctacatgcaaagggtgttcacaaagttattagggatagggaaaaggactagcccacttggatctcctgatgcacaggagaatctgtgcattctgtgaggagtaacttttctggatatgccaaat

SEQ ID NO: 925337 - DNA, 588 bp, Homo sapiens
catgccatgagggaccatgctatctggcccaggtactacacttttcccatgatctttgcaacccacagaccaggcgattcttttggatgactaaaccacaagggccctgggtttcaagcacaaaactgggcagccatttgggcagacaccgagctagctgcaggagtttattttyataccccagtggtgcctggaacaccagcaagacagaactgttcacacccctagaaaggaggctaaatccagggattcaagtggtcttgttcagtggatcccatggagcccagcaagctaagatccactggcttgaaattctcgctcccagcacagcagtctgaagttggcctgggatgctcaagcttggtgggaggagaggcatctgccattactgaggcttgagtaggcagttttcccctcacagtgtaaacaaagccactgggacgatctgactgtgcggagcccactgcagcacagcaaactcactgtagccagactgcctctctagattcctcctctcttgggagggcacctctgaaagaaaggcagcagccccagtcaggggcttatagataaaattcccatctccct

SEQ ID NO: 925338 - DNA, 588 bp, Homo sapiens
catgccatgagggaccatgctatctggcccaggtactacacttttcccatgatctttgcaacccacagaccaggcgattcttttggatgactaaaccacaagggccctgggtttcaagcacaaaactgggcagccatttgggcagacaccgagctagctgcaggagtttatttttataccccagtggtgcctggaacaccagcaagacagaactgttcacacccctagaaaggaggctaaatccagggattcaagtggtcttgttcagtggatcccatggagcccagcaagctaagatccactggcttgaaattctcgctcccagcacagcagtctgaagttggcctgggatgctcaagcttggtgggaggagaggcatctgccattactgaggcttgagtaggcagttttcccctcacagtgtaaacaaagccactgggacgayctgactgtgcggagcccactgcagcacagcaaactcactgtagccagactgcctctctagattcctcctctcttgggagggcacctctgaaagaaaggcagcagccccagtcaggggcttatagataaaattcccatctccct

SEQ ID NO: 925339 - DNA, 583 bp, Homo sapiens
ttaccagaggtataaagaggagatggtaccattccttctgaaactattccaaacaattgaagaaaagggatgtctcccttactcattttgtaaggccagcatcatcctaataccaaaacttggcagagactcaacaaaaaaagaaaacttcagttcaatatccctgatgaacatcaaggtaaaactccttaataaaattctggcaaactgaatccagcagcacattgaaaagcttatccatcatactcaagttggcttcacccctgggatgcaatgctggttcaacaaatgcaaatcaataaacataattcgtcacaaaaacagaactaatgacaaaaaccacatgactatctcaatacacacagaaaaggccttccataaaatttaacatctctttatgttaaaaactctcaataaactrcatattgatggaacatatctcaaaataacaagagccatttattacaaacccacagccaatatcataccaaatgggcaaaagctggaagcattcccttttaaaactgccacaagagaaggatgcccactctcaacactcctattcaacatagtattgaaaatt

SEQ ID NO: 925340 - DNA, 865 bp, Homo sapiens
agctgtcttttactccatctgcttgttttcctgtctataatcccatgtgaagagaatcccagcgtctacatctgaggccctttgtgaacacgtggctgtggtcatctgatcctccctgtcctccctgcgacagactcataaaggaaggatgatcaaggtctcctccagtagttgaactcccttctcaagttcatgatgcagctaaaggaacccattgttttatctgctgggtgaatggaaacagaggccttcagaaggaaagagcccagggcgcaggaaaggagcaggttccacaaaagcctggtttgagaytgtcctttcccaggctgcgcgatccaccgcaggttactgtctgtctctaggcctgtttcctccactgtagtttgaagatgctttagaccaggaaggaactggcaaacgttatctggaaaggtcctattgtattttaggctttgtggaccaagaggcaaaaacaagggtatttgtaggtacttatacaacaggaaagaaaatacatttccacaagatttttcaactatttaaaaatataataaaaactggctgggcacagtgactcacacctgtaatcccagcacattaggaggccaaggtaggtagatccctcaaggccaggagttcaagaccagcctgaccaacataccaaaaccactatctctactaaaaatactaaaattagctgagtgtggtggcagatgctatagtcccagctactcaggaggctgaagcaggagaatcactggaagctgggaagcggaggttgcagtgagccgagattgtgccactgcactccagcctgggcaacagagtgagtgagacttggtctaaaacaaaaacaaaaacccaa

SEQ ID NO: 925341 - DNA, 641 bp, Homo sapiens
ttctatgattcttcacatttttacatcctccgcttgatttcctatttcctttctatgaaattttcatgagttggttcctttcgaaaaatcttttttttttttttttgagatggaatttctctcttgttgcccaggctggagtgcaatggcacgatcttgactcactgcaacctctctgcctcctcggttcaagcgattctcgtgcctcagcctccccagtagctgggattacaggcatgcaccaccacgcctggctaattttgtatttttagtagagacagggtttcaccatgttggtcaggctggtctcaaactcctgaccttaggtgatctgcccgcctcrgcctcccaaagttctgggattgcagtcaagagccactgcgcctggctgaaaaaagaaatcttaaatcatacataattatatttactcagactctacttaacgtatgaactcactgaactgacaaggggaccactctgctaggaaatctcaagttcaaccaaatgttcccaaatggagtatgggggaagcagaggcccactgggtctgacgtgtggcttttgaatcgtgaagatacttctgcaagcttgctggtggatggttggattgacaacggcatgtctagttactgttgcaaggg

SEQ ID NO: 925342 - DNA, 637 bp, Homo sapiens
agaaggtcgatgtgtttgtgttacaagctaagtgatattttaagagtcaaaaggttctttaaaaggtttataaagtaaaaatgttacagtaagctaaaatgaatttattattgaagaaagtaaatttaaaaattaaatgtagtayagcctaagtgtacagtgtttatagtctacagcagtgtggagtaacatcctaggccttcacattcacccatcgctccctcaccaacttaccgagagcaacttccagtcctgcaagctccatttatggtaagtgcttatcaatatacaggcttattaacttttatgtgttataccatatttttactgtacttcttctatatttagatatatttagatacataaatacttaccattgtgttacaattgcctatagtattcagtacagtaacagtgctatagaggtttgtagcctaggtgtgtagtcagctacaccacctagttctgtgtaagtaaactctatgatgttcacacaatgatgaaatcgcctaaggccgcatttctcagaatgtatccctgtagttaagtgacatatgaccttctggcatgtgggcctagtgaggctaccagtgttaaactataagtcagatattgttacaagctaatgttccttagg

SEQ ID NO: 925343 - DNA, 657 bp, Homo sapiens
atggctgaggaggcctcacaatcatggcagaaggcaaaggtggggaaaagtcatgtcttacatggtgggaggcaagagagtgtgtgcaggggaactcccctttataaaaccatcagatattgtgagacttattcactatcatgagaacagcatgggaaaaacccacagccaagattcaactacctcccactgggtccctcccatgacatgtgggaattatgggagctatamttcaagatgagatttgggtggggacacagccaaaccataacattccactcctggcccctaccaaatctcatgtcctcacatttcaaaatgaatcatgccttcccaactgtcccccaaagtcttaacacatttcagcattaactcaaaaatccagagtccaaagtctcatctgagataaagcaagtcccttccacctatgagcctgtaaaatcaaaagcatgttaattacttccaagatacaatgggggtacaggcattgggtaaatacacctattgcaaatgggagaaactggccaaacaaaggagctacaggccccttggaagtccaaaatccagcagggcagtaagcgccaaaatgatctcctttgactccatgtctcacatccaggtcacactgatgcaagggagggggttcccatggtcttg

SEQ ID NO: 925344 - DNA, 657 bp, Homo sapiens
atggctgaggaggcctcacaatcatggcagaaggcaaaggtggggaaaagtcatgtcttacatggtgggaggcaagagagtgtgtgcaggggaactcccctttataaaaccatcagatattgtgagacttattcactatcatgagaacagcatgggaaaaacccacagccaagattcaactacctcccactgggtccctcccatgacatgtgggaattatgggagctataattcaagatgagatttgggtggggacacagccaaaccataacattccactcctggcccctaccaaatctcatgtcctcacatttcaaaatgaatcatgccttcccaactgtcccccaaagtcttaacacatttcagcatwaactcaaaaatccagagtccaaagtctcatctgagataaagcaagtcccttccacctatgagcctgtaaaatcaaaagcatgttaattacttccaagatacaatgggggtacaggcattgggtaaatacacctattgcaaatgggagaaactggccaaacaaaggagctacaggccccttggaagtccaaaatccagcagggcagtaagcgccaaaatgatctcctttgactccatgtctcacatccaggtcacactgatgcaagggagggggttcccatggtcttg

SEQ ID NO: 925345 - DNA, 596 bp, Homo sapiens
catgtatcccagaacttaaagtaaaataacataaaattaaattaaattaataaaagcccccaaagactcccccaaaaagagcaataataacaataagatgataaaaatgtttaaaagtgtgttaaatcccccatgataaattattaattaaaaataatgaggcatttttatttccaccatacagacggaaaaattgaaattctcataatctcagtaatttaaccactgtggcagaatctgcgtatcagttagtgatgcytccaggattcccatcagagcttcaatactaatgtcacagctttagcactttctactcacaattgttccacttaaaaaaaacatgttttaaaacttcaagaatggtggtacctgtgtctgtgtctgtgtatatacacctagggggagatgatgcctagtaggaagaaaagccttgagagctgaatctggtgcctcagtggggcaatggcaaggatattcttaatagggttctatcccagggaatacccatgcatctcagtacatgtatctccttccttattaaatggttaaagaataatacgttattgaaaagttttatcagtcagagcccccatctc

SEQ ID NO: 925346 - DNA, 534 bp, Homo sapiens
gcgggactggcgggcacgccgcccatggtcctggtgcgggatccactaggcgaagctagctggactcctgagtcaggtggggtcttggagaacttttatgtctagctagaggactgtaaacacaccagtcagcactttgtgtctagctaaaggtttgtaaatgcaccaatyattgctctgtgtccagctaatctagtggggacttggggaacttttgtgtctagctaaatgtttgtaaatgcaccaaacagcaccctgtcaaaacggaccaatcagctctctgtaaaatggaccaatcagctctctataaaatgggccaatcagcaggatgtgggtggggtcagataagggaataaaagcaggctgccggagacagcagcggcaacctgcccaggtccccttccacactgcggaagctttgttctttcgctctttgcaataaatgttgccactgctcgccctttgggtctgcactgctgttatgagctgtaacactcaccgtgaaggtctgcagcttcactcctgaggccagca

SEQ ID NO: 925347 - DNA, 534 bp, Homo sapiens
gcgggactggcgggcacgccgcccatggtcctggtgcgggatccactaggcgaagctagctggactcctgagtcaggtggggtcttggagaacttttatgtctagctagaggactgtaaacacaccagtcagcactttgtgtctagctaaaggtttgtaaatgcaccaatcattgctctgtgtccagctaatctagtggggacttggggaacttttgtgtctagctaaatgtttgtaaatgcaccaaacagcaccctgtcaaaayggaccaatcagctctctgtaaaatggaccaatcagctctctataaaatgggccaatcagcaggatgtgggtggggtcagataagggaataaaagcaggctgccggagacagcagcggcaacctgcccaggtccccttccacactgcggaagctttgttctttcgctctttgcaataaatgttgccactgctcgccctttgggtctgcactgctgttatgagctgtaacactcaccgtgaaggtctgcagcttcactcctgaggccagca

SEQ ID NO: 925348 - DNA, 622 bp, Homo sapiens
ctctagcatgtcatagtgtgtgtatatatacatatatatatatatgtatatatacacacacacgcatacacccgtgattaatgtattaatgtaatcagtgtagctggactctagcatgtctgtgcatgtgtgtgtgtgtgtgtgtgtgtgtgtgtgtgtgtctatgtactcacatatacccattgatatggtttagctctgtggcccactcaaatttcatcttgaattgcaatccccacatgccgagggagggaggtgattggatcgtggaggtggtttccgccatgctgttcttgtgatgatgagtgagtctcatgagatctggtgatttcatgagcgtcyagcatttcccctgcttgcatttctctctcctgccaccctgtgagtaaggtgccttgcttccctttcaccttctgccatgattgtaagtttcctgaggcctccccagccatgtggaactatgagtcaaataaaccatcttcctttataaattaccgagtctcgggcattttttatagcagtgtggaaacggactaatacacccatgattaatgtaatcagcataagtggattctagcatgtacttatgtgtgcatgtatgtacatgcatgtacccatgatt

SEQ ID NO: 925349 - DNA, 581 bp, Homo sapiens
aactttcaacccagaatttcatatccaaccaaactaagcttcataagtgaaggagaaatacaatactttacagacaagcaaatgctgagagattttgtcaccaccaggcctgccctaaaagagctcctgaaggaagcactaaacatggaaaggagcaaccggtaccagccactgcaaaaacaagccaaattgtaaagaatatcaaggctaggaagaaactacatcaactaacgagcaaaataaccagctaacatcataaagacaggatcaaattcacacataacaatactaaccataaatgtaaatgsgctaaattgctccaattaaaaggcacagactggcaaattggataaagagtcaagacccatcagtgtgctgtattcaggaaacccatctcacatgcagagacatacataggctcaaaataaagggatggaggaagatctaccaagcaaatggaaaacaaaaaaatgcagggattgcaatcctagtctcggataaaacagacttaaaccaacaaagatcaaaagagacaaagaaggccattacataatggtaaaggaatcaattcaacaagaaga

SEQ ID NO: 925350 - DNA, 611 bp, Homo sapiens
aaaataatttagaaggttgattattaagctaatcaaggaggcaccagagaaaggtgaagtccaacttaaattaaaaacatgatacagaatatgaaaggaaaattcttcagtgaaatagatagtataaataaaaaacaatcacaatttctggaaatcaaggatacacttagagaaatgcaaaatgcactggaaaktctcagcaatagaattgaacaagcagaaaaaagaacctcagagctagaagacaaggctttagaattaactcaatccatcaaagacaaaaaggattttaaaaaatgaacaaagccaccaagaagtttgggagtatgctaaatgccccaacctaagaataattggtattcccaaggaagaagagaaatttaaaagtctggaaaacatatttgagggactaatcgaagaaaatttccctggccttgctagagatctagacatccaaatacaagcagctcaaagaacacctgggaaattcatcacagaaagatcattgcctaggcacatagtaatcagattatctaaagtcaagatgaaggaaaaaatcttaagagctgtgaggcaaaggtatcaggtaacctataaaagaaaacttatca

SEQ ID NO: 925351 - DNA, 611 bp, Homo sapiens
cctccaaagacaaggcaactggtgtccgagtcatactctgaggataaacctatttcctaagcaaaagcctctccatcatggaaaagcatccaccagccacggtcctccccaggctacctgtggggcccaggaaggcctgcatgaagtcgggagcggagcttgttgggcgcctggtatttatcaactcctgtgctccagcctgggcgacagagtgagactctgtctcaaaaataaataagtaaaaaagtaaataacctgatcctgtctttatctaggtttaaacaaatctcttgctcatgatgacttgtttgcattaatttgtatttttaaaaacactgcactaaaatattatttatgttgaatagttttttttttgacacccctcytttaattttgcacccacagcctcaccctagtccctggcctgagccacatccgctttccccaggtctcccattttattttgagacaggggctcactgtcacccaggctggggttcaatggcatgatcatggcttactgcagcctcaacccactgggctcaagtgatcctcctgcctcggcttcccaaagtgctgggattacaggctggagccatcgctcccggccc

SEQ ID NO: 925352 - DNA, 657 bp, Homo sapiens
taacaatgaaatatagttgctatcaatgagcatctactgtatttcaggcactgtacttaaacactctacatgcattatgccatttaatcctcaatcgtattgctgagatcgataatatcattgaccctattgtatagtttgggaaaaggagggtagcgagattaggaaaatcgcccaacttggcaactgctggagcaaggatttgagctctgttgaccatattgatcactatatgatgttgtctcattgcctttaaacaacactagggttgggttagggtagcagaggatgtatataataacacacactgtttagtgagagtaattttccagaacaagcaagaaaggagaaatgcttcaataatcttctgaagtttagtttccatggacagttatggattgctaagaaattgtcaataaaggtaaggrccacggaagaagcagaaataagctgcacaggccaggcactgtgccatgtcagtggcagagccacaccgtcaccttcatcagagcccaaggtctgaagacactgaaaagaagatctggccaccaaatgccctcaacaaggggttgtccagaccctgcttcaacattgtcagcagcagggcatgctccacctcagcagacagccacttttgttttcaagtaactctctaat

SEQ ID NO: 925353 - DNA, 607 bp, Homo sapiens
atataaacaggctaagcactgcaattaaaagacaaagactgtcaaactggacaagaaagcagggcccaaatttatgctgtctacaagaaactgactttaaatccacataatgacacagatagattaaagattaaaaacatgagaaaaaatatgccatgcatatactaggcatgaaattagctggcatagctatgttaacatcaggcaaagtagactttagaacaaggaatattaccagggatagggagggacatttcagaatgataaaggaagaaawgtattatgaggatataacaattctaaatgtcaatgtacttaattatagaactccaaaaatacataaaggaaaagctgacagatctcaaagaaggaacagacaaatcagcaattagagttggcaattaaacattcttctcagtaattgatagaacaagtagacaggaagttagtaagaatatgttccttactcaggaacaaagtactagccactatcaacctgcttgcccagttcacaattactgacactccacccaactactgacaaataaatacacattctttccaagtacatgtagcatgcttaccaagatagaccatatcccaggcc

SEQ ID NO: 925354 - DNA, 607 bp, Homo sapiens
atataaacaggctaagcactgcaattaaaagacaaagactgtcaaactggacaagaaagcagggcccaaatttatgctgtctacaagaaactgactttaaatccacataatgacacagatagattaaagattaaaaacatgagaaaaaatatgccatgcatatactaggcatgaaattagctggcatagctatgttaacatcaggcaaagtagactttagaacaaggaatattaccagggatagggagggacatttcagaatgataaaggaagaaatgtattatgaggatataacaattctaaatgtsaatgtacttaattatagaactccaaaaatacataaaggaaaagctgacagatctcaaagaaggaacagacaaatcagcaattagagttggcaattaaacattcttctcagtaattgatagaacaagtagacaggaagttagtaagaatatgttccttactcaggaacaaagtactagccactatcaacctgcttgcccagttcacaattactgacactccacccaactactgacaaataaatacacattctttccaagtacatgtagcatgcttaccaagatagaccatatcccaggcc

SEQ ID NO: 925355 - DNA, 607 bp, Homo sapiens
atataaacaggctaagcactgcaattaaaagacaaagactgtcaaactggacaagaaagcagggcccaaatttatgctgtctacaagaaactgactttaaatccacataatgacacagatagattaaagattaaaaacatgagaaaaaatatgccatgcatatactaggcatgaaattagctggcatagctatgttaacatcaggcaaagtagactttagaacaaggaatattaccagggatagggagggacatttcagaatgataaaggaagaaatgtattatgaggatataacaattctaaatgtcaatgtacytaattatagaactccaaaaatacataaaggaaaagctgacagatctcaaagaaggaacagacaaatcagcaattagagttggcaattaaacattcttctcagtaattgatagaacaagtagacaggaagttagtaagaatatgttccttactcaggaacaaagtactagccactatcaacctgcttgcccagttcacaattactgacactccacccaactactgacaaataaatacacattctttccaagtacatgtagcatgcttaccaagatagaccatatcccaggcc

SEQ ID NO: 925356 - DNA, 606 bp, Homo sapiens
tggacacagacagaggggagaaggccacaagatgatggaagaggcagtgattggagtgacgtggccacaatccagcgaccaccaggggccaccagaagttggaagaggcaaggaaggaaccttccccagagcttttgggggcagcacggctctgttgacaccttgatttcagacttctggcatccagaacagtgaaagaataaattttagggggctgggcgtggtggctgacgcctgtaattccaacactttgggaggccawggcgggcggagcacctgaggtcgggagtttgagaccagcctgaccaacatggcaaaaccctgtctctactaaaaatacaaaaattagccgggcatggtgtcacatgcctataatcccagctactcagaaggctgaggcagaagaatcgcttgagcctgggaggcagtggttgcagtgacctaagatcgccccactgctctccagcctgggcgacagagggagactgtgtctcaaaaaataaaagaataaattcttgttgttttaaaccagcaagctggtgatgatttgttatggcagctcccaaaaatctaacacagacaggaagcagtgggtgggtgatgaca

SEQ ID NO: 925357 - DNA, 606 bp, Homo sapiens
tggacacagacagaggggagaaggccacaagatgatggaagaggcagtgattggagtgacgtggccacaatccagcgaccaccaggggccaccagaagttggaagaggcaaggaaggaaccttccccagagcttttgggggcagcacggctctgttgacaccttgatttcagacttctggcatccagaacagtgaaagaataaattttagggggctgggcgtggtggctgacgcctgtaattccaacactttgggaggccaaggcgggcggagcacctgaggtcgggagtttgagaccagcctgaccaacatggcaaaaccctgtctctactaaaaatacaaaaattagccgggcatggtgtcacatgcctataatcccagctactcagaaggctgaggcagaagaatcgcytgagcctgggaggcagtggttgcagtgacctaagatcgccccactgctctccagcctgggcgacagagggagactgtgtctcaaaaaataaaagaataaattcttgttgttttaaaccagcaagctggtgatgatttgttatggcagctcccaaaaatctaacacagacaggaagcagtgggtgggtgatgaca

SEQ ID NO: 925358 - DNA, 606 bp, Homo sapiens
tggacacagacagaggggagaaggccacaagatgatggaagaggcagtgattggagtgacgtggccacaatccagcgaccaccaggggccaccagaagttggaagaggcaaggaaggaaccttccccagagcttttgggggcagcacggctctgttgacaccttgatttcagacttctggcatccagaacagtgaaagaataaattttagggggctgggcgtggtggctgacgcctgtaattccaacactttgggaggccaaggcgggcggagcacctgaggtcgggagtttgagaccagcctgaccaacatggcaaaaccctgtctctactaaaaatacaaaaattagccgggcatggtgtcacatgcctataatcccagctactcagaaggctgaggcagaagaatcgcttgagcctgggaggcagtggttgcagtgaccyaagatcgccccactgctctccagcctgggcgacagagggagactgtgtctcaaaaaataaaagaataaattcttgttgttttaaaccagcaagctggtgatgatttgttatggcagctcccaaaaatctaacacagacaggaagcagtgggtgggtgatgaca

SEQ ID NO: 925359 - DNA, 719 bp, Homo sapiens
cgctggacagtataaacaaagaagaaaaggaggcttgcacttctgaagttttgattcatacagtttataacctttcggtattgacttttttcacagcataaaatttttagaaattcattcatgttaaggcatgtatctattgtttaaaaccttttagtgctgagcagtagcattccatggtatggatgtaccacatatgtgtaatcatttttccactacaggatatctggattctttccagtttggggctattagagtaaaactgctatatttatttacatacaaattctccgtgaatgtaaatttttatttccctatgataaatgcttaggaatacaaatattgggtcatataagagttgcagaattttttttttttttttttgagacagggtttcgctcttgttgcccaggctggagtgcagtggcacaatcttggctcactgcaacctctgcctcccaggttcaagcaattctcctgcctcagcctcctragtagctggaattacaagtatgcaccaccacgctcggctgattttgtatttttagtagagatggggtttctccatgttggtcaggctggtctcgaactcttaacctcaggtaatctgcccgcttcggcctcccaaagtgctgggattacaggcgtgagtcactgtgccgggccgcagattttgttttttaagaagccatcaaaaagtgttttccaggagagcaata

SEQ ID NO: 925360 - DNA, 573 bp, Homo sapiens
aaataataaatgcacagagaccataataaatcaactgcttgcagattcatatcaaaaccctatcagcaagtggcaagtgacaattaagctgcttccagtggcaggctttatagcagcaagtgagttaacgtacttccattgtatggctacrtctggtggcaggccttaaatcagaatccagcacttattttagtccatatgtggtccgtagaatatttaccactttcgtctgtgcctcttttcctcactgcacacttacctcactcacagttttggtaaccccacaagctaaccctaggcaaaatgagtaaaaagcaaacatcaccagagagcttctttgaaaagggggaaagatctaatggtgagactctgagaccgccaacaaaaagaaagctgcgtttaaaacaaaataccaagagtcctatttagagtacaggttcattgcaacaggtgattcacattcttcaagaacgctttgtataatatgtggtaactagccatccgacaaagccataaaacctgcaaaactgcttcaccacatggagactaagcaccctgcattaaaagacaagc

SEQ ID NO: 925361 - DNA, 573 bp, Homo sapiens
aaataataaatgcacagagaccataataaatcaactgcttgcagattcatatcaaaaccctatcagcaagtggcaagtgacaattaagctgcttccagtggcaggctttatagcagcaagtgagttaacgtacttccattgtatggctacatctggtggcaggccttaaatcagaatccagcacttattttagtccatatgtggtccgtagaatatttaccactttcgtctgtgcctcttttcctcactgcacacttacctcactyacagttttggtaaccccacaagctaaccctaggcaaaatgagtaaaaagcaaacatcaccagagagcttctttgaaaagggggaaagatctaatggtgagactctgagaccgccaacaaaaagaaagctgcgtttaaaacaaaataccaagagtcctatttagagtacaggttcattgcaacaggtgattcacattcttcaagaacgctttgtataatatgtggtaactagccatccgacaaagccataaaacctgcaaaactgcttcaccacatggagactaagcaccctgcattaaaagacaagc

SEQ ID NO: 925362 - DNA, 573 bp, Homo sapiens
aaataataaatgcacagagaccataataaatcaactgcttgcagattcatatcaaaaccctatcagcaagtggcaagtgacaattaagctgcttccagtggcaggctttatagcagcaagtgagttaacgtacttccattgtatggctacatctggtggcaggccttaaatcagaatccagcacttattttagtccatatgtggtccgtagaatatttaccactttcgtctgtgcctcttttcctcactgcacacttacctcactcacagttttggtaaccccacaagctaaccctaggcaaaatgagtaaaaagcaaayatcaccagagagcttctttgaaaagggggaaagatctaatggtgagactctgagaccgccaacaaaaagaaagctgcgtttaaaacaaaataccaagagtcctatttagagtacaggttcattgcaacaggtgattcacattcttcaagaacgctttgtataatatgtggtaactagccatccgacaaagccataaaacctgcaaaactgcttcaccacatggagactaagcaccctgcattaaaagacaagc

SEQ ID NO: 925363 - DNA, 607 bp, Homo sapiens
caaagcaggcacagaggcagggctgcctaagcccttgcgagcccatcccacacaatcatgtatccaggatttgggacatggggtcaagggagattatattgaagctttaagatttaatgtcttccctgctgggtttcagacttgcagaggcttgttgcctctttcttgtggccaatttctctcttctgggatgggaatattyactcaatgtctgtgtcaccattgtatcaatatattgggagtaaacaacttgtttttgatcttacgggctcataggtggaagggaattgccttgagtctcagatgagactttggacttttgagttgatgctggaatgagttagaacttttggagactattggggaaggatgactgtattttccaatgtgagaaggacatgaatttggggggcaaggaatggaataatatagtttggatttttgtcccctccaaatcacatgttgaaatctgatccctcatgttggaggtggggcctggtgggagatgtttggatcatgggggtgaatcctccatgaatggcttggtgacctcttcatggtagtgagtgagttctcactccattagttcatgtgatagctgttgttt

SEQ ID NO: 925364 - DNA, 628 bp, Homo sapiens
aatacccatcccccgttcctccttgccccttttcctcacccttggtaacctctagtctacattctgtttttacggatttgcctattctaggtacctcatataagtggaataatacaatatttgcctttctgtgtctggcttacttcaccaagcgtaatgttcccaaggttcattcatattgtattgcagcayataccaaaatttcattccttttttatgactgaataaaaagcaacctgtgttttaacaaccactccaggtgattctgatgcatgcgcaagtctgagaatcactgacctaggagtaatgcttctcacactttacttgtataaggaggcatggtggtgcatgcctgtaatcccagctacttgggaggctgaggtgggaggatcgcttgagcccaggaagtcacggctatagtgagctgtgatcacaccactgcactccagcctcgcaagaccttgtttctaaacaaaaatttactgtacataggaatctcttgaggatcttgttaaaatgcaggctctgattcattagctggcttattagctgattcatttgtggagcccaagattctgcattcctgacaacctatgcttggatagagttgagagccagctcttaaggc

SEQ ID NO: 925365 - DNA, 596 bp, Homo sapiens
tggagaaacagtgtaaactggcagtgtaaacaaaagcagggcatgtatgagtagttgagaatggtgaataggagtatgactagacagaagatagtagggatgacaagtttttttggggcacagtccaagttggtctggtgtctggaatgagattgggkcttaataaaaaaaggagcgtccatacaggagctcaaatgggctgtaccctgtagcattctgaggacaggcctgaattctgagaagggaaagtggtaaaagtattgtccattcctttttaagttggtggctgagcttggtgaggtgtgtttttaaaagacctttagtccgttctacttttcctgaacactgaggactgtaagggatatataaaggcttcactgaataccaagagcctgaaaaactgcttggctgatttgactaataaaggctggtccattatcagactgtatagaggtgggaaggctaaacagaggaattatgtctgacagaagggaagaaatgactgtggtggccttctcagaccctgtaggaaaggcctttacttatccagtgaaaatatctacttagactaagaggtatttttgttttctgactca

SEQ ID NO: 925366 - DNA, 633 bp, Homo sapiens
tggctgatttgactaataaaggctggtccattatcagactgtatagaggtgggaaggctaaacagaggaattatgtctgacagaagggaagaaatgactgtggtggccttctcagaccctgtaggaaaggcctttacttatccagtgaaaatatctacttagactaagaggtatttttgttttctgactcagggcatgttgaataaagccaatttgccagttctggktgggggcaaatctctgagcttgatgtgtagggaagggagggggcctgaataatccctgagaagtagtagaatagcagatggaacactgagaagttatttccttgaggatagatttccacaatggaaaggaaatgagaggttctaagaggtgggctagtggcttgtactatagcatagcctgcctttgctgctgtgtggccattaggcctggtggaactgccatcaataaaccaagtgtgatcagggtgaggaacaggaaaggaggaaatatggggaaatgggatgaatgtcaggtggatcagagagatacagtcatgggggtcaggtgtggtatcaggaataatgtgggaggccggattgaagtcccggccaggaataatggtaattgtgggagacttaacaaaga

SEQ ID NO: 925367 - DNA, 633 bp, Homo sapiens
tggctgatttgactaataaaggctggtccattatcagactgtatagaggtgggaaggctaaacagaggaattatgtctgacagaagggaagaaatgactgtggtggccttctcagaccctgtaggaaaggcctttacttatccagtgaaaatatctacttagactaagaggtatttttgttttctgactcagggcatgttgaataaagccaatttgccagttctggttgggggcaaatctctgagcttgatgtgtagggaarggagggggcctgaataatccctgagaagtagtagaatagcagatggaacactgagaagttatttccttgaggatagatttccacaatggaaaggaaatgagaggttctaagaggtgggctagtggcttgtactatagcatagcctgcctttgctgctgtgtggccattaggcctggtggaactgccatcaataaaccaagtgtgatcagggtgaggaacaggaaaggaggaaatatggggaaatgggatgaatgtcaggtggatcagagagatacagtcatgggggtcaggtgtggtatcaggaataatgtgggaggccggattgaagtcccggccaggaataatggtaattgtgggagacttaacaaaga

SEQ ID NO: 925368 - DNA, 621 bp, Homo sapiens
actcagctctgcccctgtccttcagcgggccctgacccctgacccctggcccctgacccctgtcagaggagctgtctcgcctgggagggtttctctagtgccttttctctgggcttccttgaccttgtgtctagatgctggcctagtttttggtacttcactcagtcattcaagaagcattaattatttactgtgtgctgcgtcgtgtacaggccgagtgggccctggcctcccagagctccctgtccatcccattatcattcctgtcaccatcagtatcattattattatcatcatgagtgctggcattggccttagatgagtattcatattgcctctattttgttccaacaatttcaagtacctcttaagaatacacatagcaggctgggcgtggtggctcacacctgtaatcccaayactttgggagactggggcaggcgaacacctgaggtcaggagttcgagaccagcctggccaacatggtgaaaccctgtctctactaaaataacaaaaattagctgggcgtggtggcgggtgcctgtaatctcagctacttaggagactgaggctgtagaattgcttgaacctgggaggcggaggttgcagtgagcctagatc

SEQ ID NO: 925369 - DNA, 420 bp, Homo sapiens
gtgaatgaattctaggtaaaaatgaaatattcatgttacaaacatatccttttttatgaatactgattaacagacattttcagttaacctatccacttgcattcctgaatatatcattaagtgggcttttcataacagtatctctcacttattctactgtttattgtataaatacatacwgagcatcttctattctctaacttgcatgccagacacttaaggagtcaaagtaaacacacctacattcacagagcgcacagcctgtgaaggaaggacactagtgcaggaaagactgcctcccagtgtgacacatgctatccaagagttgtacttgtggctcaagggtgctcagaggagagggtatctaaaaattccaagttatcttactgccatcctgaagaggaatgccacccccaagca

SEQ ID NO: 925370 - DNA, 596 bp, Homo sapiens
aaatgtacacaaatcagtagcactgctatacaccaacagtgaccaagctgagaatcaaatcaagaactcaaacacttttacaatagctgtaaaaaaatacttaagaatattcttacccaaggaggtgaaggacctctacaaggaaaactacaaaacacagctgacatcatagatgacacaaacaagtggaaacacatcccatgctcatggatgggtagaatcaatattgtgawaatgaccatattgccaaaagcaatctacaagttcaatgcaattcccaccaaaatatcatcatcattcttcacagaactagaaaaaaacaattctaaaattcatatggaacaacaaccaaaaaaaaaaaaaaaaacccgcatagccaaagcaagacttagcaaaaagaacaaatctggaggcatcacattacccatcttcaaactatactacaaggctataatcaccaaaacatcatggcactgacataaaactaggcacatagaccaatggaaaagaagagagaatccagaaataaagccaaataattatagccaactgatttttgacaaagcaaacaaaaacataaagtggggaaaagacat

SEQ ID NO: 925371 - DNA, 673 bp, Homo sapiens
catcatagatgacacaaacaagtggaaacacatcccatgctcatggatgggtagaatcaatattgtgataatgaccatattgccaaaagcaatctacaagttcaatgcaattcccaccaaaatatcatcatcattcttcacagaactagaaaaaaacaattctaaaattcatatggaacaacaaccaaaaaaaaaaaaaaaaacccgcatagccaaagcaagacttagcaaaaagaacaaatctggaggcatcacattacccatcttcaaactatactacaaggctataatcaccaaaacatcatggcactgacataaaactaggcacatagaccaatggaaaagaagagagaatccakaaataaagccaaataattatagccaactgatttttgacaaagcaaacaaaaacataaagtggggaaaagacattctagttaacaaatggtgctgagattattggcaagccacatgtggaagaatgaaactggatccttgtctctcacttaatacaaaaattgatacaagatggatcaaagacttaaatctgagacctaaaaccataaaaattctagaagataacatcagaaaaatgcttctagacattcacttaggcaaagacttcatggccaagaacccaaaagtaaatgcaacaaaaacaaaaataaataga

SEQ ID NO: 925372 - DNA, 609 bp, Homo sapiens
aggtatttgtatgtgaaagagaaacacatatttagaaacacagcaagggagattttgaataaagagagagatgaatttataaagtaggaaaaaaagaatctgaaagatacaaagtgattataaaagaattgacaggacaataaatacttcaaatactttyaggaagtaaatgagtaggagtttaggagggataaacgagataaattccatgcaatgatcaaggaaagcaagagagcagataatacaaaagaaaaagaagaaggttcacataaatagcttctggagtgcaaattataaagacatcaacatttttgatcatataataagtactggcttacagctaagtggttccaaatactggtaattaaaacaatgatgtatacgttaaagattgcaaaacttaaaagcagatttttatgggaacttttttcgaaaggatacatgaccaccttcttaaatagtatgactttacatagactctttttctggtccttactgctcctcccacaacagggaagcccgatcagttctgtcagtataaggttttcttctatttgcccttagtttagatctccatcatcaattccacttactattgtaataccttca

SEQ ID NO: 925373 - DNA, 666 bp, Homo sapiens
caagtgacctcctctttggctcacattttcttctggacttctagagcacagctttgtgtcagttcatctatttgactggtcaagtcttctcactcccctttggtgcatcctcttcaacttcctgccatctaaacactgggaggaccccaggacttggccctcagacatttttcttcctaacatactctgcatcctctaatggcacctggtctcataactttaaatgccatctgtgtggctatgacwttagtctactctctccccaacctacgtgacatctccatttgtaacttccattttcctcaactaaacctgattcttttacagacttccctatctcaataaatggtttccaatgacttaggccaaaacttttggattcattcttgtctctcttttttttacccaattccattccatcagcagatgctttggattttaccttcaacacacctcagatcttcccactcttctcaccttcatttctatccctcaggttctagctcatcttcttgcatccagcttccagcatcctctcgctgtctttttgccactgtaaccttagtcagcttcgtaaaaggtacatcatatcctatcgctcttcttttctcatttcaaaatcttcccatcgtacttgatatcgtagatcaacactcaggattgatt

SEQ ID NO: 925374 - DNA, 581 bp, Homo sapiens
gcaagcagggggtacgtgactgggggctgcatgcaccggtaattagattggaacaaaacaggatagggattttcacagtgcttttctatacaatgtctgtaatctatagataacataaccgattaggtcaggggtcgatctttaactaccaggcccagggtgtggcgccgggctgtctgcttgtggatttcatttctgccttttagtttttactttttctttctttggaggcagaaattgggcataagacagtatgaggggtggtctcctcccttagtttcaaaatgcaaagtaggaaatgtaaaaaaaagtctaagatgggttttgattttggatccttcaaagcagctccakcataataatcacatatagtaagataacggtccactttttccatatccagatttaaaaattatgaataaattcaaatttaagagctgtgtgtgatttttaggcctgctgtaacaaagtaccacaaattgagtggcttagacaacagaactttattgtctcccagttctggagtcaggaggtcctaaatcaaattgctgatagggctggttccttctgagggctgcgag

SEQ ID NO: 925375 - DNA, 567 bp, Homo sapiens
agaggaaaaataggcttgcacccaagcctatttttatgaaccttatgaaccaagaaacaagaacaattaaaaagacaggttggtatggcaggcaatgctagcaactaacccactcatcctcataataaccccaataaagtatattttcaggatgctttgtagctaggggtggctgtgtgattcagttatagtcaatgatacctaagaggagggcattgggtagggaggactcataggaaagcttttttaaatgtggcaggtctgctgtcatcctccttttgctctttgcctttgtagcaacacattgtagatgtcctgcctctgagttcacccatctacactgacggcctccacctgtgtccatgctgttccgcttcttgacctaacagctttctctagaagcttgtttagccattgtatgggcagcstataaaagctggtgtttaatgtccccacagcaacgctcaacgagtgaggtttgggatttggtagatagataactcagctttcccaccccttagtagggaaactctgaggacagtcctataagattcctcagaggtcccc

SEQ ID NO: 925376 - DNA, 564 bp, Homo sapiens
ccgcgccagggtgcttggtggacaggctgctttcagagcgagcctgagatacagacagacgatggccacacaatatataaaaaacagaactctggcccacgacccacagtgacctgcctaggaaaccaacctctttatctatagcaaacagcccgggaagccagtctcttgcaggaggccagcctcttttttttttttttttttttttttttttttttttgagatggagtctcgctctgtcgcccaggctggagtgcagtggtgcgatctcggctcactgcaaccgccgcttcccgggttcaagcgattctcctgcctcagcctcctcagtagctgcaccaccactcacggctaatttttgtgtttttattagagacggtgtttcaccatgttcstcgagctcaggctggtctcaaactcctgacctcgggcaatccacccaccttggcctcccaaagtgctgcaattacaggcatgagccacttcttatctctagtaacaacccaggaagctaagccatcatttccgtaaaagtcagtctaaaatggccaggacttggttaat

SEQ ID NO: 925377 - DNA, 557 bp, Homo sapiens
tcgctccactgcctctcaccttccgctgtgcagcccggttcctaacaggccacagaccaggaccagtctgtggccggggggttggggaccctattctatagtactgtaggatgactacaggtaacaatttcttttattatatattttcaaatggcttgaagagaagaatttaaatgtttccaacacaaggaaatgataagtgtttgaggtgacagatatattaattacccgaataygatcaccacacatcgtataaatgtatcagaatatcacaccataccctacaaatacatacaattatgtgtcaattaaaaataatgaaaaaaaggccaggcgcagtggctcacacctgtaatcccagcactttgagaggccgaggcaggcagatgacttgaggccaggagtttgagaccagcctggctaacatggcaaaaacccatctctactgagaatacaaaaattagccggcgtggtggtgcctacctgtaatcccagctactcgggaggctgagccaggagaatcgcttgaacccaggaggcagaggttgcagtgagcc

SEQ ID NO: 925378 - DNA, 595 bp, Homo sapiens
caaatttaatttcagaagtgaaacctgcctgggcgtggtggctcgtgcctgtaatcccagcaatttgggaggccaaggcggacggatcacgaggtcaggagatgagaccatcctggctaacacggtaaaaccccgtttctactaaaaatacaaaaaattagccrggcgtggtggcacctgcctgtagtcccagctactcgggaggctgaggcaggagaatggcgtgaacccgggaggcgaaggttgcagtgagccgagatcgcgccaccgcactccagcctgggcgacagagcgagactccgtctcaaaaaaaaaaaaaaacaagaaagaaacccaggcgtccctccctcccagttagtgtccatccacgctgcgtctaatggagaaccttccatgtggtagtcagagccgagccccgggaatagaaggagccatctctgaagctgccgggagctgagggttttgcagtagaataaagagaacaagtcagcgtggggccagcccggggcccccagcataatcgatgcctgtgtggcagccatggtgctggtgaccattgaaggccagaggcgagagagtcgcagcttcggtgccg

SEQ ID NO: 925379 - DNA, 595 bp, Homo sapiens
caaatttaatttcagaagtgaaacctgcctgggcgtggtggctcgtgcctgtaatcccagcaatttgggaggccaaggcggacggatcacgaggtcaggagatgagaccatcctggctaacacggtaaaaccccgtttctactaaaaatacaaaaaattagccgggcgtggtggcacctgcctgtagtcccagctactygggaggctgaggcaggagaatggcgtgaacccgggaggcgaaggttgcagtgagccgagatcgcgccaccgcactccagcctgggcgacagagcgagactccgtctcaaaaaaaaaaaaaaacaagaaagaaacccaggcgtccctccctcccagttagtgtccatccacgctgcgtctaatggagaaccttccatgtggtagtcagagccgagccccgggaatagaaggagccatctctgaagctgccgggagctgagggttttgcagtagaataaagagaacaagtcagcgtggggccagcccggggcccccagcataatcgatgcctgtgtggcagccatggtgctggtgaccattgaaggccagaggcgagagagtcgcagcttcggtgccg

SEQ ID NO: 925380 - DNA, 621 bp, Homo sapiens
attccccccacatacccccacccccggtcccctagggccggggactttatcttctgttgcagactgaattgtcttcctccaaaattcacatgttgaaatcttaacctccagaaccccagaatgtaaccatatctggttgatayagtctttaaagaggtaattaagataaaacaaggtcacataggtgggccctaatccaatatgactgctgtccttataagaagaagagattaggacacagacactcacagagggaagaccacgtgaggacccagaggaagacagtcatctcccagccaataagaggggcctgagaaacaaccacccctgccagcaccttgatctctaggtgaactccttgatttcttctggccttcaggattgtgggaaaacgaatttctctgctgtttgagccagccaatggttgtattttgttctgggtgtctgctatggactaaatgtttgtgtctttcccaaattcatacattgacaccctaatccccagtggcttgggcttaggaggtggggcccttgggaggtgataaggtcacgagggtggagccccttatggtgggattagtgcccttatcagaagagacaccagggagcttgcttcatctc

SEQ ID NO: 925381 - DNA, 621 bp, Homo sapiens
attccccccacatacccccacccccggtcccctagggccggggactttatcttctgttgcagactgaattgtcttcctccaaaattcacatgttgaaatcttaacctccagaaccccagaatgtaaccatatctggttgatatagtctttaaagaggtaattaagataaaacaaggtcacataggtgggscctaatccaatatgactgctgtccttataagaagaagagattaggacacagacactcacagagggaagaccacgtgaggacccagaggaagacagtcatctcccagccaataagaggggcctgagaaacaaccacccctgccagcaccttgatctctaggtgaactccttgatttcttctggccttcaggattgtgggaaaacgaatttctctgctgtttgagccagccaatggttgtattttgttctgggtgtctgctatggactaaatgtttgtgtctttcccaaattcatacattgacaccctaatccccagtggcttgggcttaggaggtggggcccttgggaggtgataaggtcacgagggtggagccccttatggtgggattagtgcccttatcagaagagacaccagggagcttgcttcatctc

SEQ ID NO: 925382 - DNA, 745 bp, Homo sapiens
acaccgtacacctgtgtctgagtactcatttcatccatcagccagggtctgtgggacacacctggcagggaaacttcttgaaggtcccacagttagtaaatagcaaggtcaagacttaaaccttgctttgtctaaaatcaaagggtgctctcttaaccacacaaaacccctacaggtactctctacagcctaaggccaacgacactcagaggagcccctcttcctccctgctcagcttcagagaccaggaatcacataacaacgtgcttcaaagatgcatcccatcaacctctcattcctcttcttctcaaaccctcctttgttctctagctgcttcttgtttttgttttttgtttgagacagggtctccttctatctcagcctggagtgcagtamtgtgatcatagctgactgcagccttggactcctgggcttaagccattctcccacttcaccctcccaagtacctgggaatataggcatgtgccaccatgcctggttaatttaaatttttttttttttttgtagatacagggtctcactatgttacccaggctggtcatgaaatcctgggctcaagtgatcctcttgccttggcctcccaaattgttgggattacaggcatgagccagcatgtccagcctgactcttgtttgtcttcttgtcttgacttactcctgaccatggctgacttcccttccagcttgggaactcctttgcaggaagtgcagggatgggtacacac

SEQ ID NO: 925383 - DNA, 725 bp, Homo sapiens
gtgccaccatgcctggttaatttaaatttttttttttttttgtagatacagggtctcactatgttacccaggctggtcatgaaatcctgggctcaagtgatcctcttgccttggcctcccaaattgttgggattacaggcatgagccascatgtccagcctgactcttgtttgtcttcttgtcttgacttactcctgaccatggctgacttcccttccagcttgggaactcctttgcaggaagtgcagggatgggtacacactgttttgcccatctctgcactttctgcaaagcccaccacaatggtctgaaatccttcagtcctcagcagctttgctcagagttgagctgaagatacgatgctcctgggagcagttgaaaaccatgacgaggttcagccacacttcctgctctgcaaaagcaggcaacccaagtccttccttcacttgtctgccaagtaaactcctattcactctgcaaagcccaggtcagatgtcagcctcccttcggagaccctaccctgccccctgatgtgtgctcccagacctctgcgtaaaaatacttcaacctcagtgtagttacattgcacagtgttactcctttctgcctcaatttcccctgcttggccaggaggtactaaatggctgggaaaatctttaaaaaaattatctgtctctcacgttctacacagttttcagcacttgacagtattcaataaatattag

SEQ ID NO: 925384 - DNA, 583 bp, Homo sapiens
cctgtgttacccctcagcacagcattgccaggaaggcagaaagtccaagagagggagcttagagatgtttccggggatccacagccttcttctctatcagcaaattgatactcagagagggtaaggggttggcctggagtcacacagcaagtgagggcaagaagcctggtgctctgacccaggttcccatttggatactgtggtaccccagacatgctcttgascctaccaattccagtatcaggattccctgggttctctctctctctctgcctatctctgtctctctgcctctgactctttctgtctccgcctctttttgcttctctctctccttcaaatacatcatcacataatgaatagatgaacaaaatgtggaatacctgtacaatgcaatagtatttggacataaaaatgaatgaaatattgatacatgctacagcatggaaaaatcttaaaaatatgcaattcaaaaaagccaggcagggcacagtagctcgcacctgtaatctcaccgctttgggaggccaatgtgggaggattgcttgaccccaggagtttgagacctgcctggccgacatag

SEQ ID NO: 925385 - DNA, 570 bp, Homo sapiens
tgatttcaacaaaattcagttcctcaatcagacaaggaaagaaggaaagaaggaagaaaggaagggagggagggagggagggaaggaaagaaagaagggagggagggaggaagagactatattgcttcctgaaacaagaagttgctttctgcaagccagactggcctgggaatgactaactcttccccatgaggtaacccccatgctctccatggggtaacttgtccttcttccccccaccttcccaaaagctccccagccaggcaacaggccctaggaattggmcttctgatgcctcttcccttccaagctgagatcagacccacttctctgctgcagacggaaacaaagaagtctttgtggggtgactgcctttgccgccccccacctcactccttccgcccctgcctgggacattaggtgctgggtaacaattagcaactcatcacctgcttctgtagaaccagacacctggccttccttcagctcttggctgttgtatggtctgaatacccactcgacaaaaccagagcactcgggcggtgagcaccagctcaagatgccacagct

SEQ ID NO: 925386 - DNA, 759 bp, Homo sapiens
acattcataagtacacacatatatcatgtatacatactgtatatgcatgcattaaatttattgtatttttctggccgggcgccgtggctcatgcctgtaatcccagcacttagggaggcccaggcaggcggatcatgggccaagagactgagaccatcctggccaacatggtgaaaccccggtcatactaaaaatacaaaaattagctgggcgtggtggcacctgccagtagtcccagctacttgggaggctgaggcaggagaatcggttgaacccgggacgcggaggttgcagtgagccaagatcccaccactgcactcccacctcgcgacagagtgagactccaccttaaaaaaawatatatatatttatataaatatataaatatattttatataatatttaaatataaatatattttatataaatatatatgtttttatacaaatatatattttatattaaatactttttatataaatatatattttatattaaatacattttatataaatatatactttatataaaaatatatattatttttctatgtatcccgggaccttgctgtgtagaattattaattctagtcagttctctattgattttgttgggtttactatgctgtcatcaattctgctaatagtgattttttttccccaagcctttctaggcttttctgtactgttctagaaccacaaataaaatagtgaatatatgtgttgattacaaacctcggtgaaagctttaaatatttta

SEQ ID NO: 925387 - DNA, 759 bp, Homo sapiens
acattcataagtacacacatatatcatgtatacatactgtatatgcatgcattaaatttattgtatttttctggccgggcgccgtggctcatgcctgtaatcccagcacttagggaggcccaggcaggcggatcatgggccaagagactgagaccatcctggccaacatggtgaaaccccggtcatactaaaaatacaaaaattagctgggcgtggtggcacctgccagtagtcccagctacttgggaggctgaggcaggagaatcggttgaacccgggacgcggaggttgcagtgagccaagatcccaccactgcactcccacctcgcgacagagtgagactccaccttaaaaaaatatatatatatttatataaatatataaatatattttatataatatttaaatataaatatattttatataaatatatatgtttttatacaaatatatattttatattaaatactttttatataaatatatattttatattaaatacrttttatataaatatatactttatataaaaatatatattatttttctatgtatcccgggaccttgctgtgtagaattattaattctagtcagttctctattgattttgttgggtttactatgctgtcatcaattctgctaatagtgattttttttccccaagcctttctaggcttttctgtactgttctagaaccacaaataaaatagtgaatatatgtgttgattacaaacctcggtgaaagctttaaatatttta

SEQ ID NO: 925388 - DNA, 611 bp, Homo sapiens
aagatagatataaccagtattttaaaaattatgttgtataaagcactaccctcagtgagatattagtagaacacacatgcacacacacgcacacacactcacactgagcccagattattctggcaaatgctgggttaagcaaaytgaaagaaacatcttttgtgctggacttctcagaacctggaatgtggctatatgactcataaaacagcaaggttaagacagagcatgtcattttttcccagaaatgttgaaacactttccttcccttggcttcagtgtcaccttctttctcctggttctccttcaatctctttggctgctccttcttgatttcctttttgacaatctgctgctgctcagccattctcttttctttcaccatggatttctcaagtgtgtttctattcctgcagattaaacttcccttgtttttcctgacaactctccttgtctgaccctccctggttctaaggcaggtgttccatctgtgtgggcttttggcatcctgggatgctcccagcatgttccctgccacacttcatcaggttttctccgtagactctgcgagggcagcaaccttgtctccactgttccttcaatgctcagca

SEQ ID NO: 925389 - DNA, 611 bp, Homo sapiens
aagatagatataaccagtattttaaaaattatgttgtataaagcactaccctcagtgagatattagtagaacacacatgcacacacacgcacacacactcacactgagcccagattattctggcaaatgctgggttaagcaaattraaagaaacatcttttgtgctggacttctcagaacctggaatgtggctatatgactcataaaacagcaaggttaagacagagcatgtcattttttcccagaaatgttgaaacactttccttcccttggcttcagtgtcaccttctttctcctggttctccttcaatctctttggctgctccttcttgatttcctttttgacaatctgctgctgctcagccattctcttttctttcaccatggatttctcaagtgtgtttctattcctgcagattaaacttcccttgtttttcctgacaactctccttgtctgaccctccctggttctaaggcaggtgttccatctgtgtgggcttttggcatcctgggatgctcccagcatgttccctgccacacttcatcaggttttctccgtagactctgcgagggcagcaaccttgtctccactgttccttcaatgctcagca

SEQ ID NO: 925390 - DNA, 785 bp, Homo sapiens
gatataaccagtattttaaaaattatgttgtataaagcactaccctcagtgagatattagtagaacacacatgcacacacacgcacacacactcacactgagcccagattattctggcaaatgctgggttaagcaaattgaaagaaacatcttttgtgctggacttctcagaacctggaatgtggctatatgactcataaaacagcaaggttaagacagagcatgtcattttttcccagaaatgttgaaacactttccttcccttggcttcagtgtcaccttctttctcctggttctccttcaatctctttggctgctccttcttgatttyctttttgacaatctgctgctgctcagccattctcttttctttcaccatggatttctcaagtgtgtttctattcctgcagattaaacttcccttgtttttcctgacaactctccttgtctgaccctccctggttctaaggcaggtgttccatctgtgtgggcttttggcatcctgggatgctcccagcatgttccctgccacacttcatcaggttttctccgtagactctgcgagggcagcaaccttgtctccactgttccttcaatgctcagcacataacacggaaactgactccataacatttagttggccaactgagactaaatgtatgttcctctaggtcttaaaaagttacagaaacatagcacaatagacaaaaaaaattctctttagtcaggagttctctatatatgtacaacagtttgaagtcattattaaagcaaagtgaaagaga

SEQ ID NO: 925391 - DNA, 718 bp, Homo sapiens
gttaaatagcatataaatatgattagagccttaaagtttacacttctctggtttgctcaaatttttttcaaaatagcgtatgcctttctaaaaaattgttagtatattttttaaaatgaacattaatatatatattttccaaaaacaaaatgcagctcccattggtaaatgatgatgttgagatacaacagacaacttmtcttggaaaccatttaatcagtgctcacttttgcactctttccagaaatgtcaatggctttaaaatgtagaagtatattatacaactaaacttacacttattcagtattgtgcaatatttagtacttgttctagctatctcttgctgaatagtaagccattccaaaacttaaggaattatttattgtttaatattgtttattgttattatttgttcagtgattttaaataatgttatttctcatggttttgtgggttgatgggcactacaaaagttctcttttggagtctttcttgcagttgctgttggttggctgctgctgaactcacctgaaggctccactagactaaagagcctagacgggtcactcatatggctggcagtgcatattggctgctgagtgtgatgcctatctgacctctccatgctatctggagtgctcacaacttggtagttggtcccaagacacacaggcaaatactacaaagcttcttaagacctagccttggaggtcctaga

SEQ ID NO: 925392 - DNA, 552 bp, Homo sapiens
actctttccagaaatgtcaatggctttaaaatgtagaagtatattatacaactaaacttacacttattcagtattgtgcaatatttagtacttgttctagctatctcttgctgaatagtaagccattccaaaacttaaggaattatttattgtttaatattgtttattgttattatttgttcagtgattttaaataatgttatttctcatggttttgtgggttgatgggcactacaaaagttctcttttggagtstttcttgcagttgctgttggttggctgctgctgaactcacctgaaggctccactagactaaagagcctagacgggtcactcatatggctggcagtgcatattggctgctgagtgtgatgcctatctgacctctccatgctatctggagtgctcacaacttggtagttggtcccaagacacacaggcaaatactacaaagcttcttaagacctagccttggaggtcctagaatacaacttctgctccatcctattggtaaagcaagtcattgtgaccagcacagattcaagaaattgg

SEQ ID NO: 925393 - DNA, 552 bp, Homo sapiens
actctttccagaaatgtcaatggctttaaaatgtagaagtatattatacaactaaacttacacttattcagtattgtgcaatatttagtacttgttctagctatctcttgctgaatagtaagccattccaaaacttaaggaattatttattgtttaatattgtttattgttattatttgttcagtgattttaaataatgttatttctcatggttttgtgggttgatgggcactacaaaagttctcttttggagtctttcttgcagttgctgttsgttggctgctgctgaactcacctgaaggctccactagactaaagagcctagacgggtcactcatatggctggcagtgcatattggctgctgagtgtgatgcctatctgacctctccatgctatctggagtgctcacaacttggtagttggtcccaagacacacaggcaaatactacaaagcttcttaagacctagccttggaggtcctagaatacaacttctgctccatcctattggtaaagcaagtcattgtgaccagcacagattcaagaaattgg

SEQ ID NO: 925394 - DNA, 619 bp, Homo sapiens
aatacacatttttctccccagcacatgggttattttaaaggatagaccatatgttaagtaacaagtctaaaaacattccaaaaaattgaagaaatatcaagcattttctctgactacaggggataaaactagaaatcaattaaaaaaggaatttaagaaactatacaaacacatggacattaaacaatatgctcstgaatgattagtaggtcaataaaaaagttaagaagaaaatagaaaaatttcttgaaacaaatgataatggaaacataacatagaaaatcctatgcagtatagtaaaagaggtactgttataaaaggaaaatttataactgtaagtgcctacataaaaaacagaaagacttcaaataaataacctaaaaatacatcttaattaattagaataaaaagaccaaacctaacccaaaattagaagaaaagaaatagtaaagattagagcagaagtagataaagttaaaatgacaaaaataatgtaaagaattaatgaaagaaaaagttgattttttgaaaagtgaaacaattgacaaatatttaaacaggctaactaaaaaacagaaaagatacaaattagtaaaatcagaggtgaaaaaggagacat

SEQ ID NO: 925395 - DNA, 587 bp, Homo sapiens
ctgcaagaatggccataatcaaaaaatcaaaaactaataaatgttggcatggatgtagtgaaaaggaacacttttacactgtctgtgggaaggtaaactagtacaaccactgtggaaaacagtgtggagattccttaaagaactaaaaatagatctacaatttgatccagcaatcacactcctgggtatctacccagaggaagagaagtcattatatgaaaaagatactcacacatacatgtttacagcagcacaatttgacatttcaaaaatatagtaccagcccaaatgcccatcaatcaacaagtggataaagaaaatatgatttatatatatatatgtgtgtgtgtgtgtgtgtgtgtgtgtgtgtgtaatggaatactattcagccataaaaaatgaataaaataatggcatttgcaacmacctggatggaattggagaccattactctaagtgaagtgactcgggaatggaaaaccaaatattatatattcttgcacgtaagtgggagctaagctatgaggatgcaaaggtgtaagaatgatacaatgaactttggagactcaggagactcagttgcttat

SEQ ID NO: 925396 - DNA, 610 bp, Homo sapiens
atgaagctgaaaaccatcatccttagcaaattaacacaggaacagaaaaccaaacaccgcatgttctcacttgtaagagggagctgaacaatttcctttctttcttaacagattagttgcaaggccttttaaacaaccctagaaatatgtactattatcccaatgttataggtaggaaaaatgaggcagagaaaagttaaataacatggccaaggtcatagctgggaagtggcacagccatgattcagactgcagtggcctggtcccagagctcatgttcttaacctctacagtatgttatgtctccagtagcctcattgggcagaggacacacatagactgatgcataacaagagatagatacagacacctggagagacctggacaagcagctttgtgtggtaggagagagtgctgtgcagtgtggttggctgaatagcaagccctagtaggrgagggatggagatggattaaaaacaaaatgaggcagctcacacctgtaatcccagcaccttgggaggctgaggtgggaggatcatgtgaggccagcagttcaagaccagtctgggcaacacatgagaccctatctgtacaaaataccaaaaagaat

SEQ ID NO: 925397 - DNA, 686 bp, Homo sapiens
aaggggcttctaaggaatttctgtccatctaaatgctaccacctgtcctacaagaggtacattgacttttccaaccacacagccccaagagaagacatagcatttgtaggctcactgctttagcaattctgcaatcagttcattcattacccaacagcctgctaggtgtcaggagctatgcattctgcctgatccacagcaggcactctgtaaatgttagtttattgagccaatgctgagatcacataacctttcccccaatccttgtgaaatcagctttgaaatagcactgcagggtccactccatcttgggaccatcaatataacccctttccatagaaaatatggcatttttgaaacattccaatccatgttgtataattgggacccacccttcaagggtagctagagcaggctcttcactacttcggccaagaactccagaaaggagtgggaagcagaaagtggccccagtyagcatcttaatgccccatagctcaataagttcatcaatacattccattgcaccatcacagggcaatgccacctgcctgactgcctatttctccccacttcaaaaagaacatctctcagatgagcatgagaactagattccaaggtcctctacaacccatggagtttaactccatagggagatttcaaatacctagattctcaatggaatt

SEQ ID NO: 925398 - DNA, 549 bp, Homo sapiens
gttaaaacataaatcagaatatgccactcttctgctgcgttctctccaatgacttcctgtgtctctcagaataaaagccaaactctttacaactgcctacaaagactgctatttaaagaagaccacaacagtggcatcatctggtaacttggaaatgcagaagtgcagaacccaactcccaactacaaatcagaatctgcattttcacaagaccaagtcatgtgcacrcacaccaatttttcagaaacactgacctacaagaccttgggtgacctgtccccactaagcccccgagttcatctacttcacttcctctcactcactcttctccagcctctttgttcctctgccattcatcagacatataagacacacttccacctagctgtttcttcggtctagaatcttcctgcccaggtgtctctatagtttgctccgtcacctacttcagttcttgacttagtgaagccttccttgtcatttaaaaagttcaaaaccccctgacacttcatactcttttttttttctacttagtacttcttgctatct

SEQ ID NO: 925399 - DNA, 651 bp, Homo sapiens
acagggtcccgatcccgttccttctcaatgggtgggatctccagacccaggtgtccggccacatcctgcaagtgtgtttggacttgcaacatgtccatacctccctagagtggaggtcctagagggaggrgaagccaccatgtttgctgttttgcagcctttactgttgataccttcaggtactggaaaacccagagttactagggacaggagcagatccccagcaaaccacagcagccctacagaaaagtggccagactgcttattacatgggtccccaatcccatatctccacactgggtggaacctccaggcctggttctccagccaccctatgctagtgctgtcaagccagtagcatctctgcaactccctgggacagagcttccagtgggaggttgccatctttgttgtcttgcatcttgtacccttgctgtatccaggctatggagaatccatggggactaggggctggtccagacccccagcataagccaaccacctcaaagaaaaatggccaaacttttctctacgcaggtgttagttctcacctatcctcactgggcaaggcttcctgacctgggactccagaataagaacgctgctctgacctgattacctcaatcagtggcagactggaatttctgagga

SEQ ID NO: 925400 - DNA, 573 bp, Homo sapiens
gccaggctgttattttacacagggtcccgatcccgttccttctcaatgggtgggatctccagacccaggtgtccggccacatcctgcaagtgtgtttggacttgcaacatgtccatacctccctagagtggaggtcctagagggaggggaagccaccatgtttgctgttttgcagcctttactgttgataccttcaggtactrgaaaacccagagttactagggacaggagcagatccccagcaaaccacagcagccctacagaaaagtggccagactgcttattacatgggtccccaatcccatatctccacactgggtggaacctccaggcctggttctccagccaccctatgctagtgctgtcaagccagtagcatctctgcaactccctgggacagagcttccagtgggaggttgccatctttgttgtcttgcatcttgtacccttgctgtatccaggctatggagaatccatggggactaggggctggtccagacccccagcataagccaaccacctcaaagaaaaatggccaaacttttctctacgcaggtgttagttctcacctat

SEQ ID NO: 925401 - DNA, 644 bp, Homo sapiens
ggaaatctctgctagatatccaagtctgaataactatagtctgtcacttcttccttcaagtaaaaatggtgtcccacagaaaaggcagctaattcagcttgtaactcattcacacaggtgtttttacctgagacatccatcctacttcagtatacggaaatgtttcatgcataattcctattccattacacagaatatttaaaaatacatgtacatgcactcaagggtcaaaatttaacaatttttactgcctcatcaaagacattcttaaacgaaactggcttttctttttcctttctttacaatgagtacatgatgatgaaagtccaatgactagtagtacagtttggtgccatttgatttttttttttttttttttttttttttttgagacagagtcttaaygctgtcacccaggctggagtgcaatggcacaatcttggctcactgcaacctctgcctcccgggttcatgcgattctcctgcctcagcctcctaagtagctgggattatggatgcctgccacctcgcccggctaagttttgtatttttagtagagacagggtcttgccatgttggccaggctggtctcaaagtcctaatgagaggtgaagccagctggacttcctgggtcgagtggagac

SEQ ID NO: 925402 - DNA, 564 bp, Homo sapiens
tgaaaggggccaacatagagctcagcccatggttcagagtgcaatccccagcccttggcagcttccatgtggtgttgagcctgtgagtgcacagaagtcaagaattggggtttgggaacctccacctagatttcagaagatgtatggaaatccctggatgctcaggcagaagtttgctgcaggggtgggaccccatggagaatctctggtagggcagtgcagaagggaratgtggggtcagagcccccatacagagtccccactggggctgtaagagggctaccgtcctccagaccccagaatggtatatccaccaatagcttgcaccatttgcctggaaaagctgcagtcactcaacgccagcccatgaaagcagccaggagggaggctgtaccctgcaaagccacaggggtggagctgcccaagaccatgggaacccacctcttgcattggcatgacctgggtttgagacatggagtcaaaggagatcattttggagttttaagatttgactgccctgctggatttcagacttgcatgggtactgtagcctctttgttttgg

SEQ ID NO: 925403 - DNA, 775 bp, Homo sapiens
accctgatataaactggtgtcaaacctgttagcatggctataattaaaaagttgagataatgtgtgttggtgagggtgtggaggaaagggaacccttgtacactgttggtgggaatataaattagtacagtcattactgaaaacagcatggaggttctgcaaaaaattaaaaataggactatcatatggcccagcaatccctctgccaggtatttatccaaagagatgaagtcaggccgggtgcaatggctcacgcctttaatcccagcactttgggaggccgaggcgggcagatcactggaggtcagaagttcaagaccagcctggccaayatggtgaaacccccgtctactaaaaatacaaaaattagccaggtgtggtggtgtacgcctgtaattccagctacttaggaggctgaggcaggagaatcgcttgaaccaaggagacggaggttgcagtgagctgagattgtgtcactggactccagcctgggtgacagagtaaaattccgtctcaaaaaaaaaaaaaaaaaagaaaaaaagaaaacaaaccaacaaaacacacaaataaccaaagaaatgaagtcaacacctcatcgagatatctgcgctcccttgttcattgcagcattattcacaatagccaagatatggaatcaacccaaatgtctatccaatggaggaatggataaagaaactgtggtatctgtatctctctatatagatcaatacaatgcaatattattcgactttaaaaaagaagatctttccactga

SEQ ID NO: 925404 - DNA, 502 bp, Homo sapiens
gggtgtcagggtcagtccaagtgaaagcgaagagaggctgggattaagggtgcaaaggaatagtaaagaaagcatgtttgagatctagaacagaataatgggttgtagaggcaggtattgaggataggagagtacatgggtttggcaccacggggtggataggcaaaacaatttggttgataaggtgcagatcctgaactaacctgtaaggcttgtctggttctaggacaggtaaaatgggggaattgtaaggagagtttataggctttaaaaggccatgctgtagcaggcgagtgataacaggctttaatctttttaaagcgtgctgcgggatgggatattggcgttkagtggggtaagggtgattaggttttaatgagatggtaaggggtgcatgattggtcaccaaggagggagtagaggtatcttatacttgtgggttaaggtggggggggcatacaacaggaggacgcaaaggtggctttggattgggaagaagggc

SEQ ID NO: 925405 - DNA, 502 bp, Homo sapiens
gggtgtcagggtcagtccaagtgaaagcgaagagaggctgggattaagggtgcaaaggaatagtaaagaaagcatgtttgagatctagaacagaataatgggttgtagaggcaggtattgaggataggagagtacatgggtttggcaccacggggtggataggcaaaacaatttggttgataaggtgcagatcctgaactaacctgtaaggcttgtctggttctaggacaggtaaaatgggggaattgtaaggagagtttataggctttaaaaggccatgctgtagcaggcgagtgataacaggctttaatctttttaaagcgtgctgcgggatgggatattggcgttgrgtggggtaagggtgattaggttttaatgagatggtaaggggtgcatgattggtcaccaaggagggagtagaggtatcttatacttgtgggttaaggtggggggggcatacaacaggaggacgcaaaggtggctttggattgggaagaagggc

SEQ ID NO: 925406 - DNA, 585 bp, Homo sapiens
gttgccaggggctgaggagggggatgaggaatcattgttggctgagaacagtttcagttcgggaaagtgagaaagttctggagatggatggtggtgatggttacacaacatgaacgtacttaaccctactcaactatgcatttacaaatggttaacatggggccgggcgcggctctcacgcctggaatcccagcactttgggaggccgaggtgggcggatcacaaggtcaggagatcgagaccatgctggctaacacgatgaaaccccatctctactaaaaatagaaaaaaattagctgggcgtggtggcgggcgcytgtagtcccagctactccagaggctgaggcaggagaatggcgtgaacccaggaggcagagcttgcagtgagccgagatcccgccactgcactccagcctgggcgacagagtgagactccgtctcaaaaaaaaaaaaatggttaagatggtacattttaccacagtgcgtaggtgggggcagccctcactgaagacgtggtatctgagcggaggctgggcagaggctcagggctgcccagcgggccctggggaaaagcatgcctggctg

SEQ ID NO: 925407 - DNA, 577 bp, Homo sapiens
atctcaacagtgggtttaaaatattcagtaatgtgttattccatttccagagcacaggcaagagtagacgtaacataattcttcagaaccctaggattttcagaatggtcaaagaccattggcttcagcttaaagtcaccagtgacatttgcccctaacaagagagccagcttgccctttgaaactaagcactgagttctctctaggtatgaaagtcctagatgtcatctccttccaaaggaagtcttttgtctatattgaaaatctgctttttcgtctcgctgccttcatcaatgatcttagctagacctggataacctggtgttgcttttctgttaggtagcacttgctgcttyaccttgtactttcgtgttatggggacagcttctttccttaaacctcatgaaccagcctctgctgcctccaacttttttttttttttttttttttttttgagatggattttcactcttgttgcccaagctggagagcaatggcgtgatctcggctcactgcaacctccacctcccgggttcaagcgattctcctgcctcagcctccgtagtagctgggagta

SEQ ID NO: 925408 - DNA, 607 bp, Homo sapiens
cttctgacagctctagtacctatttgttataaaaacaatcaaaacatcctcttgtaattgaaggactgataacaatgactgcaagtcctgggtgtcgggacaaggtgagctggctttcaggtttacttattagggtacacagatgggatgtaggtagcaaactgtccgtctcctccaccgaaagaaaagtgctttcctcttaagacacatacctgccttaggaaccctaaccttgcataaataagttgttcaaactcattggaaaactctttttctagttttagctacggaggcaactctactgctctctgatttttggtatatgtaggtttgtttaaatttaaaaagatcaattaacttagtcttcatatagacagttttaaaattatttattcagattattactctacaacactttgtgcttttcctgcctgwtgatcctgagcctggtctttccagggttttgccacgaagctcagcttctacttttttttttttttttttttttttgagacaggtcatccaggctaaagtcgagtggtgtgatctcggctcactgcagcctcaacctcccaggctcaatcaatcctcccacctcagcctccca

SEQ ID NO: 925409 - DNA, 607 bp, Homo sapiens
cttctgacagctctagtacctatttgttataaaaacaatcaaaacatcctcttgtaattgaaggactgataacaatgactgcaagtcctgggtgtcgggacaaggtgagctggctttcaggtttacttattagggtacacagatgggatgtaggtagcaaactgtccgtctcctccaccgaaagaaaagtgctttcctcttaagacacatacctgccttaggaaccctaaccttgcataaataagttgttcaaactcattggaaaactctttttctagttttagctacggaggcaactctactgctctctgatttttggtatatgtaggtttgtttaaatttaaaaagatcaattaacttagtcttcatatagacagttttaaaattatttattcagattattactctacaacactttgtgcttttcctgcctgttgatcctgagcctggtctttccagggttttgccasgaagctcagcttctacttttttttttttttttttttttttgagacaggtcatccaggctaaagtcgagtggtgtgatctcggctcactgcagcctcaacctcccaggctcaatcaatcctcccacctcagcctccca

SEQ ID NO: 925410 - DNA, 649 bp, Homo sapiens
cccctggcacaggcaaacctgttgatgggacaaacattgtacatgtgtaccttatgatggaaatagccattagggttcattgtgtttatgtatgtcttagagctgctaacctggatttaggacacaagaaaaaatattgtttttacagttctcaagtgagtacgtactagtcttcaagaaaaatcatactttgcagtacaaaaccaatgatggattttgacttttgaaattgttgaaaaaatatcttcctatgagtctttttttttaattaaaawttttttatttattttattttattattattatactttaagttttagggtacatgtgcacaatgtgcaggttagttacatatgtatacatgtgccatgctgctgtgctgcacccattaacttgtcatctagcattaggtatatctcctaaagctatccctcccccctcccccgaccccacaacagtccccagagtgtgatgttccccttcctgtgtccatgtgttctcattgttcagttcccacctatgagtgagaacatgcggtgtttggttttttgtccttgcgatagtttactgagaatgatgatttccaatttcattcatgtccctacaaaggacatgaactcatcatgttttatggctgtatagtattcca

SEQ ID NO: 925411 - DNA, 690 bp, Homo sapiens
cagaagaacaacaactacttgcaaacagcatgccgtttatctagcattttcacttaacatcctccccttaacgacctgcacctggcaacctgcattcaacccaaaactcagggcttcgatctcccgtatggctgatatggtttgactctgtgtcccaacccagatctcatcttgagttgtaaaccctacatgtcaaaggagggacctgtaatccccacatacggagggagggaagtgattggattataggggcggtttctcccatgctgttcttgtgataatgagtgagttctcaggagatctgatggttttataaatggtactttttcctgcaccctcactcacttctctcctgctgccatgtgaagaagatgcctgcttgacattccgccatgattgaaagtttcytgcgccaccagccatgtggaactgtgagtcaattaaacctctttccttcttgggtagtatctttatattaatagcagtgtgaaaactgactaatataatgacccttccaccggacgagccgggtctcagattttcctcatagacaacctatctctgggttggcaaaccccagacgcttttggttggaacacacattcaggcatgtctggcatacaagctcatcctaagagtatgcttacgttattgctgttaggtgtgtttaccttatacttgcatagccca

SEQ ID NO: 925412 - DNA, 629 bp, Homo sapiens
gaccccctcctcaggttcagtaatttcccagaacagttcacaaaactctaaaaagcactttacttacatttaccagtttatttataaagactatcataagctaagtgtggtgaatcacacctgtaatcccaacaatttaggaggctgaagcaggaggattgcttgaggccagaagtctgaggctgtggggagctatgaacataccactgcactccaggctgggtgacagagcaagaccctgtctctaaaagagagaaaaagagagagagaatattgtatgacccagggagtggcggattggtttcagaatgaaatttttccacttcggatcatcaggcattagattatcttaaggagtgggcaacctagatcccttgcatgagcaattcacaatagggttcttgctcctakgagaatctaatgccaccactgatcagacaggaggtgctgctcaagcaatagtgctcacatgcctgctgctcacctcctgctgtgcagcccagtttctaataggccacagactggtatcagtttacagcccagggtttgggaaccactgttatagaggatacaaaagataaacagccagataaagaggtacttagggcagggtatgagggaaggaacac

SEQ ID NO: 925413 - DNA, 624 bp, Homo sapiens
aatgtgtttgtgggtacttttttcttccattaatttatttatttatttatttatttatttattattttttatttttgagacaggttctcactttgttgcccaggctggagtgcagcaggacaatcatggttcactgcagcctcgacctcccaggctggagtgatcctcccacctcagcctccttagtagctgggactacagctatgagccaccagacctgactaatttttgtattttttgtggagaaggggtcttgccacgttgcccaggctggtctctaactcckgggctcaagcaatctgcctgcctcggcctccaaaaggtgtttgtgttttaagctaaatgttattataaaagagtcaaaagttaaaatttagaagtttgtaaagtaaaaaagtcacagtaagataacttgttattgaaaaaagaaaaatatttttataagtctaatgtagcataaggctacagggtttataaagtctgcagtagtgtccaataatgtcctaggtattcacattcactcacttctcattcactgactcacctagagcaacttctagtccttcaggctcctttcttgataggtaccccatacatgggtaccatttttttaaatcttttata

SEQ ID NO: 925414 - DNA, 579 bp, Homo sapiens
cctaactcttcagtgcccagacactgatgaacatccacaagcatcaagaccatctagctaaagaaggcaccagggaccaatcctgtagagacagagatatgtgatctttcagaaggagaattcaaaatagctgttgtgargaaactcagtgaaattcaagataacatggagaaggaattcagaatcctatgagatacatttaacaaagagattgaaatagttaaaaagaatcaagcagaaattctagaattgaaaaatgcagttgatatagttaagaatgcatcagagtctcttaatagcagaattgatcaagcagaaggaagagttagtgagcttgaagatgggctatttgaaaatacctagtcagaggagtaaaaaaaaaggaagaataaaaaagaatgacacatgtttacaaaatctagaaaatagcctcaaaagggcaaatgtaagagttattggcattaaggaggaggtagagaaagatataggggtagaaagtttattcaaagggataataccagataacttcccaaacctagagaaagatagcaacattcaactataaaaaggttataaaac

SEQ ID NO: 925415 - DNA, 609 bp, Homo sapiens
aggcagaggttgcagtgagctgagattgagatcacaccactgcattgcagcctgggcaacagagcaggactgtgtctcaaaaaacaaaaacaaggccgggtgcagtggctcacgcctgtaatcccagcactttgggaggccgaggcgggtagatcacaaggtcaggagatcgagaccatcctggctaacatggtaaaccccgtctctactaaaaaatatacaacaaattagccaggcgaggtgtcgggcacctgtagtcccagctactcgggaggctgaggcaggagaatggcgtgaacctgggagatggagcttgcagtgagccgagatcgcttcaccgcactccagcctgggcgacagagccagactccgtctaaaaacaaaacaaaacaaagcaaacraagtaaattactttggaaaacacattttctggttcccaaagggtgtgctcacgaatacacatttgcggcacaggctgaagtctgtcctcaaggtgtatgatggtcgcagagcaaggctgtgccctggaaccatgtcagggtctgtcccatggtgcagccttggggtcctgatggttgtatttcctgtctcctgcacagatcagctgga

SEQ ID NO: 925416 - DNA, 738 bp, Homo sapiens
agtctgtgcacttggggatgggagagtgcagtgactagaggactttacattgaactcagtgctgctctgccacaatggagagcaaagttgtgctgggctcactcagcattcacacacagagggggcatttgaaccagacctagccagtggggaatcgcccatctagctgttggaactcgagttcctcagcaagcctcgccagtgcaggccaaagtgctctggggtcctaggtaaacctgaacagcagactaggacacaaggactgcaattcctaggcaactcctagtgctaggctgggcttagagccagtaaactagggtggcacatgacctagggagacacaagctggtttggctatgggagggcttgcgccatccctcccccaaccccaggcagtgcagctcatagcaatgaaagtgactccttccttctgcttaaggagaggagaatgaagagtaaagaggactttgtcttgcatcttggatagcagctcagccacaacaggatagggcaccaggcagagtcatgagscccctattccaggccctagctcccaaatgacatttccagccacaccctgggccaaaagagaacccctgccttaaagggaaggactcaacacttgcaggattcatcacctgccgactaaagagtccttggaccctgaataacaaccagcaatatccagggagtatgccatgggcccgagctctgagacatgctggtttcaggggagac

SEQ ID NO: 925417 - DNA, 738 bp, Homo sapiens
agtctgtgcacttggggatgggagagtgcagtgactagaggactttacattgaactcagtgctgctctgccacaatggagagcaaagttgtgctgggctcactcagcattcacacacagagggggcatttgaaccagacctagccagtggggaatcgcccatctagctgttggaactcgagttcctcagcaagcctcgccagtgcaggccaaagtgctctggggtcctaggtaaacctgaacagcagactaggacacaaggactgcaattcctaggcaactcctagtgctaggctgggcttagagccagtaaactagggtggcacatgacctagggagacacaagctggtttggctatgggagggcttgcgccatccctcccccaaccccaggcagtgcagctcatagcaatgaaagtgactccttccttctgcttaaggagaggagaatgaagagtaaagaggactttgtcttgcatcttggatagcagctcagccacaacaggatagggcaccaggcagagtcatgagcccccyattccaggccctagctcccaaatgacatttccagccacaccctgggccaaaagagaacccctgccttaaagggaaggactcaacacttgcaggattcatcacctgccgactaaagagtccttggaccctgaataacaaccagcaatatccagggagtatgccatgggcccgagctctgagacatgctggtttcaggggagac

SEQ ID NO: 925418 - DNA, 623 bp, Homo sapiens
ctgagatgggcgtctttctcatgcaccggctctttgatattcggaattcatagggtccacagaaagttgtgttccccagcatgcattgccaactttccttgtcctgtcctggtctttgtctatcccaagatacagcctaccactgccagttcagactccacttcttgctctgtggtgccctaagttgccatatctggataatgatgggatagaggggagggagacacagagttgaggtgtgggaagaatggagggaacgttgtcctgattgcctaggcaagyagatctcttttcttccccctagtgttttgtttaaagacagggtcttactgtgttgcctgggctggagtgcagtggcatgatcatggcttactgcctcaaactcctgggctcaagtgatcttcccatctcagccttccaagtagctgggactacaggcgtgtacaacagtgcctggctagtttgttaattttctgtagagacagggtctcactgtgttgcccaaacttctttatcttttaaaaagatttcctaactgctctacaggatgtttactgcttgtgtaataaagcaaagaattttcaaatagcacccctctatctatggaacaactgtttggcatt

SEQ ID NO: 925419 - DNA, 623 bp, Homo sapiens
ctgagatgggcgtctttctcatgcaccggctctttgatattcggaattcatagggtccacagaaagttgtgttccccagcatgcattgccaactttccttgtcctgtcctggtctttgtctatcccaagatacagcctaccactgccagttcagactccacttcttgctctgtggtgccctaagttgccatatctggataatgatgggatagaggggagggagacacagagttgaggtgtgggaagaatggagggaacgttgtcctgattgcctaggcaagtagatctcttttcttccccctagtgttytgtttaaagacagggtcttactgtgttgcctgggctggagtgcagtggcatgatcatggcttactgcctcaaactcctgggctcaagtgatcttcccatctcagccttccaagtagctgggactacaggcgtgtacaacagtgcctggctagtttgttaattttctgtagagacagggtctcactgtgttgcccaaacttctttatcttttaaaaagatttcctaactgctctacaggatgtttactgcttgtgtaataaagcaaagaattttcaaatagcacccctctatctatggaacaactgtttggcatt

SEQ ID NO: 925420 - DNA, 623 bp, Homo sapiens
ctgagatgggcgtctttctcatgcaccggctctttgatattcggaattcatagggtccacagaaagttgtgttccccagcatgcattgccaactttccttgtcctgtcctggtctttgtctatcccaagatacagcctaccactgccagttcagactccacttcttgctctgtggtgccctaagttgccatatctggataatgatgggatagaggggagggagacacagagttgaggtgtgggaagaatggagggaacgttgtcctgattgcctaggcaagtagatctcttttcttccccctagtgttttgtttaaagacagggtcttactgtgttgcctgggctggagtgcagtggcatgatcatggcttactgcctcaaactcctgggctcaagtgatcttcccatctcagccttccaagtagctgggactacaggcgtgtacaacagtgcctggctagyttgttaattttctgtagagacagggtctcactgtgttgcccaaacttctttatcttttaaaaagatttcctaactgctctacaggatgtttactgcttgtgtaataaagcaaagaattttcaaatagcacccctctatctatggaacaactgtttggcatt

SEQ ID NO: 925421 - DNA, 585 bp, Homo sapiens
taaagacacatgcccacgtatgtttattggggcactattcacaatagcaaagacttggaaccaacccaaatgtccatcaatgatagactggattaagaaaatgtggcacatatacaccatggaatactatgcagccataaaaaaggatgagtttatgtcctttgtagggacatggatgaagctggaaaccatcattctgagcaaactatcgcaaggacagaaaaccaaacaccgcatgttctcactcataggtgggaattgaacaatgagaacacctggacacagggtggggaacatcacataccagggcctgtcgtggggtggggggagtggggagggatagcattaggagatatacctaatgtgaatgacaagttagtgggtgcagcacaccaagatggcacatgtatacatatgtaacaaatctgcacgttgtgcacatgtacyctagaacttaaagtataatttaaaaaaagaaatcatatttcaaacaggctttgcactatgcatgttcacctgcagatcctggggttgcagtgggggcctggggaattttgatgaatttcctctctgctgttttggaga

SEQ ID NO: 925422 - DNA, 615 bp, Homo sapiens
attggagtctctcagagggagatgcagagccctggggaatgggcatccatggctgtgctctgcccaagccaccccatacacaaaatctcctgcgctctgtgcctgctgaagccctgtctatgtctattgcccaggcagatccctctgccagctcacacatccatagggggaatagggtcccctgaagctcacatcccaaaagtctctggtcagagtaggctgtccctcagttccctcactcaccccttcctcagtgaccattcagggctgggagctacccctagcagttggatacctgacacagggtcccagcttcctccctcttcagccttggtgtcaccatcacctctccatcctttcttggtgttttctctctgaagatctgcccaaattacattgatttacttgataattwgctctttcagagggagcagcacttcctggctgagtctagtcatctgtcttgtccctctccaccatttttcgtaaagacaatcttttctccattaaattgcctttgttcctttttcaaagatcagttgactatattggtgtatatctatttttggactctctaatctgttccattgctctaggtgtctattattttgccaa

SEQ ID NO: 925423 - DNA, 635 bp, Homo sapiens
tgcctgtaatcccagcactttggaggccgaggcgggcggatcactcgagttcaggagtttgaaataagcctggccaacatggcaaaaccccatctctactaaaagtacaaaaactagcctggcgtggtggtgggcacctgtaatcccacgtacttgagaagctaaggcatgagaatcacttgaacccgggaggtggarggtgcagtgagccgagatcatgccagtgcactccagcctgagcaacagggcgagactctatctcaaaaattaaaaaagaaaaaaaaaacaattcaggcaaaacaacaattatgattatttatattttattttagagacaaagtctcactttgtcactcaggctgaagtccagtggcacaaacatggctcactgcactctgacctccaggcttaggcaatcctcctgcctcagcctcttgagtagctgggactacaggttcatgccaccacacccggctaatttttgtattttttgtagagatggggtttcgccatgttgcccaggctgatcttgttgcccagggtgctcaagtgatccacccgcctcaacctcccgaaatgctggggttacaggcatgagccactgcacccagcctatttatacaaattaaaacaag

SEQ ID NO: 925424 - DNA, 633 bp, Homo sapiens
gaacaatagaatggctatttgaagtcataattacaatgccaaccaggtgacaatactttgcagggctagggaaaagttccccagaaggctgtatatgctctgaatcagcatctagtatatggtactgtttctcccataggtaggattcataggtccaggaatcaatgggtgaaagtagaagggacaccactcacmattacccctagtgagccactagcaacatttttgcttcatattcccatgacattatgttctgctggcttagaggtcttagtttcagagtgaggtatgctgctctcaagatagtaagttctcatgagatctggttgtttaagtgtgtggcaccttcccacccttgttctgcattcaccatgtgatctgcctactcctgctttgccttctgccatgagtaaagctccctgaggcttcccacagaagcagattgcagaactatgcttcatgaacagcctgcagaaccatgaaccaattaaacctcttataaattacccagtctcgagtattctttatagcaatgcaagaatggactaacacatgactcctctatgagacagatactgtgattaaccccttttaataaactgagccatgcaaggttaaataacttgcccaagg

SEQ ID NO: 925425 - DNA, 591 bp, Homo sapiens
tttataaattgaaacctgaacagttttatactgtgagactctggacctttttaaaccttcttggctttctttgacaccattctgtcagagaaaggagtggcatcacctcattactgctaggcagagagagaagtccagrttcccctcccagcttccatcagtacctgaagaggatgatgccctcatactgccaggtgggatgaaagtccaggcatcccatttggactgcactaacaacccataagatgggttggggggacttattactggccagtggggaggaaagcctcaggtttttacttggcactgtctgataccttcctggcaggggagctggggcacctcattacagtgcttgccagggtggaagcctacgctccccatcctgcctttgctggtgtgaggagtggtgggggccaatgttttttctgtggtgtttggctggagtaaagtggttattctctaaaagatttttggcttgctaggctgcatctttcctgatcctttggttagagagattatacttttgttggggtgctttatgtttttgttttgttttggtctgtgctcactgacatttccaggttacta

SEQ ID NO: 925426 - DNA, 749 bp, Homo sapiens
ctcacgcaggtgtcccaagtctttctatttccatttcctcattgggaagttgggattaaccacattggcccatgcttctaccaccactcaatgcctgccctgagtacctgctgtgagactcccacggccactgctgggggagatcgattccccaaatctaagtgctaatggtgggattcaaagtagggtgacatcccactttggagccccagcctcactgcagggaggctaagtgaccttggagggtccccagcctctggatcttcmacattccactcccagcttgcagcccccttctctccctctgtagggctccaaccacaggactctccagccaccctggaaggctgccttgatggctggacccgccctggcttggtgaaaggctctctgtcctgggcgccatattcccagccccacccagccaggcccacaattccctctggtccccagggagccacagggtgaccacagcctcccagatgtggcccatctggaatctgctgcccacccggccggctgaaaccggccctgtggccaaagcctgggctctgtctgcctttcctcatctgcttccctcccttctcttctcccctccttgtcccactgcctctggccccaccctctgccactgccctcctctccttctctatttctgtggccctatccactatgtgtccccatgtacctcctctgacacactgagcccagacttcagtgtgtgcctcctggtcccctctatctctgtg

SEQ ID NO: 925427 - DNA, 749 bp, Homo sapiens
ctcacgcaggtgtcccaagtctttctatttccatttcctcattgggaagttgggattaaccacattggcccatgcttctaccaccactcaatgcctgccctgagtacctgctgtgagactcccacggccactgctgggggagatcgattccccaaatctaagtgctaatggtgggattcaaagtagggtgacatcccactttggagccccagcctcactgcagggaggctaagtgaccttggagggtccccagcctctggatcttccacmttccactcccagcttgcagcccccttctctccctctgtagggctccaaccacaggactctccagccaccctggaaggctgccttgatggctggacccgccctggcttggtgaaaggctctctgtcctgggcgccatattcccagccccacccagccaggcccacaattccctctggtccccagggagccacagggtgaccacagcctcccagatgtggcccatctggaatctgctgcccacccggccggctgaaaccggccctgtggccaaagcctgggctctgtctgcctttcctcatctgcttccctcccttctcttctcccctccttgtcccactgcctctggccccaccctctgccactgccctcctctccttctctatttctgtggccctatccactatgtgtccccatgtacctcctctgacacactgagcccagacttcagtgtgtgcctcctggtcccctctatctctgtg

SEQ ID NO: 925428 - DNA, 558 bp, Homo sapiens
ccaggctatccagttgttaggaatacaaaaacctgaaaagacatttcaaatggcccatcttaggttctacaatagtgatgttatctccaagagtaactgggaaagttgcaaatcttatgacctccagagtaatggctggtaattatttagaattcaagcccctctcgccgtcataacttggtggctgtccattagttttataggagcagtttagtttttttagaaggcctattataatttaaactataaactaaatttctcccaaaattagcttggcccatgcccagaaatgagaaaagacagccagcctgtcaggttagaagcaagatgaagttagtaatgttagatttctcttactgtcataattttgcaaagawgattttgtcagaggcacttgaaccagagcaactccatcttgaataagggcttggtaaaataatgctgtgacctactgggctgcattcccaggatgttaggcattccaagtcacaaggtgagataggaagttggcacaaaacacaggtcataaggacctggctgataaaacagtttgcagta

SEQ ID NO: 925429 - DNA, 758 bp, Homo sapiens
gcgtgaaccaggaggcggagcttgcagtgagctgagattgtgccactgcactccaacctggacgacagagcgagactccatctcaaataataataataataatatcatgttgatctgtcaattcaacaagtatttactgtggactttctaagcgccaggtcctgctctaaactatggagctatctctgtaaaaaaaaaaatacaaataaaaaaaaaactggcaaggcccttgatttcaagaagtttataatctaatgtgyagaaataaacaagaaatatgaagcaaataaaggcatggttataaataataatcagtgttttcaaggaagcacagggagtgttgagagggagattgagcttctttcaaggcagaagtcagggaatgtctacccaaggaggtgggatggaggcttcagttggagaaatgggtgagaaggattgttttaggcagagggaacatcatagcaagaaaccccaggtgggaaagagcttaatgtgtttgaggaactaaattaaggccagtgtggctggaacacagtgggtgaaaggagaaaggaacaagatcatgttgataggttgggcaggagtcacttgtactgactctatttccagtatatcagaaggtcttgggaggatttcaagaagaatgacatcaatcagatataatgtgaaagtttactctgactgcaaaatagagagtacttggagaggggcgagagagagtagggacaccagttaggaggctgctatggtcaaaa

SEQ ID NO: 925430 - DNA, 642 bp, Homo sapiens
gagtataaatttgtatgatcaccttataaaacaatttggcagtatttattaaagctaaacacatatattttatgacccagcacttccatacctagaaaaatgcctaacaaaattgcatgtttgtgtacactcaaaagatgtgtgtaagaagattcatagcagctttacttataataaccaaaaacctgaaaacctcccaaatgtctgtcaacaatagaatagatgaataaattgcaaataatcatgcaatcaattacaataaagcaacaaaaagcgataaactactgctatatgttaataatatgaatggatctcatgaaataacattaaataaagaaatgagccagaaaaatacacatcctgtacaattgtatttatataaaactcagaaactggccaaacgaatccatgatgaggggagtgyggaaagtggtctgtttttgtaggactcaatgactgcgagggatcaaggtggaagggactagggacctggtaatgtcctgttttcttgatacagtgatacgggccattaactttgtgaaaattcaatggctatatacacttatgattaatgcactcttctgtatgcatatatttcaataaaatttttcctaaaaaaaactttttgacaaactttctgct

SEQ ID NO: 925431 - DNA, 654 bp, Homo sapiens
tgtaaaagtgttcctatttctccgcatcctctccagcacctgttgtttcctgactttttaatgattgccattctaactggtgtgagatgatatctcatggtggttttgatttgcatttctctgatggccagtgatgatgagcattgtgtattttgtttttaattgacacataattgtacatatttatrggacaccatataatgttttgatacatgcatacattgtgtaataactaaatcagggtaattgacatatccatcacctcaaacattaatgattatttctttgtggtgacaaaattcaaaattttctagctattttgaaatatactatacaatattgttaactacagttggtcaatgagtacaaatgtgcagttaggaggaatgaattctggcaaaaggtttttttaaaaaaatttacatctcagagaggcagggaaataatctaaaattatgttttctaaagcaaatgctctaagaaaagggaggtcaggagcctagagtcaggaagaagcctgcctaatgtttgttcaagctgtggagaacattaaggctgttttggtcataccaaatctatattctcacatgtttttcagcttgtctgttaacctgtcaccagcgacagactctacttttgtgccagatttcaagt

SEQ ID NO: 925432 - DNA, 654 bp, Homo sapiens
tgtaaaagtgttcctatttctccgcatcctctccagcacctgttgtttcctgactttttaatgattgccattctaactggtgtgagatgatatctcatggtggttttgatttgcatttctctgatggccagtgatgatgagcattgtgtattttgtttttaattgacacataattgtacatatttatgggacaccatataatgttttgatacatgcatacattgtgtaataactaaatcagggtaattgacatatccatcacctsaaacattaatgattatttctttgtggtgacaaaattcaaaattttctagctattttgaaatatactatacaatattgttaactacagttggtcaatgagtacaaatgtgcagttaggaggaatgaattctggcaaaaggtttttttaaaaaaatttacatctcagagaggcagggaaataatctaaaattatgttttctaaagcaaatgctctaagaaaagggaggtcaggagcctagagtcaggaagaagcctgcctaatgtttgttcaagctgtggagaacattaaggctgttttggtcataccaaatctatattctcacatgtttttcagcttgtctgttaacctgtcaccagcgacagactctacttttgtgccagatttcaagt

SEQ ID NO: 925433 - DNA, 654 bp, Homo sapiens
tgtaaaagtgttcctatttctccgcatcctctccagcacctgttgtttcctgactttttaatgattgccattctaactggtgtgagatgatatctcatggtggttttgatttgcatttctctgatggccagtgatgatgagcattgtgtattttgtttttaattgacacataattgtacatatttatgggacaccatataatgttttgatacatgcatacattgtgtaataactaaatcagggtaattgacatatccatcacctcaaacattaatgwttatttctttgtggtgacaaaattcaaaattttctagctattttgaaatatactatacaatattgttaactacagttggtcaatgagtacaaatgtgcagttaggaggaatgaattctggcaaaaggtttttttaaaaaaatttacatctcagagaggcagggaaataatctaaaattatgttttctaaagcaaatgctctaagaaaagggaggtcaggagcctagagtcaggaagaagcctgcctaatgtttgttcaagctgtggagaacattaaggctgttttggtcataccaaatctatattctcacatgtttttcagcttgtctgttaacctgtcaccagcgacagactctacttttgtgccagatttcaagt

SEQ ID NO: 925434 - DNA, 783 bp, Homo sapiens
gcaagatcttgttttgcctaccctattaattcactagaccagtactttcgaataaagttatgtgagctaatgtgtaattttaaattttctagtagccacattagaaaattaaaaagagtgcagattaattctaatgatatattttatgtatctaacatatcgaaaatacttttttaccatgtagtctatataaaagttattartaatataagtttttgttttggtactgttttcaaaatttggtgtgctgtttatggtaacaatatatctagttcagagtctggattttcatcacaaatatatgatctgtatttaaattttataaaattacagttagaaaatagatttacatgcccatattgtttaaaacatatatgaaagttttgaaataactgaatcagatatgttttaaaattaaaattaaaaattaactttctcattcacacatgctatatttcaagtattcagtagccacatatagctagtggctcctatcttggataatctagtattaaattattttccccttaaataaattactaccgtttccctcaatgcagccaaatgaaaagctcataaccatagtattctagtggcattcagcggcattcactgttccttttgcctaactccttcttcctccattctacacaacttacttgctcacctcttcagacctttcctcaagtggcatttactgaccagcatgcccattgctagcttcacctgcacctctgcgtagatgagaaaaggatgcccattctgggggtatcactctgcggt

SEQ ID NO: 925435 - DNA, 591 bp, Homo sapiens
aggggaaaaaaatgccctcaggtaaaaagctagaaagggtttctattatttattttacttacgctatgtaagtatgtaactatgtgaatttgtgaccaaattagctttttagaacaatagtgatgatggagagttacataatttctacctgtgtatacaaatatgtcctgtccgtatatacaggtatgtcttccaccatgatattaagaaggatgtcatccacacgaatatataataaattgaacrtcaaagaatgtgggcaaagttttgcattcagaaatttccaacaaaacatactaaacacacacgcgcacacacacacaaatcttcaagtttagatttcctgaactctggcaaggtatcagactgacctgtagccccatgcacatgcaaattaaagcctctggggatagggcctgaatgtctgctatttatgcaatttctacaagttctttacccaaccaatttgagaaccactttcctatgttgtaaacagtgtacctgaactaaagtgaagggcgtgggcagaaataacatgggatacattcattcgctgaaaaaaaatgaatatttatgcaaacggtctctaag

SEQ ID NO: 925436 - DNA, 591 bp, Homo sapiens
aggggaaaaaaatgccctcaggtaaaaagctagaaagggtttctattatttattttacttacgctatgtaagtatgtaactatgtgaatttgtgaccaaattagctttttagaacaatagtgatgatggagagttacataatttctacctgtgtatacaaatatgtcctgtccgtatatacaggtatgtcttccaccatgatattaagaaggatgtcatccacacgaatatataataaattgaacatcaaagaatgtgggcaaagttttgcattcagaaatttccaacaaaacatactaaacacacaygcgcacacacacacaaatcttcaagtttagatttcctgaactctggcaaggtatcagactgacctgtagccccatgcacatgcaaattaaagcctctggggatagggcctgaatgtctgctatttatgcaatttctacaagttctttacccaaccaatttgagaaccactttcctatgttgtaaacagtgtacctgaactaaagtgaagggcgtgggcagaaataacatgggatacattcattcgctgaaaaaaaatgaatatttatgcaaacggtctctaag

SEQ ID NO: 925437 - DNA, 556 bp, Homo sapiens
aagctgctctgccactggggccatatgactcaacagatccaattggttgtggtatcagtggcagatagggatgatgactggagcctttggcagtcccccataggtgaatcacagcagagacctctaggattttgaagcaaggccctgccatctgtggataactactctccttttgagggacagctcttggcctgttactgggctttggtagaaactgaacgtttgactatgggtcatcaagtcaccacatgacctcaactgcctatcattaactgggtgctttctgacccatgtagccataaagtgggtcatgcacagcagcattctctcattaaatgaaagtggcatrtaagtgatcaggctcaagcaggtcctgaaagcacaagtaagttacatgaggaagtgctcaaatgcccatggtctccactgatgccacactgcctcgtctcctccagcctgcactgatggcctcatggggagttccttatgattagttgacagagaaagagaagactagggcctggttcatagatggttgtgcatcataagcaggcac

SEQ ID NO: 925438 - DNA, 616 bp, Homo sapiens
gtgtgccaccatgcccagctaatttttgtatttttagttgaaacagggtttcaccatgttggccaggctgatctcaaactcctgacctcaggtgatgtacccacctaggcctcccaaagtgctgggattacaggtgtgagccaccacacctggccatatttaccacattttctttattcgatcagtcattaatgggcatgtaggttgattccacgtctttgctattgtgtatagtgctacaatgaacttacatgtacatctgtctttatgataggatgatttatattcctttggatatatacccagtaatgggatggctactttaagttgtatttctgtttctagctgtttgaggaatcaccacactgctttccacaatggttgagctaatttatactcyccataacagtgtttaagtgttctctttcctccacaactgtattagtccattttccccctgctaataaaggcatactcaagacagggagatttacaaaggaaagaagtttaatggagaactcacagttgcatgtggctggggaagcctcacaatcatggtggaaggcaaggaggagcatgttacatcttatgtgaatagtggcaggcaaagagagag

SEQ ID NO: 925439 - DNA, 559 bp, Homo sapiens
tggctcacgcctgtaatcccagcactttgggaggctgaggcaggcagatcacttgagcccaggagtttgagaccagcctgggcaacatggtgaaaccccatctttactaaaaatacaaaaattagctaggtagggttgtgtgygcctgtaatcccagctacttgagaggctgaggcagaaaaatcacttgaacccaggaggcggaggttgcagtgagccaagatcgcgccactgcactccagcctgacaacagagcgagacttccatctcaaaaaaaaaaaagaaagaaagaaagaaaaaaaaaaagaaaagaaaagatttccgtgcaagtattgtttcctacttgtcttccctgttagactgtaagccctgtgagagcagagattgaatttgccctgttggctactctgctctctgtcctagcaggtttcttggatactaactactccagaaatatgacctgcgtgaacaaaccaatgaaataatgaactagaaacataaataattgaaactagatacaatgaaatggaaacttatttcactttccatgttttgaaac

SEQ ID NO: 925440 - DNA, 555 bp, Homo sapiens
gtgaatgtacctatttctactgaactgtatacttaaacaagtgtcgaagatggtgaactttatgtcatgtataatttaccacaattttgacattttaaaaaatgatgataatacatgtattcattcatttgacaaatcttttagtgcccactaagtgccaaacactgttctgctgttggggagcactagcaaaaactcaatatacaaaaaaaccttaccttcatgaagtcgacattctagtgaaataagacaaacaaaatgagtagaataaactatattcaatggaagaaagtgctatggagaaaatgaagcagaaagtggaagggaaggaagatccagagttgccagaatttggggtggtcaggaaggccccacctcaaaggcgacattgagcagaggyctgaaagtgagggagtgaggcatgaaggtgatggcagagagaggggttcacacagaaggaacagcactgcaaaggtgggagccttccactgtgtttcaggagctgcaaggaggccaatgaggctggaggtgatggagggtgcaggtgaggctagg

SEQ ID NO: 925441 - DNA, 521 bp, Homo sapiens
tcttttctcttgctgcatttagaatcctttagccttaacctttggtagtttgattattaaatgcctataggtagtctttgggttaaatcagcttggtgttctataaccctcttgtacttcaatgttgataactttctctaggtttgggaatttctctgattttatccctttgaatcaagtttctatgccatctctttctcyacctcttctttgaggtcagtaactgttaaatttgcccccttttgaggctgtttcccagatcttgtaggcttgcttcattcttttgtattcttttttcttttaactcttctgactgtgtattttcaagtaggctgtcttcaagctcacaaattctttcttctgcttggtcatttctgttactaagagattcggtgcattcttcagcatgacaattgcatttttcaactctagaatttctacttgattttttaaattaccgtaatctctttgttaaatttatctgatagcactctgaattctttctctgtgttgtctttaat

SEQ ID NO: 925442 - DNA, 789 bp, Homo sapiens
accagatgcataaagaactggtaccattcctaatgaaactacttcaaaaacttgaggaggaggacacattcctaactcattgtatgatgacagcatcatcctgataccaaaacttggcagagacacaacaaaagaagaaaacttcatgctaatatccttgatgaacacagatgcaaaaattctcaacaaaatactagcaaactgaatccagcagcacatcaaaaagctaacccaccatgatcaagtaggctttatccctgggatgcacggttggttcaacatacacaaattaataaatgtgatacactatataaacagaactaaaaaccacatgatcatttcaatagatgcagaaaaggcttttgataaaattcaacatttattcatgttaaaaatcctctaggcattgaaagaacatacctcyaaataataagagctatctatgataaacccatagccaaaatcatactgaataggcaaaagctagaagcattccctttgagaaccacagcaagccaaggatgcccactctcaccacctctattcacatagtactgaaagtcctagccagagcaatcaggcaagagaaagaaataaaaggcatctaaataggaagagaagaagtcaaactatctctgcagacaatatgatctatacctaaaaaaccccatagtctctacccaaaagctcctagatctgataacttcagcaaagtttcaggatacaaaatcaatgtacaaaaatcagtagcctttctatacacaaacaacatccaagcagagaaccaaa

SEQ ID NO: 925443 - DNA, 608 bp, Homo sapiens
catactcagggctcagttccacatagcctaggcctcttggctcctcactcacccttagacacctgagggctgcagctcccagcctatatccccaaatcccgcccactgtgtttctgaacctcctctggccagggtcagggactgactggggaggggcatctttcacgctcactaaatccctgacctagtaccctgctctaatcaaacaccaaatgcaagaagaggggccaaaaacaactcactttggcacttctggtccaggaagatgctggccaactgtccctgattgaggatgtccaagagtgtctgctgggactggcctgtcacstgggccagggtcagcccctcggcaatagtggccatgaagctcccttggaccatgttcacgatcagcatcatcttggctgcattgcccacttcacctgcccagggtaaagactcacggtcacagcccaagaatgccacagacagggcttctctgtccaccctcacctctgctcagacccacctctctccaggggaggcccccttcacctgcccccgacagactggctcttcctccttccacgcactgactatgcaggtgaaaggaaaccttccccagggtc

SEQ ID NO: 925444 - DNA, 573 bp, Homo sapiens
tggtaccagctactcgggaggctgaggtggtagaatcacctgagcctggggaggttgaagctgcagtgagtcaaaattgtgctactgcactccaacctgggtgacagagtgagatcctgtctcaaaaaaagaaaaaaaaagttttggaactatgtgttactgcacccaacctgggtgacagagtgagaccctgtctcaaaaaarggaagaaaaaagttttggaactagatgaaggtgatgattgtacaacactgtgaagatacgaaacgccactgaaccgtttactgaaatatggctaattttatgttatgtgaatttctttttctttgagcagcagcaagatttattacgaagagtgaaagaacaagtttccacagtgtggaaggggacccgaacgggttgcccgtgaatttcatctcattaaaaaatgtaaaaactttgaggccaggtaccaacctaatttgtttttttgagacagagtctcactctgttgcccaggctggagtgcagtggtatgatcacagcttactgcagccttgaccccccaagctcaagtgttcctcccacctcagc

SEQ ID NO: 925445 - DNA, 762 bp, Homo sapiens
ttgcactgctttttttttttttttttttgagacgcagtctcgctctgtcacccaggctggagcgcgatggtgggatctcggttcactgcaagctccgcctcccagattcacgccattcccctgtctcagcctcccaagtagctgggactacaggcgcccgccaccacgcctggctaatttttttgtatttttagtagagacggggtttcaccatgttagccaggatggtcttgatttcctgacctcatgatccgcctgcctcagcctyccaaagtgctgggattacaggcgtgagccaccacacccggccttgcactgttttttaatttttaagacagggtctcaatctgtcacccagactcaagtgatcgcagctcactgcaacctccaccctcaggttcaaacgatcctcccacctcagccccccaagtagctgggattcaggtgcatgtcaccatgcctggctaatttttaaattttttttgtagagatggggtcttgctgtgttgcctaggctggtcatgaactcctggcctccagggatccttctgcttcagtcttgctctgtcacccaggctggagtacagtggcgcaatctcggctcactacaacatctgcctcccaggttcaagcaattctcctgccttagcctcctaagtagctcctaagtacaggcgcccaccaccacgcctggcaaatttttgtatttttagtagagacggagtttccccatgttggccaggctgttttcgaactcctgac

SEQ ID NO: 925446 - DNA, 762 bp, Homo sapiens
ttgcactgctttttttttttttttttttgagacgcagtctcgctctgtcacccaggctggagcgcgatggtgggatctcggttcactgcaagctccgcctcccagattcacgccattcccctgtctcagcctcccaagtagctgggactacaggcgcccgccaccacgcctggctaatttttttgtatttttagtagagacggggtttcaccatgttagccaggatggtcttgatttcctgacctcatgatccgcctgcctcagcctcccaaagtgctgggattacaggcgtgarccaccacacccggccttgcactgttttttaatttttaagacagggtctcaatctgtcacccagactcaagtgatcgcagctcactgcaacctccaccctcaggttcaaacgatcctcccacctcagccccccaagtagctgggattcaggtgcatgtcaccatgcctggctaatttttaaattttttttgtagagatggggtcttgctgtgttgcctaggctggtcatgaactcctggcctccagggatccttctgcttcagtcttgctctgtcacccaggctggagtacagtggcgcaatctcggctcactacaacatctgcctcccaggttcaagcaattctcctgccttagcctcctaagtagctcctaagtacaggcgcccaccaccacgcctggcaaatttttgtatttttagtagagacggagtttccccatgttggccaggctgttttcgaactcctgac

SEQ ID NO: 925447 - DNA, 721 bp, Homo sapiens
catgcctggctaatttttaaattttttttgtagagatggggtcttgctgtgttgcctaggctggtcatgaactcctggcctccagggatccttctgcttcagtcttgctctgtcacccaggctggagtacagtggcgcaatctcggctcactacaacatctgcctcccaggttcaagcaattctcctgccttagcctcctaagtagctcctaagtacaggcgcccaccaccacgcctggcaaatttttgtatttttagtagagacggagtttccccatgttggccaggctgttttcgaactcctgacctcaagtgaccctcctgccttggcctttcaaagtgctggaattacaggcttragccaccatgcccggcctcatttttgtactttttgtagacattaggttttgctagtctcaaactcctgagctcaagtgatccacccacctcagtctcccaaaaccctggattataggtgtgagccaccgctccaggcacatttttgtcttttaatgactcagcatttctcaaattttcaatgacaacatccctgtgaggtgctattatcaggcccacctaagagatggggaggggcgacaggctgccaaaggtgaggccacacgcccaggcacgcgtagcactgtgggtctgtcctgccgtgggccctacctctcactcacccaccaccatgatgttgaactcaaaccccatcttcatagcc

SEQ ID NO: 925448 - DNA, 603 bp, Homo sapiens
actaaactactttctgtctctacagatttacctggacattttacataaatgaattcatatgtgggttttttttaatcttagcataatgttctcaagatttgtattgcagcatatatcagcatcttgttctttttttattgcttagcagtattctgttgcatgaataaaccacgtttcatttatctatttcaccagttgatggacatttgaattgcttccagtttagggctattatgaataaagctgttatgaatacacaagtctccatggggacatatgttttcatatctattgaatcatttcctaggagtagaatttctgagttacatggtatatttatgtttaactttgaaaaaaaatttttagtgtgtataaaagaatatttcattctggttttaattctcatttctctagtggctaatgatgttgagcatcattatgtgtgyttattgaccatccacatctattcttcagtgaaatgtctatttaaatctttcgccaattttataattaggttatttctcttgttgagttataaaaattctttatatattagatattaatcctttatcagatataagatttgcatatattttctcccag

SEQ ID NO: 925449 - DNA, 700 bp, Homo sapiens
aaaaggataagtgagattgtcattttgtttgcttgcttgcttttttttttttttttttttttgagactgagtcttgctgcatcgcccaggctggagtgcagtggcccgatctcggctcactgcaagctccgcctcccaggttcacgccattctcctgcatcagcctcctgagtagctgggactacaggcgcccgccaccaagcctggctaatttttttttttgtatttttagtagagacggggtttcaccgtgttagccaggatggtctcaatctcctgacctcatgatccgcccgcctcggcctcccaaagtgctgggattgcaggcttgagccacggcgcctagcctacttgctgctttttatgaacaccagtgaccaggaattgatggaaatttaccagaaatgtttcctgatgctatggtagacaaactatggaartaatgagttctacaagggcattgaaaatggtggtctaggcttcagtggagttgaggatgtatagtcaaccctttttttgttgttttattattttttgtgtgtgccaggcattagcctgtgcattttatgggcatcatcttatttaatcttcacaatggataccttcattttacagtggaagatactgaagttcagagacattaagtgacttgttaaggtttgtgactggtaaatggtggagtctgcattagaaatccaga

SEQ ID NO: 925450 - DNA, 593 bp, Homo sapiens
ataagcaacaaggacccaaatgttcatcaccaagacaatggggaaaatatctccaggacatgtcagagacctttgcagcagtccctcccattacaggccaagaggcctaaaaggaaaaaatggtttcctgggctggattcaggggccccctgctgtttgccacctagtgacttgatgccctgcatcccagctactctagccatggctaaaagggtccaaggtacagcttggrctgtggattcaggtggtgcaagccccaaaccttggcagtttcacatggtgttgagcctgtgggtgcacagaagaattgaggtttgggaatctctgcctagatttcagaggatgtatggaaactcctagatgtccagaaagaattttgctgcaggggtggtgccctaatggaaaacctctgctaggacagtgcagaagggaaatatggggttgaagcccccacacagagtccccactgaggtactgcctactggagctgtgagaagaaggccactgtcctccggaccccagaatggtacagccaccaaaagcttgatcatgcacacaggaaggctacagacaatgccagtccatgaaagcaa

SEQ ID NO: 925451 - DNA, 593 bp, Homo sapiens
ataagcaacaaggacccaaatgttcatcaccaagacaatggggaaaatatctccaggacatgtcagagacctttgcagcagtccctcccattacaggccaagaggcctaaaaggaaaaaatggtttcctgggctggattcaggggccccctgctgtttgccacctagtgacttgatgccctgcatcccagctactctagccatggctaaaagggtccaaggtacagcttgggctgtggattcaggtggtgcaagccccaaaccttggcagtttcacatggtgttgmgcctgtgggtgcacagaagaattgaggtttgggaatctctgcctagatttcagaggatgtatggaaactcctagatgtccagaaagaattttgctgcaggggtggtgccctaatggaaaacctctgctaggacagtgcagaagggaaatatggggttgaagcccccacacagagtccccactgaggtactgcctactggagctgtgagaagaaggccactgtcctccggaccccagaatggtacagccaccaaaagcttgatcatgcacacaggaaggctacagacaatgccagtccatgaaagcaa

SEQ ID NO: 925452 - DNA, 593 bp, Homo sapiens
ataagcaacaaggacccaaatgttcatcaccaagacaatggggaaaatatctccaggacatgtcagagacctttgcagcagtccctcccattacaggccaagaggcctaaaaggaaaaaatggtttcctgggctggattcaggggccccctgctgtttgccacctagtgacttgatgccctgcatcccagctactctagccatggctaaaagggtccaaggtacagcttgggctgtggattcaggtggtgcaagccccaaaccttggcagtttcacatggtgttgagcctgtgggtgcacagaagaattgaggtttgggaatctctgcctagatttcagaggatgtatggaaactcctagatgtccagaaagaattttgctgcargggtggtgccctaatggaaaacctctgctaggacagtgcagaagggaaatatggggttgaagcccccacacagagtccccactgaggtactgcctactggagctgtgagaagaaggccactgtcctccggaccccagaatggtacagccaccaaaagcttgatcatgcacacaggaaggctacagacaatgccagtccatgaaagcaa

SEQ ID NO: 925453 - DNA, 584 bp, Homo sapiens
tccatgccttgctaaggtctctggtttttataggcccatgatgggggcacagcaggccagggtggtcttggaaaatgctacatttcggcatgaaagcagaagtgcctgtccttacctaggtctgtgggggtggagccctagccagggaccacgccctcctctacccagcacttcccttctccccttccctatcatttaaagggaccacgctcttcccttcccagcacttccatatcagtttggtacacaggtaaactcgtgtcatcgaggtttgttgtacagattgtttcatcacccaggtattaagcctaatgcccatttgttattttycccgttcttctctctcctcctatcctccaccctcatgtttccctctgtgtgtccatatgctctcatcgtttagctcccactataagtgagaacatgctgtatttggttttctgttcctgtattagtttgctaaggataatggcctccagctccattaatgtttgcgcaaaggacatgatcttattcttttttatagctgcatagttttccatggtgtatatgtactacattttctttatccagtctatcattgt

SEQ ID NO: 925454 - DNA, 637 bp, Homo sapiens
ctatttgaaagttctttatttctttatcttgcctgattgccctggccagaacttccaatactatatttaataggagtagtgagagagggcaaccttgtcttgtgccagtttccaaggggaatgcttccagcttttgcccattaagtatgatattagctgtgggtttatcatatatggtgcttattcttttgaggtatgtktcttcaatacctagtttattgagagtttttaacatgaatgaatgttgaattttattgaaagccttttctgtatcttttgagataatcatatggttttggcctttagttctgtttatgtgatgaataacatttattggtttgtgtaggttgaaccaaccttgtatcccggggatgaagtctaattgaccgtggtggatacgccttttgatctgctgctcaattcggtttgccagtattttgttgaggatttttacatcaacattcatcaagaatattggcctgaagttttttgttgttgttgttgttgtatatctgccaggttttggtatctggatgatgctggcctcatagaaggagtttgggaggaatccctcctcctcaatttttttgaatagttttggtatgagtaataccagctcttctttgtacatctggta

SEQ ID NO: 925455 - DNA, 458 bp, Homo sapiens
agcatttaacattaaaacagagaccttacgactgatgaaacagactcttggtagccattaagataccaacatgacagacagcaagccctaaaagaaataaaaatattttacctcaaaagatatttcttttctctccytcttcttctttttttttttttttttttttttttttgagatggagtctccctctgttgcccaggctggagtgcagtggcatgatcttggctcagtcaccacaacctccgtctcccaggttcaagtgattctcctgcctcagcctcttgaatagctgggattacaggtgcccgccaccattcctggcttatttttttgtattttttgtagagacgtggttttgccatgttggccaggttggtctcaaactcctgacctcaagtgatctgcctgcttcagcctcccaaagtgctaggattataggcatgagccaacgtgcctgg

SEQ ID NO: 925456 - DNA, 458 bp, Homo sapiens
agcatttaacattaaaacagagaccttacgactgatgaaacagactcttggtagccattaagataccaacatgacagacagcaagccctaaaagaaataaaaatattttacctcaaaagatatttcttttctctccctcttcttctttttttttttttttttttttttttttgagatggagtctccctctgttgcccaggctggagtgcagtggcatgatcttggctcagtcaccacaacctccgtctcccaggttcaagygattctcctgcctcagcctcttgaatagctgggattacaggtgcccgccaccattcctggcttatttttttgtattttttgtagagacgtggttttgccatgttggccaggttggtctcaaactcctgacctcaagtgatctgcctgcttcagcctcccaaagtgctaggattataggcatgagccaacgtgcctgg

SEQ ID NO: 925457 - DNA, 458 bp, Homo sapiens
agcatttaacattaaaacagagaccttacgactgatgaaacagactcttggtagccattaagataccaacatgacagacagcaagccctaaaagaaataaaaatattttacctcaaaagatatttcttttctctccctcttcttctttttttttttttttttttttttttttgagatggagtctccctctgttgcccaggctggagtgcagtggcatgatcttggctcagtcaccacaacctccgtctcccaggttcaagtgattctcctgcctcagcctcttgaatagctgggattacaggtgcccgccaccattcctggcttatttttttgtattttttgtagagacgtggttttgccatgttggccaggttggtctcaaactcctgacctcaagtgatctrcctgcttcagcctcccaaagtgctaggattataggcatgagccaacgtgcctgg

SEQ ID NO: 925458 - DNA, 633 bp, Homo sapiens
agctgaccagcatttaacattaaaacagagaccttacgactgatgaaacagactcttggtagccattaagataccaacatgacagacagcaagccctaaaagaaataaaaatattttacctcaaaagatatttcttttctctccctcttcttctttttttttttttttttttttttttttgagatggagtctccctctgttgcccaggctggagtgcagtggcatgatcttggctcagtcaccacaacctccgtctcccaggttcaagtgattctcctgcctcagcctcttgaatagctgggattacaggtgcccgccaccattcctggcttatttttttgtattttttgtagagacgtggttttgccatgttggccaggttggtctcaaactcctgacctcaagtgatctgmctgcttcagcctcccaaagtgctaggattataggcatgagccaacgtgcctggctatatttcttaaacatattttgaaatggccctgcaaagctgtctcttgtgggaaaatctaccttctatagaaaatctccttttatttccaggtcttcttcctgatccgggagagaattaactgagtttggtacctttttaagtctgataaaaaacatttacaatct

SEQ ID NO: 925459 - DNA, 689 bp, Homo sapiens
catttaacattaaaacagagaccttacgactgatgaaacagactcttggtagccattaagataccaacatgacagacagcaagccctaaaagaaataaaaatattttacctcaaaagatatttcttttctctccctcttcttctttttttttttttttttttttttttttgagatggagtctccctctgttgcccaggctggagtgcagtggcatgatcttggctcagtcaccacaacctccgtctcccaggttcaagtgattctcctgcctcagcctcttgaatagctgggattacaggtgcccgccaccattcctggcttatttttttgtattttttgtagagacgtggttttgccatgttggccaggttggtctcaaactcctgacctcaagtgatctgcctgcttcagcctcccaaagtgctaggattataggcatgagcyaacgtgcctggctatatttcttaaacatattttgaaatggccctgcaaagctgtctcttgtgggaaaatctaccttctatagaaaatctccttttatttccaggtcttcttcctgatccgggagagaattaactgagtttggtacctttttaagtctgataaaaaacatttacaatctattctttctgaagcctgctacctggaggctttatctgcataataaaaaccttggtctccacagccc

SEQ ID NO: 925460 - DNA, 591 bp, Homo sapiens
ctgtctggtcctgggctttttttggttggtaggctgttaattactgcctcaatttcagaacttgttattggtctattaggggatttgacttctttctggtttagtcttgggagggtgtatgtgtccagaaatttatccatttctcctagattttctagtttatttgtatagaggtttttrtagtatttctgtgtggtcagtggtgatatcccctttatcattttttattgtgtctatttaattcttctctctctttgtctagctagttgtctatctactttgttaattttttcaaaaaaaacacctcctggattcactgattttttggagggtttttcttctctctatctccttcaattcttctctgatcctagttatatcttgtcttctgttagcttttagatttgtttgctcttgcctctctagcttttttgattgtgatgttagggtgtcgatttgagatctttctagctttctgatgtgggcatttagtgctataaatttcccttttaacactgctttagctgtgtcccagagattctggtactttgtgtctttgttctcattggtttcaaataacttcttgatttc

SEQ ID NO: 925461 - DNA, 591 bp, Homo sapiens
ctgtctggtcctgggctttttttggttggtaggctgttaattactgcctcaatttcagaacttgttattggtctattaggggatttgacttctttctggtttagtcttgggagggtgtatgtgtccagaaatttatccatttctcctagattttctagtttatttgtatagaggtttttatagtatttctgtgtggtcagtggtgatatcccctttatcattttttattgtrtctatttaattcttctctctctttgtctagctagttgtctatctactttgttaattttttcaaaaaaaacacctcctggattcactgattttttggagggtttttcttctctctatctccttcaattcttctctgatcctagttatatcttgtcttctgttagcttttagatttgtttgctcttgcctctctagcttttttgattgtgatgttagggtgtcgatttgagatctttctagctttctgatgtgggcatttagtgctataaatttcccttttaacactgctttagctgtgtcccagagattctggtactttgtgtctttgttctcattggtttcaaataacttcttgatttc

SEQ ID NO: 925462 - DNA, 481 bp, Homo sapiens
ttttgctggagactgggatgccaagtgagccagtcttcaagactcagtggtagtagcagtaggctgaatgtgcatgtccctgggccccagggcagcatatgctggtattggtattagtgggtccaagcaggccaaatattgggcttccaaggagtttactcaaatgccagtagtgacaatggtgggctaggtggatgggtgggttagtgggccccttgacagctgatgtaatttgggcaatggcaatggcagtgggaggtcaaccctctagttcccaagtggtgcatgctggtgatggtggtggctgcaattggctaagcaggccaatctccaggcccataratggtgtgtgccagtagatgccagctgaagtagtaacaactgagtgactaggtccaccttcagatcctggaaggagtgttcatgtgccaatgatgatggaatgggttgggcaattccctgatccccagactgtgtgctc

SEQ ID NO: 925463 - DNA, 716 bp, Homo sapiens
gagatttctcaaatgtgagatgggaatggtaactgaacccacttcccagggtggctgtggagactgagaccacacatggccatatcacggcatccagcacacgtgggaccctagccgtgttgcccttgatgggaatccttctatgcmccctctgccaccagggccaactcccaacagtagctgtggagggtgtgtcctctattcccactccacccacctcccattgctccacgcagtgacctgccacgtagcggccaccagcaaacccagccccactgtccaggctcctgtggataccacccccccacccccacccctgcttggggcgtcttccacttgcggttccgaaggaggctgagaaaccaccctcaagggcgctcacctgctccttgttgcacgtaatgacctgccacacagggcaaccagcaaacccagctccaccatccaggctctggtgggtaaccgcccccccagccccaggtgtctgggaggctcaaaaactgccctccaagggcactcatctgttccttattgcactaatacctcgtttacagaaatccactttgacttccctgcactgcaggtgtgacaatttaggaatcctgcttgcttgtgagctccaagagcttgaggtcacgtccacctcaccagcatcccaggacccagtactgtcccactctgtgattgtgtgtttaaaattccaaaatactctttca

SEQ ID NO: 925464 - DNA, 716 bp, Homo sapiens
gagatttctcaaatgtgagatgggaatggtaactgaacccacttcccagggtggctgtggagactgagaccacacatggccatatcacggcatccagcacacgtgggaccctagccgtgttgcccttgatgggaatccttctatgcaccctctgccaccagggccaactcccaacagtagctgtggagggtgtgtcctctattcccactccacccacctcccattgctccacgcagtgacctgccacgtagcggccaccagcaaacccagccccactgtccaggctcctgtggataccacccccccacccccacccctgcttggggcgtcttccacttgcrgttccgaaggaggctgagaaaccaccctcaagggcgctcacctgctccttgttgcacgtaatgacctgccacacagggcaaccagcaaacccagctccaccatccaggctctggtgggtaaccgcccccccagccccaggtgtctgggaggctcaaaaactgccctccaagggcactcatctgttccttattgcactaatacctcgtttacagaaatccactttgacttccctgcactgcaggtgtgacaatttaggaatcctgcttgcttgtgagctccaagagcttgaggtcacgtccacctcaccagcatcccaggacccagtactgtcccactctgtgattgtgtgtttaaaattccaaaatactctttca

SEQ ID NO: 925465 - DNA, 589 bp, Homo sapiens
tatcacatctatagttatctcctttattgaagtcttaaatccctcaaagtcatccatgaaggttggactcaacacccaaactcctgttcatgttgatattttgacctcctcccatgaatcactaacgttcttaatggcacctagaatagtgaatcctttccagaaggttttctatttactttgcccagatatatcacaggaatcactatctatagcagctacagccttayaaaatgtatttctcaaataagacttgagagtcaaagttactcctgaatccatggactgcagaatggatgttgtgttagcaggcatgaaaatcatgttaatctccttgtacatctcccttagagcccttgagtgactaggtgcactgtcaatcagtagtaatattttgaaagaactatttttttctgagcagtagatctcaacagtgggcttaaaatattcagttaaccatgatataaacagatgtgctgtcatctgagcattgttgttttacttataaagcacaagcagaagagatttagcataatttttaagggccctaggattttcagaataatatgtgagccttggcttcaactta

SEQ ID NO: 925466 - DNA, 589 bp, Homo sapiens
tatcacatctatagttatctcctttattgaagtcttaaatccctcaaagtcatccatgaaggttggactcaacacccaaactcctgttcatgttgatattttgacctcctcccatgaatcactaacgttcttaatggcacctagaatagtgaatcctttccagaaggttttctatttactttgcccagatatatcacaggaatcactatctatagcagctacagccttacaaaatgtatttctcaaataagacttgagagtcaaagttactcctgaatccatggactgcagaatggatgttgtgttagcaggcatgaaaatcatgttaatctccttgtacatctcccttagagcccttgagtgactaggtgcactgtcartcagtagtaatattttgaaagaactatttttttctgagcagtagatctcaacagtgggcttaaaatattcagttaaccatgatataaacagatgtgctgtcatctgagcattgttgttttacttataaagcacaagcagaagagatttagcataatttttaagggccctaggattttcagaataatatgtgagccttggcttcaactta

SEQ ID NO: 925467 - DNA, 602 bp, Homo sapiens
ttagtaaccagggttttcaatataaaacataggttatcaatacaaagtcaaaaaaatcagaaaagcactataatattaaatatgaattagaaataaacaacatatactcaatatttaaatatacttatatttacatatatcctagctttattcattgaaatgtctgggaaccacaccaccccaatgaaaatgaatactcctgatactcacatttkagtttctaattatcagttccccccaaaaaaaatcagatatgattcttagtttaattaagtaccattttgtttttgttatttttgcttttgaggtcatgaattatttgcctggacaatatccagaagagttttccctatgttttcttctagtatttttatagtttcaggtttacttttaagtcattaattcatctcgagttgatttttttaatatagtgagagatagaggtctaatttcatcctttggcataatgagaacccaattttcccagcaccatttattaaaggggtggcctttccccagtgtgtttttgtcaactgtcaatgatcaattggctgtcagtgtatggctttattcctgagttgtctattctgttcccattgatc

SEQ ID NO: 925468 - DNA, 739 bp, Homo sapiens
agaaaataaactattaaattttttataactcttcgagatgcaacattaaaagcagagtccctacttagtgggctcaaatcaataaactcagcctgatccaactctatgttccttccaccattatgccatacccttaatatccattcccatgcctgttctccagatttgtgtttatataaattacagaactcaaacagttctttttaagcgcagtgcacctcttcatgggtcatactctcaacctcacctctagggacccaccaggactttagttgtaggtctagaagcaaacaggggtgttgggggtagctcctgagaagaatcaacattattttgcctggcatctgcctcaggagaggccatcactgttgcctcaggcagtgcggagtttatctcctcagacaaaggtggaaaggctgatggcaacatgggtcagggaggggatgttgccactaatggggatggggaagttgttccttctggcaaaaaaasattcatccgagtttacaaactcagtgtccccagcttcatcagggtcctcccacacattcccattccaagttgcagggtcctattcttttccaatcaatgccctcactttaacagtagacacctgatgaggctgtgtatgtaccttttgttgcaggtcagccagtcgcatgataagagcttatgtctgtttttccacaatttcagctttctctacaggagataagactctcattcagggcaatcttag

SEQ ID NO: 925469 - DNA, 574 bp, Homo sapiens
gcaccttaaacccacaaataagtttggctgttgtaaagagaagggaaaccaaaattatttcaggacctactatgtgcagagtttttatctgctatatacataggcatatgctattccatcagtggttcagagggcataaacagttaataaagctatctcagggatgattaaattgagagttgctcagggtcatacaatttttgagtcaggaattaaacccagggctatttcattccaaggcccatgttactttctggtaaaacaaataaccatgaaatataatatattttctttgaatccctaatagtgggtgctattatacccccaattacttaaattgatcctgtacattgccaagagattaaattataaattattgagttcaaaaagwtaatttcttcctccaaagagatggcatcttacagtttaattactctgacagctttttttttttattttttctcctagtgaattatcaacagaaactacctagagaaacctgtaacttcagatcttctgattaattgattttctttgggtgctgcttgacagtaacagaatggtccatggggac

SEQ ID NO: 925470 - DNA, 612 bp, Homo sapiens
gaatctcctggaggaaacttgtcttgaccaaatgacgggatttaggaggaccgtgttcctgctcccggggatgtcacattactgtaggaacacagggtgtcattcaatggcagggacctggtgtgctggctcttggcgagcccaggggaccaggatctggcaaggtgaggagagtggtgcccttaggctggtggagcggcaggggaagggaggtgggtagggctggggcaggagggagagagggaagcagccgcagcttggggctctgggaagaaggaagccactgggctgagaggagcaagggctgtggatgttgcctggaaatagagtaaatagagtttctttcaatcaaatcatattttaaatgcactgggggaggctcagtctgtaaagaagtcttgccagaaatctttcccagaaaataacccttttgctaaaggcaaaaacactttccttaagttatctgttttgatatrgagtgttcttaaaagccaggcacacctacacgtgtgaaaacaaggagaaagcccgcaaacatgcgaacggagcctcaagcgtgtacacatgtgccgtgcgtgtgccaacctcgctgcgtgtacctgggcgcagcca

SEQ ID NO: 925471 - DNA, 612 bp, Homo sapiens
gaatctcctggaggaaacttgtcttgaccaaatgacgggatttaggaggaccgtgttcctgctcccggggatgtcacattactgtaggaacacagggtgtcattcaatggcagggacctggtgtgctggctcttggcgagcccaggggaccaggatctggcaaggtgaggagagtggtgcccttaggctggtggagcggcaggggaagggaggtgggtagggctggggcaggagggagagagggaagcagccgcagcttggggctctgggaagaaggaagccactgggctgagaggagcaagggctgtggatgttgcctggaaatagagtaaatagagtttctttcaatcaaatcatattttaaatgcactgggggaggctcagtctgtaaagaagtcttgccagaaatctttcccagaaaataacccttttgctaaaggcaaaaacactttccttaagttatctgttttgatatggagtrttcttaaaagccaggcacacctacacgtgtgaaaacaaggagaaagcccgcaaacatgcgaacggagcctcaagcgtgtacacatgtgccgtgcgtgtgccaacctcgctgcgtgtacctgggcgcagcca

SEQ ID NO: 925472 - DNA, 656 bp, Homo sapiens
gagtttctttcaatcaaatcatattttaaatgcactgggggaggctcagtctgtaaagaagtcttgccagaaatctttcccagaaaataacccttttgctaaaggcaaaaacactttccttaagttatctgttttgatatggagtgttcttaaaagccaggcacacctacacgtgtgaaaacaaggagaaagcccgcaaacatgcgaacggagcctcaagcgtgtacacatgtgccgtgcgtgtgccaacctcgctgcgtgtacctgggcgcagccagctctcgcattttctcatcastctggttcaatttaaattaaagcaaatgttgaaagccctcccttccaggttttatttgctgccctaagtcttcagcagcaactcattagcttaatgggttttcttaattctcatctattagcagatcctgtttctgcatggaaagccggtcctttccaaagaagaaaggctcagccttgttctacctggacacagagcagcctgcccccgcaccaccacccacacaccagccccctcgcctggaaacccctctgggagatggtggtcccttgccctgggaagctgcggcttctcgtctttacttctctcacgcccactctcctcgtcagcccctcctctccctggaatctgctccatg

SEQ ID NO: 925473 - DNA, 615 bp, Homo sapiens
agggaccatgatttggaagaccaaacaggctcagcttctcatgggtcctcctcagctattctcactgggggcaaggggggtgccgcccagaggcacagtgacacgcagtgatgatgaggctggttgggttgccgtcggcctctaggttcccttctccccagttttctcatgttcctcaccacccagtctttgagaggcttggaggcattgtttttctctcactttctctccatatttatttatttatttttttgagatggagtcttgctttgtcacccaggctggagtgcagtggtacgatcttggctcactgctacctctgcctcctgggttcaagcgattctcctgcttcagcctccagagtagctgggactacagtcacccgccaccatacccggctaattttttgtatttttagtagagatggggtttcaccatgttrgccaggctggtctcgatctgctgacctcgtgatccgcccgcctcggcctcccaaagtgctgggattacaggggtgagccacggcacccggctctccttattctttacaatcaaaatgttcctgagaagaaacgctgtgaagcagtcttgctaagcctttccagagctaagttc

SEQ ID NO: 925474 - DNA, 606 bp, Homo sapiens
ctcatttttagaaaattctgcttagtctatactagaggttttctcaattatttagatgcataagaatggctgatatttctttaggacctcatacattttattattttaacacaggtatctgataagtctctttttagaatccaaagaattaacgggacacaggagattataacgacactctccccacatataccaactttacaaaaaagggtttaggacaatttcccaggtaaaaattcctgaagcygttatttaatattgactgaaactgtagtaaaagctcagttatatttctaagtaaaagaaggcatattaattctctactgctgtgtgacgcagcaccccaaaatttcttagcttaataaaacaagcatatattctcttgcattttctgtattttaggaattggggagcacattttttttctggttggttctcgttcagggtccctcctgggatcgcagtccagttgtcctcaagggctgtagtcatctgacacctgtaaggttcattcccacccttacccatgtaggcagcctacagtttttcaccattggagagagacctcagttccttaacacatgagactcttgactcctcatggca

SEQ ID NO: 925475 - DNA, 665 bp, Homo sapiens
tgaaaacatgattccaaattataatggatatttgacgctcagagaatgtgtccactgggagttgtgattccccctctctcatcagtgagatgagtttagccagtgaggttatatcaggaggataggtacaaatttactacttctactacacatttaatcaactcttacctgctactattgaagtatttgacttgggaactcttctcttgacagagctgagtgtaagtaatgtttgcataggatgatgatttatatctatgtagtatattcctgtagtgacaataacagtgtatacaatatcagcaaaacaatttccctaaagaaagttttgagggtaaaatgtcaaaaagtaaactccacttaaatgaagaacaaagcaggcaaaattgaattgtaatgctaagaagacttggctttctaaaagggtaaatttttgtgacttgattattaagttaattcaaaggtccattacggwtctgggagctagggttgtcttagctttgttttttcatcatgatgaaagttgaaattatgcttttgttaacatgagagtgataacagaggacaccctcagtgtcccaagagaaatggtcattgttatctaatattcatggttgttacaatttaaactataatattccaataagatacattttaaacatgtt

SEQ ID NO: 925476 - DNA, 632 bp, Homo sapiens
agactgcctctctagattcctcttcattgggcagggcatctctgaaagaaagtcgacagccccagtcaggggattataaataaaattatagataaaactccatctcackgggacagggcacctgagggaaggggcggatgtgggcatagcttcagtggacttaaatgttcctgcctgccagctctgaagagagcagtggaccctgacaaggaggattctaccagcacagcgctcaagctctgctaaggaacagactgcctcctcaagtgggtccctgaaccctgtgcctgctgactgggcgacacctctcaacaggggttgacagacacctcatataggagagctctggctggcataaagccggtgcccttctgggatgaagcttccagaggaaggagcaggcagcaatctttgctgttctgcaggctcccctggtgatactcaggcaaatagggtctggagttgacctccagcaaactgcagcagacctgcaggagagagtcctgactgttagaataaaaactaacagaaagcaataacatcaacatcaacaaaaagaaccccaaaacagaaacctcatcaaaatgtcattaacctcaaagatcaaaggtagataaatccacgaagatgag

SEQ ID NO: 925477 - DNA, 632 bp, Homo sapiens
agactgcctctctagattcctcttcattgggcagggcatctctgaaagaaagtcgacagccccagtcaggggattataaataaaattatagataaaactccatctcacggggacagggcacctgagggaaggggcggatgtgggcatagcttcagtggacttaaatgttcctgcctgccagctctgaagagagcagtggaccctgacaaggaggattctaccagcacagcgctcaagctctgctaaggaacagactgcctcctcaagtgggtccctgaaccctgtgcctgctgactgggmgacacctctcaacaggggttgacagacacctcatataggagagctctggctggcataaagccggtgcccttctgggatgaagcttccagaggaaggagcaggcagcaatctttgctgttctgcaggctcccctggtgatactcaggcaaatagggtctggagttgacctccagcaaactgcagcagacctgcaggagagagtcctgactgttagaataaaaactaacagaaagcaataacatcaacatcaacaaaaagaaccccaaaacagaaacctcatcaaaatgtcattaacctcaaagatcaaaggtagataaatccacgaagatgag

SEQ ID NO: 925478 - DNA, 590 bp, Homo sapiens
ggaccagacagattcacagccaaattctaccagaggtacaaagaggagctggtaccattccttctgaaactgttacaaacaatagaaaaagagggactcctccctaactcattttatgaggccagtgtcttcctgaatccaaaacatggcagagacacaacaaaaaaaagaaaatttcaggccaatatccctgatgaacactgatacaaaaatcctcactaaaatactggcaaactgaatccagcagcacatcaaaaagattatccaccacaatcaagttagcttcattcccgggatgcaaggctggttcaaaatacacaaatcaataaacataatacatcacattaacagaaycaatgacaaaaaccacatgattatctcaatagatgcagaaaaggccttcgataaaattcaacaccaatttctgataaaagctctcaataaactaagtattgatggaacatatctcaaaataataagagctatttatgacaaaccggtactgaatgggcaaaagctggaagcattccctttgaaaaccggcacaagacaaggatgccctctctcaccactcctattcaacatagtat

SEQ ID NO: 925479 - DNA, 590 bp, Homo sapiens
ggaccagacagattcacagccaaattctaccagaggtacaaagaggagctggtaccattccttctgaaactgttacaaacaatagaaaaagagggactcctccctaactcattttatgaggccagtgtcttcctgaatccaaaacatggcagagacacaacaaaaaaaagaaaatttcaggccaatatccctgatgaacactgatacaaaaatcctcactaaaatactggcaaactgaatccagcagcacatcaaaaagattatccaccacaatcaagttagcttcattcccgggatgcaaggctggttcaaaatacacaaatcaataaacataatacatcacattaacagaaccaatgacaaaaaccacatgattatctcaatagatgcagaaaaggccttcgataaaattcaacacsaatttctgataaaagctctcaataaactaagtattgatggaacatatctcaaaataataagagctatttatgacaaaccggtactgaatgggcaaaagctggaagcattccctttgaaaaccggcacaagacaaggatgccctctctcaccactcctattcaacatagtat

SEQ ID NO: 925480 - DNA, 623 bp, Homo sapiens
tgccttgtgaaacactcagcaagaagacagccaggctgtgcctggacttcacacttgtgatggttaattgtatatgtcaccttgactgggtcacaagatatctgtcagggtgtttccagaagagattagcatttgaatcagtggactgagtgaagcagagtgccgtcatgatatgggttggctgtgtccctcccaaatctcatcttgaattatagtttccataatcctcacatgttgggcaagggacccagtgggaggtaattgaatcatgctgttctcatgatagtgaatgtgttctcacaggatctgatggttttataaggggctttcccccctttgcttgtcagtcactcagtcctgccgccttgtgaagaaggtgcctgcttctyttttgccttttgccatgactgtaagtttcctgaggcctccccagcaatgtggaactgtgagtcaattaaacctcttccctttataaattaccgtctcaggcaattctttatatcagtgtgaaaacggactaatgtacctccccaatgtggatggatgtcattcaattggttgagggcctgagtagaacaaaaagcagaggagaggggaatttgcaccctgcctgactggttgag

SEQ ID NO: 925481 - DNA, 639 bp, Homo sapiens
tacattacatatgtatataatatatatcaccctatggctgaaggagattgcccaagaaaggataaacttgcaatggggtcccctccccaaggctggggttcaggactcattaaaaaaggtatggttccattccactgaattgcagagcagttttgctggtgtacctggccagagcttgtctgtagtggctgaatgtcttagtctagtttctgttacttataacagaataactgaaacagggccgggcatggtggctcatgcctgtaatcccagcactttgggaggctgaggtgggaggatcacctgagatcacctggctggaccagcctggccaacatggtgaaaccccgtctctactaaaaatacaaaaattagctgggygtagtggcacatgcctgtagtaccagctacttgggagactgaggcagaagaatcgtttgaacccaagaggtagaggttgcagtgagttgagatcatgacactgcactccaacccgggtgacagagtgaatctccatctcaaaaaagaaaaaaaaaaaagaatacctgaaactgagtaatttataaggaatgaaatttatttcttacagttctggaggttggaaagtccaatgttgaggggtgcatctggtgagagctt

SEQ ID NO: 925482 - DNA, 639 bp, Homo sapiens
tacattacatatgtatataatatatatcaccctatggctgaaggagattgcccaagaaaggataaacttgcaatggggtcccctccccaaggctggggttcaggactcattaaaaaaggtatggttccattccactgaattgcagagcagttttgctggtgtacctggccagagcttgtctgtagtggctgaatgtcttagtctagtttctgttacttataacagaataactgaaacagggccgggcatggtggctcatgcctgtaatcccagcactttgggaggctgaggtgggaggatcacctgagatcacctggctggaccagcctggccaacatggtgaaaccccgtctctactaaaaatacaaaaattagctgggtgtagtggcacatgcctgtagtaccagctactygggagactgaggcagaagaatcgtttgaacccaagaggtagaggttgcagtgagttgagatcatgacactgcactccaacccgggtgacagagtgaatctccatctcaaaaaagaaaaaaaaaaaagaatacctgaaactgagtaatttataaggaatgaaatttatttcttacagttctggaggttggaaagtccaatgttgaggggtgcatctggtgagagctt

SEQ ID NO: 925483 - DNA, 708 bp, Homo sapiens
aattatgattgtttgattgtgggcttaagagaaatgctatcgacatcctgtgtccatttctcccctgctttagaccccaaatggttttaaccaaatttaactctcaaagacgtgcgggggttttcccacttttaaaagccctatagatttgtcaccaatgaagccacaactaaataattaatgtcaggtctcagaggaatcaatgttgaaaaaagcaacattcatgctgtgcccaactgctggcatggaggaagtgctcaattaatggcagaattgtcctttccggtttgtttgtttgttttaaaggtccattatcttgagccggccccttccttttcctcaagccagttttgccttytgaaaggcggggccctggagatgtgctccgagtcccctctcagctctaactctccgtagctgtgtggtccagatgatcccaacaccgcatgatcagaagtgaatagtgggccctgctgccttgccagattcacagctcattctcgttttattcatcctgacttttgcttttattcctgactattcctttttctggctcctgatctctttgttcaggcttctcctgactctctgggagcacaagcaggagagagggtcagggtagtgaacagccagcctccttacgtttctctgttacgttttacaggcactggtccctcccaggaacgctcctcaagctttgtgtatagg

SEQ ID NO: 925484 - DNA, 655 bp, Homo sapiens
cgtcccactccaaagaaaaaaaaaccaagtcctatggcagatggaccattgaaagatgttagctttattatcattatttatattactgtcattattattttcctactgcacacctttacccaagccacaatccaacgcgcgcgctcacacacacacacacacacacacacacagtctcccgccctgcctactgtatcctagatgtctttcctcctctctgggacctcaatagaatcaagtcttcactgcttctataggacttctctgtcaagtctagtcccggaggctctccctttttgcttctcaacaccaacaggagtcagcagcacactcctaatcacttaattatcttctaatcatttcctgtgcattacttgatctctcttcattcgactaaaaccccttctgggcaaaggatctaggtcttccagggttagttttaagcctctccctgagaccagcatctaagaccaaggaatgtttacacyaacccacctctactcaaagggtggtccttgaaccaacagccattagcatcagctgatcttttcagatatgcagaatctcaggcctcaccctagccccactgaatcagaactggcattttaacaagatctcaggtgattcatatatacacgaatgtttgagaagcctg

SEQ ID NO: 925485 - DNA, 773 bp, Homo sapiens
acagatggggcactacactgggactccagctaactttataagcagcaggcaagactgggggaattggggtgcagggacagaattccctccccactcggatcatgcctcccagtcagtgtcaatatctacctctctgctcaataaatsctgatgatcatcttaatagaaatcattacctactaaatggcaaaggaatgagaaagcaaggcaatatggatgagagaaagaggttttgagatgagatgtgagtagatttggaaaagccgggtagggagaatcagtctgtcatggctagcacggatgggtcaatgccggcagcagaaacaaggctccctgaaggtcaaggtgacagggggaagccaggaggagctggaagacagttatggatgggctccaaattggtccctaaagaaaatgatgttttctatttcttatgacaatattgttatagggctgttaacaagaatcaagaaatgtcagactgtgccaagggatgacatccagtaacagcctgagctggtttgattaagccatttaattagcatctgtttggggctgggcactgaacagagggtgatccattcaccatctgattcaattctctcattaaaggaggtagtaggtattactcttgtatatatcgcaatgaggaaccaagacccataaaggtgctaatattttgctaaaccaaataaagtaaaagagtgtatctaatgccctgtttctctcaccaccctacagcaatgtcagtgaagatggaaaacagaacgtgg

SEQ ID NO: 925486 - DNA, 454 bp, Homo sapiens
tgagaagagggtggacagaggtagtgtgatggtgacctggaaaccctgggcactggatgaagtgctgaacaaatgccagggggtattaatatacaaaagaaatcccagccatcctgcctgaaatgctgaacaaagcacttcctagaggcatctaataaagcatgtacaaatgcctaaaaacaggaatgtgagtsacatcaacctgtagtcaaatgtgcatccctaatatccaaattatagaacccagtcatattccttgggagcatttgggggacagggttttctctttggcataattaaggcaaagtcctacagcatttcccaaagcagatacaagaataatggcatctgaatcaactgtggttttgttaaaatgcagattcctaggttatgccccctgtctgactgaactagaatcctaggcatgagactcaagcatatgaattataaacaa

SEQ ID NO: 925487 - DNA, 454 bp, Homo sapiens
tgagaagagggtggacagaggtagtgtgatggtgacctggaaaccctgggcactggatgaagtgctgaacaaatgccagggggtattaatatacaaaagaaatcccagccatcctgcctgaaatgctgaacaaagcacttcctagaggcatctaataaagcatgtacaaatgcctaaaaacaggaatgtgagtgacatmaacctgtagtcaaatgtgcatccctaatatccaaattatagaacccagtcatattccttgggagcatttgggggacagggttttctctttggcataattaaggcaaagtcctacagcatttcccaaagcagatacaagaataatggcatctgaatcaactgtggttttgttaaaatgcagattcctaggttatgccccctgtctgactgaactagaatcctaggcatgagactcaagcatatgaattataaacaa

SEQ ID NO: 925488 - DNA, 515 bp, Homo sapiens
gaaccactgctctcttcaaagctgtcagacagggacacttaagtctgcagaggttactgctgtctttttgtttgtctgtgccctgcccccagaggtggagcctacagaggcaggcaggcctccttgagctgtggtgggctgcacccagttsgagcttcccagctgctttgtttacctaatcaagcctgggcaatggcgggcgcccctcccccagcctcgttgccgccttgcagtttgatctcagactgctgtgctagcaatcagcgagactccgtgggcgtgggaccctccgagccaggtgtgggatatagtctcgtggtgcgccgttttttaagccggtctgaaaagcgcaatattcgggtgggagtgacccgattttccaggtgcgtccgtcacccctttctttgactcggaaagggaactccctgaccccttgcgcttcccgagtgaggcaatgcctcgccctgcttcggctcgtgcacggtgcgcgcacccactgacctgcgcccactgtc

SEQ ID NO: 925489 - DNA, 418 bp, Homo sapiens
gaagaaggggatgctctgccttcccgcatcagctcgcatactgcaagtgaatgtccttttggcagcctttaccgtgctgtgctttttgcatttttgtgctttttgtttgcaacttttttgtttgaggtggtccccgagcatagtgtggaagtgctgtctagygtggctaagcacaagaaggctgtgtgtgcctcacggagaaaacagatgtgaaagataagcttcactcaggcatgaatgctgttggccatgagctcaaagttaatgaatcacaacatgtattaaataaggtgactttaaacagaaacacacaaaacaagatgatgtattgatacattgacaaaaatgtgaccaggataggagcgggcaaaaaaatactaaccaaaggcccgcaggggtttaaccctgtattttccat

SEQ ID NO: 925490 - DNA, 718 bp, Homo sapiens
caagatcagcctccctagagcaggagcagttggagtcataaacctgcatggacatgtaggtggtaattttgatgaattgctggaggctgaatgcagactgttctgagagtgaaaactttctggagaccctagtgttagggcccccttttcactgccccaacccagttggaactcggaatgccaccagggtctcaaggtggaaagcaagagagatcccctggtgctgtggcagaaggaagggaaaggtaatctttataaaacatgcccagggtcttctctataacaaaagcctactctccgggaaaaaaagactgccagggccccattcctcctggggcaagaatatatctataagccagccacttcttgctttcttttatcaccattgagggaggaaggaaakctaagaaacacttataaaggtcacagccctgggacaaagtgccactaaaacactcatacttacacacgagactacagtgtgcttctctccccaacatttaactgcaacaccaacagactccagtgtattaacaattgattccaggtgaaagagctgaaagacaggctttatcttacagaaacactaaaacaaccaaagacacaaaaacaaggccaccagaggtatttgaaacctctggcatccatagctacaacaaacactaaacaaagtccaagacctgccaaattgacataaatcctcgcactgaagaccaat

SEQ ID NO: 925491 - DNA, 620 bp, Homo sapiens
aatatggatgaaactgtaaggcattatctttttttttttttttttttttttttgagacgaagtctcactctgtcgcccaggctggagtgtagtgccgtgatcttgtctcactgcaagctccgcctcccaggttcatgccattctcctgcctcagcctccggcgtagctgggactacaggcacatgccaccacgcctggataatttgttttttgtatttttagtagagatagggtttcaccgtgttagccaggatggtctcgatctcctgacctcatgattcacccgcctcggcctcccaaagtgctgggattacaggcgtgagccgccgtgcctggcctggaagccattatcttaagtgaaataactcagaaacagaaattgaaatacttcatgtaatcacttataagaggaagctaaatcattgcacacatggacatatagtatgaaatagcaaacactgggtgggaaggtgagaggagggtaggagatgagaaattacttatggatacaatgtatacarttctgatgaaggtaaattaaaagcctagattccgctgtgacacaatatgcccatgtaacaaaactgcactcgtaccccctaaatttatacaaaaaagta

SEQ ID NO: 925492 - DNA, 530 bp, Homo sapiens
gggaaatttatggcattaaatgcccataagagaaagcaggaaagatctaaaattgacaccctaacatcacaattaaaagaactagagaagcaagagcaaacacattcaaaagctagcagaaggcaagaaataactaagatcagagcagaactgaaggagatagagacacaaaaaaccctccaaaaaatcaatgaatccaggagctggttttttaaaaagatcaacaaaattgatagatggctagcaagactaataaagaggaaaagagagaagaatcaaatcgacacaataaaaaatgataaaggagatatcaccaccaatctcacagaaatacaaactaccatcagaaaatactataaacagctctackcaaataaactagaaaatctagaagaaatggataaattcctggacacatgcaccctcccaagactaaaccaggaagaaattgaatccctgaatagaccaataacaggctcttaaattgaggcaataattgatagcataccaataaaaaaaagtccaggacc

SEQ ID NO: 925493 - DNA, 567 bp, Homo sapiens
gattatggtgtactatcttattaatatgttgctgtgtttggttagctagtattttatggaagatttttgcatttatgctcatcaggaacattggtgtgtagttttcttttattatgtcttttcatgatcttggtattagagtgatactggcttcatagaataatttaggaaggattccctttttctctatcttttggaatagtttcagtaggactggtaccaattctttgaattttggatagaattgagctatgaatccatcttgtcctggacgttttttgttggcagtttttttktttttttttcttgagtcttgcgctgtcacccaggctggagtgcagtggtgcgatgttgactcactgcaaacttgcctcctgggtttaagtgattctcctgcctaagcctcccaagtagctgggattacaggcacaaaccaccatacctggctaatttttgtatttttagtagagatggggttttgccatgttgatcagactggtctcaaacacctgacctcaagtgatccccccacctcgtcctaccaaagtgctaggattacaggcatga

SEQ ID NO: 925494 - DNA, 748 bp, Homo sapiens
ttctcagctctactcacaatgactaatagcaagtggaagtgatgtgtggatgagaagcaaatgtgtcttctctgcatctcttttttaatcaattggctgaagaaagagaatgcagatagaaggtgaaagaaaatataatccctgaaagatcttgaaaaagtcctttgaatcagaaaaaaaaggaaatggtgatttgagcagaatatatakttaaaaagacttctttttttaatctttcttctttttatgaaatataaaaaaagctgaccaaataaagtctaaatgaattaagtatagctcctagtataactcacagttaatataagttgactatcctctctgtagacaacatttttcatcagcatttttcagcatacagctagacctcaactaacactcattatgtgtcacaaaaatgaatcaccttagaagccatcttaataatgagataattgacttctggtacccaactcagaacatctacaaaaggagtggtgaacagatttcaacagtgatgcaaaattttattcattggcattggtagctgagtgctgtgttaaggattctaaagtcactatttattaagtggaagtagatcatcataaaggtcttcattctcatcatcttcacactgagtagggctgctttcttttccacagttgtgtttaaaactgtccaaagacactctccaaatgcttggctttctgtctagaagcttcaaatggggcttttgggtgtgcatcttttt

SEQ ID NO: 925495 - DNA, 625 bp, Homo sapiens
cctgtaatcacagcactttggtagcctgaggtgggcagatcaagagatcaagaccaccttggccaacattgtgaaaccccatatctactaaaaatacaaaagttagctggccgtggtggtgcacacctgtagtactggctactcaggaggctgaggtgggagagtcacttgaacctgggaggcagaggttgcagtgaactaagattttgccactgcatgccagccacagacagagcgagactatgtttcaaaagaaagaaaaaatagaaaaaggatttttgtttcattgatgcaaacaactatattgttgcaagttaagaatacttacaactagttgatagaggttccaagatggctgaataggaacagttccagtccacagctcccagcgtgagcgatgcagaagaygggtgatttctacatttccaactgagctaccaggttcatctcactggggcttgttggacagtaggtgcagcccatggagtgtgagccaatgcagggaagtgtatcacctcacctgggaagtgcaaggagttggggaattccctttcctggccaagggaaactgtgacagactgtacctggaaaattgggacactcacaccctattactgtgcttttc

SEQ ID NO: 925496 - DNA, 579 bp, Homo sapiens
ttgcatcctttgaagtaaaattttttaattttgatgagtttcaatttatcaaattgttattgtttttgttggtcatgctcttgatgtcatttggaagaaagctttgcgttaaccaaagtcatgcagatttactcccatatttatgactcataattttataaggttagcttttacagttgtgtgtataatttactttgagtttttttgtgtgtaaggtgtgacaaaaaggtccaacttcatttttaggcaggtgaatatcctgttatctgaacaaaatttgtggaaaagatcaatatttatcttcttaaattgagctggtacacttgtcaaaatgaattgattataaatttaaggtttatttcttttttwaaaaaatttaactttattttagataaaagaggtacatgtgcatgtctcttacatatgtatattgcacccaggtagtgagcataatacctaatatgtagttttccaacccatatccttttctccttctctgctctagtagtttgcagtgtatgttattcctatgtttatgtccatgtgtgttcaatgtttagcttccacttataagtgagg

SEQ ID NO: 925497 - DNA, 579 bp, Homo sapiens
taacagggcccatgcaagtctaaaatccagtggggcagtcaaattttaaagctccaaaatgatccccttgatgccatttctcacatccaggtcacgctaatgcaagaggtgggttcccatggccttgggcaaatgtgcctctgtggctttgcggggtacagccttccccctggctatcacgggttggcattgagtgtctgtggcttttccaggtgcatgatgcaagctgtagatgaatctaccattctggtgtctggaggactgtggccctcttctcacaggtacactaggcagtgccccagtaaggattctttgtggagactccaaccccaatttcccttctgcactkccctagcagaggttgtccatgagagcactgcccctgcagcaaacttctgcctaggcatcccagtgtttccacacatcttctgaaatttaggtggaagttcccacaccccagttcttgacttctgtgcacctgcaggctcaacacaatgtggaagctgccaaggcttggggcttgcaccctctaaagccatggccctagctctttgttgtcccctttcagccacggcacga

SEQ ID NO: 925498 - DNA, 528 bp, Homo sapiens
tggaagtgacttgctttgtctcagatgagaatttggacttgaacttttgggttaatgctggaatgagttaagactatgggggactgttgggaagaaatgattgtgttttgaaatgtgaggacaggggatttgggaggggtcagaggtggaatggtgtggtttggctgtgtacccatcaaaatctcatcttgtactgtagttcccattatccccacatgccatgggagggaccaggtgggaagtaatttaatcatgagggtggttaccttcatgctgttattgtgatagtgmgtgatttctcatgagacctgatggttttataaagggcttttcccccttctcttggcccttctccttcatgccatcatgtgaagatggttgtgtttggttccctttccaccatgattgtaagtttcctgaggcctccccaatcatgctgaagtgtgagccaattaaaccttttttccgttataaattacccagtctcaggtatgtctttattagcagtctgagaatggactaatacat

SEQ ID NO: 925499 - DNA, 566 bp, Homo sapiens
tcagctgggagcatcagcaagctactgccttaaaatccgagctccccgagtgcacaatttctgtcccttttaagggctcacaacactaaagattttacatgaaagggttgtgactgagcaatctaggggatacgtgacaggggtttcatgcactggtagtcagagtgaaacagaacagagcagggagtttcccaatgttcttccatacaatgcctgaaatctatgggtaacatggggttctaagtcatgagttgatttttaactactaggtttaggccaggcagcccaggcctggttttgggcctggaaccgggctgcttgtctttgatttcacttscttatttttttcttaaaacaggtactgagcataaaacaatataaaacaatatgagagagtctttctcttccctcattttccccctttgagactctcactttttattagagagagttctcacttttatttttgctacttatatctttttgtgcaatagattgatagtgatttatatagtacacttgcactgaagcattttggtgaactaaggtagtgatgaagcctttta

SEQ ID NO: 925500 - DNA, 557 bp, Homo sapiens
gctgtaatattatgtatttctgtttctatccagggtgaaaaagatatatatacagaggatctagaaatatcttaatcaaagttaattcattttttaatatctctaaagtttatttacaaaataaaaacacatacatttaaaatttggggtttggtagtaataatcgctttttgattaaggcattatatagatttcataatttcttgatattaaaatgtattatttttaaatgtgatgctatagacaactgatcatttrtaccattttaaagatttcattttggtaaaaaagaataaaaagaaaagtttatcagttatcactttatgtacatatatatttgaaacatagttatttggtatttattcccatagtcggggggcataaattcccatatgcccatagaatgtgctcagttgactgttcctttttttatatatttttgacggattcttcgcctggtagcaatgtattgcatactatacatttaatatgaaatatcttacttcactaattcaattttagtatgtttgaaatgaaataatgacatcaattgttta

SEQ ID NO: 925501 - DNA, 603 bp, Homo sapiens
actacctaaattcacttcacagattttgcaaaaaaggtgttttcaaactgctcagtcaaaagaaatgtttaaagctgcaagatgaatgctcacatcacaaagcaatttctcaataacttttttctagtgtttatccgaagatatttgatttatcaccataggtttgaaggtgctcccaaatatagcttcacagattctacaaaaacagtgtttccaaactgatcaatcaaaagaaaattttaactctgtgagaggaaatcatacatcacaaagtagtttctgagataacttctgtctaattcgtctctgaagatacttccttttccacattaggcctcactgcacttcaaaatatccctttgcagattctacaaacacagtgtttcctaactgtccttgtgaaagaaggayttaaatctgtgacatgaatgcacatagcagaaagcattttctcataatgcttctttccagtttttatctgaagatatttccttcttcaccattggcctttttgtgatacctaacatcctttcacagattctaaaaaaacagtgtttccaaactgtccaatcaaaagaaaagtttaactctgtgagataaatg

SEQ ID NO: 925502 - DNA, 571 bp, Homo sapiens
ttgcgttcccaagtatgcttttgcagatgctacaaaaacagtgtttctaaactgcagaatcaaaagacagttttatctcagtgaaacaaatgcacacaacacaaatttgtttctgagaaagtgtccttctagtttttatgtaaaggtgtttcctttttcacagtaggtctcaatgcactccaaaatatcccatcacagattctacaaaaacagtgtttccwaactgctcaaatgtcagaaaggtgaaattctgtgagatgaatgcgcacatcccaaagcattttctcagaaagcttctttctagttttcatctgagaatatttcctttttcactgcagacctcaaagtgctcccaaatataacttcctagattctacaaaaacagtgttaccaaagtgctcaatcaaaatatttgtttaactctatgtgatgaaagcacacatcacaaagcagtttctccaaaagcttctttcaggtttttatgaagatatttcctttttcaccacagtcctcaatgcactccaaaacatccttttgcagattctacacagtgtttcaaaactgctaaatc

SEQ ID NO: 925503 - DNA, 571 bp, Homo sapiens
ttgcgttcccaagtatgcttttgcagatgctacaaaaacagtgtttctaaactgcagaatcaaaagacagttttatctcagtgaaacaaatgcacacaacacaaatttgtttctgagaaagtgtccttctagtttttatgtaaaggtgtttcctttttcacagtaggtctcaatgcactccaaaatatcccatcacagattctacaaaaacagtgtttccaaactgctcaaatgtcagaaaggtgaaattctgtgagatgaatgcgcacatcccaaagcattttctcagaaagcttctttctagttttcatctgagaatatttcctttttcactgcagacctcaaagtgctcccaaatataacttcctagattctacaaaaacagtgttaccaaagtgctcmatcaaaatatttgtttaactctatgtgatgaaagcacacatcacaaagcagtttctccaaaagcttctttcaggtttttatgaagatatttcctttttcaccacagtcctcaatgcactccaaaacatccttttgcagattctacacagtgtttcaaaactgctaaatc

SEQ ID NO: 925504 - DNA, 580 bp, Homo sapiens
tatctgaggatatttcctttttcaccatagtcctcaatgcattcctaaataaccttttgcagattctataaaaacagtgtttccaaactactcaatcaaaagaaagcgttatctctgtgagacaaatacacacatyacaaagcagttctgcagaaagtgtctttctagttttgacatgaagatatttcctttttcaccatatgcctcaatgcactcccatatatcccttcgcagattctacaaaaacagtgtttccaaactgcctcatcaaaagaatagtgcaactgtgacatgaatctacacatcacaaagcagtttccccaaaagatttgttctggtttttttctgaaagtatttcctttttgaccataggcctcaatgtgttcccaaacatcctttcccaaatcctacaaaaacagttgtttgaaactgctcaatcaaagaaaggtttaactgtgagatgaaaacacacatcacaaagctttctcagaaatctttctagtttttatctgaggatattacatttttcaccataagcctgaatgtatcccaaatatcccttcacagattctacaaaaac

SEQ ID NO: 925505 - DNA, 604 bp, Homo sapiens
atgtaccagttgtcaaggctctgcctacagggacattgcgatgtatctctgcactgatcacctaggtcatgtaacacttttctagactctgcctacagtggatttgtgacatatctctgcactgatcatccaagtgatgtaaatcttgtctaggatctgcctaaagggactttgtgacataactctgcactgatcatccaggtgttgggtctttgctctacgctctgcctaagggggcattgtgacatatttctgcactgatcaccggtgtgatggactcttctcttggatctgcctatgggrgcagtgtgacatatctctgcactgatcaccgaggtgatgtaactgttgtataagctctgcctacagtagaattgtgagagatctcgccactgatcacgcaagtgatgtaaccattgtctagactttgcctacagggggctttgtgacatacctttgcactgatcaaccaggtgatgtaactcatctaagttctgcctacaggagctctgtgacatatctctgcactgatcacttaggtgatgtaacgcttttataagcactgcctacagcgaattttgacaaaactctgcactgatcacct

SEQ ID NO: 925506 - DNA, 604 bp, Homo sapiens
atgtaccagttgtcaaggctctgcctacagggacattgcgatgtatctctgcactgatcacctaggtcatgtaacacttttctagactctgcctacagtggatttgtgacatatctctgcactgatcatccaagtgatgtaaatcttgtctaggatctgcctaaagggactttgtgacataactctgcactgatcatccaggtgttgggtctttgctctacgctctgcctaagggggcattgtgacatatttctgcactgatcaccggtgtgatggactcttctcttggatctgcctatgggggcagtgtgacatatctctgcactgatcacygaggtgatgtaactgttgtataagctctgcctacagtagaattgtgagagatctcgccactgatcacgcaagtgatgtaaccattgtctagactttgcctacagggggctttgtgacatacctttgcactgatcaaccaggtgatgtaactcatctaagttctgcctacaggagctctgtgacatatctctgcactgatcacttaggtgatgtaacgcttttataagcactgcctacagcgaattttgacaaaactctgcactgatcacct

SEQ ID NO: 925507 - DNA, 490 bp, Homo sapiens
aaaaagtttctcagtatgcttctgtgtagtttttatgtgaagatatttccttttccacaataggtctctaagtgctccaaatatccacttgcagattctacaaaaagagtgtttccaaactgctcaatcaaaagaaagtttcaacyctgtgagatgaatgcacacatcagaaagaagtttgtcagaatgcttttgtctattttttatatgaagacaattccttttctgcagtaggcctaaatgctctccacatatacacttgcagaatataaaaaagagtgtttcaaatctgcttaatgaaaacaaatgttcaaatccatgacatgaatgctcacatcagaaagaagtttgtcagaatgcttctgtctagtttttatgtgaggatatctaattttccaccataggactcaaagctgtccaaatatccataggcagaaactacaaaaagagtgtttcaaaactgctcaatccaaagaaagtttcaactctg

SEQ ID NO: 925508 - DNA, 598 bp, Homo sapiens
gctcagtgccacaggacttttcccacttcagatgccaattgcaaatccaggacttctgattgactggctgtatattggggattcccatgaccccttccttgcttcaatagtttgctagaatggctcacgagaactcagagaaacactccacttacatttactgattaattataaaggatgtagagggcaaagtatggatagggcagtagagcttccaggctgtctccaggatgtgctacctcacagcaattccacgggcttctttggcagaccagaagcccatctaatcatgttattcaaatttgtatggagtttaagtgcatgcccacccttygccttcctggagattgggaggtgggactgaaagttccaaccctctaattacttggtcattctggtgatcagccgcattccaaggctatctagggggccccaccctgagtcacctcattagcataaactcagcatccctacattttccattttccagagttctggatgtaatttaggttcattcaattagaggtacctgtatgaggtttggaaaatggaaataaaatgaaacctcatgagaccagactcatatttctgtttcttt

SEQ ID NO: 925509 - DNA, 558 bp, Homo sapiens
ggaaactgacccatgactcaattacctccacctcgtcttgcccttgatatgtggagattatgggaattacaattcaagatgagatttgggtggagacacaaacctaaccatatcattctgcccatggcccctcctaaatctcatgtctccttcacatttcaaaatcaatcatgtcttcccaatagttccccaaagtctttattcattccagtactaacccaaaagtctaagtccaaagtctgatctgaaacaaggcaagtcccttctgcctatgagcctgtaaaatcaaaagcaaattagttacttcccagatacaatgggggtcacaggaattgggtaaatacacccattccaaatgggagaaattggccaagatgaaggggctaygggccccatccaagtctggaattcaatagggtagtcattaaaccttaaagttgcaaaatgatctcttttgactccgtgtctcatatccagggcacacagatgcaagaagtgggctcccatggccttgggcagctcctcccctctggctttgcagggtacagcccacctatt

SEQ ID NO: 925510 - DNA, 769 bp, Homo sapiens
aagacatggttgacaagtaaattttttacctctgtggcacacagtcatttaacataataattataattattacagatagataacatatactaagtcatattagaattataggagttttacttaatttcagaacatacgcctataacacatttacacaaatataacccaaagaaagccaaacaccatttcatatttggcagtgcttcctgtatgatttctatacaaaatgagccaaatgtcatttttggactttagagaacctaatatctaaaagattagtccagaaagagacatactttataatttgattttggaaagtttgtcaaatatcaaaggtttaaaacacttgatatcacaaaatagaatcccaggttaccttaagtcattcattttggccaaaatgataactctaaataagctttaaaaaagaaaacctttactctagtagaggagacttagctttccaagcaacatccaataaaggtagcatgaggctaaatttgtcttttctctctcctcctttttttccctgccatttacccatgggagagaaagcaaaastctttcattatcttttaatgttacacaaaaatcgtcttcaaaagagaaaaacaaatttcatgtttgcattagtgcatccttaacgtaaaagctagttttttaaataaaattttgtatctctgtccagttttaattagtttgaacataagatttcaatacactttttagatccctttacaattttccatcaaacagcaggtcaattttc

SEQ ID NO: 925511 - DNA, 705 bp, Homo sapiens
tgcatgtggggaaaataggaagctttagaaaatgatgcagggcgggcgcggtggttcacgcctgtaatcccggcactgtggggaggccgaggaaggtggatcatctgaggccaggagttcaaaatcagaccgggcaatgtggtgaaacccaaactctactaaaaaaaaaaaaaatagctgggtgtggtagcacatgcctgtgatcccagctactcgggaggctgaggcaggagaattgcttgaacccaggaagcagaggttgcagtgaactgagatcgcaccatggcactccagcctgggtgacagagcaagactccatctcaaaaaaaaaaaaaaaaaaaaaaaagacagaaaatgccagtgcataacccacaccccaaarcacttcaacagaatgctgaggggggttataagctccccggtgattctaaggtgtagcgagggctgaacactgttgcttgagaagagtggttctcaaagtgtggtccccacactagcagcatcagtatcacctgcctgctgctgtgctctggactgaatgtgtgtgttctccaaaatccatatgttgaagccctcattctcaatgtaatggtattaggaggggcctttgggagatgattgggtcatgagggtgcagcctgcaggaagtggatgagagtccttataaaagggactccagagagctctctttccctcttttcacca

SEQ ID NO: 925512 - DNA, 708 bp, Homo sapiens
cattcaaaagctagcagaaagtaagaaataacaaagatcagagcagaactgaaggagttagagacacaaaaaacccttcaaaaaattaatgaatccaggagcttgttttttgagatgatcaacaaaattgatagacttctagcaagacaaataaagaagaaaagagagaagaatcaaatagacacaataaaaaatgataaaggggatatcgccactgatcccacagaaatacgaactaccatcagagaatgctataaacacctctatacaaataaactagaaaatctagaagaaatggataaattactagacacatacaccctcccaagactaaaccaggaagaagttgaatctctgaatagaacaataacaggctctgaaattgaggcaataagtaataatctaccaaccaaaaaaagaccaggaccagatgattcgcagccaaattctaccacaggtacaaagaggaactggtaccattccttctgaaactattrtaaccaatagaaaaagaaggaatcctccgtaactcattttatgaggccaggattatcctgataccaaagcctggcagagacacaacaaaaaaagagaattttaaaccaatattcctgatgaacatggatgtgaaaatcctcaataaaatactggaaaactgtatccagcagcacatcaaaaagcttatccaccaagatcaggtcggcttca

SEQ ID NO: 925513 - DNA, 643 bp, Homo sapiens
tttttatttccagtgcacaagttttcaaagttttttacaacatccttgccaacactcattttctgtttttttaatttttgataataactattctaatgggtgtgttgatattttattgtcgttttgatttgtatttatataatgatcatgaggttgaacatctttcaattttyttatggatcatctgcatatctttagagaaatgtccattcaaatattttgctcatatttgaattggattttgttattgggttttagaagatctctatatattcttgatttccgtaacttaccagatacacgatttgcaatttttgtccaatttatgggttaccttttcactttgttgatagtgtttttttggtgcacgtttttcaatttttatgaagtccacatttctctacatttttttcttgttgcttgtgcttttgatgtcacatacaagacattactgccaaatccagtgttggaaagactttgacctagattttcttctaagagttttataggcttatgtcttatgttttgaactttgattcattttgttttgcatatggtgttaggtaaggattcaacttcatttttttgtttgttttgttttgcatgcgaacatccagctttcccagcatcatttgttgaaaaa

SEQ ID NO: 925514 - DNA, 554 bp, Homo sapiens
atttctcctcagaaaaatgggattttcttttctatcgcattgtcaggctgcaaattttccaaacgtttatgctctgcttcccttctaaaactgaatgcctttaacagcacccaagtcaccttttgaatcctttgctgtttagaaatttcttccrtcagatacgctaagtcatctctctcgagttcaaagttccacaaatctctagggcagggacaaaatgctgccagtctctttgctaaaacataacaagagtcacctttgctccaattcccaaccagttcttcatctccatctgagaccatctcggcctggaccttattgttcatatcactatcagcatttttgtcaaagccattcaacatctctctaggaagttccaaactttcccacattttcctgtctgcttctgagctctccaaacggtaccaacctctgcctattacccagttccaaagttgcttccacattttcaggtaacttttcagcagtgccccactctactgttaccaatttactatattagtccattttcatgctgctgataaagacatacc

SEQ ID NO: 925515 - DNA, 624 bp, Homo sapiens
gatacctggtcaagattggcaagtagacttcactcgcttgcctcctgataaatggctctgctatcttctagtctttgtctgtgctttctccgggtaggtagaagcgttcccaacaaactttagaaggtgcaaatatcatcacacaaactctcatcatgcatgtaattaccagtttcagactcccaacrtccatccagtcccataatgggcccgccttcatcagccaaattacccaaggtgtctctacaccctcaagaataaagtaggttctccacacaccccacaggcctcaatcttcaggcaaagttgaaaaaaggaaccctgtccttaaagcccaactcaccaagctggctctagaaacccaccagttgtagacaaaaaatctccctttcaccctcatgacactccatgcaacaccaaagccatactttttttatagtccctttgtaatcatgtatggcagaacttttgtcttggggcctccacccttaccagactctgagccactcaggaattacctctcctccttaatccagacacagtttttcattcgtgaagtaggagatgaggccatgcctatccctgttgacacctccttgtcctctcaacataacttttttgcag

SEQ ID NO: 925516 - DNA, 526 bp, Homo sapiens
tgttttgttttctcatcattcgtatgttcactaaagtaacactcttaatttccttcaagaacgtttcctttgcattcacaacttggttaattatttgacacaagagactttgacctctctcagcttctgacacacctttctcactaagcttaactatttctagcttttgatttaaagtaagagatatccaactatgctattctcttgaatacttacaggtggctacagggttgttaattggtctaatttcaatcttagtgtgtctcaaggaataaggaggccctgatagaggaagaagtctggggaacagccagttggtgaagcaatcagaacacacacaacwtttatcaataaagtctgctatcttacatgaagtaagtggtgctcctaaacaattacaataataataccgaagatgtctgtcaccataacagatatgataataaaaaagtgtgaaatattgcaagaattatcaaaccgtgactcagagatgtgaagtgggcacatgctgttggacaaatggcac

SEQ ID NO: 925517 - DNA, 620 bp, Homo sapiens
aattctaccagaagtacaaagaggagttggttccattccttctaaaactattccaaacaatataaaaagagggaatcctccctaactcatttaagaggccagcatcatcctgataccaaaacctgacagagacacaacaagaaaagaaaatttcaggccaatatccctgatgaacatcaatgtgaaaatcctcaacaaaacactggcaacccgaatacagcagcacatcaaaaagcttatccaccacgatcaaggcggcttcatccctgggatgcaaggctggtccaacatatgcaaattaatgaatgtaatccatcacatgaacagaatcaatgacaaaaaaacacttaattatctcaataaatgcagaaaaggccttcaataaaattcaacacccyttcacgctgaaaactctcaataaactaggtattgatggaacatatctcaaaataataagagctatttatgacaaacacacagccagtatcaaactgaacaggcaaaagctggaagcattccctttgaaaaccagcacaaaacaaggatgacctctgtcaccactcctattcaacatagtatttgaagttttgtcagggcaatcaggcaagagaaagaaataa

SEQ ID NO: 925518 - DNA, 634 bp, Homo sapiens
ctggcaaaaagctggtgctcagcaaatgcttgtggaatgtgagtgaggatggcacttcctcgcagggccatggtttcattttaactagcttctgtgtggggctgccacgtgaggacagttacgggccatgtcaggaaatcattgcctggctatgggaataaaggtgacagcccacgtttaattcaggaagaaattttttttttttttttgagatggagtctcgctcttgtcacccgggctggagtgcaatggcatgatctaggctcactgcaacctctgcctcctgggttcaagcgattctcctgcctcagcctcccaagtagctgggattacaggcgcctgccaccacacctggctaagttttgtattttagtagagacggggtctcwccatgttggccaggctggtctcaaactcctgaccttaggtgatctacccgctttggcctcccaaagtgcagggattgcaggagtgagccactgcacctgaccttctacttctgatttcttttttcctttttttttttttaatggggtcttgctatgttactgaggctggtctggaactcacaggctcaagtgatccccttgcctcagcctcccaagtacctggaattacaggcacacatcaccac

SEQ ID NO: 925519 - DNA, 634 bp, Homo sapiens
ctggcaaaaagctggtgctcagcaaatgcttgtggaatgtgagtgaggatggcacttcctcgcagggccatggtttcattttaactagcttctgtgtggggctgccacgtgaggacagttacgggccatgtcaggaaatcattgcctggctatgggaataaaggtgacagcccacgtttaattcaggaagaaattttttttttttttttgagatggagtctcgctcttgtcacccgggctggagtgcaatggcatgatctaggctcactgcaacctctgcctcctgggttcaagcgattctcctgcctcagcctcccaagtagctgggattacaggcgcctgccaccacacctggctaagttttgtattttagtagagacggggtctctccrtgttggccaggctggtctcaaactcctgaccttaggtgatctacccgctttggcctcccaaagtgcagggattgcaggagtgagccactgcacctgaccttctacttctgatttcttttttcctttttttttttttaatggggtcttgctatgttactgaggctggtctggaactcacaggctcaagtgatccccttgcctcagcctcccaagtacctggaattacaggcacacatcaccac

SEQ ID NO: 925520 - DNA, 585 bp, Homo sapiens
aggttatccccaatccccaggggcagcccacattctatatctggttcataaggaagtacaaaggcctggctccatgcctcagccggggatccctcggacaggccaccccagctccgcattctctgccatcctggctgaggctctggtggcaagcacatcacacttccacgtctccctctgcccaccttgcgctcctctctcccttagaagtttccccccacagagcactcctccaaaaccatctgcctgcaaatctccacctcagaatctgtttcccaggaaaccctacataagtaaaaaagtgtgtgtgcttgtgtatttatttttaaacaayaataaaatacttttctgtccaccaactaagttctgaaatggaatattaccagtgctttagaagcctgctttcctttcccttccatcatactcagagatcatcaataatctgatcttttttttgagacagggtcttgctctgtcacccaggctggagtgcagtgctgtgatctcagctcactgcaggctccgtctcctgggctcaagggatcctcccacctcagcctcgcaagtagctgggactacaagtgt

SEQ ID NO: 925521 - DNA, 585 bp, Homo sapiens
aggttatccccaatccccaggggcagcccacattctatatctggttcataaggaagtacaaaggcctggctccatgcctcagccggggatccctcggacaggccaccccagctccgcattctctgccatcctggctgaggctctggtggcaagcacatcacacttccacgtctccctctgcccaccttgcgctcctctctcccttagaagtttccccccacagagcactcctccaaaaccatctgcctgcaaatctccacctcagaatctgtttcccaggaaaccctacataagtaaaaaagtgtgtgtgcttgtgtatttatttttaaacaacaataaaatacttwtctgtccaccaactaagttctgaaatggaatattaccagtgctttagaagcctgctttcctttcccttccatcatactcagagatcatcaataatctgatcttttttttgagacagggtcttgctctgtcacccaggctggagtgcagtgctgtgatctcagctcactgcaggctccgtctcctgggctcaagggatcctcccacctcagcctcgcaagtagctgggactacaagtgt

SEQ ID NO: 925522 - DNA, 769 bp, Homo sapiens
gagtttgagactagcctgggcaacatggtgaaatcccatctctataaaaatacaacaacaaaaaaaagtttgagaacaggatggccaacatagtgaaaccccacctctactaaaaataaaaaaaattagcccattagcccagggtggtggcgtgtacctgcagtcccagctactgaggctgaggaaagagaattgcttgaacccaggaggtggaggctgcagtgagccaatcttgaaccactgcactccagcttgggtgacagagcaagaccctgtctcaaaaaaaaaaaaaaaacctcaggaatggctaagacactaggcacagtggctcmcgcctgtaatcccagcactttgggaggccaaggtgggcggatcacaaggtcaggagatcgagaccatcctggctaacacggcaaagcctcatctctattaaaaacacaaaaaattagccaggcatggtggcgcacgactgtagtcccagctactccggaggctgaggcaggagaatcgcttgaacccggcaggcggaggttgtagtgagccaagatcgtgccactgcactccagcctgggtgacagagtgagactctgtctcaaaaaaaaaaaaaaaggaaagtgacctgaactggcccttccttcacaggagtctggaagaacaaattgaaagctgccccacctgactggctaccagaaaaacacatcagaccacagaggaaacaccaccagatctactctagtttgcaaaatgggcaaaggacttagcattggtg

SEQ ID NO: 925523 - DNA, 769 bp, Homo sapiens
gagtttgagactagcctgggcaacatggtgaaatcccatctctataaaaatacaacaacaaaaaaaagtttgagaacaggatggccaacatagtgaaaccccacctctactaaaaataaaaaaaattagcccattagcccagggtggtggcgtgtacctgcagtcccagctactgaggctgaggaaagagaattgcttgaacccaggaggtggaggctgcagtgagccaatcttgaaccactgcactccagcttgggtgacagagcaagaccctgtctcaaaaaaaaaaaaaaaacctcaggaatggctaagacactaggcacagtggctcacgcctgtaatcccagcactttgggaggccaaggtgggcggatcamaaggtcaggagatcgagaccatcctggctaacacggcaaagcctcatctctattaaaaacacaaaaaattagccaggcatggtggcgcacgactgtagtcccagctactccggaggctgaggcaggagaatcgcttgaacccggcaggcggaggttgtagtgagccaagatcgtgccactgcactccagcctgggtgacagagtgagactctgtctcaaaaaaaaaaaaaaaggaaagtgacctgaactggcccttccttcacaggagtctggaagaacaaattgaaagctgccccacctgactggctaccagaaaaacacatcagaccacagaggaaacaccaccagatctactctagtttgcaaaatgggcaaaggacttagcattggtg

SEQ ID NO: 925524 - DNA, 769 bp, Homo sapiens
gagtttgagactagcctgggcaacatggtgaaatcccatctctataaaaatacaacaacaaaaaaaagtttgagaacaggatggccaacatagtgaaaccccacctctactaaaaataaaaaaaattagcccattagcccagggtggtggcgtgtacctgcagtcccagctactgaggctgaggaaagagaattgcttgaacccaggaggtggaggctgcagtgagccaatcttgaaccactgcactccagcttgggtgacagagcaagaccctgtctcaaaaaaaaaaaaaaaacctcaggaatggctaagacactaggcacagtggctcacgcctgtaatcccagcactttgggaggccaaggtgggcggatcacaaggtcaggagatcgagaccatcctggctaacacrgcaaagcctcatctctattaaaaacacaaaaaattagccaggcatggtggcgcacgactgtagtcccagctactccggaggctgaggcaggagaatcgcttgaacccggcaggcggaggttgtagtgagccaagatcgtgccactgcactccagcctgggtgacagagtgagactctgtctcaaaaaaaaaaaaaaaggaaagtgacctgaactggcccttccttcacaggagtctggaagaacaaattgaaagctgccccacctgactggctaccagaaaaacacatcagaccacagaggaaacaccaccagatctactctagtttgcaaaatgggcaaaggacttagcattggtg

SEQ ID NO: 925525 - DNA, 597 bp, Homo sapiens
cgctcctccatcactgtcccctcgtcttctccaccctcttctgcttggactgtcacagcagcctccccacagcctccctgtcgccaccccccgcgatccgtcccccacacagcagcctgagcaatctttataaggggaaaaccagatgtcactaaagcctctgatgacttcccattatgcacagaatggaatccacacaccccacctggctctgctaggccctgctgtatccaacaccgcctccaagcctctgaccccaccccctgctcagccacactggcttcttttttttgcttttttatttatttatttattttatattttatgtatttctttaactgctcyttgcagagcaaggctaccacacagtcagggtgcacagcatagcctacaccggcctatctgatgatcctcgaccattccgaggtcattccgaccctcagggccttggcacttccgtacccatgacctgttacattctttccacctccttccagcctcgctcatatgttctcatcagtcagatgtcatcttatccagaaagccctcctcaactccccacgctgggccacatgcctcctcgggcttcctacggtc

SEQ ID NO: 925526 - DNA, 603 bp, Homo sapiens
tggcagatcatggccagactgctgcttttttgtttgtttgtttttttgagatggagtttcactcttattgcccaggctggagtgcaatggcacaatctcagttcactgcaacctctgcctcccaggttcaagcgattttcctgcytcagcctcccaaatagctgggattacaggcatgggccacgatacctggctaattttgtatttttagtagagatggggtttctccatgttggtcaggctggtcttgaactcccgacctcaggtgatctgcctgccttggcctcctgaagtgatgggattacaggcgtgagccaccacgactggccagactgcttctttaagtgggaccccaacccatttctcctcactgggcaggacctccctgtggggtcttcagccactccacctaggcttatagggacagagctctgaactttccctgggatggagcttccagggggaggggtggctgttatctctgtggtgcagttgattcagccattccagtctgctggctttgcagagtccaaattttctggacaaggatgggttccctccagtagagcaaacctgctctaccaaaaagcagccagactgctt

SEQ ID NO: 925527 - DNA, 702 bp, Homo sapiens
gaggtttttgtttttgaagtccaagatggcagactagaggcattgttagcatgcctcttccacttggaaagacaaaatagtgtgtagagattcacactgtgaactttttttccaagaggcaagacaggaacttagaaaaactgaaagaaatgcagaccctttgaaataagcagcaggcagaagcctacactgtgaaccagacagaaaactgtgagtctccgcagtgtgagagggggagagattgcctgctgccataacacacactcccacagggtagctgggcaatgcaagccatgggggaaagccttaaccctacccagcactggagctgatttagggagcactggggaatatatgagaaagagtggcatcgggtggtgctttgcatgcactcccagactccagcaaggatagaggggagccattcttgtttctacctcacagtggaccttgcagaagtctgcaagctaactcagatgtggtcacaggctaagagaagctcccaactgagatttgygatacgaacttgagtggggatgaaccccattaaccagaactgagaagagggaaatgtgcaaggccacaagcacaagagttggacattcccccatttcaggcagatcaggaggggtgtggcctgaaagctgtggtttctatctctatcaggaaggcttctggcctggggcagttctgatttctgag

SEQ ID NO: 925528 - DNA, 649 bp, Homo sapiens
tattggtctggacaataatttcttgtgtgtaatcccaaaagcacaggaaacaaaagcataaatagacaaacatgattccatcaaactaaaaagcttctgcacaaaaggacacaattgtgtcaagagaaaatgcacagattaagaaaagtataaaaattatacatcagataatgggctcttttacaaaatatacaagaaactcaaactaatccaaaacaatcctattaaaaacgggcaaagaactcaaatagacatttcttaaaagaagacacacaaattgccaatagttatatgaaaatgttcaacatctctaatcatcagagaaagcaaattaaagtcacaaagatatatcacctcacacctgttagtttggcaattatcaaaaagatgaaagatggctagtgttggtgakgatgctgagaaatgggcacagttatgccctcttggtggtattgtaatttagtgcagccattttgggaaacagcatgaatctttattaaataacaaaaaatagaattaccatgtgatccaacaattccgctacaaaatatatacccaaaagaattcaaatcagtatgttgaagtgatgtcgatactcccaagttcattgcagcactattcacaatagccaattcatggcaacaacctg

SEQ ID NO: 925529 - DNA, 578 bp, Homo sapiens
agaacttccaacattatgttgaataggagtggtgacacagggcatccttgtcttatgccggttttcaaagggaatgcttccagattttgcccattcagtatgatattggctgcaagtttttcataaacaggtcttattattttgagatacattccatcaatacctagtttattgagagtttttagcatgaagggctgtggaattttatcaaaggccttttctgcatctattgagagaatcgtggttttttttttttgtcattggttctgtttatgtgatggattacatttattgatttgcatatgttgaaccrgccttgcatcccagggatgaagctgatttaatcgtggtggataagctttttgatgtgctggtggattcggtttgccagtattttattgaggatttttgcatcgatattcatcagggatattggtctaaaattctgttttttgttgtgtctctgccaggctttggtgtcaggatgatgctggcctcataaaatgagttagggaggattccctctttttctattgattggaatactttcagctcctctttgtacctccagtagaatt

SEQ ID NO: 925530 - DNA, 643 bp, Homo sapiens
gggacaatttgacttcctaatttcctaattgaataccttttatttctttctcttgcctgattgccttggccagaacttccaacattatgttgaataggagtggtgacacagggcatccttgtcttatgccggttttcaaagggaatgcttccagattttgcccattcagtatgatattggctgcaagtttttcataaacaggtcttattattttgagatacattccatcaatacctagtttattgagagtttttagcatgaagggctgtggaattttatcaaaggccttttctgcatctattgagagaatcgtggttttttttttttgtcattggttctgtttatgtgatggattacatttattgatttgcatatgttgaaccggccttgcatcccagggatgaagctgatttaatcgtggtggataagctttttgatgtgctggtggattcggtttgccagtattttattgaggatttttgcatcgawattcatcagggatattggtctaaaattctgttttttgttgtgtctctgccaggctttggtgtcaggatgatgctggcctcataaaatgagttagggaggattccctctttttctattgattggaatactttcagctcctctttgtacctccagt

SEQ ID NO: 925531 - DNA, 607 bp, Homo sapiens
aatggttattttcttttaatggcaggattaagagttctcacttatcaataataaagttgaatgtaaatgaactaatttctctgatcaaaagatataaaatggcagaatggattaaaaaagaagacccagtgatctgttgcctacaagaaacacacttgatctataaagacacacacagactgaaaataaagakatgggaagagatattccataacaatgaaaatcaaaaaagagacagagtagctatacttatataagaaataatagattcaagtaaaaaactataaaaagagacaaagaaagttactatataatgataaaggggtcgattcagcaagtggatataacaatagtaaatatatatgcacccaacaatgtagctcccatatatagaaaacacatattattagagataaagggagagataggccccaatataataatagctggagatgacaacacatcactttcagcattggacagatttccaatttaaaaaatcaacaaagaaacatcagacttaatctgcattatagatcaaatgaacctaatagatcttgacaaacattttattttgtgactgcagaacacacattcttctcttcag

SEQ ID NO: 925532 - DNA, 570 bp, Homo sapiens
aatacttagatttctttcagggcctgctatctctcatgtgacaatttactagattcgggttggaatttggtatcttttttttttttttttttttgagacggagtctcactctgttgcccaggctggagtgggtggcatgatcttggctcactacaagctctgcctcctgagttcaaacaattctcctgcctcagcctcccaagtagctgggattacaggcaccggccaccatgccyggctaatttttttgtatttttagtagagatctcctgaccttgtgatctgcctgcctcggccccccaaagtgctgggattacaggcgtgagccaccgcacccggcctggagtttggtatcttattgctacaaagagtctctttggtcagtcttaaaaatctgttttaatgttaacgctggccagttgcgccagaaatgccaagggaggagggtatcatgaagcatgtctgaacccccttcccatcagggcctgaatcactgttttaggtttactttggaatgcctgtggtagagatggggggtccattagttggttgggggccttagaattttat

SEQ ID NO: 925533 - DNA, 635 bp, Homo sapiens
tgaccttgtgatctgcctgcctcggccccccaaagtgctgggattacaggcgtgagccaccgcacccggcctggagtttggtatcttattgctacaaagagtctctttggtcagtcttaaaaatctgttttaatgttaacgctggccagttgcgccagaaatgccaagggaggagggtatcatgaagcatgtctgaacccccttcccatcagggcctgaatcactgttttargtttactttggaatgcctgtggtagagatggggggtccattagttggttgggggccttagaattttatttttggttgacagaggtcagcagtgaacacatggcttcccagaccaagtcacccatggatgagaggcctgctgctgctggagggtgatgttctcacttggtctggaggtaacacaggcagcctctctgcatggaagtgtaactagtgtcaaaagaaaaaccttagacaaattaaatttaacaaagtttaattgagcaaagaacaagttgcgaattgggtcatgtccagagccagagtaggctcagaggctccaaggcagccacatggtggaagatttatggacagagaaaaaggaaaatgaccacagaaaagggagtgaggacagaacacgctgg

SEQ ID NO: 925534 - DNA, 764 bp, Homo sapiens
tgctgaattcacctcctgtgtgatgttgggaccctgctccccaatgggggcctcacccccaaaaatgtctctggagtctttggggtgctgctgttgacacatgagatcagtcctgccatctgatctggcactgctgctggcactgctgctggccctgctgctggtcagtcagctcctggccaccgtgctggggtctgagccccatggacatcccggggtcctcagcccagacccaggagggacacagggagtagagtggggtgatgcccccgtcacctcccgaggccccgggagtgagtgcygggaccctctgtcctaaccctctgcctccctgggtgttaacccacctgggcaaaagtgcgtggttcaatgccaagggccgccatgggccctgcgtttccctgcagagtccctgggcttcttggcccatcacaggcttgaggatcagcacctgcagcccgtggtggttgttttctcatctgtaaatgcggatttgggctttagagctgactctttgtcaccgagagcacagcctgtcttctctgttcctttcctttgtgactcagaggccctctgcgccttggtgggaggaagaggaatcatccttgttgctgaccccctgcgacggtgctggctggacggggtgtgcatcgtgccaggagctggtccctcattcatcctcacagcagccctcccgggctcgcccgccgtgactttcactcccatttcacagacgaggaccctgaggtccagggaggctgagt

SEQ ID NO: 925535 - DNA, 578 bp, Homo sapiens
catagagacttgttgaacggctttgaccaaagggctgataatcatatggacaacaaaatccaggccgaggtgttctcagatgaagatggcgaacttgttgggaactgtagccaagtcgacacttgttgtgtttcagcaaagagactggtgacattttgtccctgccttagagattggtggaactttgaacttgagagagatgatttagggtatctggtggaagaagtttctaagcagcaaatcattcaaraggtgactttggtgctattaaaggtattcaggttcataagggaatcagagcataagagcttggataattggcagcctgacaatgcaaaagaaagaaaatcccattttctgaggagaaattcaagcctactgcagaaatttgcataaataacgaggagctgaatgttaatctccaagacagtggagaaaatgtctcctgggcatgtcagaggttttcatggcagcccctccaatcacaggccctgaggcctaggaggcaaaagtggttttgtgggctgggcccagggtccctgtgctgtgtgcagccgagggacttggtgctctgcgtc

SEQ ID NO: 925536 - DNA, 687 bp, Homo sapiens
ttggagtcaccacttggttaagcatatgataatccaccgttattctctaagatccatctgtcttctgtgcaggccaaataggagagttgaatggggatgtggtgggaatcaccatccctgcatcttttaggtccttgatggtggcattaatctcttcaatccctccagagatgtgatgttatttttgytttactatttttctaagtagaggcagctctaatggcttccatttggccttttccaccataatagccctcaccctaccagtcagggagccaatatgggggttctgccaactgctaagtgtgtctatgccaattatgcatcctggcacaggggaaatgaccacaggatgagtccagggacccactggactcactgtaagttagatctaagctaaaactccattaattacctgaccttcaaaagcccctactttaactggaggacaacaatgatgttttgtgtcctctggaatcaatgtcagctcagagccagtgtccagtagtccctgaaatatctggtcatttccctttccccagtgcatagttaccctggtaaaaggctgaagttttccttggggaaggatgggagaaagaataacagtataaattttcggcagtgtagtggtgtccttcttcaaggggacctggtcccaccccttcatctaaggggttctgggtctgt

SEQ ID NO: 925537 - DNA, 588 bp, Homo sapiens
atagccttctaaagccactaatagtttgtgtttttttaaagactgaattgttctgcccataaatgttttctcttacctacaagtgccgaataaacttaaagttgcagggttgcatactgattaacaaatatttattcagtttaacaaatgcttaatacatattatttgatagacactgtacaagaaggcagtgcaatggttaagaaagagcatgggctttggaattgtttttctcacagttaatagtggtgctaattattaaaaactaagyttcactttacttagtagtaaaatgtagataataatagttcctgtgtcctgtaattgttagacttaaatgttgtatgtaaagcaccagatgtggttattgttactatttttgtaagatagtacttttttcatgaattaagtctactagatatgttttgaaaggcagagaattatattgattatgtggtaatttttatctactttctgcttgaccatcttaaatgccacctctttacttttgctctttaaagactctttttttttttttttttctgagatggggtctcactctgttgccaggactggagtgtagtggtg

SEQ ID NO: 925538 - DNA, 568 bp, Homo sapiens
aataaagcttccacaatgtggaaagggacccgagcgggttgccactgctggctcaggcaggctgtttttattctcttatctggccccacccacattttgctgattggtagagcctagtggtctgttttgacagggcgctgattggtgcgtttacaatccctgagctagacacaaaggttatccatgtccccaccagattagctagatacagagtgtccacacaaaggttctccaaggccccatcagagtagctagatacagagtgtcgattggtgcattcacaaaccctgagctagacacagggtgctgactggtgtgtttacaaaccttgagttagatacagagtgcggattgctgtatttacaattyctgagctagacataaaggttctccaaggccccaccagagtagctagatacagagtgtcgattggtgcagtcacaaaccctgagctagacacagggtgctgattggtgtttacaaaccttgagctagagacagagtgccgactggtgtatttacaatcccttagctagacataaaagttctctacgtccccaccagactc

SEQ ID NO: 925539 - DNA, 799 bp, Homo sapiens
gacctgggcatccctgtgctcttggggccccaggaagccccctgcccctgcaggcttgagagtgtctattcttgtttcctggcctctccttgatcccagcacctgctctggtgcgagcaaagttgtagctgagcccaggtgcagttgcaacctagccaggagtgcatgcacttggggtggcactgacatgctggccccctgctgcctcagccccttccagactttaggcaccaatgagcatgggagggaggcttggcrtggacccacaggtgcccttggcagggacagcaccggtgttatagatggcatgttgatggcagcaggaggcaggcagatgcttagatgggaagaggggggtccccagcgaagcctcaccttcaaaacaggcatggcctaaagcctgggggctgggctgggttgccatttccagatggagtttgcaacctggagtgagtacttccttgatgtttttcaaccagttggagagtgctttttccaggcccactgatggccacccatagatcgatcagcacacacttccttctgagcccataaaaaccccagactcagccagactcagaaacttgtcaggatgacctgcttgtgaataggaactgccgtctctgctgagagctgttctgttgctcaaaaaagctcctttccaccttgcttaccttccagttgttcacataacctcattcttcctggacacaagagaagaactcaggacctactgaacaacaggagttaaaagaattataacaggttcttggctggcttgccaaactgtgggcagtga

SEQ ID NO: 925540 - DNA, 799 bp, Homo sapiens
gacctgggcatccctgtgctcttggggccccaggaagccccctgcccctgcaggcttgagagtgtctattcttgtttcctggcctctccttgatcccagcacctgctctggtgcgagcaaagttgtagctgagcccaggtgcagttgcaacctagccaggagtgcatgcacttggggtggcactgacatgctggccccctgctgcctcagccccttccagactttaggcaccaatgagcatgggagggaggcttggcgtggacccacaggtgcccttggcagggacagcaccggtgttatagatggcatgttgatggcagcaggaggcaggcagatgcttagatgggaagaggggggtccccagcgwagcctcaccttcaaaacaggcatggcctaaagcctgggggctgggctgggttgccatttccagatggagtttgcaacctggagtgagtacttccttgatgtttttcaaccagttggagagtgctttttccaggcccactgatggccacccatagatcgatcagcacacacttccttctgagcccataaaaaccccagactcagccagactcagaaacttgtcaggatgacctgcttgtgaataggaactgccgtctctgctgagagctgttctgttgctcaaaaaagctcctttccaccttgcttaccttccagttgttcacataacctcattcttcctggacacaagagaagaactcaggacctactgaacaacaggagttaaaagaattataacaggttcttggctggcttgccaaactgtgggcagtga

SEQ ID NO: 925541 - DNA, 545 bp, Homo sapiens
tactatcaaccttatctttgaaaaacagatagcaataaatattatattttttatgtgaggttaaaagtaccgtaggatgaatgagtactttctattttgtgataaagtgacttttttcagcgacatgggtcagtaggagaaagaatacaatgtatattaaatgtgcattaaaatcctggatttcaaccatctgataacrtttcttgtcaaactattctaacagctcctattgttttcagaaatgtttaaataaaatcttaacaaaaataaagaaaatgagctttttcccttctctatgcttcgtgccagaagacaaaggtctatattttaccttcctgttagcaggtacctaaagaatttagaatgtgggctctatccaagaggaacactcccaaaagttgctaaaaaaatataaaaatattgtacattcaagctgcatttagaatgttctgcagcttaaaaggatgtttggagtgggatttagtgtaataggtttggcaacaaaatcagtgcagttcatgcaactgatgacttgatgcagaccc

SEQ ID NO: 925542 - DNA, 825 bp, Homo sapiens
tttttctcagaaaatgggatttttttttttctatcacactgtcaggctgcaaattttccaaacttttatgttctgctttccttataagactgaatgcaggcagggtgcagtggctcatgcctgtaatcctagcactctggaggccaaggcggccagattgcctgagctcaggacttagagaccagcctgggcaacacagtgaaacccttcctctactaaaagacaaaaaatttgctgggcagggcagcatgagcctgtagtctcagctactcaggaggctgaggcaggagaattgcttgaacctgggaggtggaggttgcagtgagccaagattgtaccactgcaatccagcctgggtgacagagcaagactcagtctgaaaacaaaacaaaacaaaamtgaatgcatttaacagcacccaagtcatctcttgaatgctttgctgcttagaaattccttccaccaggtaccctaagtcatatctctgaagttcaaagttccacaaagttctagagcggaggcaaaatgccaccagtctctttgctaaaacataacaagagtcacctttgctctggttcccaagttcctcatctccatctgagactaccttagcctggatttcattgtccatttcattatcagcattttggtcgaagctattcaacaaatctctagggagtttcaaactttccgcattttcctttcttcttctgagccctccaaactgttccaacctctgcctattacccagttccaaagtcgcttccacatttttgggtatcttttcatcagcaccccactctactggtaccaatttctatatta

SEQ ID NO: 925543 - DNA, 583 bp, Homo sapiens
acttccaggaagatcaagttgaagtacttgtctattctccttccacttagtacaataaaaaacctagacattatattttacacacacacacacacacacacacacacacacacacacacggccctaaaacatagagaaaaggcccayaggctaggaaccctaagatccaagatcaacaggttggggtattcccaaggctttcttttagcctcatatatctcagaggtggaactgaaatggctagcaaactggaaatgccagtgggcataggccaaaaacatcctaacaaaatctttctttctttactaaaacaatcaggaaagggggaaacgtagcaaggcagaaaacttttagtaacaacttctctacttcagccaaatatcacagaaaaagtggtggagaacttagggtttcactttctggaggctgtaaggtggtatcaggaggctgagtagggaatgtggactttcatcctcttaggcagtatcaaggaccctgccctcaccagagtgtcagtggaggctgtgtggagtacctggacttccacctccactctgtagtaatgaaatggcacccccatttt

SEQ ID NO: 925544 - DNA, 742 bp, Homo sapiens
ttcaagatacaaaatcaatgtacaaaaatcactggcattcctatacaccaacaacagccaagctgagagccaaatcaggaaggcaatcccattcgcaactgccaaaaaagaataaaatatccaaaagtacagctaatcagggaggtgaaagatctctacaatgagaattacaaaacactgctcaaagaaataaaaratacaaacaaatggaaaaacatctcatgctcatggatagaaagaatcaatatcattaaaatggtcatactgcccaaagcaatttacagattcagtgctatttctatcaaactaccagtgacattcttcagagaactagaaagaactattttaaaattcatgtagaaccacaaaagagcctgtatacccaaggcaatcctaagcaaaaagaacaaagctggaggcatcacattacctgacttcaaactatactacaaggctacagtaaccaaaacagcacggtattggtacaaaaacagacacatagacaagtggagcagaatagagagcccagaaataaggccacacacctatgatcttcagcaaagctgacaaaaacaagcaatggggaaaacactccctattcaatatattgtgctaggataactggctagccatatgcagaagcttgaaaatggatcccttccttacattatatacaaaaatcagctcaagatggattaaagacttaaatgtaaaacccaaaactataaaaaccttggaagac

SEQ ID NO: 925545 - DNA, 620 bp, Homo sapiens
ttacttcataattgttgtaactgattatggctactccctcatcctcctatcactgactcaaccaacccattaacatctaggtgcactctttttgtctctccttctgctcttatccaaggccaaacccttcactgtactctgcatctcacacctttctgtattcaagaaatttgtcccataaaatgagttagggaggattccctctttttctattgtttggaatcatttcagaaggaatggtaccagctcctctttgtacctctggtagaatttggctgtgaatccayctggtcctggactttttttggttggtaggctattaattactgcctcaatttcagaacttgttattggtctattcagggatttgacttcttcctggcttagacttgggagggtgtatgtgtccaggaatttatccatttcttctagattttctagtttatttgcgtagaggtgtttatagtattatctgatggtagtttgtatttctgtgggatcagtgctgataccctctttatcattttttattgtgtctatttgattcttctctcttttcttctttattagtctggctagtggtctatctattttgttgatttttttttttaaaaaaaaca

SEQ ID NO: 925546 - DNA, 613 bp, Homo sapiens
attcggctactgatacttgtgtatgcttcacgagttctcatgctgtgtttttcagctccatcaggtcatttatattctcctctaaactggttattctagttagcagttcctgtaaccttttatcaaggttcttagcttccttacattgggttagaacatgctcctttagctcagaggagtttgttattacccaccttctgaagcctacttctgtcaatttgtcaaactctttctcygtccaattttgtgctcttgctggagaggagttacaatcatttggaagagaagaagcattctggttttttaaattttcagcatttttgtgctggtttttcctcatcttcatttatttatctacctttgatctttgaggctgatgacctttggatgtggttttgtatgggggtcctttgtgttgatgttgatgttactgctttctgtttgttagtttttcttctaacagtcaggaccctcttctgcaggtctgctgcagttttctggaggtccactccagttcctatttgcctgggtatcaccagtggatgctgcggaacagcaaagattgctgcctgctccttcctctggaggctttgtcccagagggcaccagcctg

SEQ ID NO: 925547 - DNA, 613 bp, Homo sapiens
attcggctactgatacttgtgtatgcttcacgagttctcatgctgtgtttttcagctccatcaggtcatttatattctcctctaaactggttattctagttagcagttcctgtaaccttttatcaaggttcttagcttccttacattgggttagaacatgctcctttagctcagaggagtttgttattacccaccttctgaagcctacttctgtcaatttgtcaaactctttctctgtccaattttgtgctcttgctggagaggagttacaatcatttggaagagaagaagcattctggttttttaaattttcagcatttttgtgctggtttttcctcatcttcatttatttatctacctttgatctttgaggctgatgacctttggatgtggttttrtatgggggtcctttgtgttgatgttgatgttactgctttctgtttgttagtttttcttctaacagtcaggaccctcttctgcaggtctgctgcagttttctggaggtccactccagttcctatttgcctgggtatcaccagtggatgctgcggaacagcaaagattgctgcctgctccttcctctggaggctttgtcccagagggcaccagcctg

SEQ ID NO: 925548 - DNA, 835 bp, Homo sapiens
ccactaaaaatctgctcatcccagcactggaaatggtttgaaacagagagcagtggtaatggttaagggttaccaccaaaaggatgttgaggaaggtctgaattttaggagtgggaggacagccagagactaaatggaatgattcttcaaaattatataaaattattatgctatgtgaaaatattctaacagatttttaaaaactcaaatgtttcccaactccttttacaatgctagcgtaactctgacatcaaatctgatggtcataataaatgcaaaggggaagggataacacacaaaagttatgagcttaactattttgaagtgaacagttcagtagcgtgaagtgcattcacattgttgtgcaaccaatttccagaactcttttcaatttgcaatgttgaaactctgtacccatggaacaactccccactctgccttctccccagcccctgacaaccaccattctacttcctgtccctatgaatttgaatatactaggtayctcatgtaagtagaatcacatagcatttgtctttttataactggcttatttcatttagcataatgttctcaaggttcatccatattgtagcatgtgtcagaattgtgttcctttttaaggctgaatagtatgatattgtatgtctataccatattttgtttatccatttatctttcaatttgttgcttccaccttttggatattgtgaataatcatgctatgaacatgggtgtacaaatatctcttcaagactctgctcagttcttttggatatatacccagagtggaactgtcagtcaaatggtaattctatttttaattttttgaggg

SEQ ID NO: 925549 - DNA, 620 bp, Homo sapiens
atggtggctcatgcctgtaattccagcactgtgggaggccgaggtgggtggatcatgaggtcaggagttcaagaccagcctgaccaagatggtgaaactccatctctactaaaaatacaaaaaaattagccaggtgtggtggcaggcacctgtaatcccagctacttgggagrgtgaggtagagaatcacttgaacctgagaggcagaggttgcagtgagctgagatcgcaccactgcactccaatctgggtgacagagcaagactctgtctcaaaaaaaaaaaaacaaaggtcgcttccaagatggccaaataggaaccgctccagtctacagctcccagtgagatcgacacagaagacgggtgatttttgcatttccaactgaggtacctggtttatctcattgggactggttggacagtgggtgcagcccacggagggcgagctgaagcagcgtggggtgttgcctcaccaggaagcacaaggggtcaggagatttccctttcctagccaagggaagccgtgagtgactgtacctggaggagcggtacactcctgtccaaatactatgcttttcccatggtcttcacaactggcagaccaggagattccctcccgtg

SEQ ID NO: 925550 - DNA, 620 bp, Homo sapiens
atggtggctcatgcctgtaattccagcactgtgggaggccgaggtgggtggatcatgaggtcaggagttcaagaccagcctgaccaagatggtgaaactccatctctactaaaaatacaaaaaaattagccaggtgtggtggcaggcacctgtaatcccagctacttgggagagtgargtagagaatcacttgaacctgagaggcagaggttgcagtgagctgagatcgcaccactgcactccaatctgggtgacagagcaagactctgtctcaaaaaaaaaaaaacaaaggtcgcttccaagatggccaaataggaaccgctccagtctacagctcccagtgagatcgacacagaagacgggtgatttttgcatttccaactgaggtacctggtttatctcattgggactggttggacagtgggtgcagcccacggagggcgagctgaagcagcgtggggtgttgcctcaccaggaagcacaaggggtcaggagatttccctttcctagccaagggaagccgtgagtgactgtacctggaggagcggtacactcctgtccaaatactatgcttttcccatggtcttcacaactggcagaccaggagattccctcccgtg

SEQ ID NO: 925551 - DNA, 620 bp, Homo sapiens
atggtggctcatgcctgtaattccagcactgtgggaggccgaggtgggtggatcatgaggtcaggagttcaagaccagcctgaccaagatggtgaaactccatctctactaaaaatacaaaaaaattagccaggtgtggtggcaggcacctgtaatcccagctacttgggagagtgaggtagagaatcacttgaacctgagaggcagaggttgcagtgagctgagatcgcaccactgcactccaatctgggtgacagagcragactctgtctcaaaaaaaaaaaaacaaaggtcgcttccaagatggccaaataggaaccgctccagtctacagctcccagtgagatcgacacagaagacgggtgatttttgcatttccaactgaggtacctggtttatctcattgggactggttggacagtgggtgcagcccacggagggcgagctgaagcagcgtggggtgttgcctcaccaggaagcacaaggggtcaggagatttccctttcctagccaagggaagccgtgagtgactgtacctggaggagcggtacactcctgtccaaatactatgcttttcccatggtcttcacaactggcagaccaggagattccctcccgtg

SEQ ID NO: 925552 - DNA, 727 bp, Homo sapiens
aggaagcacaaggggtcaggagatttccctttcctagccaagggaagccgtgagtgactgtacctggaggagcggtacactcctgtccaaatactatgcttttcccatggtcttcacaactggcagaccaggagattccctcccgtgcctggctcagcaggtcccacgcccacggagccttgcttgctgctagcacagcagtctgagattgacctgggatgctgaagttgggcagggggtggggcatccgccattactgaggcttcagtaggcagttctatgctcacagtctaaacaaagtggcagggaagcttgaactggcagagcctaccacagctcagcaagcctactgcctctctagattccacctctgcgggcagggcatatctgaacaaaaggcagcagacagcttctccagacttaaacgtccctgcctgatagctctgaagagatcagtggttctcccagcatggcgttcaagctccaataatggacagactgcctcctcaagtgggtccctgayccacctcccagtaggggccaacagatacctcatataggctggtgtctcatactgagacacctctcagtaggggccaacagatacctcatataggctggtgcccctctgggacaaaggatcaggcagcaatatttgctgttctgcagtctctgttggtgatagccgggcaaacagggtctggagtggacctccagcaaactccaa

SEQ ID NO: 925553 - DNA, 838 bp, Homo sapiens
gtaatgcctgaatattgtgaagaacctgtgaaccaggccctagtcttcttttcctctgtcaactgatcacagggaacaccccatgtagccatcggtgcaggctagggaagaaaaggcagagtggcaggagtggagaccatgggcatttgagccacttcctcttgtaacttacttgtgccttcaggacctgctcgagcctgatcacgcatataccactttcatttgatgatggacggctgctgtgcacaacctactttatggctagatgggccagaaagmacccagttcatgataggcagttcaggttacatggtgccttgatgacccacagtcaaatgttcagtttccaccaaagcctagtaatgagctaagagttgtctctcaaaaggagagtagttatctgcagaagatggcagggccttgctccaaaatcctacaggcctctgctgtgattcacctatgagggcctgtcaaaggctccaaacaacatccctacctgcaactgaaacctcaaacaccataaacaccattggatcttctgggtcatatggcccaagtggcagagcagcttgcacagcagcctggacctgttgcagagccttctcctgttctggaccctactcaaaactggccaccttttgggtcactggataaatgggctacagtaacacacccaaatgagcaatgcattgcctccaaaatccaaatagacccactaggcattgtgcctctttcttgattataggaggggccaaatgcagcaacttatccttcaccttagaaggaatatcttggcaggctccacaccactggacccctagaaatttccctgaggtag

SEQ ID NO: 925554 - DNA, 494 bp, Homo sapiens
  misc_feature 227, 267: n = A,T,C or G
caatgctggcttgggcagcctgcttttattctcttatctggccccacccacatcctgctgattggtagagccgagtggcctgttttgtcagggcgctgattggtgcgtttacaatccctgagctagatacaaaggttytccaagtccccatcagatgagttagatacagagtttggacacacaggttctccaacgtccccgtccagagcagctagatacagagtgtngattggtgcatttacaaaccttgagctaaacacagggtgntgattggtgtgtttacaaaccttgagctagatacagagtgctgattggtgtatttacaatccctgagctagacataaaggttctccacgtcctcaccagagcagctagatacagagtgtcgattggtgcactcacaaaccttgagctaaacacagggtgctgattggtgtatttacaatccctgagctagatataaagactctccacgtccccaccagactcaggag

SEQ ID NO: 925555 - DNA, 591 bp, Homo sapiens
tcatatcttcatatgcagtcatgtgtcacctgacatttcaggcagtgatcgatctactgatgtcttgatgatcttgaccctgcataggcctaggctaatgtgtgtgtctgtcttagtttttaccaaaaatctttcaaagtttttaaaatttcataaatagaaaaaagcttacagaataaggaaataaagaaagaaaatatttgtgtacagtggtacaatgtgtttgtgttatatgctgttattgcaaaaaaagtcataatgtttaaaaaataaaatgtttattgttaaaaacttacagtaagctaaggttaatttattattgaagaaaaataccttttataaacttagtgaagcctaagtgtacagtgtttataaaatctatagtagtgtacagtaaaatcctgggccctcacattcactcaaccctcactcactgaytcactcagagcaacttccattcctgcaagcttcattcacggtaagtgccctgcatagatgtacctttttaaaaatcttttttttttgagacagagtcttgctctgtttcccaggctggagtgcaggggtgcaatcttggctcactgcaacttc

SEQ ID NO: 925556 - DNA, 628 bp, Homo sapiens
aaaatgaaggagaaattgggacatttgcagataaacaaaaactgagggcactcattgcttgtagacatgccctgtgagaaatgctaaagagaattctttggactgaaatgaaaagacaatagaaagtaatttgaagacatatgaagaaataaagaacacggtaaaatataactccataggtatttattatagccagtatttttgtatctttggtttataagttattttctttataatttaaaagacaaatgaacaaaatgctacctatgtcaaagggcaaacaatgtataaagatataataagtgataattacaacaaagkgggtggtataagttatatctgagcacatttttgaatgttatttaaattaatttggtattaggtcatataaaattgttataatttaagataatctaaatacccaggataaccactaggaaaataactaaaaaaatgcacaataaataaattagaagagaataaaaatagcacatatgcacaaaaaggcacatacacaaatgtgattaaacaaaaagaaggtagtaatagccaaactgatgaatgatctcccctcccctgaatatatggcatagagaaaacaaacaaaaaaacagtattcttaccctta

SEQ ID NO: 925557 - DNA, 760 bp, Homo sapiens
tcttttctaaagtcagtcagtaaacactgaaggagtgaactgttcttttcatcagagaatacagcaagttaagtcttcagtggacataaaaaacaaaacaacaacaacaacaacaacaacaaaacatttccatgaaaggaacaaaatgacagttctaatggctaaccccccaaaatggagatctaaaaattgcctgacatagagttcaaagtaattatctaaggaagctcagtaagccacaagagaacacagacaagttaataaaattcagagaaataatacatcaacaaaatgataaattcaacaaacagatataaaacatttataaaaacaaccaaatggaaattctgaagctgaagaatacgctgaataaactgaaagaaattagttttatcagcagactttatcaagtagaagaaataatcagcaaacttgaagacaaactatttgaaattacccagtcataggaacaacaacaaaagaagactaaagaaagccaaagggactacaggacaccatcaagtgaaacaaaatacacattatggaattcttaatagaagcagagaagaagagaaagggatagamaacatatttaaagaaataaggacaaaaagtattcaatctgggggaaaagtgaacattcagatccatgatgcagaaagaaacgccaataatctgaacatcaagagatctttaccaagtgatattataatcaaattgtcaaacattcaagacagtgaaatgatcttgagaacagaaa

SEQ ID NO: 925558 - DNA, 633 bp, Homo sapiens
attgaataccctttatttctttctcttgccagagtgccctagccagaacttccaacactatgttgaataggagtggtgagagagggcatccttgtcttgtgccggttttcaaagggaatgcttccagtttttcccattcagtatgatattggctgtgggtttgtcataaatagctcttatgattttgagatacagtccatcaatacctactttattgagagtttttaccatgaatggttgttgaattttgtcgaaggccttttctacatctattgagataatcatgtggttttcgtcattggcattggttgtttatgtgatggattacgtttattgattttcatatgttgaaccagccttgcatccctgggatgaagctgacttgatcrtgatggataagctttttgatgtgctgttggattctgtttgccagtattttattgaggattttcacatcgatgttcatcagggatattggcctaaaattatctttttttgttgtgtctctgccaggctttggtatcaggatgatgctggcctcataaaatgagttagggaggattccctctttttctattgtttggaatagtttcagaaggaatagtatcaactcctttttgtacctctggtaga

SEQ ID NO: 925559 - DNA, 596 bp, Homo sapiens
cagtgacacaacaataacaacaaaaaaacttcaagccaatatccttaatgaacattgatgcaaaaatcctcaacaaaatactggcgaaccgaatgcagcagtatatcagaaagctaatccatcatgaaccagtaggcttttaccctggtatgcaagattggttcaacatatggaaatcaacaaatgtgattcatcacataaacaagattaaatataaaaaacacaggattatctcaactgattcagaaaaggctttagataaaattcaaaatggatttatgttaaaaacgctcaatatactaggcaatgaaggaacatgcttcaaaatagtaagagctatctatgacaaacctgcagccaacatcatactgaatgggcaaaagctggaagcatttcccttgaaaaycagcacaaggcaaggttgccttctctcaccactcctattcaacaaagtattggaaatcctgacgagaaatatcagtcaacagaaggaaataaagggcctccaaataggaagagaggaagtcaaactatccctgttggaagatgacacaatcctgtatctagaaaatcctatagtctcagctcataagctc

SEQ ID NO: 925560 - DNA, 527 bp, Homo sapiens
gtagcaggcaggggggcgctgagctgcaacagagaggagaggttaggggcgcacaccctgcagccaaaccagccaggttcacatcttgctcactcacctcccactgtgtgccaaggccaagttactcagcccctaagtgtttcagttttcccatctataaaatggagataataactgtacccagtctgtttattatttattgagatgattaaatgaagaaatatgtgaacagtgcctrgcacttagatgtcctgaatgaatgagagcaataataataataattaattaataattattattggctgggcatggtggctcacacctgtaatcccagcactttgggaggccaaggcgggaggatcacttgaggtcaggagttcgagaccagcccgcccaacatggtgaaaccccatctctactaaaaatacaaaattagctgagtgtggtggtgagtgcctgtaatcccagctacccaggaaactgaggcatgagaacagcttgaacctgggaggcggaggttgcagtga

SEQ ID NO: 925561 - DNA, 876 bp, Homo sapiens
tggttttggtcaaggcagtcatgcatcaccgtcataacttaagtttaaggtaatgaatacatcagaacagaagtgggggatgccttttttttttcttttttgagacggagtctcagtcagacttgtcacccaggctggagtgcagtggtgcaacctcggctcactgcaacctccaccctccgagttgaagtgattctccagcctcagtctcctgagtagttgggattacaggcgcctgccactgcacctggctaattttttgtatttttaatagagacggggtttcaccatgttggccaggatggtctcaatctcatgacctcgtgatccacctgcctacgcctcccaaagtgctgggattacaggcgtgagccaccgygcccggcctgggggatgccttcttgcaacagggtggtgtgcatttcaccagccctctggcaagcccttagctagcattcatctgctcggtaacatttgctgagacccttcctctgtgccaggccctgtgctggggatctaaaggtgggcgagaaatcatgtccctgccctttccaagttttttttactttttatttttatagggtctcattatgttgctcagactggcctcaaactcctgggctgaagcaatcctcctgccttggcctcccaaactgctgggactacatttgtgagccactgcacccgcccctttctaagtttatatctaggagagaaggacacattgaataagtacttacaagggtgacagaggtggggagaggaccaggatgctataaattgggcaacagggatggcctagtctaggggatgagagggtaaactgaggagctgaaacttatgctgccatcagaagggtgagtagaggggttggcc

SEQ ID NO: 925562 - DNA, 601 bp, Homo sapiens
atacctgtaatcccagcactttgggaggctaaggcaggcagatcacttgaactcagaagtttgcaaccatcctgggcaacatggcaaaaccccatctgtacaaaacacaaatactgagcccagcagaaggtcgagctgtgatcatgccactacattccagcctgggcaacagagtgagaccctgtctcaaaaaaaatctgtgaaggcygggtgcagtggctcactcttataattacagcactttgggaggccgaggcaggcagatcatgaggtcaggagttagagaccagcctggtcaacatggtgaaatcccatctctactaaaaatacaaaaaatagctggcatggtggcatgtgcccagctacttgggaggctgaagcaggagaatcgcttgaacctgggaggcggagattggagtgagccaagattgtgccactgcactccagcctagatgacagagcaagactccatctcaaaaagaaaaaaaagatctattaaaaattatgtatgtgatagtttgtcctggaaggccaaaggtagataattctagaaaattaggaagcaaggctgctaaccggttgacacatgccaatcattaat

SEQ ID NO: 925563 - DNA, 601 bp, Homo sapiens
atacctgtaatcccagcactttgggaggctaaggcaggcagatcacttgaactcagaagtttgcaaccatcctgggcaacatggcaaaaccccatctgtacaaaacacaaatactgagcccagcagaaggtcgagctgtgatcatgccactacattccagcctgggcaacagagtgagaccctgtctcaaaaaaaatctgtgaaggctgggtgcagtggctcactcttataattacagcactttgggaggccgaggcaggcagatcatgaggtcaggagttagagaccagcctggtcaacatggtgaaatcccatctctactaaaaatacaaaaaatagctggcatggtggcatgtgcccagctacttgggaggctgaagcaggagaatcgcttgaacctgggaggcggagattggagygagccaagattgtgccactgcactccagcctagatgacagagcaagactccatctcaaaaagaaaaaaaagatctattaaaaattatgtatgtgatagtttgtcctggaaggccaaaggtagataattctagaaaattaggaagcaaggctgctaaccggttgacacatgccaatcattaat

SEQ ID NO: 925564 - DNA, 618 bp, Homo sapiens
atttgcataaataacgaggagctgaatgttaatccccaaggcaataggaaaaatgtctcccgggcatgtcagaggtcttcccagcagcccctcccatcacaggcccagatacctagaaagaaagaatggaatcatgggctgggcccagggttcccacrctgtgtgcagtctaaggacttgatgccttgcatccaagccacttcagccatgactaaaaggggccaaggtacagctcaggccatgacttcagagggggaaagccccaacccttggcagcttccatgtggtgttgagcctgtgggtacacagtagtcaagaattgaggtttgggaacctccgtctaggtttcagaggatgaatggaaatgtccagatatccaggcagaagtttgctgcaggggcagggctctcatggagaatttctgccagggcagtgcggaagggaaatatgtggtctgagccctcacatggagtccctactggggcatacctagtggagctgtgagaagagggccactgttctccagaccccagaatggtagatccaccaacaacttgcactgtgtgcctggaaaaaccacagacactcaacatcagcccatgaaagcagccaggaggg

SEQ ID NO: 925565 - DNA, 692 bp, Homo sapiens
gggggagcagaaagtatatgcatcaggtatgaggaagaaaatagattttggaagttatgagaaatgtagggagtgagttgagaatagtttgtgatttttagggcctctaaaagtattaaagcagaggcagccactgcacgcagacatgagggctaggctaaaacagtaaggtcaagttgtttgcacagaaaggctacagggtgcagtcctggcttttgtgtaagaattctgaccacactaaccatgcctaggaaggaaagaagttgttgttttgtaagggattgaggtttgggagattagtcggacccgatcagcagggaaagcacgtgtgtttttatgagaattatgcccagataggtaacagatgaggatgaaatttgagcttgactgaagtaatgggggctgtctgtgaagccttgcggcagtacggcccaggttatttgctgagcctaatgggtgtcagggtcagtctaagtgaaagtgaagagaggctgggatgaagggtgcaaaggaatagtaaagaaagcaygtttgagatccagaacggaatagtgggttgtagagggaggtattgatgataggacagtatatgggtttggcaccatggggtggataggcaaaacaatttggatgataaggcacagatcctgaactaacctgtaagacttgtctggttctaggacaggtaaaat

SEQ ID NO: 925566 - DNA, 564 bp, Homo sapiens
aacaaaacaaggcactcgggagaggaaggaagtgaggaggagaggaaagaaagagcgagagaaggcagatatgatcagatacaagctacagatgtgactgcctaactctcccacctggaaaagtaggctgctctggcagaaggctctgaaaggcctgttcagcacccaggccgagttacattttcctacctcaaaagctcctcaggccttctggtggtctttaacagaagctcatacaggaacagagcctgcragaagagaatgatcgttagcactgatggcacactcagcgtgtgcccaacactgtgaggccctatcaggaaggcattccacaatcccattttacagatggggaaatggaggcttaacaggctatgtgagttacctaggactagaccattgctaagtggcagtgcctggatttgaaccagtgtcaaggtaattccagagccccactctcacactccagatgattctctacaccccatgaggcagatgagaggcaaagacattggtggcagggctggagttttacttcctgtgctttaggaagctgctgaccag

SEQ ID NO: 925567 - DNA, 566 bp, Homo sapiens
gcagctgggcgggcaaagccagaaaagcctagaggaagatgtgaggggtggaagggttagagcctcaacttgtcatgctggccactgggtggcaggggccagtttcaacaaaggcactcacacccaccctccaaagtccagcctctccttttggcccaagctctccgggaactggggtctggggtgggtgctggagacaccacagcacccagctccccactccacaggaaccattgggcccaccagggctgcactcctcrgggagcaggagaagcagaaaaattcacacccagccagccctccgcacccaggtgccaattcctgttccggatgcctccacacacagggccctgtcccccatggtgtctccaggggtgcctggcagcctctgaggcacagacccagagtgcacaggcccaggaaccatggtgggtgtgggggctctgtcatgctcaggattcccacgcaaacactgcacgcctgccacactccagtatgaccaagagttggtcgccctctggagtgtggagtcagggagaggagaaccactccttccttggatgcca

SEQ ID NO: 925568 - DNA, 553 bp, Homo sapiens
catgtcctgaggcagccctgtggagaaaaccccgttggaaaaaactgaagcctgcaatggctacatgagtaaacttggaagcagatcttctccaccccaccctacctcatgggaaatcttaagtcaaggcatacagctaagccatgcccagattcctgacccacagaagtcataagacaataaatatttgttgttttaagctgctatgtttggggatgacttgttaagcaaaatgagaaaaataatacaacaagtgattacaatgtgcagcagagctcaggaaccactgaactagaccagtatgtggtcttagagaagtctagtctcttcttgagcscacagggaaatctgtagcataaactgcaccatagagttgtacagccagaagcaaatctcacatcagtccgtcattggcagatgctgtctggagggaaaatagaggggtgcacaacctccctagtattcccaagtaggtgcttgtcagcaggacaagggttctagaaacctgcaggtaatagcagccaacaagaagcactgggagatgtgttcattg

SEQ ID NO: 925569 - DNA, 668 bp, Homo sapiens
gtcctgaggcagccctgtggagaaaaccccgttggaaaaaactgaagcctgcaatggctacatgagtaaacttggaagcagatcttctccaccccaccctacctcatgggaaatcttaagtcaaggcatacagctaagccatgcccagattcctgacccacagaagtcataagacaataaatatttgttgttttaagctgctatgtttggggatgacttgttaagcaaaatgagaaaaataatacaacaagtgattacaatgtgcagcagagctcaggaaccactgaactagaccagtatgtggtcttagagaagtctagtctcttcttgagcccacagggaaatctgtagcataaactgcaccatagagttgtacagccagaagcaaatctcacatcagtccgtcattggcagatgctgtctggaggraaaatagaggggtgcacaacctccctagtattcccaagtaggtgcttgtcagcaggacaagggttctagaaacctgcaggtaatagcagccaacaagaagcactgggagatgtgttcattgacctggtaaatggattctggcaggagcaccaaaggcatttctacacaggatatacttcacgctttataaagtaaatgtagaagagatggggtgaaattctggataagatatgccaata

SEQ ID NO: 925570 - DNA, 579 bp, Homo sapiens
ggcagccctgtggagaaaaccccgttggaaaaaactgaagcctgcaatggctacatgagtaaacttggaagcagatcttctccaccccaccctacctcatgggaaatcttaagtcaaggcatacagctaagccatgcccagattcctgacccacagaagtcataagacaataaatatttgttgttttaagctgctatgtttggggatgacttgttaagcaaaatgagaaaaataatacaacaagtgattacaatgtgcagcagagctcaggaaccactgaactagaccagtatgtggtcttagagaagtctagtctcttcttgagcccacagggaaatctgtagcataaactgcaccatagagttgtacagccagaagcaaatctcacatcagtccgtcattggcagatgctgtctggagggaaartagaggggtgcacaacctccctagtattcccaagtaggtgcttgtcagcaggacaagggttctagaaacctgcaggtaatagcagccaacaagaagcactgggagatgtgttcattgacctggtaaatggattctggcaggagcaccaaaggc

SEQ ID NO: 925571 - DNA, 575 bp, Homo sapiens
tgttgaataggagtggtgagagagggaatcgttgtcttgtgccaggtttcaaagggaatgcttccagttattgtccattcaatatgatattggctgtgtttttgtcataaatagctcttattattttgagatacatcccatcaatacctagtttattgagagttcttagcatgaagggctgttgaattttgtcaaaggtcttttctgcatctattaagataatcatgtggtttttgtctttggttctgtttatatgatgtattacgyttattgatttgcgtatgttgaaccagtcttgcatcctagggatgccaagttgatcgtggtggataagctttttgatgtgctgctggattcagtttgttagtatcttattgaggatatttgcatcaatgttcatccgggatattggtctaaaattctctttttttgttgttgtgtctgtcaggctttggtatcaggatgatgttggcctcataaaatgaattagggaggattctatctttttctattgattggaaaagtttcagaaagaatgataccagctcctctttgtacctctggtagaactcagc

SEQ ID NO: 925572 - DNA, 575 bp, Homo sapiens
tgttgaataggagtggtgagagagggaatcgttgtcttgtgccaggtttcaaagggaatgcttccagttattgtccattcaatatgatattggctgtgtttttgtcataaatagctcttattattttgagatacatcccatcaatacctagtttattgagagttcttagcatgaagggctgttgaattttgtcaaaggtcttttctgcatctattaagataatcatgtggtttttgtctttggttctgtttatatgatgtattacgcttattgatttgcgtatgttgaaccagtcttgcatcctagggatgccaagttgatcgtggtgsataagctttttgatgtgctgctggattcagtttgttagtatcttattgaggatatttgcatcaatgttcatccgggatattggtctaaaattctctttttttgttgttgtgtctgtcaggctttggtatcaggatgatgttggcctcataaaatgaattagggaggattctatctttttctattgattggaaaagtttcagaaagaatgataccagctcctctttgtacctctggtagaactcagc

SEQ ID NO: 925573 - DNA, 644 bp, Homo sapiens
gtatgtattaaccacatttttcttatactcttctttctcctactctttccaggatatggtaaccaaaactctactatctacttctacgagtttaaaaattttagcttctatacataagtgagaacacgtagttatgtggtgtttatgtttctatgccaggcttatttcacctaacataatgccctccacttgcatacttgttgccacaaataacaggattttgttctttattatgactaaataatattccattatatatgtatgtcacatttctttatccattcatctgttgatggayacttttgttgattccatatcttggctattgtgaatagtgttgtaataaacatgcaggtgcaggtaactctttgatatactgattttgtttcctttggatatatactgaaaatcatatgattaaattaataccccccataaaagcgtttggcaaaattaaatatccttacatgacaaaaaacctctcaacaatttagtatagaaaatatatgccttaacacaaaggacataaaggactaatctacagctaagatcatactgagtgtggaaaaggtgaaagattttactgtgaacaagaaaaagattttattgtaacaagaaaaggatgcctattttcatcaatcata

SEQ ID NO: 925574 - DNA, 644 bp, Homo sapiens
gtatgtattaaccacatttttcttatactcttctttctcctactctttccaggatatggtaaccaaaactctactatctacttctacgagtttaaaaattttagcttctatacataagtgagaacacgtagttatgtggtgtttatgtttctatgccaggcttatttcacctaacataatgccctccacttgcatacttgttgccacaaataacaggattttgttctttattatgactaaataatattccattatatatgtatgtcacatttctttatccattcatctgttgatggacacttttgttgattccatatcttggctattgtgaatagtgttgtaataaacatgcaggtgcaggtaactctttgatatactgattttstttcctttggatatatactgaaaatcatatgattaaattaataccccccataaaagcgtttggcaaaattaaatatccttacatgacaaaaaacctctcaacaatttagtatagaaaatatatgccttaacacaaaggacataaaggactaatctacagctaagatcatactgagtgtggaaaaggtgaaagattttactgtgaacaagaaaaagattttattgtaacaagaaaaggatgcctattttcatcaatcata

SEQ ID NO: 925575 - DNA, 825 bp, Homo sapiens
aatgaccaccttgggccagacatatccaacatggggggccccacccctctttgtagcatatgcacagtagaaaagagataagcaacttggagtagctcaggctgagaatctgcctgcataataaaaggttggggtgtgagctgccagagattcatgctctaagcagatgacacacctggtcctaaccagtttttcatgccctatgtggataacataccccctcccactagctcatctataaaaacacttgtatttcactgcagaatggcaactctttttttctggatccctctctgcagcagagagctgttctctttttctcacccattaaacttttgctctaacctcacctttggcatatctgtgtccttgatttcctcggtcctgacaccgagaagttcaggtgtaaccccagaagacacggccagtttatcatgacttgtctcattgcctcttgggacatagaaacgtcaatgaaaatgtgtccaaaaggacatttcataaagtgctctctcttccaatcttcaagcaatgtgggactatccatcatgtacaaaaaacttgtggctgaaatgcacaatttctaatacaaaaatgaatgctataaattactctaygtatgtgtattatggccattcagacatcgtcacacattgccacatttagatagaagaacctgtgaacttgtggctgttaggaagcttaacttgtgcatactgtcacctatgaaagttagctttccctgtgtttcttgaaaccaaccttgaaatgtccatcttgtacacaatttctatttatccccagtgaggttcacccatctggccc

SEQ ID NO: 925576 - DNA, 614 bp, Homo sapiens
taatgaaatcatgtccttggtatgaacataggtggaaccagaggccataatttcaagcaaattaatgcagaaacagaaagccaaatactgcatgttcttacttataagagctaaacattgagcatatatggacataaatatgggaacagtaaacacggtggactactaaagtgtgcagaggggaggrcaagttaatatactacatattggttgctgtgctcactacctatgtgctccaaacctgagcattatacaatattcctacataacaaatctgtgcctgtaacccctgaatctaaaataaaagttgaaattttttaaaaagtcttttcacctatgaacagaagatactgttccatttatttgtacctttgatttcttacagcagcattttgaaagtttttattgtacaaatagtttgtcatcctggttaaattgattccagagcattttattctttttaatactgttgttcatggtattgttttcttaatttccttttcagattaatcattattggtgtgcatcaatgcaactgagttttgtaagttaattttgtatcctgcaacattacttaatttgtttaaactgttttgaggtgtttttctgtttgt

SEQ ID NO: 925577 - DNA, 543 bp, Homo sapiens
ataatgaaatcatgtccttggtatgaacataggtggaaccagaggccataatttcaagcaaattaatgcagaaacagaaagccaaatactgcatgttcttacttataagagctaaacattgagcatatatggacataaatatgggaacagtaaacacggtggactactaaagtgtgcagaggggagggcaagttaatatactacatattggttgctgtgctcactacctatgtgctccaaacctgagcattatacaatattcctacataacaaatctgtgcctgtaacccctgaatctaaaataaaagttgaarttttttaaaaagtcttttcacctatgaacagaagatactgttccatttatttgtacctttgatttcttacagcagcattttgaaagtttttattgtacaaatagtttgtcatcctggttaaattgattccagagcattttattctttttaatactgttgttcatggtattgttttcttaatttccttttcagattaatcattattggtgtgcatcaatgcaactgagtt

SEQ ID NO: 925578 - DNA, 632 bp, Homo sapiens
gggcatcctaaatctgccattcgggtctcagtgatcctgttctggatttagctctagcactaactggggactaacgctaacctctagcactaacccctccttgggactcaatttattcacctataaacaaggcagcttgatagatcagtattttccacacatgtctagttgtcaaaatcatctgcggtctttcttgaaagtatggaattctggactccacgtcaggtctgctaaaatagaatctccaggggaagggtctgcagatctatttttaacaagcgattcagaaaactcttaggaccaggaaagataggaaagcatcctaggcccagatgatcttarcaattctcccagctcctactatcactcagtcaggctcttgatcggcctccctacagacccatcatgaacactacagtccctctccctatgccccaggatttgaccctcctgagcaattccccaccctgcatggatttgatagctccttccttcctgtaaggcacttaggctcttaagggaggtaaagctatttaaataatgaatggaatttacagtagcattcggaattcacttaagcaatagaaacatgattgcagtaaagtcccttaaaaatcttttcatcgggttag

SEQ ID NO: 925579 - DNA, 470 bp, Homo sapiens
gtctctactaaaaatacaaaaaattagtcaggcgtggtagcgcatgcctgtaatcccagctacctgggaggctgaggcatgagaatcgctggaacctgggaggcagaggttgtagtgagccgagattgtgccaccgcactccagcctgggcaacacagtgagactctgtgtcaaaaaaataaataagtaaataaataaataataaataaaaataagaatgaaagaacayatgcttggcatggtggctcatgcctataaccccagcaacttaggaggccaaggcaggagaattgcttgaggccaggagtttgagaacagcctggacaacataacaagaccccgcctctaaggaaatttttttttttaaattagccaggtgtggtggtgtttgtctgtggtcccagctactcaggagggctgaggtgggaggatcactcgagcccaggattcgaggctgcagtgagctatga

SEQ ID NO: 925580 - DNA, 582 bp, Homo sapiens
tcttgtgaactcctactggataggtctttctctgggaaaacactgacctgtccatttcaataaaaggattctgcagtccagaaacacacaggacaccttcaagaactcagtgaataagactattgagagacacacaaaacagcaagctatttctctcttcaaacatgatgccacggtaagatctgaatgcctcaaagcaccagcttcccaaggcatgcatgctccttccatttcaccaggagggacagaagggaccrtgcaggacaaggggttcttgagggtctggcgatggtacaggcagggtccatcccacccacaagggataggtgctgggggattgggaagcttccagcggtcggcagcctctctacattggcacaatcttttaggagagaaatttgacaacacggtttcaaacatttaaaaaataaaagttcatatatccctttaggagtccactttgaggactgagcctaaggaagccatccagaatgtgagcaaagctctagctacgaggatgttcaccagggcgttgcttacgcctggatgtcagcgggagcagcccttcctttcttgagacag

SEQ ID NO: 925581 - DNA, 626 bp, Homo sapiens
tgaggcagtaatgtgccctcttcctgccctgtgaggcggcatggggtgggaggctccctggctctgggggactggactggcacactgcctctcagagatgcctgtctgagacacacccctctgccagcagaccctggagctgtggcactgccctagcatttgactcaggaatgtttcctcttccagctcacagagaaactctctgtggtccacatttaccttaaatataagaaaatcaacttgtcattggacttatagaaatatacacatgtttgaaagggtttgagacacgctaggaggtttctaakgaggctttgggatcaacaaccaagagtaagcactgaagatgctttgactgctttgagccaccccctggcttcctttggctggagtcagccttctgtccggaagggcaggccctgtgccatggcatcctaaccacatcctcaccaactggagtctgtttccattaaaatgaagtaattaaaaataacaggaaaggctttctatttatagatggtttcatagacacttttaaaaatacaacctgaatttggctccagtaattggcattggttctttcaggttctacgtggattttatttttagtggtgcagaatgatttc

SEQ ID NO: 925582 - DNA, 572 bp, Homo sapiens
agtggtggcaggtgcctgtaaccccagccactcgggagactggggcaggagaattgcttgaacccaggaggcagaggttgcagtgagccatggcctgggtgacaagagtgagactccatctcaaaaaaaaaaaaaaaaagataagaccccgatgatgtttcttctccttgtgttccccgacgcagtctctagcccacaccctggtttgagctctcagcagatcctcccacagtctctgcttccatttctttgtccatgttcttcaagtcttttgtctgaagtccctttgtgcagcaagagaataaatggtcctaatattgctaatctttgaacaaagaaatttccaaaaagatcctcataggatgcattgctcagacccrtgggagtataggccatcaagtccttagtcttttctcagctattcatccttcacagcagatgtgtggtcttacgtggttcctctcttttttgagccaagtatatgcacagcccaaacaggctacatcagcttaaatgcactggaggaagttccagctcttcccactgatatgatctgctttatcagtttgtca

SEQ ID NO: 925583 - DNA, 629 bp, Homo sapiens
atgatcacctacctcagctttcagtagagcttgagcgttacttcccaatcaccaaatacccccgaactgagaaggaatggatctgcgacgcgtttatgaatcagccaggtgaactgactttgtccgtgctggaagaggatcaccatcattttgcttgagattgcaaatgatgtggccttggaagtatgtttgagacaacttcaaatctccatacattctggattgttaaagaatatcctgagattgccacaaaagcactgaaaagcctgcttccattttcaaggtcctatctttgtgaagcagggttgtctgcagtgacagcaaccaaaatgagattagagttgagtggacataaagcaacacacttcagggtcactgtctccatcacccccagatgggaccatctagttgcaggaaaacaagctcaaggctcccactgattcttcatgatggtgagtggtataattatttcattayatattacaatgtaatcataatagaaataaagtccataataaatgtaatacgcttgaatcatcccaaaaccatcccccagcccactcggtctatggaaaaatcgtcttccacaaaaccagtccctggtaccaaaagggttagggatgggacca

SEQ ID NO: 925584 - DNA, 886 bp, Homo sapiens
cacacacaaaaatacatttttttttttcctaagtagaactttcccttcgtggagcagaagaggatttcaggggccagtttggcaacacactgtgtgaaattttctgaagtgagggcttttgaccttctttgcctcagcctagtcttaccatgcacaaggaacaagacatcagttctaccaaccacacgggatgataggcacattgctctgaaaagcctgcgtcctgcactcacaaccacaaatgtcttcacagtcctttgacagatacttgcctgaggcattcatcagagcaaaagagcaaacaacaagtgctgggtgtttagagagatttgagatattctgtagtgactttccttaaattttcccagtttttaatcattgcacataaacagcccaatggacttggtcttaaatctctgccctttctgttggattttctaccttgstgcagtattataattctaaattagagctttctatcagttggtgttatttcttccctcagtttagcactggcaccagctatgtacagcagtgattcccaaagtgtagtcccaggacccacagcatgagcatcacctggggcttgttagaaatgcagcctcttggatcccatctcagacctactgaattagaagctccagaatgtggggtccagcaactgtgcttttacaagctcacaaggtggttctggtggctggtaaagtttgagaatcactggcctacagccttaagccctaacttctcaatctaaaatagaaaactcatattccagcctcagaccactttctaggattaccttataggacatgcaactgacatgaatgatttcacttgagatacaaatatggtcctatttcatatatatgagagaaaaatcttttga

SEQ ID NO: 925585 - DNA, 820 bp, Homo sapiens
tcccatttctctctccctagcccctggcaattgccattctactttctgtctctatgaatttgatgactctagctacctcctctaagtggaatcaaacagtatttgtccttttgtgactggcttatttcacttagcataatgtcctcaaggttcatccattgggttagcacatgacagggttttcttccttttcctggctggataatattccattgtatggatggaccacagtttgtttatccatccatctgtccgtccgtccgtccatccatccatccatctatccatccatccacaaacccttatgttgcctccacctttgagctcttgtgaatcaacacatcaggctgctataaacttcagtgtgcatatatttctttgagattctcttttctgttctttcggatataaacccagaagtggaagctgagcatggtgactcagcctgtaaccccagtactttgggagacagatgtagaaggactgcttgagcccagcagtttgagaccagtctgggcaacatctcgagaccttgtctccaataaaaatttaaaaaytagctgggcgtggtggcacatgcctgtggtcccagctacttgggaggcagaagtgggagaatcacttgaacccaggaggtcgaggctgcagtgagccatgatcacgctgttgcactccagcctgggtgacagagtgtgatcctgtctcaaataaataaataaataaataaaacccagaagtgggtttgctggatcttagatggtgtggcttttcggcttgcaggaaaggcctgtggaacacaaatgccgatccatgggttaac

SEQ ID NO: 925586 - DNA, 779 bp, Homo sapiens
acacttttgggtggtgcccacacatcgtgcagaaccatctgtgcatcaggccctagtcttctcttcctctgtcaactcatcatagggaactccccatgaggccactggtgtggactgggggaaagaaggcagtgtggcaggagtggagaccatgggcatttgagccacttcctcacgtaacttatttgtgccttcaggacckgctcgagcccgatcacatatataccacttccatttgatgatggaatgctactgtgcatgacccactttatggttagatgggtcagaaagcacccagttcatgataggcagttcaggtcgcatggtgacttgatgacccatagtcaaacattcagttttcaccaaagtccagtaacaagccaagagctgcctctcaaaaggagagtagttatctgcagaagatagcagagccttgttccaaaatcctagatgcctccactatgattcatctattggggcctgccaaaggctccaaacagcatccctatctaccactgacacctcaagcacaattggatctgctgggtcatatggccgaagtggcagagcagcctggacctgttgcagagccttctcctgttctggacctcactcaaaactggcagcctttcaggtcactcaataaatgggctagagtaacacacccagatgaggaatgtgttgccttcaaaatccaaataggcccattaggcatcatgcctctttcttggttgtaggaggggccaagtacagcaacttatccttcaccttaggactat

SEQ ID NO: 925587 - DNA, 779 bp, Homo sapiens
acacttttgggtggtgcccacacatcgtgcagaaccatctgtgcatcaggccctagtcttctcttcctctgtcaactcatcatagggaactccccatgaggccactggtgtggactgggggaaagaaggcagtgtggcaggagtggagaccatgggcatttgagccacttcctcacgtaacttatttgtgccttcaggaccggctcgagcccgatcacatatataccacttccatttgatgatggaatgctactgtgcaygacccactttatggttagatgggtcagaaagcacccagttcatgataggcagttcaggtcgcatggtgacttgatgacccatagtcaaacattcagttttcaccaaagtccagtaacaagccaagagctgcctctcaaaaggagagtagttatctgcagaagatagcagagccttgttccaaaatcctagatgcctccactatgattcatctattggggcctgccaaaggctccaaacagcatccctatctaccactgacacctcaagcacaattggatctgctgggtcatatggccgaagtggcagagcagcctggacctgttgcagagccttctcctgttctggacctcactcaaaactggcagcctttcaggtcactcaataaatgggctagagtaacacacccagatgaggaatgtgttgccttcaaaatccaaataggcccattaggcatcatgcctctttcttggttgtaggaggggccaagtacagcaacttatccttcaccttaggactat

SEQ ID NO: 925588 - DNA, 779 bp, Homo sapiens
acacttttgggtggtgcccacacatcgtgcagaaccatctgtgcatcaggccctagtcttctcttcctctgtcaactcatcatagggaactccccatgaggccactggtgtggactgggggaaagaaggcagtgtggcaggagtggagaccatgggcatttgagccacttcctcacgtaacttatttgtgccttcaggaccggctcgagcccgatcacatatataccacttccatttgatgatggaatgctactgtgcatgacccactttatggttagatgggtcagaaagcacccagttcatgataggcagttcaggtcgcatggtgacttgatgacccatagtcaaacattcagttttcaccaaagtccagtaacaagccaagagctgcctctcaaaaggagagtagttatctgcagaagatagcagagccttgytccaaaatcctagatgcctccactatgattcatctattggggcctgccaaaggctccaaacagcatccctatctaccactgacacctcaagcacaattggatctgctgggtcatatggccgaagtggcagagcagcctggacctgttgcagagccttctcctgttctggacctcactcaaaactggcagcctttcaggtcactcaataaatgggctagagtaacacacccagatgaggaatgtgttgccttcaaaatccaaataggcccattaggcatcatgcctctttcttggttgtaggaggggccaagtacagcaacttatccttcaccttaggactat

SEQ ID NO: 925589 - DNA, 658 bp, Homo sapiens
cagaattccatcttgttggaggaagtcagtcttttgttcttttcaggcctttgacagatcagatgaggcccaccggtactagggagggcaacctgctttactcacggtgcacagattaaaatggtaatttcatccaaaacaccctcacagaaatatccagaattgtgtttgactgcatacctggacaccatggcccagccaagttgatacagaaaattaaccatcataatctctaatctctccctccttccctctgtctctgtctccatctttctctctctctctctctctctcwcacacacacacacacacacacacacacacgagcaaagtttatcacaaagtaaggaagaaatgcagggtgcagtggctcacgcctgtaaccccagcactgtaggaggccaaggtgggcggatcacctaaggtcaggagttcgagaccaacctggccaacatggcaaaaccccatctctactaaaaatacaaaaattagccaggcatggtggcacacgcctgtagtctcagctactcaggagctgaggcaggagaatctcttgaacccgggaggcggaggttgcagtgagccgagatcgcgccattgcactccagcctgggcaacagtgtgagactccatctcaaaaaacaaacaaagtgaggaa

SEQ ID NO: 925590 - DNA, 646 bp, Homo sapiens
aggttccaaagccccgccccaaagatactgagaaaagaggtctggaaggggctgcattttactgtttccaagacaatgcttaggtcaggttaaaagcttcccagcttcttttattcttagtgtttgtctcagagcagatgatttactggctgggggtctgagctaaggattcaaaacaatacaaaatgaggttgcgatgaaagggaactaagacatcatctaacctactgggtttcaaacttttgtgaccttaacccacattaagaaataccttttacaatacaactcaatatgcttgtgggtttggttccagacaactgcaataaagcgagtcacacaactttcttggtttcctagtgcatataaaaattatgtttacactatacrttacatggtacatttatcctatattgtagtttattaaatgtgtggtagtatttgtctttaaaaatgaacacaccttaatttaaaaatactttattgctaaaaaaaaaaaaaaagaaaagaaaaagtgctaacatcatctgagccttcagagagtcgtaatctttttgctggtggagggtcttgccacgatgtggatggctgctgactgctcagggtggtggctgcttgaaggctggggtggctgcggcaatttcttaaa

SEQ ID NO: 925591 - DNA, 663 bp, Homo sapiens
cccagctgagtgctgacaattatttaagagaatatgtcatccaaaagaccaccaagatggctaaatagtagaaaaaaggaattttattggtgataccagtttgcaaaccaggaaaagacaatctccagcatggactgaaggtgctttctcttcaaagaggaaaagagcaggttgggttttatgccttacacggcctgtacaacacaagacagtcatacatattcagcagatttgcagggaaagttttacatatttatgagaggaacagagcacatgtgcaaygggcaaacacatataaatataatatacatcccatgttcactttggaatgggacttcaagcattaagatgaggtagaatttgtctctttacatcaaaaggtgaactataagacataaagacagtttgtgcagcctctataaactggctgaaacttacttaaggtctatagttgcttatcaggaaagaatgtttgcgtcaaggcgtgctggctcatgcttgtaatcccaaaactttgggaggccaaggtgaaaggactgcttgaggtcaggagttcaagaccagcctgggcagcagaacaagaccctgtctctacacacacacacacacacacacacacacacacacgcacgcacacacacggatctctattcattcagaggt

SEQ ID NO: 925592 - DNA, 663 bp, Homo sapiens
cccagctgagtgctgacaattatttaagagaatatgtcatccaaaagaccaccaagatggctaaatagtagaaaaaaggaattttattggtgataccagtttgcaaaccaggaaaagacaatctccagcatggactgaaggtgctttctcttcaaagaggaaaagagcaggttgggttttatgccttacacggcctgtacaacacaagacagtcatacatattcagcagatttgcagggaaagttttacatatttatgagaggaacagagcacatgtgcaatgggcaaacacatataaatataatatacatcccatgttcactttggaatgggacttyaagcattaagatgaggtagaatttgtctctttacatcaaaaggtgaactataagacataaagacagtttgtgcagcctctataaactggctgaaacttacttaaggtctatagttgcttatcaggaaagaatgtttgcgtcaaggcgtgctggctcatgcttgtaatcccaaaactttgggaggccaaggtgaaaggactgcttgaggtcaggagttcaagaccagcctgggcagcagaacaagaccctgtctctacacacacacacacacacacacacacacacacacgcacgcacacacacggatctctattcattcagaggt

SEQ ID NO: 925593 - DNA, 810 bp, Homo sapiens
tagaaaggtgaaataatttgtcaaagttcacaacagtatgtggaagagcaggtctttgaacccagacagcctagtgcctcgaacttgcactctctcttcttccctcactctcatctggacgagctgcttgcttatcctcctctgtgcctttgcccatacttttcctctggaatttttatccttcccacagtccaactgtagaaaacagtctttaaccgagcactgcccagtatggtagccactagccgcatgtgaatgtcaagcacgtgaactgtgattagcgtgaaggagaaactgaacattttattttatttayttatttatttattttgagacggagtctcgctctgtcgcccaggctggagtgcagtggtgcgatctcggctcactgcaaactccgcctcctgggttcaagcgattcgcctgcctcagcctcctgagtagctgggactacaggtgcctgccaccatgcctggctaattttttgtatttttagtagagacggggtttcactgtgttagccaggatggtctcgatctcctgacctcgtgatcgcccgcctcagcctcccaaagtgctgggactacaggcatgagccaccgcgcctgaccacattttacttttaatttaaaagccacacatggatatcataatggaccgcaaagctctaacctttctggggtgtcagcgtggtaccattatccttgatttgtgtctgtatctgccccctcccgggggcagtgaccatgtttaactcatccatctgtatcccagttcccagctttgttctggattcagtgtgtgatgagt

SEQ ID NO: 925594 - DNA, 810 bp, Homo sapiens
tagaaaggtgaaataatttgtcaaagttcacaacagtatgtggaagagcaggtctttgaacccagacagcctagtgcctcgaacttgcactctctcttcttccctcactctcatctggacgagctgcttgcttatcctcctctgtgcctttgcccatacttttcctctggaatttttatccttcccacagtccaactgtagaaaacagtctttaaccgagcactgcccagtatggtagccactagccgcatgtgaatgtcaagcacgtgaactgtgattagcgtgaaggagaaactgaacattttattttatttatttatttatttattttgagacggagtctcgctctgtcgcccaggctggagtgcagtggtgcgatctcggctcactgcaaactccgcctcctgggttcaagcgattcgcctgcctcagcctcctgagtagctgggactacaggtgcctgccaccaygcctggctaattttttgtatttttagtagagacggggtttcactgtgttagccaggatggtctcgatctcctgacctcgtgatcgcccgcctcagcctcccaaagtgctgggactacaggcatgagccaccgcgcctgaccacattttacttttaatttaaaagccacacatggatatcataatggaccgcaaagctctaacctttctggggtgtcagcgtggtaccattatccttgatttgtgtctgtatctgccccctcccgggggcagtgaccatgtttaactcatccatctgtatcccagttcccagctttgttctggattcagtgtgtgatgagt

SEQ ID NO: 925595 - DNA, 458 bp, Homo sapiens
agtgtgcaaggctcagataagtgtaataaaaactcccatttgcccaacagtgaactatccaaagaagaaatcaagagtacaattccattttacaagaataaaagttacttagaaataaatttaactaacagatgaaagatctgtacactgaaaattataaaacattgatggaaaaaattgaagaagatacaaataaatgaaaaatgcttcatgttcatgaactgaaaaaaataatattgtaaaaatggccatactattcaaagccatatacagattcagcagagtccctatcaaaattctaatgacatttttcatagaaatataaaaacaatgttaaatttgtatgaaaccacaggagaccccaagtcgccaaagaagtcttgagccaaaggaacaaaagtggaggaatcacactrcttgatttcaaaatctactataaatctttagtagccaaaaca

SEQ ID NO: 925596 - DNA, 630 bp, Homo sapiens
ggtgagctagtgtaatttttggggagtgttaaagagccttgttttgtcatatcagaattgtttttctggttccttctcatttgggtaggctatgtcagtgggaaggtctggggctcaaggctgctgttcagattcttttgtcccacgggatgttcctttgatgtaatactatctccctttttccagggatgtggcttcctgagagctgagctgtaatgattgttatttctcttctggatctaaccacccagaagggctaccaggctccaggctggtactggggattatctgcacagagtcctttgatgtgaaccgtcttcatgtctctcagcagtggataccagcacctgctctggtggaagtggcatgggagtgaaatggactctgtgaggatttttagttttggttgtttaatgcgctatttttacactggttgacctcctgccaggaggtggcacattcaagagagcatcagctatggtagtataacrgggatcaggcagtaggcagggccctagaactccgaagagaatatgctctttgtcttcagctaccagagcagatagagaaggaccatcatgttgggccagggttaggcgtgtctgagctcagattctccttgggcagggc

SEQ ID NO: 925597 - DNA, 569 bp, Homo sapiens
ggcacaccaggagattatatcccatgcctggctcagtgggtcccatgcccatggagccttgctcactgctagcgcagcagtccaagattgaactgcaaggtggcagcctggctgagggaggggcatctgccattgctgaggcttgagtaggtaaacaaagcggcaggaaagcttgaacygggtagagcccaccgcagctcaaagaggcctgcctgcctctgtagactccacctctgggggcagggcatagctgaacaaaaggcagcagaaacttctgcagacttaaatgtccctgtctgacagctctgaagacagcagtggttctcccagcatggtgtttgagctctgagaacggacagactgcctactcaagtgggtccctgacctccgtgtagcctaactgggagacacctcccagtagggcccgactgacacctcatacagccaggtgcccctctgagatgaagatttcagaggaaagatcaggcagcaatatttgctgttctgcagcctctgctggcgatacccaggcaaacagggtctggagtggacctccagcaaactcccac

SEQ ID NO: 925598 - DNA, 569 bp, Homo sapiens
ggcacaccaggagattatatcccatgcctggctcagtgggtcccatgcccatggagccttgctcactgctagcgcagcagtccaagattgaactgcaaggtggcagcctggctgagggaggggcatctgccattgctgaggcttgagtaggtaaacaaagcggcaggaaagcttgaactgggtagagcccaccgcagctcaaagaggcctgcctgcctctgtagactccacctctgggggcagggcatagctgaacaaaaggcagcagaaacttctgcagacttaaatgtccctgtctgacagctctgaagacagcagtggttctcccagcatggtgtttgagctctgagaacggacagactgcctactcaagtgggtccctgacytccgtgtagcctaactgggagacacctcccagtagggcccgactgacacctcatacagccaggtgcccctctgagatgaagatttcagaggaaagatcaggcagcaatatttgctgttctgcagcctctgctggcgatacccaggcaaacagggtctggagtggacctccagcaaactcccac

SEQ ID NO: 925599 - DNA, 577 bp, Homo sapiens
tgagggccttcctctggcctcctcgggtctgatcgtgagtagccccttccactggcctctgcacaaaaggcgtcctctgctgggtgcctcccttgttcgatcttcatcttcacctatgtcacttggttagttttgctgtcttgagttcccccactgaactcgaagtccatggatagggacaatgaattacccttcctacagctctcctcagcccccatgtattcatctgaagtgctaccacatttgtgggttgatygactttgaccaaatagacacagcccatcctaaattctcattcctgaactagcttcctgtgattctaaatgatttcactgctctctgcatcagtttctctagctattaaatgcaagtaataataaggtgacaacattctctaccatgtctgagattaaatgcattaaagtgtctttatattagagaaagctaaattcaaggacttaatgtagcttctgtctttcttttatataacatagtctttaacatgtaaacaactacaacttaaggatcaattatcctgatacccatttctggtcggtaggacacatatccttcaagt

SEQ ID NO: 925600 - DNA, 577 bp, Homo sapiens
tgagggccttcctctggcctcctcgggtctgatcgtgagtagccccttccactggcctctgcacaaaaggcgtcctctgctgggtgcctcccttgttcgatcttcatcttcacctatgtcacttggttagttttgctgtcttgagttcccccactgaactcgaagtccatggatagggacaatgaattacccttcctacagctctcctcagcccccatgtattcatctgaagtgctaccacatttgtgggttgattgactttgaccaaatagacacagcccatcctaaattctcattcctgaactagcttcctgtgattctaaatgatttcactgctctctgcatcagtttctctagctattaaatgcaagtaataataaggtracaacattctctaccatgtctgagattaaatgcattaaagtgtctttatattagagaaagctaaattcaaggacttaatgtagcttctgtctttcttttatataacatagtctttaacatgtaaacaactacaacttaaggatcaattatcctgatacccatttctggtcggtaggacacatatccttcaagt

SEQ ID NO: 925601 - DNA, 662 bp, Homo sapiens
gtatgctgccttcaagagagatacctcacacataacaacacccataagctcaaaataaagggatggaagaaaatctacaaagcaaatggaaaccagaaaaaagcaggagctgcaatcctaattttggaacaacagactttaaactaacaaagatcagaaactaacgaagaagggcattaaataataataaggtgytcaattcaccaagaagatctgactatcctaaatttatatgcacccaacataggagcacccagattcataaagcaaattcttagagacctgcaaagagacataagactccaacatagtaatagtgggacagttcaacattccactgacagtattagacagatcatcaaggcagaaaattaacaaagatatttaggacctgaactcaacattggagcaaatggatctgatagacctctacagaactgtccatccgaaaacaacagaatatacatttttttctcatcaacagatggcacattctaaaactcagccaataattagacataaaacaatgctcagcaaatgcaaaagaagcaaaatcataccaaacacactctcagacgatattgcaataaataaagaagtcaagactaagaaaattgcttggccaggcgcagtggctcacatctgtaatcccagcactttgg

SEQ ID NO: 925602 - DNA, 594 bp, Homo sapiens
cagcaaagtttcaggatgcaaagtaaacatacaaaaatcactagcattcctatacaccaccaggagccaagccaagagccaaatcaggaacacaatcccattcacaattgccacagaaagaacaaagtacctaggaatacggctaaccagggaggtgaaagattcctatggtgagaattacaagacactgctcaacgaaatcagagaatacacaaacaaatggaaaaatatccttcacatgcttatggataggaagaatccatatatcattaaaatgaccatactgcccaaagcaatttatagattcawtgctattcctatcaaactaccagtgacagtcttcacagaactagaaaacactattttaaaattcatatggaaccacaaaagaacccaaatagccaaggcagtcctaaggaaaaggaagaaagctggaagaatcacattacccaccttcaaactatactacagggctacagtaaccaaaacagcatagtattggtacaaaaacaggcacatagtgcaatggaacagaatagaaagtccccaaacaagaccactcacctatgaccgtctgatctttgacaaaactga

SEQ ID NO: 925603 - DNA, 580 bp, Homo sapiens
agcaaatcaaatctaaaaatgatttaaaagaattgtgcaccatgaccatgtgggacttattctgggtatgcaaggctggttcctcattcccaaatcaatcagtataatcaaccatatcaacaaggttgataacattcaagaaaaattatatggtcatatcaattgaagcagaaaatgtatttgaaagcctggtgcagtatccctagcaatttgggaggccgaggtgggaagatcccttgagcccaggagtgcaagatcaacctgggcaacatagtgtgaccccattgctacaaatgattaaaaaattagctgggcatcgaggcacgtgcctgtagccccaagtactcaagggtctgaggtaggaggattgcttgagcccagaagagtgaggctaaagtgagcagtgattgtgccacwgcactccagcctgggtgacagagtgagactccgtcttaaaaaaaaaaaacaaaaaacaaaaattgtaaaagcatttgaaaaaatccaatgctcattcataataaaaatttccagttagtatagaggagaattaccacattttgatagatagcatctacaaaaa

SEQ ID NO: 925604 - DNA, 727 bp, Homo sapiens
agcgacccctcctccctgcacacaggtgggggcagctcagcaccaggagcagaacaaatcagcacgctgcctgcagggcctctttttggtagtgaatcaggaatttttctcgatggaaaaaaaaatctaaaggctgtattttgacgctaagtttgggacaactttaaacttaaagtgtctttcccttgtaattcacagaktctaatccactcatttctgggaatgtttttccccagcagtctcagtctcaaaagacatgtaaatcagtgacttgggatgaactaactagaaaattaaaattttgagaagctatttgctcataagcccaatagccaggcccagtttaaacgggcaaatagtattgctagagattcagttttgccgtcactaatactaacacattgataatgagacaagtaaccgtctcccctccccaccatccttacctttcccaccggaggttaattaaaaaaaaaaaaaaaaaaaaaaaaacctatggaattggccccacgtgtttcacctgggcagaggcctgttcttcactagcttgcttgcttggttggttgtcccggggttaaaatcagtcctgttcttgcccctagagtggtctgccttcaaatgctctcctccgaatgtgaggaagagtgacatttgacaaacagaccaaaacctttaggtctcctcagtgctgccctttagaccttccagaaagtgttgccaggctcgt

SEQ ID NO: 925605 - DNA, 727 bp, Homo sapiens
agcgacccctcctccctgcacacaggtgggggcagctcagcaccaggagcagaacaaatcagcacgctgcctgcagggcctctttttggtagtgaatcaggaatttttctcgatggaaaaaaaaatctaaaggctgtattttgacgctaagtttgggacaactttaaacttaaagtgtctttcccttgtaattcacagagtctaatccactcatttctgggaatgtttttccccagcagtctcagtctcaaaakacatgtaaatcagtgacttgggatgaactaactagaaaattaaaattttgagaagctatttgctcataagcccaatagccaggcccagtttaaacgggcaaatagtattgctagagattcagttttgccgtcactaatactaacacattgataatgagacaagtaaccgtctcccctccccaccatccttacctttcccaccggaggttaattaaaaaaaaaaaaaaaaaaaaaaaaacctatggaattggccccacgtgtttcacctgggcagaggcctgttcttcactagcttgcttgcttggttggttgtcccggggttaaaatcagtcctgttcttgcccctagagtggtctgccttcaaatgctctcctccgaatgtgaggaagagtgacatttgacaaacagaccaaaacctttaggtctcctcagtgctgccctttagaccttccagaaagtgttgccaggctcgt

SEQ ID NO: 925606 - DNA, 727 bp, Homo sapiens
agcgacccctcctccctgcacacaggtgggggcagctcagcaccaggagcagaacaaatcagcacgctgcctgcagggcctctttttggtagtgaatcaggaatttttctcgatggaaaaaaaaatctaaaggctgtattttgacgctaagtttgggacaactttaaacttaaagtgtctttcccttgtaattcacagagtctaatccactcatttctgggaatgtttttccccagcagtctcagtctcaaaagacatgtaaatcagtgacttgggatgaactaactagaaaattaaaattttgagaagctatttgctcataagcccaatagccaggcccagtttaaacgggcaaatagtattgctagagattcagttttgccgtcactaatactaacacattgataatgagacaagtaaccgtctcccctccccaccatccttacctttcccaccggaggttaattaaaaaaaaaaaaaaaaaaaaaaaaacctatggaattgkccccacgtgtttcacctgggcagaggcctgttcttcactagcttgcttgcttggttggttgtcccggggttaaaatcagtcctgttcttgcccctagagtggtctgccttcaaatgctctcctccgaatgtgaggaagagtgacatttgacaaacagaccaaaacctttaggtctcctcagtgctgccctttagaccttccagaaagtgttgccaggctcgt

SEQ ID NO: 925607 - DNA, 604 bp, Homo sapiens
tgagatgggagaatagcttgaacctgggaggcggaggttgcagtgagccgagatcgtgccactgcactccagcctgggtgacagagtgagactccatctcaaacaaacaaacaaacaaaaaatctctcttccatagatttaacattagttcccaagatccttctgactatggaaaaacccagtactgcaacataaatgaataaagcattataatcattgtgtctaaaaagtaatcaagactaaaaaaaagttagctgaattgaaccacattggaaactattctgaaacatatacatgatcatagcaccaatayagctgagtgtagtcctggatatggtccaagttgcttcctatgaaaatcaccccaggaatgtcagttccagcagctggacccatgttatactagcaaggctggagcagtgtcagaggaagtctcaaagaactcttaagtaagaaaatagcagaagtgaccacagtcagtgaaataaagcaacagggaagtattcgagcatcttggaggtgctttccttgatcctaaccttcctgcctttccattcttggaattttctatatccaataaaactgtctctttctggcacaagtc

SEQ ID NO: 925608 - DNA, 663 bp, Homo sapiens
cggtggctcacatctgtaatcccagcactttgggaggccaaggtggagggctcgcttgaggccagaagtttgagaccagactggccaacatggtaaaaccccatctccactaaaaatacaaaaattagctgggcgtggtgtcgggcacctgtagttccagctattcaggaggctgaggaacgagaatcgcttgagcctggaaggtggaggttgcagtgagccaagatagcaccactgcattccagcctgggygacagagtgagattctgtctccaaaaaaaaaaaaaaaaaaaaaaaaaaaaaaaaaaaaaaaccaagaaaacaaaaaaaaagaaaagaaaaccaaaatggctcatggcctttagccacagaaggcagctaagatagatggcctatgtagataaatcaatatacatagcctcaacatctctaggccagctaagccaatcaggtcacgcaggattctaaatttatctaacaggtaatttttttttttagactaataggctaataggctgtcttacctaagtgaccaccctgagcacacagctcattcaccaaatggagagttacacctcttataagtgggagaaggcattccacctgttgttaaaagacaaagtgatagttttcattgtacaaatatcctagcaagaagctgaa

SEQ ID NO: 925609 - DNA, 663 bp, Homo sapiens
cggtggctcacatctgtaatcccagcactttgggaggccaaggtggagggctcgcttgaggccagaagtttgagaccagactggccaacatggtaaaaccccatctccactaaaaatacaaaaattagctgggcgtggtgtcgggcacctgtagttccagctattcaggaggctgaggaacgagaatcgcttgagcctggaaggtggaggttgcagtgagccaagatagcaccactgcattccagcctgggtgacagagygagattctgtctccaaaaaaaaaaaaaaaaaaaaaaaaaaaaaaaaaaaaaaaccaagaaaacaaaaaaaaagaaaagaaaaccaaaatggctcatggcctttagccacagaaggcagctaagatagatggcctatgtagataaatcaatatacatagcctcaacatctctaggccagctaagccaatcaggtcacgcaggattctaaatttatctaacaggtaatttttttttttagactaataggctaataggctgtcttacctaagtgaccaccctgagcacacagctcattcaccaaatggagagttacacctcttataagtgggagaaggcattccacctgttgttaaaagacaaagtgatagttttcattgtacaaatatcctagcaagaagctgaa

SEQ ID NO: 925610 - DNA, 617 bp, Homo sapiens
cacccccattttataggggggtgagggtggggtggggggtgggatgggaggaccgtcatttttcccacaaagtttacagcccccttccctatatgcctggatcctccaagctacaagaccccgcaatgctgcagggagcccttgagtccagactccccatccagtgctcctgggggtggatgcccagcccagggtccagggatccatctgagccccccttgcccccattcccagtccattctacgccagaacaggtaaatggcagggtctgctcctgccccacggatgccaggcccagcagggtgcagcagcttccatttcatggcagcatctagggttcccccgcaggatgggtggcaacaggcacggggcaragaggaggcaggtgcactggagcctggaggagctctgggttatttgggtccaaatgtgactcctgtgtgtgctacgtagcctcgggcgagtcactcaccctctctgagcctcaacgatcacatctgtaaagtacaacagtcatggttcctttcagggggtggttgtagggatttggtagggaatcatgtgagtggatggaatgggctgggtatgccataagtgcttaataaccagccgttgtg

SEQ ID NO: 925611 - DNA, 617 bp, Homo sapiens
cacccccattttataggggggtgagggtggggtggggggtgggatgggaggaccgtcatttttcccacaaagtttacagcccccttccctatatgcctggatcctccaagctacaagaccccgcaatgctgcagggagcccttgagtccagactccccatccagtgctcctgggggtggatgcccagcccagggtccagggatccatctgagccccccttgcccccattcccagtccattctacgccagaacaggtaaatggcagggtctgctcctgccccacggatgccaggcccagcagggtgcagcagcttccatttcatggcagcatctagggttcccccgcaggatgggtggcaacaggcacggggcagaraggaggcaggtgcactggagcctggaggagctctgggttatttgggtccaaatgtgactcctgtgtgtgctacgtagcctcgggcgagtcactcaccctctctgagcctcaacgatcacatctgtaaagtacaacagtcatggttcctttcagggggtggttgtagggatttggtagggaatcatgtgagtggatggaatgggctgggtatgccataagtgcttaataaccagccgttgtg

SEQ ID NO: 925612 - DNA, 379 bp, Homo sapiens
aaaggaggccaggcgcagtggctcacgtctgtaatctcaacactttgggaggctgaggtgggagggttacttgagctcaggagttccagaacagcctggccaacatggtgaaactctgtctctagtaaacatacaaaaattagccgggcatggtggcaagagcctgtaatcccagctacttgggaagctgaagcacraggatgatcgcttgaacccgggaggcagaggttgcagtgatccgagatcacgccactgcactgcagcctgggtgacagagtgagatcctgtctcaaaaaaaaaaaaaaaaaaaagaaaagaaaaaggaaaatagcaagtgttgatgaggatgtggagaaatttgaacccccatgccttgctg

SEQ ID NO: 925613 - DNA, 573 bp, Homo sapiens
agagggtccccttccccactcacacgtgaacaacagcccaaaccccacacccactgctcccagagctgcggctgcccccccacttccttgctccctctacctgaaccccatcctgtggtgagtccccatcggggggctccttgggaattcaaggtccgggccccttggacttctttccccagccccctggtccccagctgctcctcccttggaacyaggcacgcagcctccagcccctcctccctcagacccagggatccgggcctgcactccctcatccctcagactcaagagtccagggccccagcccctcctccttcagacccagggatctgggcccccagcccctcctccttcagacccaggggtccaggccaccagcccctcctccctcagactcaaaagtccaggcccccagcccctcctccctcagacccaggggtccaggcccccagcccctcctccctcagactcaaaagtccaggcccccagcccctcctccctcagacccaggggtctggggctcccagcccctcctccctcagacccaggggtccaggcccccagcccctc

SEQ ID NO: 925614 - DNA, 618 bp, Homo sapiens
atcagcaatgatgtctgcaatggcgctgacttctatggaaaccagatcaagcccaagatgttctgtgctggctaccccgagggtggcattgatgcctgccaggtgagggactctgtaggggcagccccctggtcgctgccaccccagggatggagatgcaggggagtgggtggtcaggctccccatctaaaagcctgagggctctggggccacagcccatgtcatcccggggtgggcctcctgtcyaaccactttggccttcagccagacctccctctcccctcccagggcgacagcggtggtccctttgtgtgtgaggacagcatctctcggacgccacgttggcggctgtgtggcattgtgagttggggcactggctgtgccctggcccagaagccaggcgtctacaccaaagtcagtgacttccgggagtggatcttccaggccataaaggtgaaagttgggtccagatgggagccagggtggggacgtttgggtgtctaatgggggaagggaggcagagatttgttttaggaaacctacgctcaggcctagaagagggccccccttgggaacagatggactttgaagggttcctggggaagggaagccagtggt

SEQ ID NO: 925615 - DNA, 425 bp, Homo sapiens
tgtatttttagtagagacgggctgtcaccatgttggccaggctgctctcgaactcctgacctcaggtgatccacctgcctcggcctcccaaagtgctgggtgtcacgcgcatccatgtgaagagaccaccaaacaggctttgtgtgagcaataaagctttctaatcacctgggtgcaggcaggctgagtccgaaaagagagtcagtgaagggagrtaggggtggggccgttttatgggatttggataggtagtggaaaattacagtcaaaggggtttgttctctggcgggcaggggtgggggtcacaaggtgctcagtgggggagcttctgagccaggagaaggaatttcacaaggtaatgtcatcagttaaggcaggaaccggccattttcacttcttttgtgattcttcagttacttcaggcc

SEQ ID NO: 925616 - DNA, 425 bp, Homo sapiens
tgtatttttagtagagacgggctgtcaccatgttggccaggctgctctcgaactcctgacctcaggtgatccacctgcctcggcctcccaaagtgctgggtgtcacgcgcatccatgtgaagagaccaccaaacaggctttgtgtgagcaataaagctttctaatcacctgggtgcaggcaggctgagtccgaaaagagagtcagtgaagggagataggggtggggccgttttatgggatttggataggtagtggaaaattacagtcaaaggggkttgttctctggcgggcaggggtgggggtcacaaggtgctcagtgggggagcttctgagccaggagaaggaatttcacaaggtaatgtcatcagttaaggcaggaaccggccattttcacttcttttgtgattcttcagttacttcaggcc

SEQ ID NO: 925617 - DNA, 767 bp, Homo sapiens
acagtgattcatgcctgtaatcccagcactttgggaatacaaggtgggcggatcacgaggtcaggagtttgagaccagcctggccaatatggtgaaaccccatctgtactaacaatacaaaaattagctgggtgtggtggtgtgccgctgctagtcccagctacttgggaggctgaggcagaagaattgcttgaacccgggaggcagaggttgcagtaagccaagatcgtgccactgcactccagcctggatgacagagcgagactctgtctcaaaaaaaaaaagaagattaattttccagttgtgatggtgctataaaataaagctcgttgttttcaaaagctaatcctgggttgggcatggtggcccacgcctgtcatcctaagcactttgggaagccaaagtgggtgaattgcttgagcccagaagtttgagaccaggctgggaaacatagcaaaagcagtctctatgaaaaayacaaaaattagctgggtgtagcagaagtgccttgtagtcccagctacttgggaggctgaggcaggaggatagattgagcccaggatgttgaggctgcagtgagctgtgatcgtgccattgcactccagcctaggcgacagagtgagaccttgtctcaaaaaataaaaataaaaaagctaatccttttaaggaaaaaaattaaataaatagcagtgtgaggaatatttgaataaagcaaaaattgtgacggtagtactcaaaagcgccaagatggtgagacgctgcttcag

SEQ ID NO: 925618 - DNA, 530 bp, Homo sapiens
agctgtgagccaattaaacctcttttctttactaattatccagtcatggtcgggcacagtggctcatgcctgtaatcccagcactttgggagaccgaggcgggcgggtcacctgaggtcaggcgttcaagaccaacctggccaacatggtgaaaccccgtctctactaaaaatacaaaaattagccaggtgtggtggtgcatgcctgtagtccccgctactcaggaggctgagaaagaagaatcactggaacctgggaggtggaggttgcagtgagctgagattgcaccactgcactccagcctgggcgacagagtgagactccatccccaaaactagtaataatataaataaaytaataaataaataacccagtctcaggtatttctttatagcaatgtaagaacgaactaatacaacaaggatgcactgtgcctctggctgaccattggctggggccctgggcacaaatccaggggcccctcatggtttctgggtcccaagaaacctctgctgactcagctcacagag

SEQ ID NO: 925619 - DNA, 685 bp, Homo sapiens
aattttaagtgacctatatttaagttcagagattctttcttctgctcgatcaagtctgctattgacactgtccattttattttttaaatttcattcattgaattcttcagttgcaggatttctgttttttaattattattcctatckctattgaatttctgattcatatcataaagtttatctgattttattgaattgtgtctgtattttcttttatcttgtcgagtttccttaagattagtagtttgaattccttttccataggtcatttatttccttttcattgatgtcttttaccagcaagttattatgttcttttggtaatgtcatatttccttgcttttaaatgtttcttttggcacttcagtgttatctgtacatctggtggaacaattgcttctttcaaactttttagagttgctttcataaagtaagactttcccctccagttggatattcttgtgccagttggcaagaaattggtgactgtttccaaattagtatagtggtatggtctacatgtagtttccttatctgtgttgaatgttatcaataactatgagtgaccccatggcctagactgcagatgtttgtgacagtggttgcttaggttgttagcatcattggtcaaggctttgggggccttccaattcttatttttctgctcagcaccacaggggaaggg

SEQ ID NO: 925620 - DNA, 659 bp, Homo sapiens
ttttttaaaactgtggctgctataggaattcacaaccacacccacaggatacaccaaggtagaactgtcagaggtgtttaaaccagagcgactccatcttgaatagggcctgggtaaaatgaggctgagacctacttcccagacacttaaggcattctaagtcacaggataacattggaagtcggcacaagctacaggtcaggtcataaaggccttgctggttaaacaaattgcagtaaagaagccrgccaaaacccaccaaaatcaagatggcgaggagactgacctttggtgtcctcactgctgcttgttatgtgtccggaattggttccttctggtgggttcctggtctggctggcttcaggagtgaagctgcagaccctcgcggtgtgtgttacagctcataaaggcggtgcgtctggagtcgtgctggagttgtttgttcctcccggtgggttcatgatttcgctggcttcaggagtgaagctgcagaccttcacagtgagtgttacagctcctaaagacggcgtgtctggagttgttcgttcctcccagtgggtttgtggtctcgctggcttcaagagtgaagctgcagaccttcagggtgagtgttgcagctcataaaggtagtgcagacccaaagagcaaaagaacaaaca

SEQ ID NO: 925621 - DNA, 719 bp, Homo sapiens
tgggctcctgagtctagtagggacttggagaacctttatgtctagctaagggattgtaaatacaccagtcagcactctgtatctagctcaaggtttgtaaacacaccaatcagcactgtgtgtctagctcaggagtttgtggatgcaccaatcagtgctctgtgtttagctaatctagtggggacttggagaatttttgtgtctagytcagggattgtaaatgcaccaatcagcaccctgtcaaaatggaccaatcagctctctgtaaaatggaccaatcagcaggatgtgggtggggccagataagggaataaaagcaggctgcccgagcccccagtggtaacgtgttggggtctgcatccacatggttgattggctgtttgcaatatatcttgctgctgcttgctctttgggtccgcattgcatttatgagctgtaacagtcaataccaaggtttgcagcttcactcctaagccaaggagaccatgaagccaccagaaggaagagactccgaacacatccaaacatcagaagaaacaaattccagagacgctgcttttaagaactgtaacactcactgcaagggtctgtgggttcattcttgaagtcagtgagactaagaacccaccatttccagacacgcacaatctcagctcactgcaacctccgcctcctgggttcaagcaatttttttgcctcagcctcccgagtacctggga

SEQ ID NO: 925622 - DNA, 630 bp, Homo sapiens
ggcgacacaatgagaccctgtctcaatacataaataaatacaaattggccaggcgcagtagctcacgcctttaatcccagcactttgggaggccaaggcaggcggatcacctgaggtcaggagttcgagactgccctggccaacatggtgaaaccccatctctactaaaactacaaaaattagttgggcatggtggygtgtgctcgtagtcccagctacttgggaggctgaagcaggagaatcgcttgaacctgggaggcagaggttgcagtgagccgagattgtgctactgcactccagcctgggtgacagggtgagactcagtctcaaaaaaaaaagtaaataaatataaataaataaataataaaattaaaaaaaaaaatctcaattcttccgctagtagagtgcctccctggaatcccatccagcttgctgtccttctcactccaagtttaagaaggatagaaaggtgggggagactgtttcggggcaggcaaggaggggaggcctaggcaggaggtgtggtgaaacccaccatatgtgccctcaagcaccctctttctctgccagaggccacaggcttggaagaaccatgtctcttcccaggtttccttctcagcctgactcgaa

SEQ ID NO: 925623 - DNA, 759 bp, Homo sapiens; identical to SEQ ID NO: 922736

SEQ ID NO: 925624 - DNA, 542 bp, Homo sapiens; identical to SEQ ID NO: 920014

SEQ ID NO: 925625 - DNA, 593 bp, Homo sapiens
acagcagaaaaatgtgaactctgaataaagaggtgggagtttttcagcacataaagaatatttaaagccaattcattggatgcattgaccagtaagtgtagagatcaaaatcaagaacaactccaagaattgagagcagatgcaaaccccaattttygtgggtctccagtccaggtatgagcagaaaacacgagggttggggagggaaggagtcttccaagccataagccaggggaaatcgttcagtcaattcttatgctctgatgtggtcattaacagatgataacctcatcctaaagatgagacttctttaggaacatcctaaagatgagacttctttaggaacatcctaaagatgagacttctttaggaacatcctaaagatgagacttctttaggaacatcctaaagatgagacttctttaggaacatcctaaagatgagacttctttaggaacatcctaaagatgagacttctttaggaacatcctaaagatgagacttctttaggaacatcctaaagatgagacttctttaggaacatcctaaagatgagacttctttaggaacatcctaaagatgagacttcttta

SEQ ID NO: 925626 - DNA, 774 bp, Homo sapiens
agacaatccctgggaaggacactaaacagaaccgccatcccttaagtgagactctgtggacggtggaagatttgggctttgtgcctgggtgaggaggagcattacaatccatccttcagttacctctgccttgattctccaatgatattgtacaagactctgatccctgagagatttttagagcactggcttcggagtctgacagacgatgggcctaatcctggccttgcaacttactagctttgtgaccttgatctctctgtgtctttttttccttatctgtaaaatgggaataacaataataagtgtctggaatatagtagacattattatggtgggccattattatgtaacattttaatgtaatatttgaatcttttttttttttgagacagagtctgggagtcttagtctgtcacccaggctggagtgcagtggcatgatcttggctcactgcaacctccgcctcccaggttcaagagattctcctrctttagcctcccaagtagctaggattataggtgcccactaccatgcctagctaattttttgtattcttagtagagatggggtttcaccatgttggccaggctggtgtcgaactcctgacctcaggtgacccacctgcctaggcctcccaaagtgctgggattacaggtgtgagccactgcactcgacctaaattattattatgtaccacttaaatagcactttacagcttataacacatttcatgagcaatatttcactcaatcctctaaaccaatggtctcc

SEQ ID NO: 925627 - DNA, 680 bp, Homo sapiens
ggaggctgaggcaggaggataaattgagcccagagtttcagactgcagtgagctataatgactccactgcactccagcctgggtgacagagcaagaccctgtctttatttaaaaataaataaataggctgggcacagtggctcatgcctgtaatcccagcactttgggaggctgaggtgggcagatcacgagctcaggagatcgagaccatcctggctaacacggtgaaaccctgtctctactaaaagtgcaaaaattagccaggcatggtggcgggcacctgtagtcccagttactcgggaggctgaggcaggagaatggcgtgaacccggaaggtggagcttgcagtgagtcragatagtgccactgcactccagcctgggtgacagagtgagactgtgtctcaaaataaataaataaataaataaatacaaataaataggccaggcacagtggctcacacctgtaatcccagtcgaggcaggaggattgcttgagcccaggagtttgagaccagcctgggcaacacagcgggaccccatctctacaaaaaaaattttaattagtggggcatagtggcacacacgtgtagtccccactactcaggaggctgaggtgggagaacagcttgagcccaggaggtcgaggctgcaagtgagtcatgatcctgccactgcact

SEQ ID NO: 925628 - DNA, 716 bp, Homo sapiens
gttagtttgatgaggatgatggcttccagcttcatccatgtccttgcaaaagatatgatctcattccttttcatggctgcatatatgtgtatatgtactacattttcttcatccagtgtatcactgatgggcatttgggttggttccatgtctttgttattgtaaatagtgctgcagtaaacatatgtgtgcatgtgtctctatagtagaatgatttatattcctttgggtatatacccagtaatgggattgctgggtcaaatggyatttttggttctatatccttgaggaattgccatactgttttccacaatggttgaactaatttacattcccaccaacagcataaaagtgtttctatttctccacagcctcgccagcatctattgtttcctgactttttaataatcaccattctgactggtatgagatggtatctcattgtggttatgatttgcatttctctgatgatcagtgatattgagcttttcttcagatatttatggctgcataaatgtcttcttttgagaatgtcttttcatatcatttgcctactttttgatggggttgtttgtttttttcttgtaaatatgtttaagttccttatatattctgggtattagacctttttcagatgagtagattgcaaaaaattcctccaatcctgtaggttgcctgttcactctgatgacagtttcttttgctgttctgcccaa

SEQ ID NO: 925629 - DNA, 619 bp, Homo sapiens
tgagtgctgccacttaaatcctgcagtcccgagatccggttataaccaatgcatttagatttttcatttcggtggcaacaatcttcattgtaagttctgtcctacagagaagtgtggtgatcaagctcttcggagatactgggactcctctcacaaatgtatgtctcacagttatgatgaatggtgtatctcctggatcttcctcagttgagtatgttttaaaggaaaaatacactttatcattcaaatctttcaaagcttttgaatcactttatagcaaaccaatgaagatccagcatttcattctttcttttcttttttctttttttttttttttttgagacagagtttcactcttgttgcccaggggctggagtgcaatggtgcgatctcggctcaccgaaacctccacctcccggcttcaagtgattctcctgcctcagcctcmtgagtagctgggattacagacatgcaccactacacccagctaattttgtatttttagtagagaaggggtttctccatgttggccaggctggtctcgaactcccaacctcaggtgatcctcccacctccgcctcccaaaatgctgggattacaggtgtgagccaccgcacct

SEQ ID NO: 925630 - DNA, 575 bp, Homo sapiens
gtaggtggcttgaaacaactccaatttgttatctcaccattttgtaggtgagaagttcaatgcaggctttactgggataagactgagatgtcatcaggactacattcttttctggaggctctagaatggtggtccccagcctttttggtactagggactggtttcgtggaagacaaggtttccacgagccagagttgrggatggtttcaggatgattcaaaaatactatatttattgtgcactttattgctatgattgctacattgtaatcatataatgaaataattctacaactcaccataatgtagaatcagtgggagccctgaactcactttcttgcaactaggtggccccatatggggatgatggaagatggtgacagatcatcaggcattagattctcataagaagcatgcaactagatccctcacatgctcagttcacaataggggtggtgctcctatgagaatcgaatgttactgctgatctgacaggaggtagagctcaggcagtaatgcaagcaatggggagtggctgtaaatacagatgacacttcactccttctcccatggcac

SEQ ID NO: 925631 - DNA, 623 bp, Homo sapiens
tggcggtgggcacctgtaatcccagctactcaggagactgaggcaggagaatcacttgaacctgggaagcagaggttgcagtgagccaagatcactccactgcactccagcctgggcaacaagagagaaactccgtctcaaaaaaaaaaaaaaaaaaaaaaaaaaaaggttattttaagaaattgtatagtgaattctcttttttaaaaaagggaaaacattwctatatttattaatatttaaacctgcagttttataaaattttgtctagtccgacactcttgttttacaaatgggaaattgaggccccagttccatatgagagacaaatacaaaaatctgccttctaaagctggtcaaaagcagttatatctctatgatcaattcagaagttgagtcctctgttgaaatgatttcaatagttgaggtgattttactgtttctctttaatgttgtgatatattttctctcttatacgactctatagtaaaaacgagaatcattttactcaatctggttcatgtagcagtatcaggctgtgaaattcatactgctcagacactggttctccaactgtgatgtacgtaagaaatactgtgcctgctgtctcttaaatgtagagt

SEQ ID NO: 925632 - DNA, 674 bp, Homo sapiens
atgagacagaatccacaagggacacacatccctggggcagggctaagactagggtgaggagagtgaggttgctggtctttgtgctgtagtgggttgaatagtggtccccaagaagactgtccaagtcctaacaccctagaacctgagaatgtaaccttatttggtcaaaatctttgcaaatggaattaagcatctccagataagatcatcctggattaagagtgggccctaaatccaatgtcaggtgtcctaccagaggaaggcagagggcaagctgacacacagagatgcagggaggatggccatttgattaaaatgaagtcagagattggcctgatgccaccagaagccaatgaacaccaagagccaccaaaaactgcaggaagcaaggaaaatcctttcctcgtggcttcagagggagtgcggccctgccaacaccacaatttcaaatgtctggcccccagaaccatgagagaataaatttctagtattttaacccacccagttgtttgtggtaatttgtcayggcagcccttagaagctaatataggtacaaaatataagagagtgccaaaaaaccctgtaatcaacagaaacaatgttttgatgtaatcttttttaaaaattaaaattaatgtttaaaaagccaaactcattataaacaaaatgtagaa

SEQ ID NO: 925633 - DNA, 713 bp, Homo sapiens; identical to SEQ ID NO: 922998

SEQ ID NO: 925634 - DNA, 713 bp, Homo sapiens; identical to SEQ ID NO: 922999

SEQ ID NO: 925635 - DNA, 559 bp, Homo sapiens
cagtaataacttggtgttttcacagaaatagggatttctgtttttccactgtgtggagagctctctctcccactccacaggagtagagacaggagatacactgtgatatctctgattctagcatagtgcctggtggttgctcagtaaatgttctttggatacctgtaattgccatttagtaaaactaataggagtaaaatgtaatatattttatttaaatatatatttaggccaggcgcrgtggctcaagtctgtaatcccagtactttgggaggctgaagtgggcagatcatttgaggtcaggagttgaagaccagcctggtgaacatggtgaaaccctgtttctactaaaaatacaaaaattagccaggtgtggtggggcatgcctgtaatcccagctacttgggaggctgaggcaggggaattgcttgaatctgggaggctgaggtttcagtgagctgagatcatgccactgcactctagcctgggtgacagagtgagactctgtctcaaaaaaaaatttatatatatatatatatatatataatatttaatatgt

SEQ ID NO: 925636 - DNA, 578 bp, Homo sapiens
taaggaagatgatttttcacgaatctacataggacctatcaactataaggaaatatattagtaaacactgtttctacatcctgatgcttgtaggtttccttgatgttgaaatagtgttagcacagatttgttatttttcctctttctgattaatccaaacctggagtgtggccctggttctccggctgcagagaagtcagtccatcttttgtaggctccttttctgttttacatttgtcgggctcactacttgagcttactcagcaacctttaaagctctaaatcctcgttagtcttaaactccccagctcatatttggccggcaactctacttggcatttcagtaatttcccacttgccagctcatcttttaccaagaatcaaaaaccattctgatctttaaagaaatgcagatgaggccgggtatcrtggctcacgcctgtaatcccagcactttgggaagccgaggagggtagatcacgaggtcaggagttcgagaccagcctgtccaacatggtgaaaacccatctctactaaaaatacaaaaattagttgggcatggtggtgcgtgctcatag

SEQ ID NO: 925637 - DNA, 568 bp, Homo sapiens
ttggttatctctgttgtttacaatatcttaacataaaccttaattatgattgatagcatatactcagacattagaatttttagaaatcccatataagtttgcaatatatattagcattattcaccaagataaaacctaaagaaggttgtgcatcggccaggcgtggtggctcacacctgtaatcccagcactttgggaggccaaggcgggcggatcatgaggtcaggagatggagaccatcctggctaacacggtgaaaccccatctctactaaaaaatagaaaaaaytagctgggcatggtggtgggcgcctgtagtcccagctacccaggaggctgaggcaggagaatggtgtgaacccgggaggcagagcttgcagtgagctgagatcttgccactgcactccagcctgggcgacagagcgagactccgtctcaaaaaaagaaaaaaaaaaaaaagaaaaaaaaaaggattgagcatcattttggcaatcccatgtacctgaacatgtcaaataatcctgtttacctttcttttctggaaattccacgggccctttgaagaattc

SEQ ID NO: 925638 - DNA, 568 bp, Homo sapiens
ttggttatctctgttgtttacaatatcttaacataaaccttaattatgattgatagcatatactcagacattagaatttttagaaatcccatataagtttgcaatatatattagcattattcaccaagataaaacctaaagaaggttgtgcatcggccaggcgtggtggctcacacctgtaatcccagcactttgggaggccaaggcgggcggatcatgaggtcaggagatggagaccatcctggctaacacggtgaaaccccatctctactaaaaaatagaaaaaactagctgggcatggtggtgggcgcctgtagtcccagctacccaggaggctgaggcaggagaatggtgtgaacccgggaggcagagcttgcagtgagctgagatcktgccactgcactccagcctgggcgacagagcgagactccgtctcaaaaaaagaaaaaaaaaaaaaagaaaaaaaaaaggattgagcatcattttggcaatcccatgtacctgaacatgtcaaataatcctgtttacctttcttttctggaaattccacgggccctttgaagaattc

SEQ ID NO: 925639 - DNA, 626 bp, Homo sapiens
gttgatttggtgtagagaattctgtagatgtctactagttccacttgatccagagcttagttcaagtcctgaatatccttgctaattttctgtctcgttttctgtctaatactgagaatggggtgttaaagtctcccactattattatgtgggagtctaagtctctttgtagatctctaagaacttgtttttatgaatctgggtgctcctgtattgtgtgcttatacatttagagtagttagctcttcttattgaattgtttcctttaccattacataatgcccttttttgatctatattggtttaaagtctgttttgtcagagactaggattgcaacccctgctttttttttgctttccatttgctttgtaaattttcctccatccttttattttgagcctatgtgtgtctktgcacatgagatggatctcctgaatacagcacacccataggtcttgactctattcaatttgccactctgtgtcttttaattggagtatttagcccattcacatttaaggttagtattgttatgtgtgaatttgatcctgtcatcatgctgctatttggttattttgcacactagttgatacagtttcttcatagtgtcattggtccttatatt

SEQ ID NO: 925640 - DNA, 577 bp, Homo sapiens
acatagatgcaaaaagcttcaacaaaataccagcaaatcaagttcaacagcatgataaaatgatgatacaccatgatcaattgggttttatccctggagtgcaaggatgttttgacatatacaaatcaataaaaataatacactaccttaagagaatgcaagatacaaatcacatgagcatctcaatagatgcagaaaaaacatttgacaaaattcaacatccttttatgagaaaaattctcaacaagttaagaatagaaataatgtaccctaacctaataaacaccttataaaacaagcccatagctaatactatactcaatggagaaaaatatttctccyaagatctggaataatacaagggtactcactcttatttattttattcaacatagtagtaaactccctggacagagaagttggcaagaaaaagaaaggaaagtcatccaaatttaaaagaaaaaagctaaatcttctgtgtactgatgatacgactttatatataaaatttcctgaaactccacccaaaacaattagaactaataaatgaattgcagggtacaaaattaacatataa

SEQ ID NO: 925641 - DNA, 575 bp, Homo sapiens
cagaatctccaagacaatggggaaaatatctccaggacatgtcataggtcttcatgggcagcccctcccatcacagacccagaggcctaggaggaaaaaatggtttcgtgggccaggcccagggtccccatgctgtgtgcagcctagggacttggtgccctgcatcccagccactccagccattgctaaaagggggcaaggtacagcttggcccatggtttcagaggatgcaagccccataccttggcaacttccatgtggtgttgagcctgcggctgcacagaagtcaagaactaaggtctgggaacctccgcctagatttcagaaagatgtatggaaacacctagatgcccagaaaaawgtctgctacaggggtggggccctcatggagaacttctgctagggcagttcagaagggacatgtggggtcagagcccccacacaaagtccctactggggcactgcctaatagagctgtgagaagagggccaccgtcctccagacccccagaatggtagatccgtcaatagcttgcactatgcacctcaaaaagccgcagatactcaatgccagcc

SEQ ID NO: 925642 - DNA, 643 bp, Homo sapiens
gagaaaatgagcattatcataatttacagtacccatcaactaaacagatcagttgctgtgagaattataatattctctgagaacagaacaaatgtctcctgtgatttttcagaaagtgtgcacaattaatctgtattaagtgatatcttcaacatcggtgcagtaaatacagccatcactgccacaattactttttttatactatcttcatataggttgatgacacaactctgattggtaaaamccattctaccagggtccagatgatatatccctgaacagatctctcttggtgatagaatgtagagtatctaaaagaatgaaatggataaaccgcttacgtttgagaaaggcctccattgttctgtttgtcccaactcagggcctatttaagatagttaggggccttaacttctgaaaaggctatgtagtggcacccctctccccagttttttccctgaatttttgtttctccatgctttgatagtgccctaagccagatatgttcagtctgcctactgggcagcaatatctcagcctaatgtttgataataattaaatgataatgtgtcccactgctttctggtttagaacagagctaaattcttttaactatcagcccaaatggaattttttttttatg

SEQ ID NO: 925643 - DNA, 641 bp, Homo sapiens
atttctagttctagatccttgaggaatcgccacactgacttccacaatggttgaactagtttacactcccaccaacagtgtaaaagcgttcctatttctccacatcctctccagcacctgttgtttcctgactttttaatgattgccattcgaactggtgtgagatggtatctcattgtgrttttgatttgcatttctctgatggccagtgatgatgagcattttttcatgtgtctgttggctgcataaatgtcttcttttgagaagtgtcagaaataacagtatttcttttacagagtttatataaaagttcaataagatcatgggtaacacatttagtacagagtctgcatcatgtgttcaggaagtatttacttgctatgataattactattaacaataaagatcttaaataatttcatatatagaatgtctttgtaaggccgaattgtcagcattgaaaactaattttccaaaaccatttttatcatcttctgtttataaccttcctgtcgtatccactcataaccctaaggacggaacgtgccgcagatctgaggtctgttgagaggtatggcactgtccttggccccagcaagtcatatcccactcttaagacctgtgacctggcctggcacggt

SEQ ID NO: 925644 - DNA, 641 bp, Homo sapiens
atttctagttctagatccttgaggaatcgccacactgacttccacaatggttgaactagtttacactcccaccaacagtgtaaaagcgttcctatttctccacatcctctccagcacctgttgtttcctgactttttaatgattgccattcgaactggtgtgagatggtatctcattgtgattttgatttgcatttctctgatggccagtgatgatgagcattttttcatgtgtctgttggctgcataaatgtcttcttttgagaagtgtcagaaataacagtatttcttttacagagtttatataaaagttcaataagatcatgggtaacacatttagtacagagtctgcatcatgtgttcaggaagtatttacttgctatgataattactattaacaataaagatcttaaataatttcatatatrgaatgtctttgtaaggccgaattgtcagcattgaaaactaattttccaaaaccatttttatcatcttctgtttataaccttcctgtcgtatccactcataaccctaaggacggaacgtgccgcagatctgaggtctgttgagaggtatggcactgtccttggccccagcaagtcatatcccactcttaagacctgtgacctggcctggcacggt

SEQ ID NO: 925645 - DNA, 582 bp, Homo sapiens
aattaaaataatatcattattttaaaataactataattgctttttatatttattaaaataattataaataaatgtttggaacactcattgatatacaatggcctctcttatggcgaattctaagaaacactaggttctttgactgcaaacaggtgttacttaaaaaaagaaaggttaagtaagtttaaggaaggataagataaaataagtcaacaggcttctgtaccatagcacttcttaaagcctttattatacaactacacacagtactgtgagagagagacagagactgaagaccctgacatcacactcatgcaaggacacacgacatcttagagcccatctccracctgatatacacagagtacaccttgaaaaacattaatacaaagactcaaagtgcaacctcatggaagagtcaggtaggtggaaaatgctcataaaggagattagacgtgacatttgtttgaaaggagactttccacttgactgattggtggggaggggaagctgaagttggggggagtaatagggacaaaggcacagagcccagacagggcgacgaagtcgagggacatcagg

SEQ ID NO: 925646 - DNA, 582 bp, Homo sapiens
aattaaaataatatcattattttaaaataactataattgctttttatatttattaaaataattataaataaatgtttggaacactcattgatatacaatggcctctcttatggcgaattctaagaaacactaggttctttgactgcaaacaggtgttacttaaaaaaagaaaggttaagtaagtttaaggaaggataagataaaataagtcaacaggcttctgtaccatagcacttcttaaagcctttattatacaactacacacagtactgtgagagagagacagagactgaagaccctgacatcacactcatgcaaggacacacgacatcttagagcccatctccaacctgatatacacagagtacaccttgraaaacattaatacaaagactcaaagtgcaacctcatggaagagtcaggtaggtggaaaatgctcataaaggagattagacgtgacatttgtttgaaaggagactttccacttgactgattggtggggaggggaagctgaagttggggggagtaatagggacaaaggcacagagcccagacagggcgacgaagtcgagggacatcagg

SEQ ID NO: 925647 - DNA, 599 bp, Homo sapiens
gattgctctagccaggactttcattactacgtgaaatattagtgctaagagcaggcatccttatatggtttcggttgtcaagggaaatgcttccagctttttcccatttagtatgatactggctgtgagtctgtcacagatgattcttattactttgaggcatactccttcagtgcctagtttgttgagggttttaacctgaaggggttttgaattttatttaaagtccttcttgcatctattgaggtgctcatgtgtttttcgtttttagttctgtttatgtgataaatcacatttgttgatttgcatatgttgaaccaaacttgcatcccaaggataacttctacttgatyatggtggattagctttttgatgtgctgctggattccgtttgctagtattttgttgaggattttcacatctatgtgcatcagggatactggcctgaaattttctttttttgttatatctttgccaggttttagtatcaggatgatgctggactaatagaatgagttagggaggagtatctccatctcaatgttttggaatagtttcaggaggaataatactagctcttctttgcttgtctagtataa

SEQ ID NO: 925648 - DNA, 723 bp, Homo sapiens
tttgtcctgagaaaatggtttgttttttttctttctcattgtcaggctgcaaattttctgaacttttatgctctgcttcccttataaacctgaatgcctttaacagcacccacgtcacctcttaaatgctttgttgcttagaaatttcttccaccagatacactaaatcatctctgtcaagttcaaagttccacaaatctctagggcagggacaaaatactaccagtctttttgctgacacatagcaggagtcaccttttactccagttcccaacaatttcctcatctccatctgaggccacctcaccctggttttcattgtccatatcattattaggattttggtcaaagccattcaacaagtctctaggaagttccaaactgtccaacatttttctctcttcttctgagccctccaaacttttccaacctctgactgataccctgttccaaagttkcttccacatttttcaggtattttttacagcagcaccccactctaccagtaccaatcttactgtatttatttattttcatgctaccgataaagatacacccaagactgggtaatttataaagaaaaagaggtttaatggatcatagattcactgaaaccatctcagcaaaattctgaccaagacagtgaaagagatccaacttaaacaactccatcttgccactaacctccaagctgtccttgtttattcctgggcataggctaaa

SEQ ID NO: 925649 - DNA, 787 bp, Homo sapiens
tgctatctcattttggttttgattgtgtttttctgataattaatgaagctgagcatcctttcatatacccattggctatttgtatgtctttggagaaatgtcagttcgggttctttactcattttttaatcaggctattttcttgctttggattgtttgagttttttatatatgttagatattaatcacttatcagatgtacagtctgcaaatacttcctctcattttgtaagttttcttttcactctgttgatggtttcctttgctgcacagagcattaaagttcgatgcaatctcacttgyctatttttcctttgcttgactatgcttttgttgtcatatccaaaaatcattgccaagaccaatgtcaacaaactgtccccctgttttattccagtagttttacattttcagttcttacatttaagtcttaaattcattttgacttgacttctgtatatgcagtgagaaaagggtccaatttcattcttctatgtgtggatatccattattttccacaccatttattgaagagattatcttttacccattacacaatgagtaaacacattatacaattacacctttgtcaaagatcagttgaccgtaaacatgtggatttatttctaggctttcttttctgttccatctgcctgtatgtctgtttttaatgccagaaccatatgttttaattactgtagatttgtaatacattttgaaattggaaagtgtgatgcttccagctttgtcctgcttgctcaacattgcttaggctatgcaagttctt

SEQ ID NO: 925650 - DNA, 586 bp, Homo sapiens
agtaaagaaactcctgtagcaataagcatacctgggtgtctagattgtggtttctaatatcattttttaataaaaggaaacaaaactactgggaaaatggctgattctagaagtgaaatgagaaatatatgagatgagcctacmacatcttgtagtgccggaaagtaagaaagtgctcaaaaacaaaccaaccactatgatagggatgtcagagagataggagccaactgaaagggctcctaatggccaatattagaacaatttaagcaacaaaatgaagtagtataggattataaccctaataagaacataaatattcatgagtttatattgacacaagtaaatgattgaacaaaagaaataagtaaatggggcagaatagacaaatctctcatgcagaagaattctgaataatagaaatagatattctgcccttaagaaggtagagcataatttcccattcataaatgtgagctgactgtaaggggctttcttccaaagagtgctgtatggaaagaggaagaaaaaagagttacttcacaatggggaaacctgaccaacactacctcaaaccaggtgatcaaag

SEQ ID NO: 925651 - DNA, 662 bp, Homo sapiens
cttgtgccttctgggtgaggcgacaccccatcctgcttcagctcatcttccatgggctgcacccaccgtccaaccagtctcaatgagatgaaccaggtacctcagttggaaatgtagaaatcacccatgttctgcgtcaatctcgctgtgagctgcagactggagctgttcctatttggccatcttggaagcaacttagatgggttacattttatatgtgttgaatctaagatccccatggagattttagtagctaaattgattgggtgctcaggagatagattttwgctgaagacagagatttttaaaaaaataatcagcaagtatattgaaaacaccaggagaaatgagatcaggaacaatgtgtagagtgagaagagaatctaaaagagaactccggaaaatcctggcatttaagacagttaacacttaaaatgaaagcaaaaaaagaaaaagaagaaaaaaattgcaaaatatagtaagaaggaacacccaaagggtagaagacatcccagagagaataattccacagagatcaggaaaatgggatgttacagcaactaggaaatgatcagcaatgtgaaatgctggcaaaagtcagataagaaaaactgagaaatatctcttggatttggcaatgtcttggcaagaacatttcactg

SEQ ID NO: 925652 - DNA, 775 bp, Homo sapiens
agaaagttagcctatcctttgggggaagccaggcatcgacttcttctatctagctacaaaagtcctagatgttttgtctacattgaaaatctattgtttagtgtagccaccttcatcacctacagaagatcttagtagaccttctgtataacttcctacaacttctatattagtacttgctgcttcaccttgcacttttatgttatggagatagcttgtttccttaaaccttaggaaacaacttctgctagcttcaaacttttctttggccgcttcctcatctctctcagcctttgtagaattaaagagagttagggtcttgctgtggattagactttctcttaaggaaatgtggctggtttttcttttatccagagtactaaaactttctccacatcagcaataagrctgtttttacttttttatcatttgtgtattcactggaacacacttagaagccatagtagggttattaattggcataatttcaatattattgtatctcaaggaatagagaggcccaagaataaggagagagatggggaacagcctgttggtggaacagttaggatacacacaacgctcatcgattaattttgctttttatatgggcaagggtcatggtgccccaaaacaattacagtagtaacatcaaagaccactggtcacagatcactgtaatagatataataataatgaaaaatttgaaatattgtgacaattaccaaattgtgacacagaaacaaagtaagcacatgctgttacaaaaaatggc

SEQ ID NO: 925653 - DNA, 533 bp, Homo sapiens
gacttgaacagagagaggcagcaagtcagtcagatatgtgtgggcagcatatcccaagcagagggaacagtcatacaatcttggaggctacaaggtgcttggtatgttctgcaaagagttaagaggtcagtgtgcctggagaaggtgcagcaaatgggacagtgatggccataaggccagggcggtggcagacagccagatggtgtggagtcttgcaggccacggtaagaatgtgtgggttttgcattttacttagagtgaaaagagaagagattacagattgttgtgcagagaggcaacatgatctgatttatattttttaaaaatttctctgtggagtatatattgggggaggggagcaaggrtagaagcagggagaactattaggaggctattatactagtccagtgagggatgatgatggctggaattaccatggcagcagtggaagtggcagaagtgagaattctgattatattgtaaagatgctgtccgcagggtttgctagtggactgggtgtgcagcaagagaga

SEQ ID NO: 925654 - DNA, 643 bp, Homo sapiens
gataagcagactttacatttcggtgttttcctgcatagtaggtacaatcggtgatgggattatttttctctcccccattcatgcctgcttctttaagattttaatattaagaattgttttatgaaattaatgttaaaatactacagtgttctcttccctgggggtgcaatagacaggtcggtgttcctgggattccttctgagtgcccatcatccagcctcacttccctttgcctccacactggccccagtggccttctttggaggatgcccatgggcccctggagctgcttggggaaaggtacagagagccagaagtgcctgggggtttacattcgctctgaggyggccagtagcggagaaccgaatatgggagtgacaaaggtcagtggccttgcttcaatgtgggcccatttatgctttggaatctggcagaggctgggccggaatctcacctgtgcttggctttttccccatttctgttctgttcccctcatcccctttccgttttctcctgggagcactttattgatatataactgacaagtgaattgtagtctccagatctgattctgggggacccattttaagatgggggtggcagaaggtggggggatggcatgagagtgtagatcgtagataat

SEQ ID NO: 925655 - DNA, 570 bp, Homo sapiens
tcagactgtgtttctctgctccattaggtcatttatgtttctctctaaactgattattctagttaacagctcctgtaatgttttatcatggttcttagcttctttacattaagtgggaacataattctttagctcagtgaaattcattattacccactttctgaagcctacttctgtcagttcatccakctcagcttcagccccattctgtacccttgctggataagtgttgcaatcatttggaagagaagagacattctggcttttggaattttcagcatttttgctttgatttttcctaatcttcgtggatttatctacctttgatctttgagtctggtaatctttgcgtggggcttttgttgggtctttttgttgatgttgttgttgttgttactttctgtttgtttgtttttcttctaacagtcagattcttcttctgcaggtctgctgcagtttgcatggggttcattccagaacctgttcacctgagtatcaccagtggaggctgcagaactgcaaagattgctgcctgctccctcctctagaagcttgtcccagaggggcacc

SEQ ID NO: 925656 - DNA, 570 bp, Homo sapiens
tcagactgtgtttctctgctccattaggtcatttatgtttctctctaaactgattattctagttaacagctcctgtaatgttttatcatggttcttagcttctttacattaagtgggaacataattctttagctcagtgaaattcattattacccactttctgaagcctacttctgtcagttcatccagctcagcttcagccccattctgtacccttgctggataagtgttgcaatcatttggaagagaagagacattctggcttttggaattttcagcatttttgctttgatttttcctaatcttcgtggatttatctacctttgatctttgagtctggtaatctttgcrtggggcttttgttgggtctttttgttgatgttgttgttgttgttactttctgtttgtttgtttttcttctaacagtcagattcttcttctgcaggtctgctgcagtttgcatggggttcattccagaacctgttcacctgagtatcaccagtggaggctgcagaactgcaaagattgctgcctgctccctcctctagaagcttgtcccagaggggcacc

SEQ ID NO: 925657 - DNA, 596 bp, Homo sapiens
tattgctttttttttttttttttgaggtggagtctccccctgtcacccgggctggagtacagtggcgccatctcggctcactgcaacctccgcctcccaggttcaagcgattctcctgcctcagcctcctaagtacctggggttacaggtgcgtgccaccacacctgcctaatttttrtatttttagtagagatggggtttcaccatgttggtcaggctggtctccaattcctgacctcaggtgatctgcccgcctcggcttccaaaagtgctgggattacaggcgtgagctaccatgcgccccatgttacagcaccttttctaggtttagatacacaatatttgctattgtgttgtaattgcctacagcattcagtacagtaacatgccgtgcaggtttgtggcctaggagaaataggctataccaatcaacctaggtttgtgtaagtacacactatgatgtttgcacaactacaaaatcacctgacacatctctcagaatgtattcctgtccttaagtaacacatgattgtacatccctttttaagaacaagcagaaccttcctagaaggccttcagcctatttgcctccccat

SEQ ID NO: 925658 - DNA, 628 bp, Homo sapiens
ggggccgaatccaggaggctgagcaacgactgactgccagccttgcctccactgtacctcacagggtaaggcccaatggcctggaactccagccactccccaccggggctctcgggctagcagcacctctgtacctccctgggacggagctcgccgagggagaggcaggcccctattttggctgtcctccagccctcgccactcttgccctcaggctgtggaggatgcacggtgactagcgactggcatggaccccagcacacctgccccacggaaaacctgccagactgttctccaagtggatcccagttcccagtgtccctcactgggcggggcctcccgaccagcgactcgtgcctctgcctgaagacctcaggtggaggtggctctgtatttctctacggaggaaatcccagaarcagcccacatcccctccgtcattgcagcagcagtggtgccgccccaaccaccctcaggctggggaaggacaaagagcctggtcgctgggctggcacctccagcacactccaacccaatacagagatgagcccaagttctcttccctgtgaggccccacaccccgccattcttcagcaggcgggccccccacctcaggaccgcagatgag

SEQ ID NO: 925659 - DNA, 578 bp, Homo sapiens
caaatttaacactgaatagaatgggaaattctgagttcagaattgcctataaaaagattttgtaaagaagaaagaaaggaaaaaaaggaaagaggcattgcaggttttataccacaaattattgctgtttcaactacaatctgcctcctagtttctgacttaccattaaatgaagcaagacaataattggaaaactcatgcaaaatcttgcctagagctgtcttaggcccatcctctgagctctctgtgttctaagagttaagctcaaggataagagataacctctaggcattataataactagattttaaccctaaacctaagttcaagagcacactgtccactgtgaakggaaaaaacaaagttggagggagaggctcttttacaataaactcctcagcagagattgcctcagagtttttcccagatttcaaaatagccacattagtgattttacaaaagcatatcacatgtgatcaaagatttaaaactgctttttctcactagcacaaagacaagagaccataactggacaatataaattagtgaagtatatgaaaatctgttaccaccatggt

SEQ ID NO: 925660 - DNA, 665 bp, Homo sapiens
atttggtgaggtggttttttttttttttttcagggtctggttcattatttctacccttcctgatgaaggtggatgccaagggagtatgatattcccactttatttctagtgcttgggttagccttttaattatgagtgtagtaatgtgggtcctgttgtctgaatcaatattctctattattccaaacctgggtatgatattttccaacagagctttaactacattactggctattgcacttgggaaggggatggcttctacccagtgggtaagatagtctactattactaataaatatttgaggtgacctattrggagcatttcagtatagtccacttggatactttggaatggccttagccctggatttcttcctccaaaatgttgcttctttaaggtttgcttattagtttctctgcacactatgcaactatctgtaacttgcttagcaggggtctagatccccatatacccataaaccctaaggactgtgtcacacagagcgtggggaccccagtgggttccttggtgaagttgtgacagcatttccctcatgagaggtttatacaacatttcccttccatctggtaatacccactttccctctgggctttcctcagctcctaatttttttggtttttcttggtctgcaggggaaaagatg

SEQ ID NO: 925661 - DNA, 661 bp, Homo sapiens
agatgcaggggtgcctacctccctgtgggtgttcaccacaatgacagaggcagcatagctgggtggagtggggggcccctgctggagattatgtgtgtggttgtactggatatggtattggcttggggcagggtgctggctggggcaggtttgggtgccttctctgtgccctgcaagcaggagtgatccctgagggtgtgggggtgtccgctgttctctgtgcagtattagtataagggcagggtgctggcaggggcagggcttgctggctttatgcccaccaaagctccatctgcagtggtggctgggggctgggtgggtgcagactacactccagtgtgctggcagggcaaggaaagcaaaacctatctgtgcagacatgtgccagcaaagtgatgtagggcattgccatgggccccggggaagctgcagtatggggagggagcaygtgcatggctgtataggccacacctcactggacttctccaccagtcaggcaaggttcactggcacagaagctatgctgtgggcccccaaggtacccaagactgccctctaagcaggtgtggccaggctggggccccagaagaggccaacagactaaggggtgcacaggtcagaccagccccatctgatgtgcaagaccacccttcagcgatca

SEQ ID NO: 925662 - DNA, 624 bp, Homo sapiens
tagaagccatctcaaacttgggtttaccttcctcagcagcctattagaagagggcacgtggcagaaacaacattaaaatccggaggaccaggctgggcacggtggctcacgcctgtaatcctaccactttgggaggccgaggcaggtggatcacgaggtcaggagatcgagaacatcccggctaacacggtgaaacacgtgtgtactaaaaatacaaaaaaatkagccaggcatggtggcgggcacctgtagtcccaactactcgtgaggctgaggcaggagaatggcgtgaacccgggaggtggagcttgcagtgagcggagatcgtgccactgcactccagcctgggggacagagcgagactccatttcaaaaaaaaaaaaaattcctggggaccagcatccagtcacccagagactaccccctttctatctgttttcaaggtgaacagaacctacctgttgcattagacagggccagggattccatggagccccgaggggtctgctctgtgggcgtcatgtcctctgtgtatttcagggaactgatgggatgacgggtccgacactgctgagtggacaagcccccttcctcttcctcttcctcctcatatttggggacttg

SEQ ID NO: 925663 - DNA, 766 bp, Homo sapiens
gaactggagagagagagggtcccagaaggactgtgtgcaggggtgaagcccaggtgaggggactagctggggatggtgcacttgggctggcaagagtgggagctaaagggataagggggggatgcccggggggatggatggacaaaggctagggtctggggatccgagggagggggcagcaggccccttgcagcctgaggtgtgcaccgccacatggctccaccctggaacacagcgtggccctgaggaggaggaggggagactgccctggtgcacgatggagaaagctctggaatgtaccattaagtgagcaaagcagggtgygagagtacacatctcacactactttgggtaagaaagggcaggtgtaagtacgtatattcttatttaatttgtcagcaaaaagaagcaggaaggaaacagttgtctcttaaaatggtcccttcagagggagggcaaggggcagggcctccagtgcctgtatgcttcctcagggcagacctaggaatattcctgagggttctgaaccctgtcaatgtaatacttgttcaaacaattaattcaaaacaacaggttagggagagggtgggttgccaatccctggggctggctctgaggtggaaggggattcccacatggactcggaggggctgcaggctcaggaaggagatggcctcgcagcctctcaggccctccctggcctgcctctctgggctcctttgggatctaagcttcccccaatccccccaaggtgcccttctccctc

SEQ ID NO: 925664 - DNA, 575 bp, Homo sapiens
gtgggagtttgctggaggtccactccagaccctgtttgcctgggtatcgccagcagaggctgcagaacagcaaatattgctgcctgatctttcctctgaaatcttcatctcagaggggcacctggctgtatgaggtgtcagtcgggccctactgggaggtgtctcccagttaggctacacggargtcagggacccacttgagtaggcagtctgtccgttctcagagctcaaacaccatgctgggagaaccactgctgtcttcagagctgtcagacagggacatttaagtctgcagaagtttctgctgccttttgttcagctatgccctgcccccagaggtggagtctacagaggcaggcaggcctctttgagctgcggtgggctctacccagttcaagctttcctgccgctttgtttacctactcaagcctcagcaatggcagatgcccctccctcagccaggctgccaccttgcagttcaatcttggactgctgcgctagcagtgagcaaggctccatgggcatgggacccactgagccaggcatgggatataatctcctggtgtgccacttgc

SEQ ID NO: 925665 - DNA, 575 bp, Homo sapiens
gtgggagtttgctggaggtccactccagaccctgtttgcctgggtatcgccagcagaggctgcagaacagcaaatattgctgcctgatctttcctctgaaatcttcatctcagaggggcacctggctgtatgaggtgtcagtcgggccctactgggaggtgtctcccagttaggctacacggaggtcagggacccacttgagtaggcagtctgtccgttctcagagctcaaacaccatgctgggagaaccactgctgtcttcagagctgtcagacagggacatttaagtctgcagaagtttctgctgccttttgttcagctatgccctgcccccagaggtggagtctacagaggcaggcaggcctctttgagctgcggtgggctctacccrgttcaagctttcctgccgctttgtttacctactcaagcctcagcaatggcagatgcccctccctcagccaggctgccaccttgcagttcaatcttggactgctgcgctagcagtgagcaaggctccatgggcatgggacccactgagccaggcatgggatataatctcctggtgtgccacttgc

SEQ ID NO: 925666 - DNA, 623 bp, Homo sapiens
tagtgtaatttttggggagtgttaaagagccttgttttgtcatatcagaattgtttttctggttccttctcatttgggtaggctatgtcagtgggaaggtctggggctcaaggctgctgttcagattcttttgtcccacgggatgttcctttgatgtaatactatctccctttttccagggatgtggcttcctgagagctgagctgtaatgattgttatttctcttctggatctaaccacccagaagggctaccaggctccaggctggtactggggattatctgcacagagtcctttgatgtgaaccgtcttcatgtctctcagcagtggataccagcacctgctctggtggaagtggcatgggagtgaaatggactctgtgaggatttttagttttggttgtttaatgcgctatttttacactggttgacctcctgccaggaggtggcacattcaagagwgcatcagctgtggtagtataacggggatcaggcagtaggcagggccctagaactccgaagagaatatgctctttgtcttcagctaccagagcagatagagaaggaccatcatgttgggccagggttaggcgtgtctgagctcagattctccttgggcagggc

SEQ ID NO: 925667 - DNA, 623 bp, Homo sapiens
tagtgtaatttttggggagtgttaaagagccttgttttgtcatatcagaattgtttttctggttccttctcatttgggtaggctatgtcagtgggaaggtctggggctcaaggctgctgttcagattcttttgtcccacgggatgttcctttgatgtaatactatctccctttttccagggatgtggcttcctgagagctgagctgtaatgattgttatttctcttctggatctaaccacccagaagggctaccaggctccaggctggtactggggattatctgcacagagtcctttgatgtgaaccgtcttcatgtctctcagcagtggataccagcacctgctctggtggaagtggcatgggagtgaaatggactctgtgaggatttttagttttggttgtttaatgcgctatttttacactggttgacctcctgccaggaggtggcacattcaagagtgcatcagctrtggtagtataacggggatcaggcagtaggcagggccctagaactccgaagagaatatgctctttgtcttcagctaccagagcagatagagaaggaccatcatgttgggccagggttaggcgtgtctgagctcagattctccttgggcagggc

SEQ ID NO: 925668 - DNA, 812 bp, Homo sapiens
tccttcttagacttccatagcgacttcttaactggatcgctgtgtccaaggctaggtcatgctccaggcagccctggttattctgcagttgtaggggtcctcctgggcctcgtgaaatggattctggctatggcttaatgatgtctcactgggattgtgtcagttaaagtgttctcgaactaatgagacagaccaaacccctgcctccaaatccagggaggttggtgggatatgaaattgaccagcttcgctaagggggatatctgggtttcggatggactacagrgcagttctccagatggccttggactgacccagttctcccagctttctcactgtagttctcaagaataactgtagaatgtgctgggaatgcaatagcctgaggtcaggaggaactggccagaacagcctgggcttgttcctgtccctgctatgaaagaatgcccttcaggcccggagaggcggctcacgcctataatcccagcactttgggaggccaaggggcagatcacccgaggtcaagagttcaagaccagttggccaacatggtgaaaccctatctctactaaaaatacaaaaattagccaagcgtggtggcgcacacctgtaatcccagctacttgggaggctgaggcaggagaatcactttaacccgggaggcggaggctgcagtgaactaagattgtgccactgtgctccagcctgggtgacagagcaagactcctcaaaaaacaaaagaaaacaaaacaaaagatgatgacgaagaagaaagaatggatttggggaaaaaaacaaaaaccagcagtgtc

SEQ ID NO: 925669 - DNA, 417 bp, Homo sapiens
ggaggctgaggtaggagaattgcttgaacccggcaggcagaggttgaagtgagccaagattgtgccgttggacaccagcctgggcaaagaagcgagactctgactcaaaaaaaaaaaaaaaaaaagaatataatgaattccctataaaatgaaaacatacttttcatctgaaaatacatatatatataatatagtaaatatttttcaagtaagctctcttatctgagaacttttcgyctactgaaataactcacggtatttttgataggggaatgagttctctcattaggcacctcctataatgtatataaaccatgttttcaacgtgtacgttaaaaataacaacactgtgtatgcttaactttgtgagttaaatcactcaaattctccaactgctccagccagggaattatgagg

SEQ ID NO: 925670 - DNA, 437 bp, Homo sapiens
aacatacttcaaaagaataagagccatctattacaaacccacagccaacatcacactgaatgggcaaaagctggaagcattccccttgcaaaccagaacaagacaaggatgccctctctcaccactcctattcaacrtagtactggaagtcctggccagagtaatcatgcaagataaagaaataaaaggcatccagctaggaaaagaggaaatcaaactattcctgtttgcagacaacatgattctatacctaaaaaatcccatagtctctgcccaaaagctccgtaagctaataaacaacttcaaagtttcaggatacaaaatcaatgtacaataatcagtagcattcttatacaccaaaaatattcaagctaagaaccaaatcagtaatgtaatcccattcacaatagcaacaaaaaagaataaaatacctagga

SEQ ID NO: 925671 - DNA, 614 bp, Homo sapiens
gcccacatatgtgtgagtttggctgtgttttttgaagtattggcttggttgaattgggactttaaaatgagaacattcttttgaaaagcaggagaatccatgtctttagaaacgcatccccacatagcaactatctgcagaggttgagtagatgctgcttcctgtacacacggcaggtcccagaagctccctcctgaccaaggctctcatttctgttcccagcctggaccccagagtgtggcaatctgtgactagcacagtgctagcctcagcagctctcccmctgtagattccctcctccttgcagctcagggcaggaatccacagggaataggccttcactgtgcacagggtctgcaggacacacagcactgggctgttctgtctgttgcaccagcctaaggatttccagttctcaccttcgctccagactgggctgtggctgagtccatccctctccctgcagcctgctctgcagcagcctggctgcttgtgatgtcagccctcggcactcagcacacagtttcttcctgcttagttactctgcccagggcaggtcatgcctttccctccaagaaaagaaagtcagtgcataaatccaatttgaacttaaa

SEQ ID NO: 925672 - DNA, 711 bp, Homo sapiens
atggttacacactgtcctcatttaattcaccagtatgtcccctacagaaaaccagacgtatgctagagaatgactgcaaattcaccaagtgatgtgtgagtagcccttacctcagcatctgtgccagatgtgggatcttggcagagcagattgacatggcctcaggaatctggtatgccacctctgatctggtggatgtattctttttcatcccattcaagaacacagaagcagttttcattcccatggggcaggtcccagtatgcatttactagtatgtgtatttcttgtcctagggccatgttaactgtaccacctctgttatgagggatcaaatggatatggatcatttggatattccactgagcataacattggtcctctgtattaatgacattgtgttaaccagaatgaataagtaagaagtggaatcagtaatcagtaagaatactttagagamcttggtaagatgcctgtgctccagagggtgggagatgaaccccatgaacctcatcactgagactatgaggtagtgtgttagtccatttgtgttgctataaggaatacctgagactgcgtaatttataaagaaaagaggtttatttggcttatggttcttcaggctgtacaagaagcatggccctagcatctgctcctggtgagggcctcagggagcttccactcatggtggaaggtgaagggggagcaggg

SEQ ID NO: 925673 - DNA, 598 bp, Homo sapiens
agacgtactgcaagcggcttgctgcaggcacaggcgtccgggacggggagatgcggtggcacccaaaagcttggagacgccagaaaccacagagcccccaaaagagtgttacatccctggcttggggagcccctaggtctgggttccctgaaaagccacaagtcttctctycttcttgtcgcacacagcgtgagttggacaggggagtgtttcagtcctgtttgtgttacagctctttcagtcccaccattcagcaggtcccaagttcttgtcccacatccaggaagaaggaggcacacacaactggagagctagctaggcacagaggagcttcactgagcggcagaacagctctcaggatacctgaagtgggtagctcatttccacgggcagatcatcctgaggagtctccagctttcagaagagaggagacttgtagtgggtagcccctttcagcagacaggttgtcctatggaggagactggatgtgggtagctccctccctctgctggtagtcctaatatctgtctgattctggcagagccgggggtttttatggactcaggagggaggacttgcgtgctgattggtccatggg

SEQ ID NO: 925674 - DNA, 596 bp, Homo sapiens
atgagcacttagaaactcaccagttactttcctgttaggtaatgagtaatgattcttgaatcatttaaaccacccagacctagtagtaaattcaacaacacagtcaagtcaaaccttctctttcatcactgcaaacaactttttgctttggtcatgattatcatggtgctaagaggagtacacttctgtgtctggccttcagtctacatgattagaagtttctccatatctgatataggcccttcccaaatttttgttagtctcattgccttcagtgaagsagattatctcagagcttctattagttagttcttgtactttaagatcatagttatagtggaatgagatctgtctgacaggtgagcagtaatcatcattgatgttctacctttgtagttcttaatcacttctaattttgttttcaggtcaatcacttgttgtagcttcttactggcaatattagcagtaggctttttatactcagaggccctgatgaacaaaacaaaatgagattaaatcaagcacaaaagaaaatgatgtaattaagagacacagtaaataggagaaatatgatcctgctgctagaataacatagc

SEQ ID NO: 925675 - DNA, 596 bp, Homo sapiens
atgagcacttagaaactcaccagttactttcctgttaggtaatgagtaatgattcttgaatcatttaaaccacccagacctagtagtaaattcaacaacacagtcaagtcaaaccttctctttcatcactgcaaacaactttttgctttggtcatgattatcatggtgctaagaggagtacacttctgtgtctggccttcagtctacatgattagaagtttctccatatctgatataggcccttcccaaatttttgttagtctcattgccttcagtgaaggagattatctcagagcttctattagttagttcttgtactttaagatcatagttatagtggaatgagatctgtctgacaggtgagcagtaatcatcattgatgttcyacctttgtagttcttaatcacttctaattttgttttcaggtcaatcacttgttgtagcttcttactggcaatattagcagtaggctttttatactcagaggccctgatgaacaaaacaaaatgagattaaatcaagcacaaaagaaaatgatgtaattaagagacacagtaaataggagaaatatgatcctgctgctagaataacatagc

SEQ ID NO: 925676 - DNA, 620 bp, Homo sapiens
ggcagggtctgaatcatcattgatacgtaaagacctgaagcatgatcatgggctcctgtgagaagcggaggacatggatgttaggcaataaatagattcctggccaaagaatggtttatagtgagtccactggtccatgggcccatacaggggtcatttttcctgtccaaaaatgtattattggtattattatacttggcagttgatgtaactccctcactaggtccttggcttttagamaagagttgtcataatggagaaggccaagtgtagggctcagaaattgctggctacgataagtaaatcaaaaacagtattacaccctgggggaatagtagagattaaagaggcaaggatgcagggatggtggtccctgtcatatctccattgaattccctagtctggtcctttcagaaactgaatggatcctagaaaatgactgaagactaccacaagtacaaccaagcaatgaccttgatcatatctgctgtgtccaacatagtgccattgtgggagcagataaatatggccttgggtttatggtacccaaccaccaatttggcaaatgcatgcttttcaatccccaatagaaaaggccatcagaaacagttcacattcaa

SEQ ID NO: 925677 - DNA, 590 bp, Homo sapiens
gaaattcgttaaggcagtcattaacccttaaagttccaaaatgatcttctttgattccatgtctcacatccagggcacgtgggtgcaagaagtaacttcccatggtcttggggagctctgctcctgtggctttgcagagtacagtccccttcctggctgctttcacaagctgtcattgaatgtctrcagcttttccaggtgtgctgtgcaagctgccggtggatctaccattctgggttctggaggatggtggcccacttctcacagctccactaggcagtgccctagtggggactctgtgtcaggactcccaccccacatatcccttctgcactgccctagcagaggttctccatgagggctctgcccctgcagtacacctctgcctggacattcaggcgtatccatacatcctctgaaatctatgtagaggttcccaaacctcaattcttgacttctgtgcatcctcaggctcaacaccacatggaagctgccaatgcttggggcatgcaccctctgaagccatgacctgggctgtactttgaccccttttagccatggctggagctgctagcatgcaaggcaccaag

SEQ ID NO: 925678 - DNA, 590 bp, Homo sapiens
gaaattcgttaaggcagtcattaacccttaaagttccaaaatgatcttctttgattccatgtctcacatccagggcacgtgggtgcaagaagtaacttcccatggtcttggggagctctgctcctgtggctttgcagagtacagtccccttcctggctgctttcacaagctgtcattgaatgtctacagcttttccaggtgtgctgtgcaagctgcmggtggatctaccattctgggttctggaggatggtggcccacttctcacagctccactaggcagtgccctagtggggactctgtgtcaggactcccaccccacatatcccttctgcactgccctagcagaggttctccatgagggctctgcccctgcagtacacctctgcctggacattcaggcgtatccatacatcctctgaaatctatgtagaggttcccaaacctcaattcttgacttctgtgcatcctcaggctcaacaccacatggaagctgccaatgcttggggcatgcaccctctgaagccatgacctgggctgtactttgaccccttttagccatggctggagctgctagcatgcaaggcaccaag

SEQ ID NO: 925679 - DNA, 590 bp, Homo sapiens
gaaattcgttaaggcagtcattaacccttaaagttccaaaatgatcttctttgattccatgtctcacatccagggcacgtgggtgcaagaagtaacttcccatggtcttggggagctctgctcctgtggctttgcagagtacagtccccttcctggctgctttcacaagctgtcattgaatgtctacagcttttccaggtgtgctgtgcaagctgccggtggatctaccattctgggttctggaggatggtggcccacttctcacagctccactaggcagtgcccyagtggggactctgtgtcaggactcccaccccacatatcccttctgcactgccctagcagaggttctccatgagggctctgcccctgcagtacacctctgcctggacattcaggcgtatccatacatcctctgaaatctatgtagaggttcccaaacctcaattcttgacttctgtgcatcctcaggctcaacaccacatggaagctgccaatgcttggggcatgcaccctctgaagccatgacctgggctgtactttgaccccttttagccatggctggagctgctagcatgcaaggcaccaag

SEQ ID NO: 925680 - DNA, 785 bp, Homo sapiens
tagttacttttcagaactgctgcagcagtacatatccagtgtaggtttgtgctaaacattattctagtggctaggatggaacaaaccaacaaaataccattgtttcaatgaccaggtacatacagaaaataaacaagtatggaatttaatttagatggcaataagtgctgttaagaaacataaaacatggtaggaggacagggactggcataatcataggggatatgttgattttaaatagtggggagggtctcctatttaaatggagtcctaaggtgaaggggcattaaacatttgagtatctgcagggaagagcattgcaggtggagggagcattcttggcctaataaatggcaagcaggtgaatgtgaactgttcaagaaccttgtattatcttgcaagttaaaagggttggtaaaaattggtaataggccaaggcaaaaaaaaaatcaactattttattctattaaaaaaggctcccatcttggttccagtttcctccaggcaaccagttagcatatcttaaaaatagacccatttcacatatttcatgtgtgtgagtctctgtgtgtgtgtgtgtgtgtgtgtgtatgtgtgtgtgtgattggccgactaatgcaaatttgagaagaggaaatgarcttaaattgtgcttatgttaacaacttaaaaacaatcattagacatatccatgtttaaaattctatggatagttcaactatactatttagccagtcttctttttcctaacttccccttctctcttcctgctcactttaaagcta

SEQ ID NO: 925681 - DNA, 772 bp, Homo sapiens
tattcagaatatataaagacctctcaaactcaataataagaaaataatccatttaaaaaggagaaaaagatttgaatagacacttcaaagaagatttatggatgacaaataagtatgtgacaagatgtttaacaccatttgccagcaaggaaatgaaaattaggaccataatgatatatcactacacactgattaaaatggctaaagttaaaaacaaatgaccatgccaagtgtcaatgaaaatatggaggaactggaactcccatagactctcacaataatagccccaaactggaaacaacaggtgaatgaataaacaaatggtggcacatcacacaaaagagtattactcagcaataaaaagaaattagctattggyatacacaacaacatgaataagtcttaatataattatgctgagtgagagaagcaagattttttaaaaatggcatatactatatggttccatttatacgaaatgtgagaaaatgccatttattctacagtgacagaaagcagatgagtcattacctgggacagggacatggtgggttaggagcaggaggaagaaaaggattacaaagggactaaataaacttttgggtatgatgaatatgtttattatcttaatttgtggtgatggtttcactggtgtacatatatatcaaaatgtatcaaatcatacattttaaatatgtgcagtttatccctgacggctcctaggagctcacagcagcatccaggtgtctgtctttccttttctgtggccaga

SEQ ID NO: 925682 - DNA, 772 bp, Homo sapiens
tattcagaatatataaagacctctcaaactcaataataagaaaataatccatttaaaaaggagaaaaagatttgaatagacacttcaaagaagatttatggatgacaaataagtatgtgacaagatgtttaacaccatttgccagcaaggaaatgaaaattaggaccataatgatatatcactacacactgattaaaatggctaaagttaaaaacaaatgaccatgccaagtgtcaatgaaaatatggaggaactggaactcccatagactctcacaataatagccccaaactggaaacaacaggtgaatgaataaacaaatggtggcacatcacacaaaagagtattactcagcaataaaaagaaattagctattggcatacacaacaacatgaataaktcttaatataattatgctgagtgagagaagcaagattttttaaaaatggcatatactatatggttccatttatacgaaatgtgagaaaatgccatttattctacagtgacagaaagcagatgagtcattacctgggacagggacatggtgggttaggagcaggaggaagaaaaggattacaaagggactaaataaacttttgggtatgatgaatatgtttattatcttaatttgtggtgatggtttcactggtgtacatatatatcaaaatgtatcaaatcatacattttaaatatgtgcagtttatccctgacggctcctaggagctcacagcagcatccaggtgtctgtctttccttttctgtggccaga

SEQ ID NO: 925683 - DNA, 772 bp, Homo sapiens
tattcagaatatataaagacctctcaaactcaataataagaaaataatccatttaaaaaggagaaaaagatttgaatagacacttcaaagaagatttatggatgacaaataagtatgtgacaagatgtttaacaccatttgccagcaaggaaatgaaaattaggaccataatgatatatcactacacactgattaaaatggctaaagttaaaaacaaatgaccatgccaagtgtcaatgaaaatatggaggaactggaactcccatagactctcacaataatagccccaaactggaaacaacaggtgaatgaataaacaaatggtggcacatcacacaaaagagtattactcagcaataaaaagaaattagctattggcatacacaacaacatgaataagtcttaatataattatgctgagtgagagaagcaagattttttaaaaatggcatatactatatggttccatttatacgaaatgtgagaaaatgccatttattctacagtgacagaaagcagatgagtcattacctgggacagggacatggtgggttaggagcaggaggaagaaaaggattacaaagggactaaataaacttttgggtatgatgaatatgtttattatsttaatttgtggtgatggtttcactggtgtacatatatatcaaaatgtatcaaatcatacattttaaatatgtgcagtttatccctgacggctcctaggagctcacagcagcatccaggtgtctgtctttccttttctgtggccaga

SEQ ID NO: 925684 - DNA, 584 bp, Homo sapiens
tatgaatatatatgaatgtatatatgtatgtgtatatatatgtgtgtgtctgcacacatatgcttgtatgtgtgtgtgtttgtgtgtgtgtgtgtgtgtgtatgtatgaagttaaattagctgatctcaccctgtgcttcrgtaagcagttctagagttctggaaacactttcaataacgggaggattattagactgaatggagagcttccagagcaggcttctgtgaagggaacaacacgtatctgaatgtccatgtttggtaaactaactcctgatacgagctacatgcccatgagtgccggtgcgcaggctgaatgcacagctgctgcttggttgtttatgtgtgcgctgtctaggccacttggcagcccctggctgtctcctcagtccctgtcagatcccccaccagctgcccacctcaagtgactcaggaaagcacactcaggagagaaacccactttaataacacctcatccattccaaagccgagcaaaatcaattacgatttatctggtctgatgggtaagacctttatggagaagcagttaaggcctcaggtcctggcatcaaataaactggcta

SEQ ID NO: 925685 - DNA, 618 bp, Homo sapiens
ggagaaccactgctctctttgaagctgtcagacagggacatttaagtccgcagaggttactgctgtctttttgtttgtctgtgccctgcccccagaggtggagcctacagaggcaggcaggcctccttgagctgtggtgggctccacccagttcaagcttccctgctgctttgtttacctaagcaagcctgggcaatggtgggcgcccctcccccagcctcgctgccgccttgcagtttgatctcagactgctgtgctagcaatcagcgagactccttggagtaggaccctcggagccaggtgcggcatgtaatctcgtggtgcgccattttttaagcccgtcggaaaagcgcagtattcgggtgggwgtgaccctattctccaggtgccgtccatcacccctttctttgattaggaaagggaactccctgaccccttgcgcttcccgagtcaggcaatgcctcgccctgctttggctcgtgcacggtgcgcgcacccactgacctgcgcccactgtctggcactccctagtgagatgaacccagtacctcagatggaaatgcagaaatcacctgtcttctgtgtcgtcaggctgagagctgtagactggagctgttc

SEQ ID NO: 925686 - DNA, 713 bp, Homo sapiens
gatgctgaggtctggggtatggatgagcctgtcactctggtagtgagcatagtatgtgataggtagtttttcagcccatgcccccatttgccaaccccttctagtcatctccagtgtctgttgttaacatctttttttgttttttgagacagagtctcactctgtcgcccaggctggagtgcagtggcgcaatcttggcccactgcaacctctccgcctcccgggttcaagcaactctcctgcctcagcctcctgagtagctgggactacaggtgcccaccaccacgcctggctaatttttgtatttttagtagagacggggttttgccatgttggccaggctggtcttcaactcctgaccttatgatctgcccgcctaggcctcccaaagttatggcattacaggtgtgagccactgcacctggcytttttttttttttttttttcccttgagaaagggtcttgctttcaccctgactggaaggcagtggcatgatcatggctcactgcagccttgaccttctgggctcaagtgattttcccacctcagccttccacgtagctgggaccatgggcatgtaccaccacacctggctaactttgattttttgtagatacaaggtctatgttgcccaggctggtcttgaactcctgggctcaagcagtcctcttgcctcagcctcccaagtgctggcattacaggcattagccac

SEQ ID NO: 925687 - DNA, 713 bp, Homo sapiens
gatgctgaggtctggggtatggatgagcctgtcactctggtagtgagcatagtatgtgataggtagtttttcagcccatgcccccatttgccaaccccttctagtcatctccagtgtctgttgttaacatctttttttgttttttgagacagagtctcactctgtcgcccaggctggagtgcagtggcgcaatcttggcccactgcaacctctccgcctcccgggttcaagcaactctcctgcctcagcctcctgagtagctgggactacaggtgcccaccaccacgcctggctaatttttgtatttttagtagagacggggttttgccatgttggccaggctggtcttcaactcctgaccttatgatctgcccgcctaggcctcccaaagttatggcattacaggtgtgagccactgcacctggcctttttttttttttttttttcccttgagaaagggtcttgctttcaccctgactggaaggcagtggcatgatcatggctcactgcagccttgaccttctgggctcaagtgatyttcccacctcagccttccacgtagctgggaccatgggcatgtaccaccacacctggctaactttgattttttgtagatacaaggtctatgttgcccaggctggtcttgaactcctgggctcaagcagtcctcttgcctcagcctcccaagtgctggcattacaggcattagccac

SEQ ID NO: 925688 - DNA, 643 bp, Homo sapiens
ttcagctctgtagagaaggggaaggtcttagttaagacttcttggttgcaaaagcaacccactcaactagttcaagtcaagcagaaaaaagaaagaagggtttttgtagatactgggttttgtacagaccaccaaaagatgggagctggagtgggagtcaggacccatgactgctctttgttttttggggtctctcatctctgcttctctgaggttctccttcattctctctttctgagcttcaccaggcatgaccatctggccctagccttacatcacttcttttttttttttttttttttttttgagacagagtctttctctgtcacccagtctggagtgcagtggtgcratcttggctcactgcaagctccgcctcccgggttcacgccattctcctgcctcagcctcctgagtagctgggactacaggcacccaccaccacgcccggctaatttttgtatttttagtagagatggggtttcactgtgttagccaggatggtctcgatctcctgacgtcgtgatctgcccgcctcggcctcccaaagtgctgggattacaggtgtgagccaccatgcccggccatcacttcacaattctagcccctaccggacaaggcccagtgcttccaggcctcaatt

SEQ ID NO: 925689 - DNA, 736 bp, Homo sapiens
ggagacaatcagtcatttactgtacacatcagtgcaggactgagggaaggcttttagaagatgtgggactccaccttttcaaagggtcaaagggcagacaatttcacaataaagggcagagagacttggacctcaaggttatgggagaaaacctgctatctgatcagagtgcaaattgctccaaggattggctgtcaatcacagaagaataagtagaccattatattttactgtctgctccttgcatagactaaattagagcagtttgtgtactttttatcactttctttgtactttatgttgttaaaaaaatgaatatggcatatatccagttttgccatcagagcttcaaatacaaagaatattgacagaatatttttaataatttttttaaaaatcttccctggctatataagagataaagctgttttgttgaaccatacaaatagaaattacaggaattagccataaaaatatggatactgcctacttaaagcttacatatttttacaagtaaatgatagagcagggtttaaatgcaggtctgtccaaactcataccgcatagaaaattgtgaaaattaaatacaaygaactctaaaaactaacttagggcagtgcctggcatgcaataagcacccaataaagaacacgcacacgcacatttcatttctgcatttgtccacagggccctactcactgtatactccgcactccatggactttaaatacagcta

SEQ ID NO: 925690 - DNA, 757 bp, Homo sapiens
cacattttgatagttcttggcaatatttcaaactttatcataattattgtatctattacggtgatcagcaatctttgatgttactattgtagtagttttggggtgccatgaactgtgcccatgtgagatggtgaacttaattgatatgtgttgtgtatgttctgattactgctctgatcgtctctgcctgctcaggctgccctaggccctgagacacaacaatattgaaatcaggccaattaataaccctacaatgtcttctaaatgttcaagtgacacttggacgtctctcactttaaatcaaaagctagaaatgattaagcttagtgaggaaggcaggcgtgtcagaagctgagataggctgcacggtaggcctcttggaccaaacacttagccaagttgtgactgcaaaggaaaagttcttgaaattaagtgttactccagtgaacacaaatgattagaaagccttattgctgataggaaaaaaactttgctctaggtagaagatcaagccagccaaaatactcccttaagcccaggcttaatacagagcaaggccctctgttcaactctgtgaatgctgagagaggtgaggaagcagcagaakaaaagtttaaagctagcagagttcagctcatgaggtttaagggaagaagctgtctccataatataaaagtgcaaggtgaaacagcaagtgatgatgtagaatctgcagcaagttatccagaagtccagaagatatagctaagatgagttt

SEQ ID NO: 925691 - DNA, 660 bp, Homo sapiens
gggcagagggccaggcagaacagagaggaggaatcagaggtgaaggctcggcagtcttcctgggttggaggcaattaacctggcacctctcagggcaccaggattatgagccctccccaggtccttgttctgagagggaggagcctttctgcaaggaaggtcccaagtggggaatgaatttccatccccgcccactgagacaaccagagactcccccaagggcagcagaaaacagggggctgtccctgatcccctaagaccacagatgccytctagctggactggccggccaaacgcacaccatgtcccagcgagctagtgctgaagcatagggaaccgaggttagactgtaggaagaacttcctggtgtgaagaaaactctgctgctcatgggtggaggaaggagcctcacatctctcctctcactccaccctcagtgtaaacatggggctcctgcttgtcaaaacggaggcaaggtggggtgagcagatacctgcccccccaacgctccctctcacactcacaaggcagggcagaaaccctcttgacctccatccctactgaacctgtttggctgtgagtacagcagagagcaggattaaggttggcttcaagcagaacctaccagtacagatatgcaggggaatggcagcccgcaaa

SEQ ID NO: 925692 - DNA, 501 bp, Homo sapiens
agtgtaaaatgattgagcaactttggaaaacagtttggcaatttcttatgaagttaaacatgcacttatcaaatgatgcagcaattccactcctgggtatttgctcaaaagaaataaaagcagatctatacagagacttgtacatgaattttatagaagctttatttataatagccctaaattggaaacaacccaaatgtgtaccagcagatgaatggataaacaaattgagatatagtcatrcaataaaatatcattcagcaacaaaaaataatgaactagattcattcagtggtgattagattggagcatacatctgtcaaaatttgttgaactgtacttttagaatgtgtgcgctttattgagatacaattgtatgcaaattatatgtcaattaagttgataaaataatgatttaaaatgcataagatacttagaaataaatctaacacatatgtgaaagacttacacctagagaaatataagcgttacacaaaatgt

SEQ ID NO: 925693 - DNA, 622 bp, Homo sapiens
tatcttttgacaccatgatggtggtgccactcagttaatgtcaggttggggcagatgtccaagttccgttaataccctgggggagggtacctcattactgctgggcagggctgggaggtcaggctccccatgtggccttcactgacaccatgggtggtagagggagctctagttaccaccggktgttggtggaagctctggctgcacactcgctcttctctcacaccatcccagcagtaaaggggcacactttgttatagacttctgatgagatggaagtctgagctttctacttggcctttgtacctgatggaagcatggccttagctttttccatgttgtatggccagagtaaggaaggcattgtccaaaagtttttgtcttactgggcagccctttcctggttttttgactacagagaacggactattagggagattttcttaaatctccaccattggtgtttctggattactagctcctctatcaccccgtatagggtatgtatacaaggcaaacagaaaaaccaggaaactcattgctatgtgtttcttagagcccaaggccccacactagcctgccctcttctctccacctttcagtcttcttgcttattattata

SEQ ID NO: 925694 - DNA, 593 bp, Homo sapiens
aatgtcaggttggggcagatgtccaagttccgttaataccctgggggagggtacctcattactgctgggcagggctgggaggtcaggctccccatgtggccttcactgacaccatgggtggtagagggagctctagttaccaccggttgttggtggaagctctggctgcacactcgctcttctctcacaccatcccagcagtaaaggggcacactttgttatagacttctgatgaratggaagtctgagctttctacttggcctttgtacctgatggaagcatggccttagctttttccatgttgtatggccagagtaaggaaggcattgtccaaaagtttttgtcttactgggcagccctttcctggttttttgactacagagaacggactattagggagattttcttaaatctccaccattggtgtttctggattactagctcctctatcaccccgtatagggtatgtatacaaggcaaacagaaaaaccaggaaactcattgctatgtgtttcttagagcccaaggccccacactagcctgccctcttctctccacctttcagtcttcttgcttattattatataatgtc

SEQ ID NO: 925695 - DNA, 622 bp, Homo sapiens
tatcttttgacaccatgatggtggtgccactcagttaatgtcaggttggggcagatgtccaagttccgttaataccctgggggagggtacctcattactgctgggcagggctgggaggtcaggctccccatgtggccttcactgacaccatgggtggtagagggagctctagttaccaccggttgttggtggaagctctggctgcacactcgctcttctctcacaccatcccagcagtaaaggggcacactttgttatagacttctgatgagatggaagtctgagctttctacttggcctttgtacctgatggaagcatggccttagctttttccatgttgtatggccagagtaaggaaggcattgtccaaaagtttttgtcttactgggcagccctttcctggttttttgrctacagagaacggactattagggagattttcttaaatctccaccattggtgtttctggattactagctcctctatcaccccgtatagggtatgtatacaaggcaaacagaaaaaccaggaaactcattgctatgtgtttcttagagcccaaggccccacactagcctgccctcttctctccacctttcagtcttcttgcttattattata

SEQ ID NO: 925696 - DNA, 505 bp, Homo sapiens
gagcaaggtgagacagcaagcatgttcacagcaccttcactaggagtagatttcatctcgaggaaccactttctttgctcatccataagaagcaactcctcatctgtttaatttttttaatgagattgcagcaattcagtcacatcatcagcctccacttgtaattctacttctcttgttatttccaccacatctgcaattacttcctccaatgaagttttaaacccgtcagtgtcattcatgagggktgaaataaatttcttccaaactcctggtaatgttgataatgcatatagagatacacagttactatatatgtttccagttatccagaagacctagctaagataaccgatgaaggtggctacagtaagcaacaaattttcagtgttgacaaaacagcattctattttaaaaagttgccatccaagactttcattgttgtagagatgacagtgcctggcttaaaagcttcaaaggacaggctgattttcttggcaggaga

SEQ ID NO: 925697 - DNA, 555 bp, Homo sapiens
tggcgaagtctcaggatacaaaatcaatgtgcaaaaattgcaagcatttctatgcgccataatagacaaacagagagccaaatcatgggtgaactcccattcacaattgtacaaagagaataaaatacctagaaatacaacttacaagacacatgaaggacctcttcaaggagaactacaaaccactgctcaaggaaataagggaggasataaacaaatggaaaaacattccatgctcacggataggaagaatcaatgttgtgaaagtggccatactacccaaagtaattgatagattcaatgctatccccatcaagctactgttgactttcttcccagaattagcaaaaacttctttaaatttcatatggaaccaaaatgagctcatataaccaagacaattctaagcaagaagaacaaagctggaggcatcactctacctgactttaaactatactacaaggctacagcaaccaaaacagcatggtactggtaccaaaacatatatatagaccaatggaacagaacagaggcctcagaaataatgccacacat

SEQ ID NO: 925698 - DNA, 555 bp, Homo sapiens
tggcgaagtctcaggatacaaaatcaatgtgcaaaaattgcaagcatttctatgcgccataatagacaaacagagagccaaatcatgggtgaactcccattcacaattgtacaaagagaataaaatacctagaaatacaacttacaagacacatgaaggacctcttcaaggagaactacaaaccactgctcaaggaaataagggaggagataaacaaatggaaaaacattccatgctcacggataggaagaatcaatrttgtgaaagtggccatactacccaaagtaattgatagattcaatgctatccccatcaagctactgttgactttcttcccagaattagcaaaaacttctttaaatttcatatggaaccaaaatgagctcatataaccaagacaattctaagcaagaagaacaaagctggaggcatcactctacctgactttaaactatactacaaggctacagcaaccaaaacagcatggtactggtaccaaaacatatatatagaccaatggaacagaacagaggcctcagaaataatgccacacat

SEQ ID NO: 925699 - DNA, 763 bp, Homo sapiens
aaaatatacagtttgaagtttttatgtaaggaaaaaggtcgaaaacaatatagaataagacaagaaaaattaaaacagtagaaaataatgaaatagaagatagacaattgagaatatatattttaaaaaatttgttctttgaaaaaataaaattgctaaacgtatagttaggttaatcaagaaaaatagagtgaaaaaatagattacaatattaggaacgaaagtggacttactacctcagatcctacagatgttaaaaagataacaagggtacattatgaaaagctgcatgccaataaatttgacatctctgataaaatggggaagttttttgaaagacatatattatcagaactgacacacaaggaaacagaaaatctgaatatctttatatgttaaagaaatttaatttgtaattacatttccatgaagaaaaccaattccaggtccagatagttatcctatcaatcatttaaaaagaaaaaaaaatatacacaaaaactcaggaagtagaggaagacggaacattttcccactcattttttaaaagtccagcatatccccaatatgaatgtcttatgaagaatttacaagaaaacrtaactacctactcatgtccgttatcaatatacacacaagtatccttagaaaaatatttttatttttattgttttcctttttatttgtataaaattataaggtacatgtgcaactttgttatgtacatagattgcatagtggtcaggtcggggcttttagaata

SEQ ID NO: 925700 - DNA, 605 bp, Homo sapiens
tccatgatgcccacctgagctgcaaaacgagcaggtttttattaaggactttaaaggtggggggtgtacaaacagggagtaggtcacaaagatcacatgcttctgaggccaataaagatcacaaggcaaggggcaaagcaaagatcacaaggcaaagggcaaaattagaattactgatgagggtctatattcaactgtgcacgtattgtcttgataaacatcttaaacaacagaaaacagggttggagagcagagaactggtccaacctcaaattgaccagggcgggattttttccccaccctagtaagcctgagggtactgcaggagaccagggcatatttcagtccttatctcaaccacgtaagacagacactcccagagtggctgtttatagacctctccccaggaatgcaattcttttcccagagtattaattatcaayattccttgctaggaaaagaatttagcaatatctctcctatttgcacgtccatttataggctctctacaagaagaaaaatatggctctttttgcctgacccacaggcagtcagaccttatggttgtcttcccttgttccctaaaatcgctgttattctgttca

SEQ ID NO: 925701 - DNA, 622 bp, Homo sapiens
cattgtgcacactaaattaagctgacggagtccctgccctgtggaacctttcgttcattcacctactcatttcacaaatatttgctgagagtcctactgtgtgccccacactgccaacaaggcagatagggagcttagaacctagtctgtgacacaggcaacaacagatgacagatccataaacaattaaggcatttcagttaagatatttcagatagtgacaattactatgaagaaaatagaagaagataatgagaaggaaagtggctgggtgcaragcatgccattttaaaataagttcttgctagttgaatggatgaatagtaaattccatgtgacctgaaaggggatatacttaggccatttattgtttctgactctgccttccacagggtaagactgaactttcttacccattgtgagcaattctggccaaggagtagtgagcagaattgacatgtcatttctggccttcatgttggaattctagtgagaaaccctccagaggtcattctctcttctggcctgctgctgatcagtgctatgtgtagaggctgccacgttggcctggtctggatgatgctgagattgagcatgatctcaggttgacctgtgatgaaca

SEQ ID NO: 925702 - DNA, 825 bp, Homo sapiens
ttccgacctactcctccctccccggcttaattcccacctataccaaagtggccccacgcgggcagaagcgaaagacggaaatgaggggaggccaactactcgagatctgcgcccgaagcagattttccacgcgctcagagtagggtcggggaaaggcccacttggggcttctgagagagagggaagggcagggaaagggctgccccccagcaagacacagttgggtgaacaactgagtctttgcctcgttgacaaaggagaatgagggactcgcgccaggctggcttgaactgactggagaaaagcgacttctgtaattcagggccctcckcgtgcgaaggaaactttggcaaagcagaaagacaggcatgcagtttccaggcggaaaaacgtgaaccatgggacatgatgggctccagggccgtggatgcagttgcccgaggccccagggccgcccccggaaggccgggactgccagggactcggcgtgggggtgctgactgccgctccaggcctcggggttcaagcactccagcagcatccgctcaccacgctccccgcccacttccatgatcacgagggggcaaggctagccaatccggggtggccactgcccggccctgcgaggactcgaggcgcactgggaaactgcgcggtgcctagaggtacaaagaacaggtcctgggagggtagtaggaggggaccttagcacagcctatgtcagtttgtcaacaaggatttgctgagaagtcgcactgtgctcagcatagcggcactgcctacctaatgggctttggggcatagacagtgaataacctggcagtg

SEQ ID NO: 925703 - DNA, 618 bp, Homo sapiens
tcttattgtctcacttactttccctttcctcttattctttcttctctaaaaatgtactcttctccctaacctccagaaaaatattggcccatgaacttcacccaaggctctgttttccagggaatgcaggccaaaacacaaatcttagttcaacatgttcaatacgtttgctgcttaaataaaaaactaatatttgtttctcattggcaaatatatacctactttatttcctaatatacgttttctcacgagatagtggcagtgtgcgcgtgtgtgtgtgtgtgtgtgtgtgtgtgtgtgtgtgttttgagacagagtctcgctctgttgcccaggctggggtgcagtggcacgatctcggctcactgcaagctctgcctccggggttcacgccattctcccgcctcagcctccagagtagctgggactacagrtgcccgccaccacacctggctaatttttgtatttttagtagagacggggtttcaccgtgttagccaggatggtctcgatctcctgacctcgtgatccgcccaccttggcctcccaaagtgctgggattacaggcatgagccactgcgcccagtcgtttatttcctgcttgatgattaaactaaa

SEQ ID NO: 925704 - DNA, 674 bp, Homo sapiens
tgaaaagatagcagaaaatgtggaagcaactttggaactgggtaacaggcagaggttggaacagtttggagagctcagaagaagacaggaaaatgtgggaaagtttggatcttccaagagacttattgattggctttgaccaaaatgctgataattatatggacagtgaaatccaggctgatgtgatctcagatggagatgaggaactggagcaaaggtgactcttactatgttttaacaacaaaactggcggaattttgaccctaccctagagatctgtggaactttgaacttgagggagataatttagggtatctggtggaagacatttctaagcagcaaarcattcaagaggtgacttgggtgctgttaaaggcattcagttttaaaagggaaacagcataaaagtttggaaaatttgtagcctgacaatgtgatagaaaagaaaatctcattttctgaggagaaatgcaagctggctgcagaaatttgtataagtaatgagaagctgaatattaatccccaagacaatggagaaaatgtccccagggcatgtcagagacctttgtgggagcccctcccatcacaggctcagaggcctaggaagaaaaaatggtttcatgagctgggcccagggtccccatgctgtgtgcagcctaggaacttggtgccct

SEQ ID NO: 925705 - DNA, 605 bp, Homo sapiens
tcacttaaaattacagttgacccttgaacagtgctggggttaggggcactgaaccccagcccactcccactgtgccccacagtcaggaatccaagtgtaactttttttttttttttgagatggagtcttgctctgtcacccaggctggagtgcaatggtgtgatcttggctcactgcaacctctgcctcccaggttcatgggattacaggcgcgccgccacacccagctaatttttgtatttttagtagagacggggtttcacagtgatggccaggctagtctcaaactcctgacctcagatgatccacccacctcggcccgccaaagtgctgggattacaggcatggaccactgcacctggccccaagtataacttgactccccaaaagcttaactactactagcctactgttcactggaagcttcaccaataacatgattggtcaataactatatatrtatatatatatatatatataaagctctttaccctcatcatcctcactttgggctgaggaggaagaagaggggttgatcttgtttgggtagcagaggcagaaaaaaacctgtgtacaagtggacctgtgcatttcaagcccctttt

SEQ ID NO: 925706 - DNA, 566 bp, Homo sapiens
cagtgctaagcccctcactgcccggggctggccggcccgccactccaagtgtggggtgccaagcccatgcccatccggaattctagctggcctgcaagcgccacgcgcagccccggttctcgcccgtgcctctccctccacacctcctcgcgagctgagggagccggctctggccctggccatcccaggaaggggctcccacagtgcagtggtggctgaagggctcctcaagtgcagccagagtgggtgccgaggccctctaggaggcgccaagagcgagcgagggctgcgagggctgccagcacgctgtcacctctcaatttcaaagtttttgaatttattgagacttgttttatggccaatcatgtgttcaatcttaggttgtgttctgtgcacagatgagaaggatgtatatcctrtggttggtgggtggagtattctgtagatgtctattaagtccaattgatcgagtgttgaatttaagtccagaatttccctatttttctgcctttataatttgtctaatgctgtcagtggcatgttgaagtccccaactattattgtgt

SEQ ID NO: 925707 - DNA, 625 bp, Homo sapiens
taactgttattccaggtagctctcctactagatggagaatttccttatgattagataccttgtgcctttatattttgtctgcagtagcatctatctaatacaataccttgaatatagtaggtcctaaataaatgtctttggaatgaacaaataaatgttcattgtattgtgctagccacggtagaaatatacacaagwcctcagtccccaaggaatttatcttgtaggtggaaacataaattatttacaaatgtactgttagtaactatgcaaagtcaagcatgattctaagttcaacagtacaaaaagaaggataaggtaggtgagatcagcaacccagctaagagtacttttgatcagcagcctaccctctatctgaagtagttctaatagatactttccagtttttaggaaggtagaacaaaatggtagaaatagactattcctcaagtttgacagatacggacagtagttttgtttggtgccattgaatgccaagcatcagcattttcaaatctaaaataaggatagtaattcatatctcgcaaggattttttttgaaggggtattagagataacataagtaaagtgttttacatttcctggtcacttaacaaacctcagc

SEQ ID NO: 925708 - DNA, 443 bp, Homo sapiens
tgctcagtgggcaagggacagagagaagggctcaccaggtgtgcacacttgcacaggtaaggacagcagcttgaggggctccattctgaatctatgagctgctcacatttgcccagtgggcccggggaatacacactcacaagtaagtgtgccagctggagaggctcagttatggactgggtgcttatgtctcccacaaattcacrtgttgaattttacccccaaggttatagtattaagaggtgagacctggaaggtgattaggtcaggatggtgcagcccttatagaagatgctccaggagctctctctgctctccatcatgggaggacacggtgagaggatggccctccacaaggcaggaaatgagctctcaccagacaccatctgccaggcgcttcattttggacttcccactctccagaactgtgagaattaagtgct

SEQ ID NO: 925709 - DNA, 443 bp, Homo sapiens
tgctcagtgggcaagggacagagagaagggctcaccaggtgtgcacacttgcacaggtaaggacagcagcttgaggggctccattctgaatctatgagctgctcacatttgcccagtgggcccggggaatacacactcacaagtaagtgtgccagctggagaggctcagttatggactgggtgcttatgtctcccacaaattcacgtgttgaattttacccccaaggttatagtattaagaggtgagacctggaaggtgattaggtcaggatggtgcagcccttatagaagatgcyccaggagctctctctgctctccatcatgggaggacacggtgagaggatggccctccacaaggcaggaaatgagctctcaccagacaccatctgccaggcgcttcattttggacttcccactctccagaactgtgagaattaagtgct

SEQ ID NO: 925710 - DNA, 754 bp, Homo sapiens
cttcttcccaatccaaagcctcctttgtgtcctcctcttgtatccccccaccttaacccacaagtataagacacctctactccctccttggtgaccgatcatgcaccccttaccatctcattaaaacctaatcacccttacccygctcaatgccaaaatcccatcccacagcatgcttgaaaggattaaagcctcttatcactggcctgctacagcatggccttttaaagcctataatctctccttacaattcccccatttcacctgtgctaaaaccagacaagccttataagttagttcaggatctatgccttatcaaccaaattgttttgcctatccaccccatggtgccaaacccatatactctcctatcctcaatacctccctccacaatccattattctgttcttgatctcaaacatgctttctttgctattcctttgcacccttcatcccagcctctcttcactttcacttggactgaccctgacaaccatcaggctcagcaaattacctgggttgtactgctgcaaagcttaacagacagaccccattacttcagtcaagcccaaatttcttcgttatctgttacctatctcagcataattctcataaaaacacacgtgctctccctgctgatcatgtctgactaatctctcaaaccccaaccccttctacaaaacaacaacttctttccttcctgggcatggttggatacttttgcctttggatacctggttttgccatcctaaca

SEQ ID NO: 925711 - DNA, 809 bp, Homo sapiens
ctatccaccccatggtgccaaacccatatactctcctatcctcaatacctccctccacaatccattattctgttcttgatctcaaacatgctttctttgctattcctttgcacccttcatcccagcctctcttcactttcacttggactgaccctgacaaccatcaggctcagcaaattacctgggttgtactgctgcaaagcttaacagacagaccccattacttcagtcaagcccaaatttcttcgttatctgttacctatctcagcataattctcataaaaacacacgtgctctccctgctgatcatgtctgactaatctctcaaaccccaaccccttctacaaaacaacaacttctttccttcctgggcatggttggatacttttgcctttggatacctggttttgccatcctaacaaaaccattatataaactcacaaaaggaaacctagctgaccccatagatcctaaatccttccccactcctctttctgttccttgaagacagctttagagactgcccccaccccagctctccctgactcatcccaacccttttcattacacacaaccaaagtkcagggctgtgcagtcagaatacttacacaaggactgggatcacgtcctgtagcctttttgtccaaacaacttgaccttactgttttaggctggccatcatgtctccatgcagtggctactgccatcctaatacttttagaggcccttaaaatcacaaactatgctcaactcactctctacagctctcataatttctaaaatctgttttcttcctcacacctgatgca

SEQ ID NO: 925712 - DNA, 620 bp, Homo sapiens
aaataaggaaacagataatttgaagaacattatacaccaattcaacctgagagacattgacataactctccgccccccaacagaatacacattttctcaactgcacatgaaacattcttcaagacagaccatatattaggccacaaaacaagtcttgataaatgtaaaagtttgacaccataaaaatatattttccaactacagtctakatcataataactagacatcaatagcagtataaaaagtgaaaaaagcctgaggcgagaggatcacttaagtctagaagtttgagaccagcctgagcaacatggtgagactctgtctctaccaaaaaaacaaaaaacaaaaaggctgggccgaggtgggcagatcacttgaggtcaggagttcaagaccagcctggccaacatggtgaaaccccggctctactaaaaatataaaattattcgggcgtggtggtgcatgcctataatcccagctacttgggaggctaaggcaggagaatctcttgaacctgggaggcagaggttgcagtgagccgagatcacgtcattgcactccagcctgggcaacaagagggaaactccgtctcaaaaaaaaaaaagtatatatttgctagt

SEQ ID NO: 925713 - DNA, 788 bp, Homo sapiens
ggggacctggagaatttttctgtctagctaaaggattgtaaacgcaccaatcagcgctctgtgtctagttaaaggattgtaaatgcacaagtcagcactccgtaaaaatgcaccaatcagcactctgtgtgtagctaaaggattgtaaatgggccaatcagcactctgtaaaatggaccaatcagcaggatgtaggtggggccaaataagggaataaaagctggcyacccaatccagcagcagcaactggcttgggtccccttccgtgctgtggaagctttgttcttttgctcttcacagtatatcttgctgctgctcactctttgggtcctcactacctttatgagctgtaacactcactgcgagggtctgcagcttctgtcctgaagttagcgagactatgaacccaccgggaggaacaaacaactccggatgcaccacctttaagagctgtaacactcactgcaaaggtctgcggcttcactcctgaagtcagtgagaccatgacccactggaaggaagaaactccggacacatctgaacatctgaaggaacaaactctggacacaccatctttaagaactgtagcactcaccatgagggtccacagcttcattcttgaagtcagtgagaccaagaaccgaccagaaggaaccaattccggacacaggcctgtccaataagagtgtgctgaagggcatccccagaggcttcatgatggaaacagcagatgatgccaactgagatcatacatagtggccatgatcctccccatcaggagaaaaaca

SEQ ID NO: 925714 - DNA, 788 bp, Homo sapiens
ggggacctggagaatttttctgtctagctaaaggattgtaaacgcaccaatcagcgctctgtgtctagttaaaggattgtaaatgcacaagtcagcactccgtaaaaatgcaccaatcagcactctgtgtgtagctaaaggattgtaaatgggccaatcagcactctgtaaaatggaccaatcagcaggatgtaggtggggccaaataagggaataaaagctggccacccaatccagcagsagcaactggcttgggtccccttccgtgctgtggaagctttgttcttttgctcttcacagtatatcttgctgctgctcactctttgggtcctcactacctttatgagctgtaacactcactgcgagggtctgcagcttctgtcctgaagttagcgagactatgaacccaccgggaggaacaaacaactccggatgcaccacctttaagagctgtaacactcactgcaaaggtctgcggcttcactcctgaagtcagtgagaccatgacccactggaaggaagaaactccggacacatctgaacatctgaaggaacaaactctggacacaccatctttaagaactgtagcactcaccatgagggtccacagcttcattcttgaagtcagtgagaccaagaaccgaccagaaggaaccaattccggacacaggcctgtccaataagagtgtgctgaagggcatccccagaggcttcatgatggaaacagcagatgatgccaactgagatcatacatagtggccatgatcctccccatcaggagaaaaaca

SEQ ID NO: 925715 - DNA, 637 bp, Homo sapiens
aggattgtaaacgcaccaatcagcgctctgtgtctagttaaaggattgtaaatgcacaagtcagcactccgtaaaaatgcaccaatcagcactctgtgtgtagctaaaggattgtaaatgggccaatcagcactctgtaaaatggaccaatcagcaggatgtaggtggggccaaataagggaataaaagctggccacccaatccagcagcagcaactggcttgggtccccttccgtgctgtggaagctttgttcttttgctcttcacagtatatcttgctgctgctcactctttgggtcctcactacctttatgagctgtaacactcactgcgagggtctgcrgcttctgtcctgaagttagcgagactatgaacccaccgggaggaacaaacaactccggatgcaccacctttaagagctgtaacactcactgcaaaggtctgcggcttcactcctgaagtcagtgagaccatgacccactggaaggaagaaactccggacacatctgaacatctgaaggaacaaactctggacacaccatctttaagaactgtagcactcaccatgagggtccacagcttcattcttgaagtcagtgagaccaagaaccgaccagaaggaaccaattccggacac

SEQ ID NO: 925716 - DNA, 588 bp, Homo sapiens
  misc_feature 474, 508, 551, 552: n = A,T,C or G
gctggaaaccaccagaagctaagaaggagattttacctgaaagcctctcaaagaaatcaatcatactcacacctcctttttgaatttctggcctcgtgaatggtgaaaaaataaatttctgtcgtcttaagccccacggtttgtagtcatttgttctgttcctagccttaggaaactaacacagcatgctaagggaaaagaagaaaattctgcataaaatgtcattttactttttaaaacaactactgttgacagtaaatgagtattcttccaagattcatatgcagaacatatatgcagcccggaacattttttgggacccatggcataagtgattatgatmgataaaatccaaatattaacctgccaaaagagttattttatcttttgcagtcatttaaaggtaataagcagaggtcatgagccctataaaaattaatctattcatttgttgtcacttgatacttacgatcncgtgacatatttaggttttaattctttgtacagnatatggttcgtcttgcactgtaattttattgcacaacaaattnnttatttatatatctaaggtggttcttaaatgtgata

SEQ ID NO: 925717 - DNA, 588 bp, Homo sapiens
  misc_feature 474, 508, 551, 552: n = A,T,C or G
gctggaaaccaccagaagctaagaaggagattttacctgaaagcctctcaaagaaatcaatcatactcacacctcctttttgaatttctggcctcgtgaatggtgaaaaaataaatttctgtcgtcttaagccccacggtttgtagtcatttgttctgttcctagccttaggaaactaacacagcatgctaagggaaaagaagaaaattctgcataaaatgtcattttactttttaaaacaactactgttgacagtaaatgagtattcttccaagattcatatgcagaacatatatgcagcccggaacattttttgggacccatggcataagtgattatgatcgataaaatccaaatattaacctgccaaaagagttattttatcttttgcagtcatttaaaggtaataagcagaggtcatgagccctrtaaaaattaatctattcatttgttgtcacttgatacttacgatcncgtgacatatttaggttttaattctttgtacagnatatggttcgtcttgcactgtaattttattgcacaacaaattnnttatttatatatctaaggtggttcttaaatgtgata

SEQ ID NO: 925718 - DNA, 712 bp, Homo sapiens
ttcttaggggctaacatagctggtgatgactttaaagtgaagccgttgtttgtttaccatcccagaaatgctacagcccttaagaattatgttcaatctactctgcctgtgctctgtacacttaacagcaaagcctggaagacatctgtttacagcatgatttgctgaatatttgaagcccactgtggagacctactgctcagaaaaaaaagaattctttcaaaatattatttctttttgacaacacacctggttactcaagagctccgatggagatgtacaaggagaggaatgttgttttcacgcctgccaacacagcatgcattgtgaagcccgtggttcaaggagcgattttgactttcaagtcttattagttaagaaatacattttgtaaggctaaagctgtcatagatagtgattcttctgacggatctgtgcaaagtaaatggaaagcgttgtggaaaggagttaccattctagataccattaagaacattcatgaggaggtcagaatatcaacatyaacaggagtttggaagaaattgattccaaccaccctggatgactttgaggggttcaagccttcagtggagaaaggaacggcagatgtggcagaactcgcaagaaaactagaattagaagtggagcctgaagatgtgaccgaattgcaataagctcatgagaaaacgcgaacaggtgaggagttgatttt

SEQ ID NO: 925719 - DNA, 613 bp, Homo sapiens
atatttgtccttttgtgatcggcttattttgctcagcacagtgtcctcagggtccatccatgttgtggcatgtgtctgaatttcctttcaaggctgaataacactccattgtgtggatggactccattttatcaatgcacgcatttgtggatggacacttggtttgcctccmccttttcactattgtgagtaatgctgccgtgaacatgggggtacacatgcctctcccttcttttgttcttttgggtatatacccagaagtggaattgctggatcatatggtcattctgtgtttaatgttttgaggaactgaggaacgttcttttttgggatggggagacagtgtggctgtgtttgctcatgggtgggaggactgagtagagacagagtggaggcaggggaggggataacccctggagcgggccctggaggagccagtggtgctgggattcaggaaaaggagggagagcgatgatggcagccctgaggcagaggatggtgacagtggaagaggcagggaggccccttgtcatcctgggcccagccgaccctgtggtgagaggcaggacgggaaccacaggtgaattgagtatgattgaggaacaggaacaca

SEQ ID NO: 925720 - DNA, 815 bp, Homo sapiens
atcggaccacaggctgaggaggggacagagcagagacccctccctcttaaggggacaccagcactgccaccctaccccacacaaggagataaaggaaaatcttgagtcctttcaggggaacttccaggtacccagctaggcctgagaagtaaatgagcagcttgataagcaagaaggtaatagtaacataaaacaatagccaaggaagttagagtcagatgtttggttccctatagaaactgaagataagatcttcacgtatgtccctgagttgtttttcagcaccacactctaaccaactgagctaaccggccaccgaccctgagcttttcaaaaacctggacccccaccacatggagtctgctggcacatagactccagagaacggggagctgagcactgaactstgacctcttgctgttctttgatctacatttcttcctgaggggcctgaaagaagccacatccacaggccagaccttaacattcctttctgctgaccccaagtttttagacaaagtctagattccttaatcaatggcaaatcagagagtctttgaatctacctatgacccagaagtgcacccacttcaagacatcccacgtttttaggccaaaccaatgtgtagcccctgtatattgatttatgattgtacttgtaacttctgctttcctgaaatgtacccctgtctttaagaagccttgtttgtaagccactggggaggttgggtctcaagtatgagctgtccccattctccttgcttggtgccctgcaaataagtgccctctcttctcctgctgcaaaacctcagtgt

SEQ ID NO: 925721 - DNA, 815 bp, Homo sapiens
atcggaccacaggctgaggaggggacagagcagagacccctccctcttaaggggacaccagcactgccaccctaccccacacaaggagataaaggaaaatcttgagtcctttcaggggaacttccaggtacccagctaggcctgagaagtaaatgagcagcttgataagcaagaaggtaatagtaacataaaacaatagccaaggaagttagagtcagatgtttggttccctatagaaactgaagataagatcttcacgtatgtccctgagttgtttttcagcaccacactctaaccaactgagctaaccggccaccgaccctgagcttttcaaaaacctggacccccaccacatggagtctgctggcacatagactccagagaacggggagctgagcactgaactctgacctcttgctgttctttgatctacatttcttcctgaggggcctgaaagaagccacayccacaggccagaccttaacattcctttctgctgaccccaagtttttagacaaagtctagattccttaatcaatggcaaatcagagagtctttgaatctacctatgacccagaagtgcacccacttcaagacatcccacgtttttaggccaaaccaatgtgtagcccctgtatattgatttatgattgtacttgtaacttctgctttcctgaaatgtacccctgtctttaagaagccttgtttgtaagccactggggaggttgggtctcaagtatgagctgtccccattctccttgcttggtgccctgcaaataagtgccctctcttctcctgctgcaaaacctcagtgt

SEQ ID NO: 925722 - DNA, 734 bp, Homo sapiens
tgagcttttcaaaaacctggacccccaccacatggagtctgctggcacatagactccagagaacggggagctgagcactgaactctgacctcttgctgttctttgatctacatttcttcctgaggggcctgaaagaagccacatccacaggccagaccttaacattcctttctgctgaccccaagtttttagacaaagtctagattccttaatcaatggcaaatcagagagtctttgaatctacctatgacccagaagtgcacccacttcaagacatcccacgtttttaggccaaaccaatgtgtagcccctgtatattgatttatgattgtacttgtaacttctgctttcctgaaatgtacccctgtctttaagaagccttgtttgtaagccactggggaggttgggtctcaagtatgagctgtccccattctccttgcttggtgccctgcaaataartgccctctcttctcctgctgcaaaacctcagtgtggatgtttggctttactgcacttggcaagcagaccccagtccagtgtggtagcaagggctcaatccccaagactgctccccaacttccaatgtcaatcaaaagccccaggttgtttcacctctgcttctggccaactagcttgaaattgggttcccatggccacatccttgggtttaacttgctagagtggctcacggaacttagggagacacttacttatatttactggtttatcacaag

SEQ ID NO: 925723 - DNA, 550 bp, Homo sapiens
gatgggagtttcgctcttgtcacccaggctggagtgcaatggcgtgatctcagctcactgcaactgccacctcctgtgattcaccttcaagtgattctcctgcctcagtctcccgagtagctggtacaggtgtgtgccaccatgcctggctaccacctttctaatttattaaaaatacatggttgaggcttactgagtaggtcaagttcatttctaaagtttatttcctcccaattaaagtggttagcaactggakattgacgtgctagaccagccagatgtcaatattattggttgtttacttacccaacattctaaaaacctcaaatcactttctaaaacttaactttataaactttataattttgccatataaatagaaactaacacaaactgaagaattattaaaatctagctaaataaagctgtttgccaaaggcagagtctgaggcccactgttcttgaggaggaggttggcaagtcccagaggggacctgttaaagtcacaccaacaccagacagacgctcttcttggcctcagaggctgagg

SEQ ID NO: 925724 - DNA, 752 bp, Homo sapiens
  misc_feature 418: n = A,T,C or G
agcgcagccaatcagaggctcgccctggactccgtcccgggctggggggcgtggctggagggcgtggcgggcggtacccggcgtctctgcctgccgcctttgcttgcgcggctgtgtagggggttgtggcgggccggagcagtccccgagctgacttaacattctctaaaaataccccattctttgaacttcgacgacctgggttggcctgctcactctgtgtccctgcgctcctctgcttctctgctccttcggtcttgtgtgctggggacacgtgggcctttccagttmcctgcagccacctttggtctgtaggaaggcagtggcgcagggagcggtgggagcccgggtctgcagggctcaaggtggcgacggcgacaggtctgccccacccgccacccccacccgcagaatgcantcgccagtgcagcccgggtcgtggccccccaacagacccagtcccgccgcgacacggcagcagcacctcttcgccgcgacacgcagcagcacctcttcggccctttgagctcttccctccttatttctcagtctcatgctacactgcgattcttttatttatttgctattttaggcagtatccgccggctctctaccatggacactcagtgaggatttggttctcttaggtatgaaccctgtgcttcacctcctgtgagccccaagactcatttcatcagttttgggatgcatcagtatttggtgtttacagtattatggttatgtaaatattg

SEQ ID NO: 925725 - DNA, 619 bp, Homo sapiens
ctgatgacaagaactgtggcatcatccaggtgtttgttagaaatgcagtttcaggccctgtcccatctctgctaaagccaactgcatttgttttttgtttttgttcgtttgtttttgagatggcttctcgctctgttgcccaggctggaagctcggctcactgcaagctccgcctcccaggttcatgccattctcctgcctcagcctcccgagtagctgggattacaggcacccgccaccacatcctgctaattttttttttttgtatttttagtagagacggggtttcaccatgttagccaggatggtctcgataaaatgacctcgttatctgcccrcctcagtctcccaaagtgctgggattacaggcgtgagccaccgcacctggccagccaactgcattttaacaagatcctcaggtaattcagatatatgaaagtttgagaagcactgttctaaagaagataggtgattatttgcctttgtgtaccagagtggagaattttgtaatagtcaaaaatattgcaagtttttaacttattcatccagtaattgtccttttaactgcttactccatgccatgatctatgtgagatgctatcagggaacctgcccccga

SEQ ID NO: 925726 - DNA, 622 bp, Homo sapiens
aggtgctttaggttgttagtcccggaggctgacacaggctatttcatgtaatggggtttatggacagacaaggcaatacgaagacagaaacctcatggggatctgggagcagccagactgtcaggaaagaacaggaagagaaatgcagccagcatcctggagactgggatgaaggtcatttgggatcagtggcagctccgaggagccaggtgtccttgccaccccaacagctaggctgcatcctggtccttaccgatgagtgaacacatctgtggcagcttgaccaggtggctgttgggttgcgtgcaacacgagggcaggaactctgtcccattccttactgtgtccccagtgcctggcatgcagcaggtgctccaggatgttggcgtacatgaaacttgccacttcctctcttgggytcttcccctgtattctgaggttagttccgattcacatctgcctgtcagggcaacagcacttacattcttctgcaaagcctccttgcatcccaggaagtggacaggtggggacagccacagtcatcctggaggctcctgcttcctctccaccaagcccaagcccctagagtttcctgggcagacccaggatgccaggacgctgt

SEQ ID NO: 925727 - DNA, 600 bp, Homo sapiens
atcgagtggtttctgtgtaccaggcattgtgctaaatccttgccttaaacccgctcagcaacactaaaaagtagatgtggtaggcagaatcatactcccttctcccaaaagataggcacatcctaattcctggagccctrcatggcaaaaggggctttgaagatgtaattaagttaaggatttggggctggggggtttattattatcataacttgggtgtgtctttaaagcggaagaggggtcagagaaggagatgtgatgacaggatggtcagagagatgctgtgctgcaggcttggcagacagaggttaagggaccatgcgccaaggaatgtgagcagcctctagaagctggaaaaagcaggggaaatgattccccccgaagcctccagaaggaacgcagacctgctgacgccttgcttttagccccatgagacccatggcggacttctaacctatggaattgtaagattataaatttgtgttgtttcaagccattaaatttgcgacaacatgttacagcagcaatgaaaaacaaatacagtaggcaatgctatcctgctactttataggtgaagaaatgggagctcagagacggaca

SEQ ID NO: 925728 - DNA, 632 bp, Homo sapiens
cttaattgagagtttaatgttcttccctaagtattttgggatagggctttccaaatattttaggtgctacctagaagtttcataaacaaaattcacccttagtacatactacgaacttacacatatatgacacacacacacagagttgacttctgaactaaatggcatgggtacacttatacatgacttttttttcaaccaaatgcatggagagaaaatacagtatttataggatgcaaaacttgcatatacagacagccaacttttcatacatacaggttctgcaggactgtctacaggacttgtatatacatggattttggtatactggcacaagttgggggtgtcctagaaccaatcccccacatataccaagggatgactgtaatagtttaaataaatataaatatatttatatatacttaaatggcaattatgacccactaatttcatgatgcattaataggtttwaaaaacacacttatgggccaggcatggtggctcatgcctataatcccagcactttgggaggctgaggtgggcaaatcacctgaggtcaggagtttgagaccagcctggccaacatggtgaaacctcatctctactaaaaatacaaaaattagctgggcatg

SEQ ID NO: 925729 - DNA, 623 bp, Homo sapiens
aagtggccttgcagacagatctgctagtgtctctccctgcgttgtcctcaagatgaaggaaacactgagagatacctggtttttggtgtggtgtgctcgtcttctagaagagtggtttttttctgcagggggagttgattttggatgctagcaggtcttggcccacctccaaattcactggggattmaggatctacagaaaaataacacggaaccatgcagcccaagcatagccacacacacaggccaccaaaagttagtgaggctaaaaacaagaagcactgaagtgtgttagccctattcctttaagcagaccccacttacaggcacacacacacacacaaaatgccacacacactcgacgtcaaacactcgcaacacacccacggaaacacacagcatggcagatcccgaggttgcatggttctgcaggaggccccacctgagagacagcaaccccagggaacacaggcaggctgtacctagaaatcacattggcgtaagtttcaaaacccatacaacctctagggtggcctgaggaattctgcagatccttttggatccttagagattttgcagtttatttgtggggctgtggttgatgtttcttcaggctgactccca

SEQ ID NO: 925730 - DNA, 623 bp, Homo sapiens
aagtggccttgcagacagatctgctagtgtctctccctgcgttgtcctcaagatgaaggaaacactgagagatacctggtttttggtgtggtgtgctcgtcttctagaagagtggtttttttctgcagggggagttgattttggatgctagcaggtcttggcccacctccaaattcactggggattcaggatctacmgaaaaataacacggaaccatgcagcccaagcatagccacacacacaggccaccaaaagttagtgaggctaaaaacaagaagcactgaagtgtgttagccctattcctttaagcagaccccacttacaggcacacacacacacacaaaatgccacacacactcgacgtcaaacactcgcaacacacccacggaaacacacagcatggcagatcccgaggttgcatggttctgcaggaggccccacctgagagacagcaaccccagggaacacaggcaggctgtacctagaaatcacattggcgtaagtttcaaaacccatacaacctctagggtggcctgaggaattctgcagatccttttggatccttagagattttgcagtttatttgtggggctgtggttgatgtttcttcaggctgactccca

SEQ ID NO: 925731 - DNA, 623 bp, Homo sapiens
aagtggccttgcagacagatctgctagtgtctctccctgcgttgtcctcaagatgaaggaaacactgagagatacctggtttttggtgtggtgtgctcgtcttctagaagagtggtttttttctgcagggggagttgattttggatgctagcaggtcttggcccacctccaaattcactggggattcaggatctacagaaaaataacacggaaccatgcagcccaagcatagccacacacacaggccaccaaaagttagtgaggctaaaaacaagaagcactgaagtgtgttagccctattcctttaagcagaccccacttacaggcacacacacacacacaaaatgccacacacactcgacgtcaaacactcgcaacacamccacggaaacacacagcatggcagatcccgaggttgcatggttctgcaggaggccccacctgagagacagcaaccccagggaacacaggcaggctgtacctagaaatcacattggcgtaagtttcaaaacccatacaacctctagggtggcctgaggaattctgcagatccttttggatccttagagattttgcagtttatttgtggggctgtggttgatgtttcttcaggctgactccca

SEQ ID NO: 925732 - DNA, 716 bp, Homo sapiens
aaatgttgtggctggttagatcttctattcaaaccactcagactttctccatatcagcaataagtctgttttcctatcttataatgcatgtcttcactggactggcatttttcacttccttcaagaatatttgttttttgggccgggcgcagtggttcacgtctgtaatcccagcattttgggaggccgaggcaggcagatcacaaggtctagagtttgacaccagcctggccaagtggtgaaaccccgtstctacttaaaatacaaaaattagctgggtgtggtagcaggcacctgtaatcccagctactcaggaggctgaggcaggagaatcatttgaacccaggagtcggggcttgcagtgagccaagatcccaccattgcactccagcctgggtgacagggtgagactccgtctctctctctctctctctctctctctctctctctctatatatatatatatatatatatagagagagagagagagagagagagagagagagagataacttgatacaagaggcctagcttttggcctctctcagtttttgacatgctttcatcactaaagttaatcatttctagcttttgatttaaagtgagagacgtgcaacctcttcttttacttgaaaatgtagagaccattgcagggtaattacttagcttaattttaatattgtagtgtctcggggaataggaaggccttaggagag

SEQ ID NO: 925733 - DNA, 669 bp, Homo sapiens
agggacttggaaggaacatgattggaaaattggtgacaaagaatttggagaagaggtatgtagatggacctccctgaatggactacaaaagtgaaaataattgtgtctcatgataatgttcaccaaagaatgacctcaagagaaaaactgaataatcaagtggattggatgacccattctctggatattagtcagtctcttttcccagccttgccattactttataaactcatgagcaaagtggccatgaaggcaaggatggaggttaggtatgggctcagcaacatggaattttactcaccaggctagcctggttatgccaaacrtggaatgccgaatgtgtcagcagcagagaccaagagtaaaacttcaatatggcaccatcccctggtgtgatcagccagcagcctgatggcaggtaaattacactggactgcttccattatgggaggggcatcattgtgtccttcctggaataggctctctggatctggatttgtcttccaagcattcagtgtttctgccaaaactaccatccatagacttatagaatgcttttttacactgccattttattccacacagcattgcttttaaccggggtacttatgccacagccaaagaagggtgtcagtggagtcaggcttatgaaatttcctggtcctacaa

SEQ ID NO: 925734 - DNA, 669 bp, Homo sapiens
agggacttggaaggaacatgattggaaaattggtgacaaagaatttggagaagaggtatgtagatggacctccctgaatggactacaaaagtgaaaataattgtgtctcatgataatgttcaccaaagaatgacctcaagagaaaaactgaataatcaagtggattggatgacccattctctggatattagtcagtctcttttcccagccttgccattactttataaactcatgagcaaagtggccatgaaggcaaggatggaggttaggtatgggctcagcaacatggaattttactcaccaggctagcctggttatgccaaacatggaatgccgaatgtgtcagcagcagagaccaagartaaaacttcaatatggcaccatcccctggtgtgatcagccagcagcctgatggcaggtaaattacactggactgcttccattatgggaggggcatcattgtgtccttcctggaataggctctctggatctggatttgtcttccaagcattcagtgtttctgccaaaactaccatccatagacttatagaatgcttttttacactgccattttattccacacagcattgcttttaaccggggtacttatgccacagccaaagaagggtgtcagtggagtcaggcttatgaaatttcctggtcctacaa

SEQ ID NO: 925735 - DNA, 631 bp, Homo sapiens
atataagggtagaatggcctttagaagactgagttacagtgtcagctaggtacaatattttgcagggctggttcagggttttccaaaaggctgtatattctctgaatcagtgtccaatacatggtgtctgtttcacccatagccaggaatcacgagttcagaaatcaaaggatgataaatgggagtggcattactattatccctagcgactcctagcaaaattyttgttttctcttcctgtagctttatgttttgctgtcctataaatattaactccagaggaaaaaatacttccactagaagacacaataataattctattgaacttgaagttaagactgccagtcacattgggttcctcaagcctctgagtccacaggccatgaagggagttatggtattgactagggtcccaagaagttcctaagtcccaagaagtaattgaactactactccataatggaggtaagaaagagtgtgtttggaatacaggagacctcttttaggtggtctctaagtatgatcatgtcttgtaattaaggtcaatgaaaaactacaacaactcaatctaggcaaaactatgagtggcccagaatcttcagggatgaatgtttcagttttgccaccaggt

SEQ ID NO: 925736 - DNA, 631 bp, Homo sapiens
atataagggtagaatggcctttagaagactgagttacagtgtcagctaggtacaatattttgcagggctggttcagggttttccaaaaggctgtatattctctgaatcagtgtccaatacatggtgtctgtttcacccatagccaggaatcacgagttcagaaatcaaaggatgataaatgggagtggcattactattatccctagcgactcctagcaaaattcttgttttctsttcctgtagctttatgttttgctgtcctataaatattaactccagaggaaaaaatacttccactagaagacacaataataattctattgaacttgaagttaagactgccagtcacattgggttcctcaagcctctgagtccacaggccatgaagggagttatggtattgactagggtcccaagaagttcctaagtcccaagaagtaattgaactactactccataatggaggtaagaaagagtgtgtttggaatacaggagacctcttttaggtggtctctaagtatgatcatgtcttgtaattaaggtcaatgaaaaactacaacaactcaatctaggcaaaactatgagtggcccagaatcttcagggatgaatgtttcagttttgccaccaggt

SEQ ID NO: 925737 - DNA, 631 bp, Homo sapiens
atataagggtagaatggcctttagaagactgagttacagtgtcagctaggtacaatattttgcagggctggttcagggttttccaaaaggctgtatattctctgaatcagtgtccaatacatggtgtctgtttcacccatagccaggaatcacgagttcagaaatcaaaggatgataaatgggagtggcattactattatccctagcgactcctagcaaaattcttgttttctcttcctgtagctttatgttttgctgtcstataaatattaactccagaggaaaaaatacttccactagaagacacaataataattctattgaacttgaagttaagactgccagtcacattgggttcctcaagcctctgagtccacaggccatgaagggagttatggtattgactagggtcccaagaagttcctaagtcccaagaagtaattgaactactactccataatggaggtaagaaagagtgtgtttggaatacaggagacctcttttaggtggtctctaagtatgatcatgtcttgtaattaaggtcaatgaaaaactacaacaactcaatctaggcaaaactatgagtggcccagaatcttcagggatgaatgtttcagttttgccaccaggt

SEQ ID NO: 925738 - DNA, 603 bp, Homo sapiens
cccacatcttcctgtcttcttctgagccctgaaaactgttccaatctctgcctgttacccagttccaaagttgcttccacattttcaggttatcttatggcagtaccccactctctgctctaccaatttcctatattagtctgttatcacactgctataaagatactgcctgagactgggtaatttataaaggaaagaagtttaattggctcacagttccacatggctggggaggcctcaggaaacttgcagttatggcagaaggggaagcaggcacctttttcccgtggtggcaggagagagagagagggragctctgggaaactgacattataaaaccatcagatcttgagagaactcactcactatcacaagaatggcatgggggaaactgcctccatgatccaatcacctgccaccaggtagattcctccctcaacacctggggattacaattcaaaatgagatttgagtggggacacaaagccaaaccatatcacccaggctggtctcaaactcttagactcaagttatcctcccaccccaatttcccaaagtgctgggattgtatgtgtaagcactgcacccagccttagttacttt

SEQ ID NO: 925739 - DNA, 538 bp, Homo sapiens
tgagaccatcctggccaacataatgaaaccccgtctctactaaaaatacaaaaattagctgggcttggcagtgggtacctgtaatcccagctactcaggaggctgaggcaggagaattgcttgaactcgggaggtggaggttgcagggggccgagatcatgccattgcactccagcctgggcgacagagcaagacgctgtctcaaaaaaaaaaaaaaaaaaaaggggggggtgctaaggacatgaatagacaattgtcaaaagaaaatacagaaatggccaacaaacatatgaagaaagactccacatcactaattatcagagaaatgcaaattaaaactataatataataccctcttactcctgcaagaatggccataatcaaaaaatcaaaamatactacatgttggtgtggatgtggtgaaagggaccactttacactgctggtgggaatggaaactagtacaaccactatggagaacagcggggagattccttaaaggactaaaagtagatctaccatttgatccagcaaaacc

SEQ ID NO: 925740 - DNA, 660 bp, Homo sapiens
gaaggctgaggcagagaattccttgaacccaggaggcagaggttgcagtgagtcaagactgctccactccactccagcctgcgtgacacagacagactccatctcaaaaattaaaaaaaaaaaaaaaaaaaaaatgaaatgaagaggaactagaaaaaaggaaaccaattacaaaaagagaacaaaagcacttttaatactcctttcatcacgttccatatagtaacagagtcagtcacttcttaccctacttctctcccccactcccgaccccagccatgaaaagggaagagggtgatccacaacaaatgagtcaagtcactgtcctctggctgaagaggggttgcagagggaagctgcctctgacgccatcattataaaatgmaccacacttagacacaggagtttggcaactctcattctcatctgtataatttaaactaattttaaatttgttaccttataaacagagaaaacaacatgtcatcacttcatcatcacatccaatcaactcaccactcatctgcacccagggtccctcttcgtcttcattactgcttccctccatcattctatacatagccctttctcactttctctctccatctgtttcttttctgcatttccccctgggcttctgctcattttatacccctctcc

SEQ ID NO: 925741 - DNA, 658 bp, Homo sapiens
cggagagaattgctgagcctggggtcccaagccagcctgggcgacaaagtaacacccactgcggcaggtctcccttcctagtctctctctctctctttccctttttttttttttggagacagagtctcactccgtcgcccaggctggagtgccgtggagtgatcccagctcactacaacttccgcctcctggtttcaagcgattctccggcctcagctcccgagtagctgggactacaggcatgcgccaccatgcccagttaattttgtatatttagtagagacagggtttcaccatgttagccaggctgaactcccgacctcaggtgatccgcccacgtcggcctcccaaagtgctgggattacaggcgtgagccaccgcgcccgggccttttcccttttttwaaaaaaaaaaaaaacttttttaaataaaatttttgatggtgtgacatagggatccaacattactcttttccatgtggatatccagttagttgtcccagcacatttgtggaagagatctattactttattattattattattattactattattgagacacagtatttctgttgcccaggctggagtgcagtggcgagatctcaactcaatgcagcctctgcctcctgggttcaagcgattctcctgcctcagcc

SEQ ID NO: 925742 - DNA, 580 bp, Homo sapiens
ctatatgtcctgcatccaattgctcttttactagctgctgaagttgagtttgtttctcctgtgttaggggccattgatcgacccatacaggtgttttgctgagccattctaatggtaaggcagttggcagaggagaaatatcaatgacccccatcagaaatcctgatgtcctagcccttttctatctgtttttccagttwctcatatcgggttaggagttccttgtaggaatttccctaaacttttcccactctgatatcccatattcttcaacattttaaatcctgggttatcaaattttcacttgtaagtctgctatcccatgccgtaagtctcagccccataaattgatagctatatttgcaacatagagctgaaaagtatatgactgtccacccagaccaagacaaagtaaaatctcagcactctgtcaaacactttgaactgctcctactcccactagggatgtggaggttagtctgagaggccatggtaggggccggtccttactggttattactgacacatcagctcctgtgtccattagcccataaaatttcttttctttaatttgtattac

SEQ ID NO: 925743 - DNA, 687 bp, Homo sapiens
gtaatcttcttcctttcctacatccttgtattcccgagtcctggcaaccacaacagagtgccacccagggtgtcaaagcagatttcacccatgttaacaggaggtacaagggtgagaatatctgctcttacccacatacaccccacctcccctgctgtcagtagcctttgaattccctagacctcatttatgccatggatactagcatgatctttatccatgaaacacaaagcttggcttaatcggcaggaattagtcatgctcacctgctctatgccttttaacttccattatcatctgcctctggatccctcagatctacttctctttcctagggctttcacctgaagcttggaattgagtttgggccaaaaatgtgttttgggggtgttgtatggactccttctcataagccaaatgctaaggtgaagctgtggaawtgagtcctcccccaacaagggagagaaaaggatctcttgtgacgtgcccagatatctggtggctatagtcatgttgttaagatttgcatgcgtggagcttgactttggttagctcccttggtcttactttcccaaaaaggaaacctccaggtaatgtgcaccctatttatatccataaactggcaagatttgcaggatagttgctcagaactagaatattgatccagatttttacattaacaatccc

SEQ ID NO: 925744 - DNA, 687 bp, Homo sapiens
gtaatcttcttcctttcctacatccttgtattcccgagtcctggcaaccacaacagagtgccacccagggtgtcaaagcagatttcacccatgttaacaggaggtacaagggtgagaatatctgctcttacccacatacaccccacctcccctgctgtcagtagcctttgaattccctagacctcatttatgccatggatactagcatgatctttatccatgaaacacaaagcttggcttaatcggcaggaattagtcatgctcacctgctctatgccttttaacttccattatcatctgcctctggatccctcagatctacttctctttcctagggctttcacctgaagcttggaattgagtttgggccaaaaatgtgttttgggggtgttgtatggactccttctcataagccaaatgctaaggtgaagctgtggaattgagtcctcccccaacaagggagagaaaaggatctcttgtgacgtgcccagatatctggtggctatagtcaygttgttaagatttgcatgcgtggagcttgactttggttagctcccttggtcttactttcccaaaaaggaaacctccaggtaatgtgcaccctatttatatccataaactggcaagatttgcaggatagttgctcagaactagaatattgatccagatttttacattaacaatccc

SEQ ID NO: 925745 - DNA, 604 bp, Homo sapiens
atatatgtaaaaatattttttttttccaaatagagtcacattaacagtttctgggggttagaaaataaatgtatgtttttggggaccaccattcattccactacagcagggcccccaaccccagggccaaggaccggagcctgtcaagaaccaggmcacacagcacgaggtgaacattgagtgagcgagcaaagcctcatctgtatgtacagtcactccccattgctggcattaccacctgagttctgcctcctgtcagatcagtggcagcattagactttcagagaagcacaaaccctattgtgaactgtgtatgcaagggatataggttgcatgctccttgagaatctaatgcctagtgacctaaggtggagctgaggtggtgatgttagcactggggagtggctgcaaatacagattaacattagcagagaggtttgactacacagagaccatcataaatcaattgcttacagactcatatcaaaacacaataagtgtgtggcaagtgacaagctgcatctggtagcaggctttatattggcaagtgagttgatgtacttcaattgtctgttgcatctggtggcaggctttaagtcacaat

SEQ ID NO: 925746 - DNA, 604 bp, Homo sapiens
atatatgtaaaaatattttttttttccaaatagagtcacattaacagtttctgggggttagaaaataaatgtatgtttttggggaccaccattcattccactacagcagggcccccaaccccagggccaaggaccggagcctgtcaagaaccaggccacacagcacgaggtgaacattgagtgagcgagcaaagcctcatctgtatgtacagtcactccccattgctggcattaccacctgagttctgcctcctgtcagatcagtggcagcattagactttcagagaagcacaaaccctattgtgaactgtgtatgcaagggatataggttgcatgctccttgagaatctaatgcctagtgacctaaggtggagctgaggtggtgatgttagcactggggagtggctrcaaatacagattaacattagcagagaggtttgactacacagagaccatcataaatcaattgcttacagactcatatcaaaacacaataagtgtgtggcaagtgacaagctgcatctggtagcaggctttatattggcaagtgagttgatgtacttcaattgtctgttgcatctggtggcaggctttaagtcacaat

SEQ ID NO: 925747 - DNA, 861 bp, Homo sapiens
  misc_feature 42: n = A,T,C or G
atctgcctggtttgaattccagcttcaccgccaactagctgnggtgacctgggcaagtcacttgttcatgggtgcttagtttcccatctgcaaaatgaaagtcataacagtactcagcttacagaatggcctcaaggtgtcttagtgtcagagcctccaacaaataggagaaattcgtgcttactgctaggagcaatggagcagaggctagaggagcatcttttttttttttttttttttttgagagccagtttcactctccccccaggctggaatacattggtgcaatctcagctcactgcaacctccgcctcccaggttcaagcaattctcctgcctcagatttctgagttagctgagactacaggtgtgcaccaccacccctagctattttttgtgtgtgtgtgttattggtagagatggggttttgccatgttgaccaggctggtctcaaactcctcacctcaagtgattcacctgcctcggcctcccaaagtactgggattacaggtgtgagccaccacgcccagtcctaggggcamcttcttctccaggccatcactaagtcgtatatggatggtgaggacagaagcaactaacccagtcccagaggaggaggccttttaactcacactccagcagagcaggggtctgcatacattttcttaaagggctggatagaaatattttaagcttttcagaccagaaagtttctattgcaactattcactctgctattgtatcaggaaagcagccatggacaatacacaaatggacaggtatggctgtgtttcaataaaactttatttataaaaaacacaggcagttgtttgctgacctgctggggtgggagccttgctg

SEQ ID NO: 925748 - DNA, 578 bp, Homo sapiens
tggcgggtgcctgtaaccccagctacttgggaggctgagacatgagaatcgcttcaacctgggagatggtggttgtggggagccgagattgtgccactgcactccagcctgggtggctgagcaagactccatctcaagaaaaaataaacaaataaaataaaaataaaaaataaatgaataatttaaagaaataaaaataggggccaggcatggtggctcatgcctgtaatcccastactttgggaggccgaggtgggcggatcacttgaggttaggagtttgagaacagcctgtccaacatggtgtaaccccatctctactaaaaatacaattatcagccaggcatgatgtcatgtgcctgtagtcctagctactaagaggaggctgaggcaggaggatcacttgaacctgggaggtggaggttgcagtgagccaagatagcaacactgcactccagcctgggcagaggaatgagactccatctcaaaaaaaaaaaaaagaaagaaaagaaataaaaatgctccctgcagaacatgggaaggcgcagttactgtcaagaataggaacagcctcacttg

SEQ ID NO: 925749 - DNA, 578 bp, Homo sapiens
gttctcgaagcctcggtcataagcatagatggttccagggttagttgaagacttgagatgagtggatgcgcacaaattgaggggtgcttctctacctctcctctttctcaggttctccaccacactttggagatcctggttgccccaagaccccttttcctgattgctgagtcctgtagccagaaagatggccatattttctctaggggtttagctatccagagctgccccmgtgaggctgccttcagagaaagctaccaagaaacaggaaacttagtccatatgggttgcttgctcaattaactttccatttctttccagaatctacctgcttttcttcagtttccagagtgctcaggtagttgtagtttgtccagagtttacggctgacacttggagcaactgaggagccatttgttaagagttacttctgccatactggaagcagacgcctcactacagctctctttttctttcctcctctcctttctcctcaattgattgccctcttttcctctatagctctcttcctctctcctttcctgtcattccccttctacttccctgtctctgaagtt

SEQ ID NO: 925750 - DNA, 578 bp, Homo sapiens
gttctcgaagcctcggtcataagcatagatggttccagggttagttgaagacttgagatgagtggatgcgcacaaattgaggggtgcttctctacctctcctctttctcaggttctccaccacactttggagatcctggttgccccaagaccccttttcctgattgctgagtcctgtagccagaaagatggccatattttctctaggggtttagctatccagagctgccccagtgaggctgccttcagagaaagctaccaagaaacaggaaacttagtccatatgggttgcttgctcaattaactttccatttctttccagaatctacctgcttttcttcagtttccagagtgctcaggtagttgtagtttgtccagagtttacggctgacacttgsagcaactgaggagccatttgttaagagttacttctgccatactggaagcagacgcctcactacagctctctttttctttcctcctctcctttctcctcaattgattgccctcttttcctctatagctctcttcctctctcctttcctgtcattccccttctacttccctgtctctgaagtt

SEQ ID NO: 925751 - DNA, 613 bp, Homo sapiens
gatatgggaaagtttgcaactttgtagagacttgttgaatgactttgactaaatgcagctcatctcagatggagatgaggaacttgttgggaactggaataaaggtgactcttgttatgttttagcaaagaggctggtgaaattttgcccctgccctagagagtcatggaactttgaacttgagagaggtgatttaggacatctggtggaaaaaaatttctaagcagtaaagcattcaagatgtgacttgggtgctgttaaaagcattcagttttatgtattctcaaagatatggtttggaaktggaacttatgtttaaaacagaagcagagtataaaaattcagaaaatgtgcagcctgatgatgtgatagaaaaaaaaaaaaaacatcttctgaggagaagttcaagctggctgcagaaatttgcctaatgaggagcgaaatgttaattgccaagacaatggggaaaatgtctccagggcatgtcagagaccctccaagcagcccctcccatcacagcactggagggctgggagaaaaaaattgttttgtgggcctggccagccccccgctgctgtgtgcagccgagggacttggtgttctgcatcccaac

SEQ ID NO: 925752 - DNA, 637 bp, Homo sapiens
cagtggaagtaacagaggagtgaagtggactctgtaagggtccttggttgtagttttgttcagtgaactggttttctcaagtgctggttgtgctagtggtaaagttgtcatgtggacagactcaggacctctggttagccatgatgttacagaccatgtaattagctgttgtcttctttgttggarcagggttgttcttttataagggttgtaatagcttgagttgattcacctccagtcaggaggtggtgctttcaaaagagtactatggggggataatatgggggcaaaccagcctaccctaaggagggtgtagtataggtgggatgctagttgcgctatggtcacctggataaatattcaggtctctcaggtgatgggcaggtccatagagctcctaagagattatgtcttttgtctttggctaccaaggcaggtagagaaagaccatctgttgagggcagggtcaggtatgtctgagctcagactctccttgggcagggcttgctatggctataataggagatgcaggtgtggttctcaggccaatggagttatgttccaagggaattatggctgcctctcctgcatcatacatcacacaggtcaccagggaagtagaggaaagccagcagtg

SEQ ID NO: 925753 - DNA, 637 bp, Homo sapiens
cagtggaagtaacagaggagtgaagtggactctgtaagggtccttggttgtagttttgttcagtgaactggttttctcaagtgctggttgtgctagtggtaaagttgtcatgtggacagactcaggacctctggttagccatgatgttacagaccatgtaattagctgttgtcttctttgttggagcagggttgttcttttataagggttgtaatagcttgagttgattcacctccagtcaggaggtggtgctttcaaaagagtactatggggggayaatatgggggcaaaccagcctaccctaaggagggtgtagtataggtgggatgctagttgcgctatggtcacctggataaatattcaggtctctcaggtgatgggcaggtccatagagctcctaagagattatgtcttttgtctttggctaccaaggcaggtagagaaagaccatctgttgagggcagggtcaggtatgtctgagctcagactctccttgggcagggcttgctatggctataataggagatgcaggtgtggttctcaggccaatggagttatgttccaagggaattatggctgcctctcctgcatcatacatcacacaggtcaccagggaagtagaggaaagccagcagtg

SEQ ID NO: 925754 - DNA, 473 bp, Homo sapiens
caaaagacctgcagctgagggtcctgtctgttagaaggaaaactaacagaaaggacatccacaccaaaaatctatctgtacatcaccatcatcaaagaccaaaagtagataaaaccacaaagatgggaaaaaaacagaacagaaaaactggaaactctacagagcacctctccttctccaaagaaacacagttcctcaccagcaacggaacaaagctggacggagaatgactttgacaagctcagagaagaagccttcagacaatcaaattactccgagctatgggaggacattcaaatcaaaggcaaagaacttgaaaactttgaaaaaaattwagaagaatgtataactagaataaccaatacagagaagtgcttaaaggagctgatggagctgaaaaccaaggctcgagaactacgtgaagaatgcagaagcctcaggagccgatgcgatcaactggaagaaagggtatc

SEQ ID NO: 925755 - DNA, 638 bp, Homo sapiens
gctggaggtccactccagaccctgtttgcctgtgtatcagcagcggaagctgcagaacagcgaatattgctgaacagcaaatgttgctgcctgattgttcctctggaagcttcatctcagaggagtacccagccgtgtgargtgtccatctgcctctactgtgggatacctcccacttaggctactcgaggttcagggacccacttgaggaggcagtctgtccattctcagatctcaaactccatgctggaagaaccactactctcttccaagctgtcagacagggacatttaagtctgcagaggtttctgccaccttttgtttggctatgccctgcccccagaggtggagtctacagaggcaggcaggcctccttgagctgtggtgtttccacccaatttgaaacctccagactgcttagtttacctattcaagcctcagcaatggcgggcaccctcccccagcctcgctgctgccttgcagtttgatctcagagtgctgtgctagcaatgagcaaggctccgtgggtgtgagaccctctgagctatgcacaggatataatctcctggtgtgccatttgctaagaccattggaaaagtgcagtattagggtgggagtgacccaatttcccaggtgcc

SEQ ID NO: 925756 - DNA, 745 bp, Homo sapiens
ctgttggagtttgctggaggtccactccagaccctgtttgcctgtgtatcagcagcggaagctgcagaacagcgaatattgctgaacagcaaatgttgctgcctgattgttcctctggaagcttcatctcagaggagtacccagccgtgtgaggtgtccatctgcctctactgtgggatrcctcccacttaggctactcgaggttcagggacccacttgaggaggcagtctgtccattctcagatctcaaactccatgctggaagaaccactactctcttccaagctgtcagacagggacatttaagtctgcagaggtttctgccaccttttgtttggctatgccctgcccccagaggtggagtctacagaggcaggcaggcctccttgagctgtggtgtttccacccaatttgaaacctccagactgcttagtttacctattcaagcctcagcaatggcgggcaccctcccccagcctcgctgctgccttgcagtttgatctcagagtgctgtgctagcaatgagcaaggctccgtgggtgtgagaccctctgagctatgcacaggatataatctcctggtgtgccatttgctaagaccattggaaaagtgcagtattagggtgggagtgacccaatttcccaggtgccatctgtcacagcttcccttggctaggaaagggaattccctgaccccttgtgcttccccggtgaggcaatgccttgccctgcttcagctcatgctc

SEQ ID NO: 925757 - DNA, 638 bp, Homo sapiens
gctggaggtccactccagaccctgtttgcctgtgtatcagcagcggaagctgcagaacagcgaatattgctgaacagcaaatgttgctgcctgattgttcctctggaagcttcatctcagaggagtacccagccgtgtgaggtgtccatctgcctctactgtgggatacctcccacttaggctactcgaggttcagggacccacttgaggaggcagtctgtccattctcagatctcaaactccatgctggaagaaccactactctcttccaagctgtcagacagggacatttaagtctgcagaggtttctgccaccttttgtttggctatgccctgcccccagaggtggagtctacagaggcaggcaggcctccttgagctgtggtgtttccacccaatttgaaacctccagactgcttagtttacctattcaagcctcagcaatggcgggcaccctcccccagcctcgctgctgccttgcartttgatctcagagtgctgtgctagcaatgagcaaggctccgtgggtgtgagaccctctgagctatgcacaggatataatctcctggtgtgccatttgctaagaccattggaaaagtgcagtattagggtgggagtgacccaatttcccaggtgcc

SEQ ID NO: 925758 - DNA, 824 bp, Homo sapiens
actaagtatagttaacacctactatatgcctgtaactattaagtgctaattgttactaagatgactgtaatatagatcttgacttcaaggggaccaacaatacataatttaaaacaaagacatccacaaactcatatataacctaattagcttttcaatttcgtattgctaatttacctgaaccatttattcaatactcacttattatgtrtattggaatttaatcacactctttctctttcttttcaagttttaaatcaactgagagcaaaacataaagtcagacagatggagagaaaatggcagttttattactgatgaagctgggctagctggtagaaattaatatttggccacaagcagactttctgatgctttcactgatttaaaattggctgtttagaattattggctgccccatacccacttttcactagagtgaaggctgacttacaagcttactacatgaaggaacaaaaaggacagaaatgcttttgggcttaccaggcatgttgccccaaaagaggaagcgtagaaggaaataagacatatggtcatttttttccccaaatcttaaccaaaaaaaaaaaaaaaaaaagtgggcaggcagggttttttatgtttaaatctacatgtgtatgcctgtatgtgtgccaggggtattggcggttggtagtgaacaatgtgaacacaaagtagcctcaaggagcacccagtatcacgatccttcattccacagctctatctactgcacagacactgaaattttgtgactgatgcccatattcttctactttatttggcttttttgaataattatacca

SEQ ID NO: 925759 - DNA, 737 bp, Homo sapiens
aattctgacttttcactactatcccccacaggggcggggctccaactccaggtaaccagaccaggcaacctggacttccaattagcaggggagtccccaagccagcctggccaatctcggccggctagccaagacgaccagacgtgacgtcagacatgattaagttggcgcgtcacctagacgtcagcctcttacctctcggacgtcccgtcccaggagcaaaactctagtgactttgggcccgcccccgtgagagtggagggcggccgatgagggcggttctgaagggaacaagaccaatgagacgakcccggggcggggcgcggggccggagggtggggcgggtggcggcggtggcagtccgaggtctggctccgcgcagtatatgacagtacgtcagcagcgggatggccctagcagtggcggcggctgcagaagcccaagcagccgcggccgcagtggaggctagagccggagcggcggcggcggcggcaccccggggagtttaagatggcggcgggggggacagggggcctgcgggaggagcagcgctatgggctgtcgtgcggacggctggggcaggacaacatcaccgtactgcatgtgaagctcaccgagacggcgatccgggcgctcgagacttaccagagccacaaggtgagcgggccggccggcaggctgggctcagagaggcagagcgcacccctcacggcctggccgcgcccgggtgcggggcc

SEQ ID NO: 925760 - DNA, 617 bp, Homo sapiens
tttctcctgggctgcaaaacttgcagtcacgttcagcttggcaacctggaacagattcgcatgtgccattgccgggtaacccactctgttctcctgagattgtggtgcagtagggcccttgctgctccatctccaagcacatctctggcatccagagtaaccatttgcctagttgagtagcctgagccaccgcactcctcctggacataacgttatggtgaagcagagtctctctgctccatacccaggaagatccctaggcattcagagcacctccttgcctgcttctggagtttgagtcaccccacccctcctatgcagagatcttagtgcagggggtctctgctccatgctcyaggcatcttgagcacctactctcctggactagaagtttagaccatcccctatccctgtgcagagaacttggggctgaggaggtttcccagctacactactaggcacatctctgggcccttggtggccacccactgcattctccctcggcactagtgcctgtgtctgtcatcaggggacctgtaggtggacctgtcaggtctggccctgccattcctgccctctgccaaccccctgaccctggggctgggcagtgagctcag

SEQ ID NO: 925761 - DNA, 602 bp, Homo sapiens
ctgaggcaggcagataatctgaggtcaggggttcgagaccagcctgaccaacgtggcaaaaccccatctctactaaaaatacaaaaaattagctgggtgtggttggtgcttttattcctagctactcaggaggctgaggcaggagaatcccttgaacctgggaagcagagattgcagtgagccaaaatggagccattgcactccagcctgggtgacaagagcaaaaytccatctcaaataaataaataaaacaggaaatctcctctccatagaacatatagcaaataaatgactttgtgactttacttcatcctcttcatttacctaggacataccccaagtagagggtatttaaactcataaaaactctgtaacagggcctttgagcccctatgctcaggcttgctcccacaccatggagtgtactttcattttcaataaatcccttcattccttccttgctttgtgtgttttgtccaattctttttcaagatgccaagaacctggacaccctccatcattaacagtatggtcatgtgagaaggcatctgatgggagcctctggattctcttcatagttccttcctgctcctgctgggttt

SEQ ID NO: 925762 - DNA, 565 bp, Homo sapiens
ccactgtggtctgtagaggggctaattctgagcacttgagttctgggaaacccatcaaacacgtggaaatgagcttgatgagaatcgctagatgtgaaggggctgagtgctactaagacaaattccactgccccattcccttactgaccaaccacctatattttatcatttttattgaagcacactttaccagcgtcattacatattaacctgtgttgagattgaaacagaagattcacagtgatgcaccctaaaggatgtgcaaaacttgagagaacaccaggaccaaaagaaacctagcttgttttctgacaacagctgatggtcattctaacaagagctgatgtagcatgcatgcaaatgtctcacagggaccaccattcagtcctcatgatgaacttatgaacagctatgactccattarcctaataacacctgagacctccatattgagagcttctgtgtggcccacactgtgcaaggccctatatggagactatctgatgatggagggtatctcacaacccccagtcgattgccagtagagcatggggctcagagaagt

SEQ ID NO: 925763 - DNA, 580 bp, Homo sapiens
catatatctttatagtagaatgatttatattcctttgggtatatacctagtaatgggattgctgggtcaaatgatatttctgcctctagatcttagaggaatcaccacactctcttccataatggttgaactaattctacctctccagaggcatgtgtcttcatccaaacctctttgccacactattttcttcttcagtctttatcaacttttctccctaaaatcagaggaatttgcagtggcaagataacaagggtatttgctgggaatgttcatttcatttgttatggagaggttttgtggtggaaaggaagaggatgaatattggatccagacaggcctcgatttacytgtggtttccctttctgttgtctgtgtggtcctgggcaaataccaatgtttcagtttgcttgctatcatcagactctttaagacaacgttatataacactctaaggataattggggattaagtgataaaaataagtataaagtactcataatgccttgtatatagtagccacttaatatataactttccttcatttctttccaattatattttattttgtgatttggaa

SEQ ID NO: 925764 - DNA, 655 bp, Homo sapiens
gcggctcacacctgtaatctcagcactttgggaagctgaagcggatggatcacttgaggtcaggagttcgtgaccaccctggccaacgcagtgaaaccctgcctctactaaaaatacaaaaattagccgggtatggtggtatgcatctataatcccagctacccgkgaggctgaggcacgagaatcgcttgaacctgggaggcagaggttgcagtaagccgagatcgcgccactgcactccagactgggcaacagagtgagactttgtctcaaaaataagtaaatagataaaaaaagccaggtctagaaactcaaatattgcttggtctcattcacatgtgggagctaaacaagctgatttcatagaagtagagagtatagtggtagttaccagagactagggtggctagaggggtagggtataggaagatgctggtcaaaggatacataattacagttagataggaggagtaaatttcaagatatctattgtatagcaaggtgactatagttgatggtatattgtattattgaaaaatgtaaacagtggaagttatgtgctctcattacaaaaatgacagctatgtgagttaatgtatttttaaactagctagagttgttaaccattctacaatgtatatatacttcaaaacat

SEQ ID NO: 925765 - DNA, 655 bp, Homo sapiens
gcggctcacacctgtaatctcagcactttgggaagctgaagcggatggatcacttgaggtcaggagttcgtgaccaccctggccaacgcagtgaaaccctgcctctactaaaaatacaaaaattagccgggtatggtggtatgcatctataatcccagctacccgtgaggctgaggcacgagaatcgcttgaacctgggaggcrgaggttgcagtaagccgagatcgcgccactgcactccagactgggcaacagagtgagactttgtctcaaaaataagtaaatagataaaaaaagccaggtctagaaactcaaatattgcttggtctcattcacatgtgggagctaaacaagctgatttcatagaagtagagagtatagtggtagttaccagagactagggtggctagaggggtagggtataggaagatgctggtcaaaggatacataattacagttagataggaggagtaaatttcaagatatctattgtatagcaaggtgactatagttgatggtatattgtattattgaaaaatgtaaacagtggaagttatgtgctctcattacaaaaatgacagctatgtgagttaatgtatttttaaactagctagagttgttaaccattctacaatgtatatatacttcaaaacat

SEQ ID NO: 925766 - DNA, 655 bp, Homo sapiens
gcggctcacacctgtaatctcagcactttgggaagctgaagcggatggatcacttgaggtcaggagttcgtgaccaccctggccaacgcagtgaaaccctgcctctactaaaaatacaaaaattagccgggtatggtggtatgcatctataatcccagctacccgtgaggctgaggcacgagaatcgcttgaacctgggaggcagaggttgcagtaagccgagatcgcgccactgcactccagactgggcaacagagtgagactttgtctcaaaaataagtaaatagataaaaaaagccaggtctagaaacwcaaatattgcttggtctcattcacatgtgggagctaaacaagctgatttcatagaagtagagagtatagtggtagttaccagagactagggtggctagaggggtagggtataggaagatgctggtcaaaggatacataattacagttagataggaggagtaaatttcaagatatctattgtatagcaaggtgactatagttgatggtatattgtattattgaaaaatgtaaacagtggaagttatgtgctctcattacaaaaatgacagctatgtgagttaatgtatttttaaactagctagagttgttaaccattctacaatgtatatatacttcaaaacat

SEQ ID NO: 925767 - DNA, 655 bp, Homo sapiens
gcggctcacacctgtaatctcagcactttgggaagctgaagcggatggatcacttgaggtcaggagttcgtgaccaccctggccaacgcagtgaaaccctgcctctactaaaaatacaaaaattagccgggtatggtggtatgcatctataatcccagctacccgtgaggctgaggcacgagaatcgcttgaacctgggaggcagaggttgcagtaagccgagatcgcgccactgcactccagactgggcaacagagtgagactttgtctcaaaaataagtaaatagataaaaaaagccaggtctagaaactcaaatattgcttggtctcattcacatgtgggagctaaacaagctgatttcatagaagtagagagtatartggtagttaccagagactagggtggctagaggggtagggtataggaagatgctggtcaaaggatacataattacagttagataggaggagtaaatttcaagatatctattgtatagcaaggtgactatagttgatggtatattgtattattgaaaaatgtaaacagtggaagttatgtgctctcattacaaaaatgacagctatgtgagttaatgtatttttaaactagctagagttgttaaccattctacaatgtatatatacttcaaaacat

SEQ ID NO: 925768 - DNA, 643 bp, Homo sapiens
tgcatttcagtatggaacacgaggtagacttttaagatttttggctccagtctctggctccttgagggcacatctggacctacccagggtgtggggcaacttggttccctgaaaggaaggacacaagcatgggctggcttcaccatctactgattgtagcaacataggtccctcagcaaacataggcagtagcccaagtggtgttcacagcaggccttgggtgagacttagtgctatgctggctcaggtctgacacagtaaagtcccagtgttgatggccacaaagatgcttctgtatctctcccmaagctccaggcagctcagcacagaaagagagactccatatgttttggagaaagtaaaataagagaacaagagtctctgactggtaatctagagaattcttccagatgttatccaaggtactgctatgaatctgcaagaaccacagcattactgggcttgaggtgccccataaggcatacatggcttagatcacaatactgaagtcctttttgaatacctggaaatccttctcaagaaggacaggtataaagaagcctagactatgaagactacaataaatacctaattcttcaatgcccagaaacagatgaacatccgcaagcatcaggaccatcca

SEQ ID NO: 925769 - DNA, 631 bp, Homo sapiens
aaataattatgatgcagaactcattgccaaaaggcaatactggagacatactagtaattaaagcattgtgcaatataatttattattttctcattattgcccacatggctctctcttattgcccacatacttccctcttatggcactagaatatttttacatgcctgtctctccatattatgatcacttttgaaaggaagaacagtatatttgaacactatgcttagtgcctagtacagtaactggtaaacaacaatacttactaaatatatattgaattaattgaattctgaaatgtgtgctgctgaagagtctcacaaaaggattatccttttaggggagaaagatttcttttctcatctgatatgagttgcatctgtgtccctgcccaaatctcatgttgaattgtagttcccagtgttgaaggtggggtctggtaggaggtgattggatcatgasgttagatttcttctttggtactgtccttgctatagagagttctcatgagatctggttgtttaaaagtgtgaggcacctcctccttctgtcttcctcctgctcctgccatttgaagtgctggcttcccctttgccttctgccacaattgtaagtctcctgaggcctccccaga

SEQ ID NO: 925770 - DNA, 562 bp, Homo sapiens
aagattaacaaaatagatagactgttagccagactaataaagaagaaaagagaggaggatcaaatagacataataaaaaacaataaaggggtatctccactcatcccacagaaatacaaactaccatcagagaatactataaacacctctatgcaaataaactagaaaatctagaagaaatggataaattcctggacacatacaccctcccaagactaaatcaggaagaagtcaaatccctgaatagaccaatagtaagttctgattgaggcagtaattaatagcctastaaccaaaaaaagcccaggaccagacagattcacagccaaattctaccagaggtacaaaggggagctggtaccattccttctgcaactattccaatcaacagaataaaagggaatcttccctaactcgttttatggggccagcatcatcctgataccaaaacctggctgagacacaaaaaaagaaaatttcaggccaatatccctgatgaacatcgatgtgaaaatcctcaataaaatactggcaaactgaatccagaagcacatcaaaaagc

SEQ ID NO: 925771 - DNA, 717 bp, Homo sapiens
aaagcgccacctcctggcaggaggccaaagaacaaaaaccgagtgcaataaacaacaataatacaactaggaactctcatagaatcaatttcactcccttgccatctccaccagaacaagtgctactatccatggctgagagacctgaagatggttcacatctcaggactctgtgcagacaactcccagtaccagcctggaacccagcagccctgctgagtggctaggtccaaaagcgatcaataacaattactacagttttgttcctagaaagccacatccctaggaaagagggagagtactacatcaagggagcaccccatgagacaaaaaaaatctgaacagcagcttttgagccccagattttccctctgacatagcctacccaatgagaaggaacagaaaaacagttctggtaatatgacaaaacaaggttctttaacaacctcaaaaaatyacactagctcactcgcaacaaaccaagaagaaagtcatgatttgacaagaaaaaaaattagaaggttgattattaagctaatcaaggaggcaccagagaaaggtaaagtccagtgtaatgaaatccaaaaaatgatagaagatacaaggggagaaatattcaatgaaatagatagcataaataaaacacagttacaacttctgaaaatcaagtacacatttatagaatgcaaaatgcactggaaagtctcagcaatagaa

SEQ ID NO: 925772 - DNA, 791 bp, Homo sapiens
ctgcaggtggttttgttgcatcggcaactgtgacatccctgggaacctgatatataatcgtgattaggtgaatgttttgttttctttcagtagttgtcataaagaagagtttgggtccagctagaaaggacagcaatgtactatcatctcctctttcaaccttatatcaactctcaaggtttatatcctaaacgagtccttagggaccatgaccacctttctcttaaaccagatgtaacaccattctttgcactgatgacattatgctgactgcgcaggaggtagcaactaatccagacacattagcgacacacttacaagacattatgtgagaaataattcccaaacaacgtcaggggtcttctacctgagggaaacgtctaacaacttagtagtctggcatgtcaagatggtggttataaggtgaacagcatgttcttacatcttgccttttttactactaaataaggaacacagaaacgagttccataatagatgttgtcttagtatatacctcaatgttgtgcagtactgtgacccactgacaggtgcctsaaaccctgctagcatggattggggcccagaaaaagagaagcttccttagtcctgcacctgcggtctcatggggagttccctgcgaccagttgatgagaaaataaaaaacatcatgcctgattttcatttgttatttcagaatatgccggcaccacgtctattaagtttgttactactgcaaaagaaattatccccaatttagcagcttaaaacaacacaaatatataagcagttct

SEQ ID NO: 925773 - DNA, 761 bp, Homo sapiens
taatcaaacataccttactactgactagataatgacatgaataatgttattgtaaccagtatccccactattccaagagatagtttatttttctctctcttcttttctctttccttcatttccctacttcctacctgcctctttagaaatgtaactatagccttttacctcatcttccccagccayccctacagggcaagttcatctaatagtgtgcttagaagctccagaatggaattctcacccaccaggaagttgcctcaagagacaacagtcaatttacaacccaaagtatacctgctagagtttccagccacctttacaatctatttctgccaatgaagatgccaactcaactgcctggtagatgaggcactgaagactccccacctgctaacttctgcccctgcatcggcctacctttaaaagcacctgctttctgccccaaaaaggaagcagtacccttaaggcaggaggtctgtacttattcccctagttttagaactaagcaatgtacttattcttgatttagaataaaaagtcactttcttcacacttgacctcactcttgtaaattagatctgtaagtggtgaatgacagaacctgcattttggtttcaaatttgatggcctatatggggaaaacacagggtgctctggatgagccggcacttgacaggtgggttttgctaccaggcaagacctgtgggtgccaactgcttgtggttagtgtacccatgacagaaatgctagtgaacttc

SEQ ID NO: 925774 - DNA, 605 bp, Homo sapiens
ttcttttttttaaattattgattcaaggagcacatagtcttcttagttacatgggtattgtatgtgtaatggtgggggttggccttttagtgtacccatcacccaaatattgaacactgtatccaatagaagcattttcagtgcacacatccttcctactctcccctcttttggagggagtccccatagtttatactcttcatttttgtgtccctgggctaattccattaccaaatgatccctgggccacatccttggtttcctctcctgaacacaggtgttcactatttacatgaccaagctgagagttttctaaactttttgttctgcttccatttcagattataaatctatctttaarttgtttctttgctgctgaatcagtgcaagcagccaaaagtaaacgtgcagctccttctaaattttgcttagtaatttcctctgctagatatgttagtattcatctctctgaagttcatccttccacaaagcccttatggacatagttcagacaagttatttgccaatttataacaacataaagctggtctttactccagcttccaataccttggttcctcagttctatctgagacctggttaga

SEQ ID NO: 925775 - DNA, 744 bp, Homo sapiens
tctgctcccacagagcatcaccagaaacaagcctgggtggccacacacccatccattcttacctatcttctattctctagggcagtcattgccggcatcattttcttttgtgtttccaccttcattccaggaactcagcagagacaggtgtttgttgcccatgtataaaggctaaatcccacgcaccccaataaaacagaggccacgctctttccctcagggtgactttgcccttcctagacctcatgtcttcaggtgctgatttcattgaaaggcaccctccacctgagtggttattagagtgtggcacaccgggctgccccttggttgtggctagttatgacctgcattggaagatggcagtgaggagtaaacatctgtccttaaaacgaggaaatgagggaaaaacaccaggtgaccagcagttggttgtacacggcgtcagcaacacggggcttgatacagctccatgcgtggcacatcgcaagcacctgagaaacggcagcgcccgtgccaggaccgtttctagctctacacaatttcccagattcatcacccagttctcaacacagttcttgtttcacaagatcaacaagtgtgarttttgtcttccatggaaggtaccatttgtgacttgactttcccttatcttgcttctccttggacttgtatcaagagagatttacagaatgattgatttgaattgttgccaaggttggtggaaggtcctttcataactgcctg

SEQ ID NO: 925776 - DNA, 810 bp, Homo sapiens
cagctgactctaggtgagagttccagcacaatgttgaatgggaatggggagagagccgagagcacgttcctttctgttcccagtcttaagaggaaagcattcagcctcttaccatttagtgtagtgttagttgcatgttttctgcatttatcttttattaaggtagcatatttcccatctcttcctagttccttgagaattattacttgagaatgaatagctgttatatttttcctatgcctttcctgcatcaattgatatgatcgtatgttttctcttcttttgcctgctgatgtggtacattatgttaattggtttttggatggtgaaccagccttgaataccagaaataagtcccacttgatcatggtgtataaatcttttcatatcgtattggatttcacytgacatttgcagctatgcttctgacagatattgatctgtagttttttttatttatctggttttgatatttgggggtctcatagaataaagagggaagtgtttattctgtttctactttctggaaggaattgtaaagaactgatatcactcttcctgaattgtttggtagaactcattagtaaatcatcatggcttggttctttctttccttgaaataacttttgattttattttataataaatataaggctattcctgttatctgtttgtcccagtgtgaattttggtagttggtaggttttttttttaaagaattgattcatatcatattagttatcaaatttgtgggcatgaagttgtttatattattcctctgttattctttattcttattttctgaggcag

SEQ ID NO: 925777 - DNA, 728 bp, Homo sapiens
cccgagcccttattgtcccttttacagtaggagcaggaatactaggcaggcttgggactggaattggaggcataacctcctccacccaattctattataaattatcacgagaattaaatgatgacatggaatgagttgccgactccctagtgaccctacaaagccagcttaattgtctagctgtggtagtccttcaaaatcagagagccctagacttattaacaactgaaagaggaggaacctgcctcttcttaggagaagaatgttgctatttcgttaaccagtcaggaatcattactgaaaaggttaaagaaataagagaacaaatagaaagtagacaraaaggagctttaacactcagggccctggaatatgtttaacaaatgtgtaccttggctcctcccctttctaagccctgtgacagtcatcctactattactcgctttcgggccttgcatttttaacctccttgtcaaatttgtctcctccaggatcaaggccatcaagctgcaaatggacttacaaatggaacctcaaatgaactcaactcacggcttctactgagaacccctggatccacctgctggtccctcactagcctaaaaagttcccctctggaggacaccacaactgcagggccccttcttcacccctaaccatcaggaagtagccagaacgactgctgccagttcccaacagcaattggtgtgtcctgtctagagggggga

SEQ ID NO: 925778 - DNA, 749 bp, Homo sapiens
aaactgcacatgtatccctgaacttataataaaagtttaaagaaaaaatgtttttttctccttgattgttggcttaatttttcctaaatatatgcagaaggtggagatactttacaaaaaaaatttgtaccagccccttcaaaaatggtagaattagaagttccatggagcaaatttcaagggaaacagtgataactagtgaaaattgttttctaaaacaaccagtcgatgcctctggaaataaccctgaaggcatacaacaaacaaagtaacatgtactgaagaaaatacactaatttgtggtgaaaacagtgagagtctttggcatttaaaccacaacatgctcacttgcccaccctcgtaattcactgtgacagaaactacctttgctccagggagatgctgacaccatcagaggcttcccactccccaaagcttccagttgagggccagagtatgctgttgaggagagatgtctctctgaatttcttatctacacacactaaggcatatgctgcaaragctaaattcctccagacaagtgtggctaagaagggtctcccatctttcatctaaccacagtcataactcagaggtttaactcaagaatggcacagagaatattgagtaccaaataatcactgccccagctcattcataggatgaagttaccatgatgggagaggaaaagtaagaataaaggtcagagccttactcttaaggcatgaatgttgctcagaaagaagtgt

SEQ ID NO: 925779 - DNA, 627 bp, Homo sapiens
cttaacataaatgctaatacatgaagttaacaacacttaaatgctgttgtgaagtcaacaaatcttatgtcacatgataaaggaaaaagaaaataaataaaatggaaatcatttcttaatacaagtgtatacctgcacaaacatattaagaaaataaggaggaaatccaaatacaacaattacagtccctgtttctgcaactgatcacatggtggtagctagtattgatgactaccttcttctgctactcattctgtattccctttgccttcagcaagcacctcagcaaatcttgatttttacctggtggagtgatgcaaatcttcawgcctgcaggtctgggcaatttgtagtcctgcttgaattgggttgttgtagtttcctgtataccttaatcacagggtatggtaatactaagagatgccctaagggatctcccgtattccacacatacccttccttacctcaattgtggagtggtagactgagttcatcttgatggtctgggtcaatcaccccagacaacactgtaacttccttcttagcctgttgatttagaagtaagagaagcccaaagtggccaggtggcaatcttaacttccagtttgatggatcattgttgtgtct

SEQ ID NO: 925780 - DNA, 588 bp, Homo sapiens
ttccccctttgctcagttctcattcttctctattctgccaccatgtgaaaaaggacatgtttgctcccactacgattgtaggtttcccaaggccatattaaactgtgagtcagttaaacctctttcctttataaattacccagtttttatgggtaatttaatggacagttcattatagcagcatgagaatggacaaatatagtaaactggtgctggtagagagaggtgttgctataaagatatccaaaaatgtggaagcaactttggaactgggtagcaggcagaggttgcaagagtttggagggctcagaagaatgtakgaagatgtgggaaagtttgtaacttcttagagacttgttgaatgatggccttgatcaaaaacaatgaagtctaggctgaggtggtctcagatgaagatgaggaatttgctgggaactggaataaaggtgactcttgctatattttagctaagagactggtggcatgttgcccctgctctagagatctgtagaactttgaatttgagagagattatttaggctataaggtggaagaaatttctaagtggcaaagtgttcaagaggtggc

SEQ ID NO: 925781 - DNA, 443 bp, Homo sapiens
agggcaagccaggcatggaagtaagtgctcaggaagtatctatcatattaaatggaccagaaacccatcacgaggctgtgttgtaagagagctcaactggaaatgcaaactccaggaggaccaataataataacatccaccttttggcagtacctcctacgtgctctattctrtgctacatatttcatgcatatattagctctaaaccagacaacaaccttataggggattttttttttttttgagacagagttttgttcttgtcacccaggctggagtgcggtggcaccatctctgctcactgcaacctctgccttcccgggttcaagcgattatcctgcctcagcctcccaagtagctgggattacaggtgcctgccaccatgcccaactaagttttgtatttttagtagagacggtgtttcaccacgttggccaggccgg

SEQ ID NO: 925782 - DNA, 689 bp, Homo sapiens
ctggttagatagtgggtgcagcccatggagggcgagcagaagcagggtggggtgtcacctcacatgggaagtgcaaggggtggaggaactccctcccctagccaagggaagccgtgagggactgtgccatgagggacggtgcattccaggccagataccacgcttttcccacggtttttgcaaccatagaccagatgcctgtgccaccaaggccctgagttttaagcacaaaactgggcagccatttggccagacactgagctagctgcaggagtttcttttcgtaccccagtgactcctggaacaccagcgagacagaaccattcactccctggaaagggggctcaagctagggagccaagtggtctagctcagtggatctgaccccctatggagcccagcaagctaagatccactggcttgaaattctcactgccaccaagcattctgaagtcgacctgggacaccccagcttggtgrgggaggggtgtctgccattactgaggcttgagtaggcagttatcccctcacggtataaaaaaaagcctccaggaaatttgaaatgggcagagcccaccacagcttggcaaagccactgtagccagactgcctctctagattcctcctctctgggcagggaatctctgaaagaaaggcagcagtcccagtcaggggctcatagggaaaac

SEQ ID NO: 925783 - DNA, 668 bp, Homo sapiens
acattgtggcagacgcctgtaatcccagctaatcgggaggctaagacaggagaatcgcttgaacccgggaggcagaggttgcagtgagccgagatcgcaccattgtgctccaacctgggcaacaagagcgaaactccatctcaaaaaataataataaaataaattatagttggaaaaaaggggtttcctaaagacccaagggaaatggcctctttgttcctgaagccacagagaggatttttctgctccccacaactagttttccttgtgaaaattcataattgctaccagcttgttctcctctctgtcactatacatctgtccttgaagccttatttgaacaaagagttctggtatcactcggatgcctagaaactgttgccgttctgtgaaaccgaccaccagaggaaacccatgcttctcattggctgccttactaagatggtracttgttgccctggtgacaagttgcaatgacaggtggctctgccaaatcagaacacagtgatacttgcttcccctcccgggtgaaggatggaaaataaaagtaaaagccttggcggctgtcaggcttctttaccaaagagctggagagcactccttggccccatttatgcaaacacttcccatctacagatgatccagcttcggagtgggagtctaagcag

SEQ ID NO: 925784 - DNA, 807 bp, Homo sapiens
tagtccttggtggttcaggcctccttgggagttgccttagcagaagaaaactgcctcatccagggtcacacctcattccaggggtggctcacatccagtgactgatcactatggaggaacaaagccccatccctttgtcctcatctcaggagcactatgaagagctatctcagctccagagtttcacagagggtcatctgaggcctttggtgtgagtgcattgcagcctgactcccccactacctaatactgcttccttccacaggagttgatcccaacagcactccctaatcaacagcttgcatgctaatttcacagtctacttcctgggcactcaacctgtgccaccaccttaatcgagtggttaagttaacatcatcagtaatgggatctgtaaaagttatgtgcaaccaggtaggaggcaccaagaagaacacagcatcatttctgcaatcttcctgtgaaagataygtgacttgattttaacatcaagtgaggaaacatcagtcaaacccaaatggaggggcattctaaaaattactgccttgtaatgttcaaaagtgtcaaatcatgaaagtcaaagcaagattatgaatctgttccaaattaaagaaaactaaagacatgagacatgacatctaaatataacatgtgatcctggactagcttctgttgctataaggtacattactgaacaagtagaaaaactcaaatgtgttctaaagattagactaccatcaaatatcagtgttaatttccttattttgatggttgcacagaagaatgtctttgctcataggtagtaca

SEQ ID NO: 925785 - DNA, 821 bp, Homo sapiens
aaatagtttataatgcaaaacagtaactttggtacctactgggtctattggttggaattcttttaacccttttcaataattatggagacacttgtccagaatttattatataaacttttttatacattagacttttacaaacaaatgctctcaaaattcaatattttcttcatgttcagtcaggatattaattcctagcttgctatgccagagtggtaaaagggggtagggcttcattttcaaaatgaacccagcaaagggaacccagaagtgctcagaaagggctttctgctaactaatgatggcaaacgtggtctgtgtgatggggtggcatctactttctgaaaatttttaattttaatttttgttgttttcgttttgttttgttttataacttgtgttttatttttgccaaatttggtttcattccctgcctgttccatttggaggtactacactaaaaaaaaaataataaaacacgtaatcacaccatggggaaaaatgaaaggagaagaaaaaaagaaagctggataatcagcccctaattttctaaaaattgctattaacaaagctgctktacaattctcttgataaatatccaagaaatctgttcttggaagcttaagaagagagtggaaaggctgtactctcaggactaaggaaggactcactccctaaagactttgtggatggaaatttgttcagtactcctgtagtgtgtatgtgagtgaggacatctggactggtatctagccaggatgccctggtagaactgcatttagcgttgatgtcctttccgatgggttgcaacatccatttgg

SEQ ID NO: 925786 - DNA, 595 bp, Homo sapiens
gttttccacttcccttctgcccaggaactggttcttggctgtacttcccttgcttttgttacagtccaaatacaagtctggccctccccatccagcatactccagatcctactagggttacagagctttgctgtcctccttaaagggagaggaattatggcccctgtgtaagtagcaagtcaccttcttacaccagtatccagagccttccataacttgctctcaccctgtctagacagcttctctgccmtgtcctgtccaacggctccctccttgcagtgaggctgttcttactcttgaggacaacagactcagactgatcccccactggggttttgcttacactggggtggtccctcattcagaatatccacctccttactctcattttttttgtaacagttcctttaggtcctacttcaagatgtactctctctgtgatgctttcatgtgacagttcagatcatctgatttttaccccttcttatgcacacatagcacctatgaatttggccttgactcattgttatcctctgattgttctaggaatgggtgtatcatcttaccagttagcttataaaggtctgccaagggg

SEQ ID NO: 925787 - DNA, 595 bp, Homo sapiens
gttttccacttcccttctgcccaggaactggttcttggctgtacttcccttgcttttgttacagtccaaatacaagtctggccctccccatccagcatactccagatcctactagggttacagagctttgctgtcctccttaaagggagaggaattatggcccctgtgtaagtagcaagtcaccttcttacaccagtatccagagccttccataacttgctctcaccctgtctagacagcttctctgccatgtcctgtmcaacggctccctccttgcagtgaggctgttcttactcttgaggacaacagactcagactgatcccccactggggttttgcttacactggggtggtccctcattcagaatatccacctccttactctcattttttttgtaacagttcctttaggtcctacttcaagatgtactctctctgtgatgctttcatgtgacagttcagatcatctgatttttaccccttcttatgcacacatagcacctatgaatttggccttgactcattgttatcctctgattgttctaggaatgggtgtatcatcttaccagttagcttataaaggtctgccaagggg

SEQ ID NO: 925788 - DNA, 636 bp, Homo sapiens
tagctccctggcaccttggcccagatcaaagagaaccgcacatctccacacgcagacaggagagcacgcatacctttcgtgcacaccaacacacatgagctcacatggccccagacacgtgcacagaatgggcccgggaggcctgtgtgctcaagcagacccgcagacccactgctgcacagggtacctggatttttcttatttcctcacctgagctcaccttttaacccacatcttttcttattatttcctgaaatgcgtttgctctcccattgtcagggatccaaggcaaagaaaacatccctctgtgacctgcccccccgacaaatcgaacctcatttttctgtgtccctgtgagtccttgtccataagcagaactcacttttctttttttccaaggcatggattgcagtttaccgtctgctttttgtacttgaccttattacatagccaygattttcttactttccagttgtaatgggagcacagttgtccatcttgcagctctgctgtgcttttttttttttttttttgggacggagtcttactgtgtcacccaggctggagtgcagtggcacagtctcggctcactgcaacctcagcctcccgggttcaagcaattctcctgtctcagtc

SEQ ID NO: 925789 - DNA, 612 bp, Homo sapiens
agagactctctttcaaaaacaaaaaagttagggtatggtggctcatgactgtaattccagctacttgggaggctggggcaggaggattgcttaatcccaggaggtcaagactgcagttagccgtgattgtgcaactgtactccagcctaggtgacaagaatgagattctgtctcaattaaaaacaaaaacaaaaacaaaaaacagcagcagcagcaaatcaccatttgccatttcaactaaaatgattaattcaggctatgatcatcaatggataaaatcacttgataaaaaggactttacaaatgaaggaaccaggctgtcattacctgaacccagtgatcacatcagccttactaaacataggagasccagagccagacatcctgtttctccagatgggaggcaatacacagtttacagtaacacctaaagagccaaaaaacttgaacctaaatctagtcaaggcatttaaagctaacttccatttaacaaaataatgaaaacaacgaacagattaaataagaggtttcctgactctcggccagtgaataaatctttccactataccactactaacctctctgaccctcaggacaaatagaagctgcaac

SEQ ID NO: 925790 - DNA, 568 bp, Homo sapiens
gtgaaaaatgactttgatagtttgataagaatagcattgaatctgtacattgctttaggcagtatggccattttaacaatattattttttcctatccatgagcatggaatgtttttccatttgtttgtgtcatctctgatttctttgagtagcgttttataattcttgctgtagagatctgatatctccctggttagctgtattactaagtattttattcttgtggctattgcaaaagggattgtgttcttgatttggctytcagcttggatgttgctggtatatagagatgctactaatttttctacatatattttgtatcctgaaactttgctaaagctgtttatcagatttagaagcttttgggcaaaaattatgtgttttctaagtatagaattatataatctacaaagagagttattttgacttcctctcttcctattcggatgccttttatttctttctctcttgcctgattgctcttcttgggacttccagtactatgctgaatagaagtggtgaaagtgaccatccttctcttgttctggttttcaaagggaatgcttcc

SEQ ID NO: 925791 - DNA, 469 bp, Homo sapiens
ggcatcatgttgagtcacacctgaagcccatggctttccagaccagcatagtactagagttcacccagggcctgaggccaccacagtctggctgtcacagatatttacttaaggcctaaatcccctttagtcagcagttagtgaatcctgctgggactgggtagctgtcatctgggcagtggattcccttctggctgaagttgtacctagaaacgccatccaggagcaaataaatgaaattgggggcttcaggaatatgcctggtgctttgttttactgtggctgagttggcacctaagttgcaagacaaagtcctctgtactcttacctctccttcccccaagtaaaaggagttgctacaggagctgcattgctgggaggtgggggaggsgtgattcaggcactatcatggccactgcgactgttgttgcactttgtcacaccccaagtccactgcagcatcagggct

SEQ ID NO: 925792 - DNA, 625 bp, Homo sapiens
ctttcaccaaaatgctgatagtgatatggacaatgaagttcagactgaggaagtctcagatggggatggtaaacttattgggaactggaacaaaggtcacttgtgctatactttagcaaagagattggtgccattttttccctgccctagagttctgaggaactttgaacttgagagagataatttatcgcatgtagtggaagaaatttctaagcagtaaagcattcaagaggtgacctggctgattctgaaagcatttagtcatttgtgttaacaaagagatggtctgaaattggaacttacrttaaaaagggaagcagagcacaaagtttgaaaaatttgcagcctgaccatgtagtagaaaagaaaaaaaaaaccattttctggggacaaattcaaggtggttgcagaaatttgcataagtaatgaaaagtcaaatgttaatagccaaggcagtggggaaaatgtctccagggcatttcagagatcttcatggcagcccctcccttcatagtcctggaggcctagggtggaaaaatggttttgtggggcaggcccaaggccctgttgctctgtgcagtcttggtacatggcaccctatgtcccagccattccaacttcactc

SEQ ID NO: 925793 - DNA, 644 bp, Homo sapiens
caagcagccttggttcattttcttttttaaaaaattttcaaattattttttatttagagacagagcctctctctatcacccaggctggggtgcagtggcgtgatcatggctcactgcagcctcgaactcctggatgatcaaccaatcctctcacctcagcctcccaagtagctgacactacaggtacatgccatcgtgcctagctaattttttttttttttttgagacggagtctcactctgtcacccaggctggagtgcattggcgcaatctcagctcactgcaatctccgcttcctgggttcacaccattctcctgcctcagcctccccagtagctgggcctacaggtgtcygccaccaggcccagctaatttttttttgtatttttagtagagacggggtttcactttgttagccaggatggtctcgatctcctgacctcgtgatccacccgccttggcctctcaaagtgctgggattacaggcgtgagccaccgcgactggctgcctggctaattttttaaagaaaattttctagaggtgagatcttactttttgatgcaggatggttttgaactcctggcttcaagtgaacctcctgccttggcttcccaaagtggctgggataacaggcatgagccac

SEQ ID NO: 925794 - DNA, 857 bp, Homo sapiens
agtcatgcagtgtttgtttttctgtgcttgccttatttcacttaacataatgtccatcaggtttgtccatgttgtcacaaatgacagaatttcttcccattgcgtacatataccacattttaaaagtccatccatcttttgatgcacacaggttatgtacatcatggtgagtatagttcgtaatatattgtatacttgaaaattgctaacacaattttaagtattctcaccgccaaaaaaatggtaagtatatgagataatgcatatgttcaatagcttgattttgctattctacaatgtgtatatgtatataaacatcatgatgtacaccataaatatatattatttttacttgtcaattagaaagaaaagaaggccaggcgttgtagcttatgcctgtaatcccagcactttgggaggctgaagcggatggatcacgaggtcaagagatggagaccatcctggccaacatggtgaaaccccgtctctactaaaaatacaraaattagctgggcgtggtggcgggcacctgtagtcccagctacttagtaggctgaggcaggagaatggcttgaacctgggaggtggaggttgcagtgagcagagattgcgccactgcactccagcctggcaatagagtgggactctgtcagaaagagagagagagagagagagagagagaaagagagaaagagagagagaaagagagagagaaagaaagaaagaaagaaaagaaaaagaggaagacatttaataagctctgatttgctctgcccatgttccctgcttacttgtgtgtttgttttcagtagagtgggtagtgtgcacttcagagtgagacggagccaggtgtgaat

SEQ ID NO: 925795 - DNA, 646 bp, Homo sapiens
gctgagcagagccacattacatttaggagaaatcaataacacagtgacttttcaaagaaattatgcaagtcaaatattaactaaatgaaacctttaaaatgctaaaagaaaacacccatgaacctaaaattctatactgaggaaaaatatcattcaaaaatgatgacaaatttaagagattcatataagcagaaactgaaacaatgygcagcaaaccagcgctgaaagaaatactactaaaagatgtatctaaatggcaaataaataaataaataaataaatcccagatagaaccatgtaaaagcatggtaaagagataattgaaaagggtaaaagggtccaggcgcggtggctcacacctgtaatcccagcactctaggaggccaaggcagacagatcacaaggagaggagttcgagaccagtctgaccaacatggtgaaaccccgtctctactaaaaatacaaaaattagctgggcatggtggcacatgcctgtaatcccacctactcaggaggctgaggcaggagaatcactttaatccaggaggcagaggttgcagtaagccgagatggcaccattgcactccagcctgggcgacagagtgagactccgtctcaataaaaaataaaagaaaagggtaaaagg

SEQ ID NO: 925796 - DNA, 645 bp, Homo sapiens
aacacacaatctaagagtgggaaagaatatttgcaaactatgcatctgacaaaggactactatctagaatctataaggaacttaaatcaacaagaaaattacaaatatccccattaaaaagtgagcagaggacatgaatagacacgtctcaaaagaagacacagaagcagccaacatacgtgaaaaaatgctcaatgtaactaytcatcagggaaaagcaaattaaaaccacaaagagataccacctcataccagtcagaatggctattattaaaaagtcaaataataacagatgttctcgaggacgcagagaaaagggaacacttacaaacttttggtgggaatgtaattagttcagcccctgtggaaagcaatttggagacttctcaaaaaaaaaaaaaatagaactaccattcaacccagcaatcccacgactgggtatctacccaaaggaaaagaaactgttttatcgaaaagatacctgcacacatatgtctatcacagaactaatcacaatagcaaagtcatggaatcaacctaagtgtccatcaacagtggactggataaagaacatgtggttatatataatacatgaaatactaagcaggcataaaacagaatgaaatcacgttctttgcagcaaca

SEQ ID NO: 925797 - DNA, 761 bp, Homo sapiens
gaggccattatctgaaatgaaataacacagaaacagaaaaaaaaataccacaagttctcacttataagtaggagctaatcaatgagtacacgtaacatgaagatggaaaacagtggacaatggggactccaagaagcaggaaggagggagagaggcaaaaattgaaaaactacctcttgagtactatgttcattatttggwtgatgggttttctagaagcccaaaccccatccctcattacacaatatacccatgtaacaaacctgcacatgtatccctccaaatccataattttaaagaaaaaaaaaaacagtcacaggaagaaaaatactgtatgttcttactcttatgtgagagctaaataagtggatctcgtgaagagacagagtacaatgatggttaccagaagctggaagggaagggagagaaggcaatgaagaaaagttgattaataggtactaaaatacagttaaaaggaataagttctagtatgtgatagtacagtagggaaattacagttcataatttattgtatatttcaaaatagccagaagagaaaaactgtaatgtttccaacagaaaagaaatatgaatgtttgaggtgatggatatatcccaattaccctggttttgatcattacacattgtatgcaagtaccaaaacatcacatgtatcccataaatatgtacaactatgatatatcaatttttttaaaaagaaatactgtaaagccaggagacaataaattgatgtatttaaa

SEQ ID NO: 925798 - DNA, 752 bp, Homo sapiens
aggcagaaattcaggcatatggggcatccgcttgcctagaccagcagcctgtgctatcccatcctttatggacattgaccatggtgcagcaagaccttctccactccacgcccaggaagatctccaggcatttggagttctagctcatctggatcagccgcctgaactgccccacccttactgcgcagagatcctggtgcagggaagccctctctgctacacccaagcagatctccaggcattcagagcacctgcttgcctggtttggcagcctgagttgccccacccctcttgtgcataaatcctggtgcaaaggrgcccttccctgctacatgcccaggcagatctccaggcatttagagtactcaatctcctggattaggagtttaggccaccctcaaccccaccattcatgtgcagagaatttggggccaaggaggtttcccatctccacacctaggcactcttctgagtgctcggtggccacccactgtattctccctcagtgctggtgcttgtgccagcactagaggacctataggcagacctgcatggtccaccctacccatcatggaccccacttccctgggactgagcagggagctcagaccactgtgtatttcatgaatcagtctactgcctgaagcaagagagacttctgccagtaaacaaggatcaagtacatagtcagacccattggtcacaggtggctcttacctataagtgccatctattggcttgtaggttgaact

SEQ ID NO: 925799 - DNA, 442 bp, Homo sapiens
acaccattaggaacacgtagaaratctacagcaaactggaaactagaaaatctagaggaaatggataaattcctgaaaacacacaagatcccaagattgaatcaggaagaaattgaaaccctgaacagaccaatatcaagttcaaaaattgaatcagtaataaaaaacctatcaaccaaagcaagtcctggaccagacagattcacagccaaactctattagatgtacaaagaagagctgccaccaatcttactgaaactattccaaaacatcaaggcaagagggacccttccttaactcattctactaaaccaatatcatcctagcaccaaaatcttacaaagacacaacaaaaagagaaaactataggccgatatccctgaacgcagaccaaaatcctcaacaaaatactagtaacctgaatccagcggcgcatcaaaag

SEQ ID NO: 925800 - DNA, 442 bp, Homo sapiens
acaccattaggaacacgtagaaaatctacagcaaaytggaaactagaaaatctagaggaaatggataaattcctgaaaacacacaagatcccaagattgaatcaggaagaaattgaaaccctgaacagaccaatatcaagttcaaaaattgaatcagtaataaaaaacctatcaaccaaagcaagtcctggaccagacagattcacagccaaactctattagatgtacaaagaagagctgccaccaatcttactgaaactattccaaaacatcaaggcaagagggacccttccttaactcattctactaaaccaatatcatcctagcaccaaaatcttacaaagacacaacaaaaagagaaaactataggccgatatccctgaacgcagaccaaaatcctcaacaaaatactagtaacctgaatccagcggcgcatcaaaag

SEQ ID NO: 925801 - DNA, 442 bp, Homo sapiens
acaccattaggaacacgtagaaaatctacagcaaactggaaactagaaaatctagaggaaatggataaattcctgaaaacacacaagatcccaagattgaatcaggaagaaaytgaaaccctgaacagaccaatatcaagttcaaaaattgaatcagtaataaaaaacctatcaaccaaagcaagtcctggaccagacagattcacagccaaactctattagatgtacaaagaagagctgccaccaatcttactgaaactattccaaaacatcaaggcaagagggacccttccttaactcattctactaaaccaatatcatcctagcaccaaaatcttacaaagacacaacaaaaagagaaaactataggccgatatccctgaacgcagaccaaaatcctcaacaaaatactagtaacctgaatccagcggcgcatcaaaag

SEQ ID NO: 925802 - DNA, 583 bp, Homo sapiens
ttctcccttaatgtttttttctgttcttgtaactctttttttttttttttttttgagacactctcactctgtcacccaggctggcgtgcaatggtgtgatcttggctcactgcagcctctgcctcccgggttcaagtgattctccygcctcagcctcctgagtagctgggattacaggtgcccaccactacgccagctaatttttgtatttttagtggagacggggttttgccatattgtccaggctggtcttgaactcctgacctcaggtgatctgcccgccttggcctcccaaagtgctgggattacaggtgtgagccactgtgcccggcctctcttaactcctgttacttgaatggtgcctctcctatctaggctgagtctgtaattgatcatttttttctaaccttttctatgtctttatctttttattctttgttctggtgtatataggtaatatctcccaagccttctattggatttttgtttctctcttatattttcatttcttttctttcttctttatttcttttgagatgggatctcacccgtcacccaggctggagtgcagtggcgtgatcac

SEQ ID NO: 925803 - DNA, 636 bp, Homo sapiens
tcccaatccagaccccaagagacgattcttggatcttgtgcaagaaagaattcagggtaaatccatagactcgccctaaagtgaaagcaggtttattaggaaagtaaaggaataaaagaatggctactccatagactgagcagcccagagagctgctggcatttttatggttatttcttgatgatatgccaaacatggrgtggattattcatgcctcctcattttagaccatatagggtaacttcctgatgttgccatggcgtttgtaaactgtcatggcactggtgagagtgtagcagtgaggacaaccaaaagtcactctcatgacctgtattttgtgttaacctcctatctcgtcctgtgacttagaatgccttaaccatctgggaaatgtagctcagtaggttttagccttattttacccagctcctatttaagatggagttgttctggttcatacgcctctgacacagtctcaacctcccaggctcaagccatttgtcctcctcagcctcctaagtagctggacagcaggcattgagccaccatgccaactaattaaattttttttttttttatagagacagaggtccccctgtgttgcgcaggctagtcttgaactcctggggtcaagtg

SEQ ID NO: 925804 - DNA, 636 bp, Homo sapiens
tcccaatccagaccccaagagacgattcttggatcttgtgcaagaaagaattcagggtaaatccatagactcgccctaaagtgaaagcaggtttattaggaaagtaaaggaataaaagaatggctactccatagactgagcagcccagagagctgctggcatttttatggttatttcttgatgatatgccaaacatggagtggattattcatgcctcctcattttagaccatatagggtaacttcctgatgttgccatggsgtttgtaaactgtcatggcactggtgagagtgtagcagtgaggacaaccaaaagtcactctcatgacctgtattttgtgttaacctcctatctcgtcctgtgacttagaatgccttaaccatctgggaaatgtagctcagtaggttttagccttattttacccagctcctatttaagatggagttgttctggttcatacgcctctgacacagtctcaacctcccaggctcaagccatttgtcctcctcagcctcctaagtagctggacagcaggcattgagccaccatgccaactaattaaattttttttttttttatagagacagaggtccccctgtgttgcgcaggctagtcttgaactcctggggtcaagtg

SEQ ID NO: 925805 - DNA, 597 bp, Homo sapiens
tctgccttcaactcacaccccagacacctcagatctcccccaccccgccttcctgtgtctgtcgcctctcacggaccaaaggccagttcaaagggtttccccaaccttcccactgtagacacaatagtccattctccctggaccctgagccaacagaagaaagcacaggcaggagatcaaacatgggctgaatggaagacagaggagacagagaacggsgggcgagatggggcagcaaaaataatgacttccatccaaggctcttcccaaaaacccacagctctttgaagctggctttccttttataaaatgcactgttattaatgacccaagtggaagctttctgggcaggacaatacccaactccctggtggcctctgtgggaccttgtgcatgggaaagcatccggtggccagcggatgtctccaacacgccaagtgcctatgggtgccacaaaggggtttgggagcagggtcatgtccacatgaagacccatggtaccccgagtatttggggctgctactgtcctctcaggccaaagctggggacagtaaggtctgtgctgctgcagtccagccaattcatttattcaacaaa

SEQ ID NO: 925806 - DNA, 597 bp, Homo sapiens
tctgccttcaactcacaccccagacacctcagatctcccccaccccgccttcctgtgtctgtcgcctctcacggaccaaaggccagttcaaagggtttccccaaccttcccactgtagacacaatagtccattctccctggaccctgagccaacagaagaaagcacaggcaggagatcaaacatgggctgaatggaagacagaggagacagagaacggggggcgagatggggcagcaaaaataatgacttccatccaagkctcttcccaaaaacccacagctctttgaagctggctttccttttataaaatgcactgttattaatgacccaagtggaagctttctgggcaggacaatacccaactccctggtggcctctgtgggaccttgtgcatgggaaagcatccggtggccagcggatgtctccaacacgccaagtgcctatgggtgccacaaaggggtttgggagcagggtcatgtccacatgaagacccatggtaccccgagtatttggggctgctactgtcctctcaggccaaagctggggacagtaaggtctgtgctgctgcagtccagccaattcatttattcaacaaa

SEQ ID NO: 925807 - DNA, 743 bp, Homo sapiens
gcctgggtgtcatgcagaaccatctgtcaaccaggtcctagtattctctgcctctgttgactgatcatagggaattccccatgaggccatcagtgcagcctgaggagaaggcagggtggcaggaatggagaccttgggcatttgagccacttcctcatgtaacttacttgtgccttcaggacctgctcaagccaratataccacttccatttgatgatggattgctactgtgcacgacccactttatggctagatgggttagaaagcactcagttcatgatagtcagttcaggtcacatggtgacttgatgacaaacattcagcttccgccaaagtccagtaacaggccaagagctgtctctcaaaaggggagtagtaatctgcagaagaatggcatggtcttgcttcaaaatcctagaggcctctatctactgtgattcacctatgagggcctgtcaaaggctccaaacagcatccctatatgccactgaaacctcaagcaccactggatctgctgggtcttacagcccaagtggcagagcagcttgcacagcagtctggacctgttgcagagccttctcctgttttggaccccactcaaaattggcagctttttgagttactcaataaatgggccagaataacacacccaaatgaggaatgtgttgcctccaaaatccaaataggcccaccaggcattgggcctttttcttggttgtgggaggggctaaatgcaggaactt

SEQ ID NO: 925808 - DNA, 739 bp, Homo sapiens
tgggtggtgcctgggtgtcatgcagaaccatctgtcaaccaggtcctagtattctctgcctctgttgactgatcatagggaattccccatgaggccatcagtgcagcctgaggagaaggcagggtggcaggaatggagaccttgggcatttgagccacttcctcatgtaacttacttgtgccttcaggacctgctcaagccaaatataccacttccatttgatgatggattgctactgtgcacgacccactttatggctagatgggttagaaagcactcagttcatgatagtcagttcaggtcacatggtgacttgatgacaaacattcagcttcygccaaagtccagtaacaggccaagagctgtctctcaaaaggggagtagtaatctgcagaagaatggcatggtcttgcttcaaaatcctagaggcctctatctactgtgattcacctatgagggcctgtcaaaggctccaaacagcatccctatatgccactgaaacctcaagcaccactggatctgctgggtcttacagcccaagtggcagagcagcttgcacagcagtctggacctgttgcagagccttctcctgttttggaccccactcaaaattggcagctttttgagttactcaataaatgggccagaataacacacccaaatgaggaatgtgttgcctccaaaatccaaataggcccaccaggcattgggcctttttcttggttgtgggaggggctaa

SEQ ID NO: 925809 - DNA, 743 bp, Homo sapiens
gcctgggtgtcatgcagaaccatctgtcaaccaggtcctagtattctctgcctctgttgactgatcatagggaattccccatgaggccatcagtgcagcctgaggagaaggcagggtggcaggaatggagaccttgggcatttgagccacttcctcatgtaacttacttgtgccttcaggacctgctcaagccaaatataccacttccatttgatgatggattgctactgtgcacgacccactttatggctagatgggttagaaagcactcagttcatgatagtcagttcaggtcacatggtgacttgatgacaaacattcagcttccgccaaagtccagtaacaggccaagagctgtctctcaaaaggggagtagtaatctgcagaagaatggcatggtcttgcttcaaaatcctagaggcctctatctactgtgattcacctatgagggcctgtcaaaggctccaaacagcatccctatatgccactgaaacctcaagcaccactggatcygctgggtcttacagcccaagtggcagagcagcttgcacagcagtctggacctgttgcagagccttctcctgttttggaccccactcaaaattggcagctttttgagttactcaataaatgggccagaataacacacccaaatgaggaatgtgttgcctccaaaatccaaataggcccaccaggcattgggcctttttcttggttgtgggaggggctaaatgcaggaactt

SEQ ID NO: 925810 - DNA, 522 bp, Homo sapiens
  misc_feature 521, 522: n = A,T,C or G
acctcaacagaccaaaccaaacaaaactggagtcactcatgctaaaagtaacataatgaaactgagactttaaggaaacacatagatcttagaccagaacagaccaggttttgtttctctcctgtaaacagggcattctagcataaggggaagttccctctactcagtgtttgttcctacctttacaaaactcattgttctactgattcccagtgggtttcactaccaaataagtayatctactatggtgatagtgacatcaatgactaaagttttggtaaatctctctcaaaaatggagaaaatgaccaaaaggggggaattggtaaagcaaactagaaggcctgagaaggactccatacttctttatttgagtcattgtggacaaactgcaacctaacttcataggtagacaaaattgaaaatctaactttggagtatgtgcctgtaacaatagctgagtcttctccaatcccagtggccgttcttccaccattcttaccctgctaagtgttcaaactnn

SEQ ID NO: 925811 - DNA, 769 bp, Homo sapiens
cctgtgttagtctgctaagcataattgtctccagcttcatccatgtcccttcaaaggacatgatttcattcttttatatggctgcatagtattacatggtgtatatgtaccaattttctttacccagtctagcattgattaggatatttaggttgacccccatgtccttttgctttttgtgacatagtgctgcaatgaagatgagtgtgcatgtgtctttataatagaacaatttatattcctttgggtatataccccggtaatgggattgctggcttgaatgatatttctgtctttagatcttttaagaatctccacactgtcttccacaactgggtgaactaattcacacccctaccaacagtgtacaagtgttcccctttctccacaacctcttcagcatctattattatttttttgactttttaataataaccattgagactagtgtgggatgttatctcattatggttttaatttgcatttgtctaatgattagtgatactgaccaggtcagcaatcacttattgcaatcagcccagaagggagagttcgtgctatgagcccaagccaggggctccctgtttgatgatgagcagttgtgggtgtgtgggacctragagagatggactgacctcctctctttgggttgactgcaacttgttggaggtatggataaggcacttagggtctttgccccttcattagcctgagggtagcaaggacagttccactgcagaggcagtggcagacaggctttcagttgccc

SEQ ID NO: 925812 - DNA, 589 bp, Homo sapiens
gaccctgcaggccatggaaaataactcttatattccctgcatgagacaggaagcctctggagggttttgagcagagaagctgatatgacttgaatatgattttttaaaggtcactctggattgccatcgagtgtcaagacagcagaaagaccagtttagaaggctactttagccatacagggtgagagataatggacgtggtaggggtagaaatggtaagaaatatttctattctggatgtattttgaatataaatctaacagcaatttcagaagaattgatggtgagaaaaagaattaagtcatggatatctccaggtttgtaggtctaagcaactagaataatagggctgttacttattgtcataagaagattgtgggacaatcagccttgaagggaatgattaatttgtttggtctttgacagattytaatttagaatcctattagacatctactatgcagtgtgagaaggtagttgtttatagcagtttagagttcataggggaagttaatgccggagatacacacacacatacacgggcgcgtgcacaaacacacacacacacacacacacacttgccattggc

SEQ ID NO: 925813 - DNA, 568 bp, Homo sapiens
cttcagataaacatatttcagcagtgactctcaagattcactcatctgctggattttggggtggtagtttgccctgtggcctcagttttctgagagatctaagaaaatttgtttatttttagcttgttcagctttttcttattgtaaggwtaagagtaataacttctaagatctttacatattggagctgaaaccaaatatttatcaaatcatacatgtgcagaacatgcaggtttgttacataggtatacgtgtgccatgatggtttactgcacccatcaacctgtcatctacattaggtatttctcctaatgctatccctcccctagcccccaaccccctgacacgccctggtgtgtgatgttcccctccctgtgtagtgaactcccattcataattgctacaaagagaataaaatacctagggatacaacttacaagggatgtgaaggacctcttcaaggagaactacaaacaactgctcaaggaaataagagaggacataaacaagtggaagaatattccatcctcaggaataggaagaataaatatcatgaaaattgacatat

SEQ ID NO: 925814 - DNA, 568 bp, Homo sapiens
cttcagataaacatatttcagcagtgactctcaagattcactcatctgctggattttggggtggtagtttgccctgtggcctcagttttctgagagatctaagaaaatttgtttatttttagcttgttcagctttttcttattgtaaggataagagtaataacttctaagatctttacatattggagctgaaaccaaatatttatcaaatcatacatgtgcagaacatgcaggtttgttacataggtatacgtgtgccatgatggtttactgcacccatcaacctgtcatctacattaggtatttctcctaatgctatccctcccctagccccmaaccccctgacacgccctggtgtgtgatgttcccctccctgtgtagtgaactcccattcataattgctacaaagagaataaaatacctagggatacaacttacaagggatgtgaaggacctcttcaaggagaactacaaacaactgctcaaggaaataagagaggacataaacaagtggaagaatattccatcctcaggaataggaagaataaatatcatgaaaattgacatat

SEQ ID NO: 925815 - DNA, 568 bp, Homo sapiens
cttcagataaacatatttcagcagtgactctcaagattcactcatctgctggattttggggtggtagtttgccctgtggcctcagttttctgagagatctaagaaaatttgtttatttttagcttgttcagctttttcttattgtaaggataagagtaataacttctaagatctttacatattggagctgaaaccaaatatttatcaaatcatacatgtgcagaacatgcaggtttgttacataggtatacgtgtgccatgatggtttactgcacccatcaacctgtcatctacattaggtatttctcctaatgctatccctcccctagcccccaaccccctgacasgccctggtgtgtgatgttcccctccctgtgtagtgaactcccattcataattgctacaaagagaataaaatacctagggatacaacttacaagggatgtgaaggacctcttcaaggagaactacaaacaactgctcaaggaaataagagaggacataaacaagtggaagaatattccatcctcaggaataggaagaataaatatcatgaaaattgacatat

SEQ ID NO: 925816 - DNA, 700 bp, Homo sapiens
tcatgaacggataccttttcattgtgtccccacatggtggaagggagttgggtgtgtttttgtttgtttgtttgtttgtttttttgagatagaatttcgctcttgtcacccaggctggagtgtagtggcgtgatctcggctcactgcaacctctgcctcccggattcaagtggttctcctgcctcagcctccccagtagctgggattacaggtgcctgcyaccacgcccatctaatttttgtatttttagtagagatggggtttcatcatgtaggccagggtggtctcgaactcctgacctcaagtgatccgcccacctcggcatctcaaagtgctgggattacaggtgtgagccactgtgcccggcaggaagggaaccttttttcagagcactaatcacatccaaaagggcttgcccattatcataccaacgggttaggatttcaacatacaaattttggagtacatacacattcagttgactgcaaacccctctcagatgttcaaaaggtgatgctgctttgctcttttgagtcatagaaacataaagttgtgagaggaaaataaaacttgggacccccaaatcactaagccaaagggaaaagtcaagctgggaactgcttagggcaaacttgcctcccattctattactaaaaaggaaagctactaagttagaaaagctactttcctccctctcaag

SEQ ID NO: 925817 - DNA, 700 bp, Homo sapiens
tcatgaacggataccttttcattgtgtccccacatggtggaagggagttgggtgtgtttttgtttgtttgtttgtttgtttttttgagatagaatttcgctcttgtcacccaggctggagtgtagtggcgtgatctcggctcactgcaacctctgcctcccggattcaagtggttctcctgcctcagcctccccagtagctgggattacaggtgcctgccaccacgcccatctaatttttgtatttttagtagagatggggtttcatcatgtaggccagggtggtctcgaactcctgacctcaagtgatccgcccacctcggcatctcaaagtgctgggattacaggtgtgagccacygtgcccggcaggaagggaaccttttttcagagcactaatcacatccaaaagggcttgcccattatcataccaacgggttaggatttcaacatacaaattttggagtacatacacattcagttgactgcaaacccctctcagatgttcaaaaggtgatgctgctttgctcttttgagtcatagaaacataaagttgtgagaggaaaataaaacttgggacccccaaatcactaagccaaagggaaaagtcaagctgggaactgcttagggcaaacttgcctcccattctattactaaaaaggaaagctactaagttagaaaagctactttcctccctctcaag

SEQ ID NO: 925818 - DNA, 700 bp, Homo sapiens
tcatgaacggataccttttcattgtgtccccacatggtggaagggagttgggtgtgtttttgtttgtttgtttgtttgtttttttgagatagaatttcgctcttgtcacccaggctggagtgtagtggcgtgatctcggctcactgcaacctctgcctcccggattcaagtggttctcctgcctcagcctccccagtagctgggattacaggtgcctgccaccacgcccatctaatttttgtatttttagtagagatggggtttcatcatgtaggccagggtggtctcgaactcctgacctcaagtgatccgcccacctcggcatctcaaagtgctgggattacaggtgtgagccactgygcccggcaggaagggaaccttttttcagagcactaatcacatccaaaagggcttgcccattatcataccaacgggttaggatttcaacatacaaattttggagtacatacacattcagttgactgcaaacccctctcagatgttcaaaaggtgatgctgctttgctcttttgagtcatagaaacataaagttgtgagaggaaaataaaacttgggacccccaaatcactaagccaaagggaaaagtcaagctgggaactgcttagggcaaacttgcctcccattctattactaaaaaggaaagctactaagttagaaaagctactttcctccctctcaag

SEQ ID NO: 925819 - DNA, 639 bp, Homo sapiens
catggtaggcaaaaagtagaaacaactcaaatgtccatcaactgacatatggataagcaaaatgtggtatatctgtagggtggaatacgatcagtaatgaaaggaatgaagtacatgatagagcatagatgaatcctgaaaacattatgccaagtgaaaggaggcagaaacaaaaggacacatattgtataattccattggcaggaaatgtctagaacacgcaaatccagagagacaaaaaatagattagtggctggcaggggatggaggaggggaagtaactgcaaatgrgtatggggtttcttttgagggtaatgaaatgttctggaattagatattgttgatggttgcacaactttgtaaatacatgaaaaaccactgaattgtaaccttaaaagggtgagttttacagtatataaattatatctcaataaagctgttacaacaaagaggaagatcaagtgtgtcaaatgccgctgacagggcgaataatgaaatctgagaactgaccactgaatttggcaatgtgctgtttcattttgtagtagggattgattagagtgggttccaggcaaaaaaagaggaagtgaaaacacagagcttaaatagttctttttttttctttctccattttcaaag

SEQ ID NO: 925820 - DNA, 596 bp, Homo sapiens
gctaattttatattttaaacataatgcagtgtggatttggatttgggttggtgagaccaaagaggggaaactagttaagaagttatcaaagaggggaaactagttaagaagttatcaaaaccagaagaaagagatgaagagagcttggggtctgmggaatgcactaaaatggggagagttcagagttaggtaagtttgaatgaaatacaagctagttctcgggcatagacattcatagtcagcacagttagcatctctattattaacaccactgcagcacttatcacaactgtaattcagtaattacataaggagccttcttccccaaaggcatgaaccatgttgtttggctgacatctgggatactgcctgctggcatacagtatgtactcaaaaaatatttggtaatttaatacatttaccaaataagtaaattaatgataaaacttgtagaaaaataaaatcatataaaaatctaaacgctcaaaagaaattcacatatcacctagtagaaaatagagggttagaaaaattgtgtgactttcttaaagtcacaaagctgattcgtaacagagggcagagcagaatcctgtttc

SEQ ID NO: 925821 - DNA, 632 bp, Homo sapiens
agttagatttatattgttaactgtagagaagccacttaacacaaaataatagctaattaacaatgaaaataaaatgaattacaaatatgccccattaggtaaagaaaaaatgcacagaaagagaaaaaaagaacgaagggaaaacagaaacaaatagcaaagtggtagactgaagccaaccatattgataaacacattaaatgctaatggtctaatagtgtctttcaaatgaactttctgagatgattagaatgttctacatctgcagtgtccaatacagtgtgactattgattgaaatatggtttgcataagaaaggaactacatttttaatagactttgtttcttaaacatatgtaattttacagcaaaattgaacagaaaaaggagagtttccacatactccttctcattctgctcataattttcccaattattaatattttatattggtgtggtgcatttgctataattggtgaatcaaatcaatacmtgtcttagtccattcttgctgctataacaaaatatcttcaactaggtaatttgtaaatagcaagaatgtgttgctcacagttctggagcctggagagtgcaagatcaaggctccagcagacttggagtctggtgaaagcc

SEQ ID NO: 925822 - DNA, 685 bp, Homo sapiens
  misc_feature 539: n = A,T,C or G
catctgcagtgtccaatacagtgtgactattgattgaaatatggtttgcataagaaaggaactacatttttaatagactttgtttcttaaacatatgtaattttacagcaaaattgaacagaaaaaggagagtttccacatactccttctcattctgctcataattttcccaattattaatattttatattggtgtggtgcatttgctataattggtgaatcaaatcaatacctgtcttagtccattcttgctgctataacaaaatatcttcaactaggtaatttgtaaatagcaagaatgtgttgctcacagttctggagcctggagagtgcaagatcaaggctccagcagacttggagtctggtgaaagcctgttgctcatagatggcaccttctgtgtgcttacatgayggaggagcaagggaactccctggagtctctataaggacactaatcccattcatgggggtggagcctcatgacttaaccacttcccaaaggacccctctcttaatactatcacattgggcattaggtntcacacataaattttagggggatatcaacatttaaaccataagcatacacaaatttaactaaaattcacagtctacattgggggtcactttgtgctgtatagttctgtggggtttgacaaatgcatagtgtcatatattcaccatt

SEQ ID NO: 925823 - DNA, 574 bp, Homo sapiens
ttatgggtttaatgttgacacatgaaaattataatttatgctttattaattgttgacaaaagtgatgattaacaagaaaccaaattaattgtgctttctcaattaaaaagatgtaccacagcatacaatttaaccagatatttatttcctcttatcttagcaacatgggatttgctttttaaaaataaataaaaataaacaaataaaacattttgaaggcctcagatttctcccttcctttcttcatattgattgatgaataatcatggaaaaatatttagctctaactttatgcttctgacacctttttgtattctagtcatgaagttagggatgtgattyctaacatttttctcattactggccatgatattttaaaaattagactgaatagctgagatatcttgtgtaatggaaatataatattgcacataggtgtgtccctctatatgttaattacatagttcacattgtatcttaatatgtacattgaatagccagatatattaagtatgactttctttttgattctgttgctgatcagcttagttattgagaataatgtttcctagaa

SEQ ID NO: 925824 - DNA, 611 bp, Homo sapiens
ctatggagaaaacagtgtggagattccttaaagtgctttaaaaaaggcttttaaatactcatctgggcactgggttatatgtacaattattttgttctgtagatttctgtttttacgttacaaggactgaatatgtaatatggattattagcatttgccagacaggccttttatggtgtagcccagtgtttcccagtccactttagtccacaggagactcaacattgtcacgtctctatttctgattaaaggagtaagggaaatgaaaagagagtacaataagctggccagcaggctgtgtctctgcaagggggctaagaaaaggaccaattatgggtacacatgttcttggctgaccaaaatttaggcaatgaagaatcgctaatcttacttctcattgggcaaataaaaatatagaaacttaaataccttamtaaatcatataatatattaatagaagtagaaatactagaatctagaaattctggtttacaaacaaatggtcttacttcctaaccatactcactagacaatctcatgtgaaccctaatcaatgccctttttctgctatttctagtaattaagtatgcagactgttccaaaatgaggca

SEQ ID NO: 925825 - DNA, 590 bp, Homo sapiens
gatgtacaaatagtgtgccctgacttgcatgggactctcctttctattggttatataccattcctttttcttttttttttttaattgtagtaaggacctttaacatgagatgtacccacttaaagaatttttaggtgtacaatacmgtattgttaattgtagcctcagtattgtacagcacatcactagaacttattcatcttgcataattaaaactttctatccagtgaatagcaactacccctaccactttccacacagactctagcaacctttattctattctctgcttctttgaatttgactactctaggtatcctatataagtggaatcacagtatttgtgttactgcgtctgtcttatttcattgagaataacatccttaaggttcatccatattgtcacatgaggcagaattttcttctttctaaaggctgaataatattacattgtatgtttataccacatctatttatccattcatcggtcactgaacatttagtctatttccacattttgaccactgtgtataaagcttcattgaacgcaggagtgtaaagaagacataataatggccaataggtacatg

SEQ ID NO: 925826 - DNA, 713 bp, Homo sapiens
ggggcaggcagctacaggcaccagcacaggtgccagctctgtgcaagcctgtggctggaacagatgcaccaaaatgccttctgctgtgggcacccatgtctggatgaggggaacacaatggtgcccagaagcttggagatgccagaaaccacagagccccaaagagggtggcacagccctggctcagggagccccagctcttctctacttcttgttgcccacagtgtggtgagttgggggacgggggtgtacatgtttcagctctgtttgtgttatacctctttcagtcccaccattcggtgggccccaagttcttttcccacattagtaagaatgaggtacatggacaactggaggatgaccaaggcaaagaggtgtyttattgagcaacagtacagctccaaggacacccaaagtgggtagctactttccaaaggcaggttgtcctgaggagtgtgcagtcctcagcagaggggagacccagagagggtagtccctatctgcaggcaggtcgtcccattgtctgcctgagtctggctgcgtccagggtttttatgagcttcagaagaagtgcatgctgactgatccacgggcagccatgggtgggcccaaaaaagcaccataagttctcactccaggccacaggctccacccagaatcgacagttgggcccccatgcttcaggttatccctggcttgaaggtggggcttca

SEQ ID NO: 925827 - DNA, 632 bp, Homo sapiens
ggtgtcttgaggagtgttcagctttcagcagagaggagaccctggagtgggtagctcctctctgctggcaggttgtcatggcgtctctccagtctcctgtgttcggggttttatgggcttcagaggggaggaagtgcatgctgattggttcatctggtggctatgagaagcccagataaaggactataaattcccactccagtctgtgggactgggagcccgacccccaggcttcaggccttccccgacctgaaggtagagcttcaccagggacctgcccttttctgcctgggagactgtctgcctcctataactattactttgtgctaagggacgcttgaaggccagcgtgaactgccctcaatgccccggtcagcttcgctgtcatgcttactggtgcccgaagtctggagggggtcgaggaggcagggggctggtgtgacagtactgcccccagtttgcacacacctggccatgttgcaacagcacaygggctcagcctcaactttgctctgagatcaaagtgggtgcagagagcggggagagaccagacagtgggaacaagcacttctgagcctgcagcggcataggggggccttcctgggcccttgagagtgcagagatgcctgagt

SEQ ID NO: 925828 - DNA, 800 bp, Homo sapiens
agggggagtagcagcttccttaatgtggttcacagtttttactgacatgcccttaaaattctagtctgatgggactcccttgaattcgtcttctttagcccttcctacagtgttgtaaacactcagttactttctgataaaacacctraaaaatttctgttgtctgttgtaaacactgaatttctttcttttaaaacatctgaaaactttctgaatcctgactgatgggcacacagggaattataaaagggtaagtattggatctaatacagtggttcacaaatgagggtgaagagcaactttgccccttggagaatatttggcaatgtctggatacatatatatatatacacacacacacacacacatatacatatatgtgtatatatacatacatatacatgtatgtgtatatatatatacatacatatacatgtatgtgtatatatatatacatacatatacatgtatgtgtatatatacatacatatatttgtgtgtgtgtgtgtatatatatatatttgtcacgagttgggaaggtggtgctactagcatctggaacctaatgggtagaggccaaggaagctgctaaacattctgcaatgcataagaacatacagtaaaaattatccagcccaaaatatgttaagaataagggtgacaagccctggactaaagcaattttcaacaggttgtagctacaggattaaactctttattattaggcaaggcgagattgtgaagtgccatatatggtgctcgaaagaatgggcagatctcattctccctctgacacctca

SEQ ID NO: 925829 - DNA, 800 bp, Homo sapiens
agggggagtagcagcttccttaatgtggttcacagtttttactgacatgcccttaaaattctagtctgatgggactcccttgaattcgtcttctttagcccttcctacagtgttgtaaacactcagttactttctgataaaacacctgaaaaatttctgttgtctgttgtaaacactgaatttctttcttttaaaacatctgaaaactttctgaatcctgactgatgggcacrcagggaattataaaagggtaagtattggatctaatacagtggttcacaaatgagggtgaagagcaactttgccccttggagaatatttggcaatgtctggatacatatatatatatacacacacacacacacacatatacatatatgtgtatatatacatacatatacatgtatgtgtatatatatatacatacatatacatgtatgtgtatatatatatacatacatatacatgtatgtgtatatatacatacatatatttgtgtgtgtgtgtgtatatatatatatttgtcacgagttgggaaggtggtgctactagcatctggaacctaatgggtagaggccaaggaagctgctaaacattctgcaatgcataagaacatacagtaaaaattatccagcccaaaatatgttaagaataagggtgacaagccctggactaaagcaattttcaacaggttgtagctacaggattaaactctttattattaggcaaggcgagattgtgaagtgccatatatggtgctcgaaagaatgggcagatctcattctccctctgacacctca

SEQ ID NO: 925830 - DNA, 653 bp, Homo sapiens
tacaatggcttctaggtgttcaagtgaaaggaagagtcacacatttctaactttaattcaaacctagaaaggattaagcctagggagaaaggcatatccaaagctgagataggcaggaagctaggcttctcaggccagttagccaaattgtgaatccaaataaaatttcttgaaggatattaaaagtgataytccagtgaacacatgaatgatatgaaagcgaaactgtctttttgctaatatgaagagagttcgaatggtccggatagaagatcaagccagccacagcattcccttaagccaaaacctaatccacagcaaggccctaactctcttcaaatctatgaagcctgagagaggtcaggaagctgcggaagaaaagtctgaagctaacagagtttgcctcatgaggtttaaggaaagaagatttctccataatctaaaagtgcaaggtgaagcagcaagtgctgatggagaagctgtagcaagttattcagaagatctaggtaagatcattgatgaaggtgactacactaaacaacagatttttgatgtaaacaaaacaactttttcttgaaagaaaatgccaccttggagtttcacagctagagagaagtcaatgcctggcttcaaacttcaaaggacaggctgat

SEQ ID NO: 925831 - DNA, 592 bp, Homo sapiens
  misc_feature 590, 591: n = A,T,C or G
cagtgagccaagatggcaccattgcactccagtctagacaagagcgaaactccatctcaaaatttaaaaaaagaaatatactttggggaaaatccttttgttactggtggagggtgtccaggtttttggtgtcttaaataattgtacaaaattcacaaacaaacaaaggaaagaatgaagcaacaaaagcagagacttattgaaaacaaaagtacaggccgggcgcggtggctcacgcctgtaatccctgcagcattttgggaggccaaggcaggcggattacttggggccaggagttcgagaccagcctggccaacatggtgaaaccccgactctactaaaaatacaaaaattaggccaggcgcggtagctcatgcctgtaatcccagcactttgggagggcaaggcaggcggatcacgagatcaggagytcaaaaccagcctggccaatatgtgaaacccccatctttactaaaaatacaaaaattagctgggcgtggtggtgcgtgcctgtaattccagctactcaggaggctgaggcagaagaatcgcttgaacccaagaggcggggtttgcagtgagctgagacnnc

SEQ ID NO: 925832 - DNA, 600 bp, Homo sapiens
ggtcgaggcaggcggatgacctaaggttagcagctcgagaccagcctgaccaacatggtaaaaccctgtctctactaaaaatacaaaaattagctgggtgtggtggtgtgtgcctgaagtcacagctacttgggaggctgagacaggagaactgcttgaacccaagaggcggaggctgcagtgagccaagatcatgccactgcactccagcctgggcgacagaacgagttcagtctcaaacaaaataaaaataaataaaaataggccgggcacggtggctcacacctgtaatcccagcactttgggaggctgaggcaggcggatcacaatgtcaagagaycgagaccatcctggccaacatggtgaaagctcatctctactaaaaatacaaaaattagctcggcgtgttggcgcgcacctatagccccagccactggagaggctgaggcaggagaattgcttgaacccgggaggaagaggttgcagtgagccaagattgcaccactgcactccagcctggcgacagagtgagactccatctcaaaataaataaataagtaaaaataaaagttacctgatccccaaagcctggtatttgat

SEQ ID NO: 925833 - DNA, 716 bp, Homo sapiens
ataccatgccccattgggaatggaggagtgcccttctaaatgctgatggctcagggtttaagggtgcctcaggctgatccatggccttatcatgcatcaggactacaggtcccctgacttcttataattctgctgctaaggggcttatactcagggtattctgctgttctaagtaggcaccccactttgctaaggtggatgtctgtgctgtcctgtctggggggtcattgaatgtacccaccccactattgggtaagtcatccacacgatgacttcagcccatcccatcacactctcacaagactgaagggcagcatatgaagctgctaactrcttctctatcagtgactatcggagctcacctcccttccaaagctgggaccaaaagtctaccagtgttctgaagtgctccatggactgccataggccccagccacagtcatctgtggtcacatgctcatccatttcaaatgggcgccccaggtcaatcactcatagggcctgtgcttgctgtatggcctgcttggctgccagaaaagccatctcagcctcatcagcccaattccaggtagttcctttttttgtcaaccaatgcaagtgtttcatcaactgagccaaatagggtgcgatgcttgccaatatcccaaaaggcacacaaaagtctgtagctgccacatcgttgtgggccggggatatgcctgaattttatcagtgat

SEQ ID NO: 925834 - DNA, 716 bp, Homo sapiens
ataccatgccccattgggaatggaggagtgcccttctaaatgctgatggctcagggtttaagggtgcctcaggctgatccatggccttatcatgcatcaggactacaggtcccctgacttcttataattctgctgctaaggggcttatactcagggtattctgctgttctaagtaggcaccccactttgctaaggtggatgtctgtgctgtcctgtctggggggtcattgaatgtacccaccccactattgggtaagtcatccacacgatgacttcagcccatcccatcacactctcacaagactgaagggcagcatatgaagctgctaactacttctctatcagtgactatcggagctcacctcccttccaaagctgggaccaaaagtctaccagtgttctgaagtgctccatggactgccataggccccagccacartcatctgtggtcacatgctcatccatttcaaatgggcgccccaggtcaatcactcatagggcctgtgcttgctgtatggcctgcttggctgccagaaaagccatctcagcctcatcagcccaattccaggtagttcctttttttgtcaaccaatgcaagtgtttcatcaactgagccaaatagggtgcgatgcttgccaatatcccaaaaggcacacaaaagtctgtagctgccacatcgttgtgggccggggatatgcctgaattttatcagtgat

SEQ ID NO: 925835 - DNA, 829 bp, Homo sapiens
gaagctgctaactacttctctatcagtgactatcggagctcacctcccttccaaagctgggaccaaaagtctaccagtgttctgaagtgctccatggactgccataggccccagccacagtcatctgtggtcacatgctcatccatttcaaatgggcgccccaggtcaatcactcatagggcctgtgcttgctgtatggcctgcttggctgccagaaaagccatctcagcctcatcagcccaattccaggtagttcctttttttgtcaaccaatrcaagtgtttcatcaactgagccaaatagggtgcgatgcttgccaatatcccaaaaggcacacaaaagtctgtagctgccacatcgttgtgggccggggatatgcctgaattttatcagtgatggcctctggtatggcctttgtcttattcaaccagataactcccaagaatttggcagacaatcaggtctttggacattgatttgttgacagcccaaccgcatactgccaaatgttgtcacaggagggatgctgctgcttctaaatctccaagagaatcagaggttaacataacataatcaatataatggaataagtggaccccctttggacatttccaggtcactaaatccgtggcaaggagaccatgacatatgacgtggctatgcacatagccctgcagcaacaccgtcaaagtctattgtcacccctcccacatgaaggcaaacttcctggctctctggagcaatgtcaattgagaagaatgcattggccaagttcaccacatagtggtgctgtcccaattccattgtcaagtggtccatcaaatccgtg

SEQ ID NO: 925836 - DNA, 829 bp, Homo sapiens
gaagctgctaactacttctctatcagtgactatcggagctcacctcccttccaaagctgggaccaaaagtctaccagtgttctgaagtgctccatggactgccataggccccagccacagtcatctgtggtcacatgctcatccatttcaaatgggcgccccaggtcaatcactcatagggcctgtgcttgctgtatggcctgcttggctgccagaaaagccatctcagcctcatcagcccaattccaggtagttcctttttttgtcaaccaatgcaagtgtttcatcaactgagccaaatagggtgcgatgcttgccaatatcccaaaaggcacacaaaagtctgtagctgccacatcgttgtgggccggggatatgcctgaattttatcagtgatggcctctggtatggcctttgtcttattcaaccagataactcccaagaatttggcagacaatcaggtctttggacattgatttgttgacagcccaaccgcatactgccaaatgttgtcacargagggatgctgctgcttctaaatctccaagagaatcagaggttaacataacataatcaatataatggaataagtggaccccctttggacatttccaggtcactaaatccgtggcaaggagaccatgacatatgacgtggctatgcacatagccctgcagcaacaccgtcaaagtctattgtcacccctcccacatgaaggcaaacttcctggctctctggagcaatgtcaattgagaagaatgcattggccaagttcaccacatagtggtgctgtcccaattccattgtcaagtggtccatcaaatccgtg

SEQ ID NO: 925837 - DNA, 706 bp, Homo sapiens
tatacaaaatgaataatttctgaagatctgatgtacagcaatgtgactatagttaacattattgtattgtagacttgaaatttgctaaaagggcagatattaagtgttcttgccatatatacacagaaaaagaggcaactatgtgaggtgatatatatgttaatttgactgtggctaatattttatgacacatacatcaaatcaagttgtataccttaaatatacacaattttaactgtcaaatatacaataaaactagaaaaagaatagggcccctttataaccttttaagtggagactggagcacagaagatgcccttggatggggaaatcaccatcagtaaatacagttcatgctgagggtgatgggaagatacaggctgtggggtcaggccgcctgcctctgcctcttattggctgtaggaccttaggcacttatgttaaaagactgagctttattcactcacccataaaatggaaatattacaattacctacttaataagggtgctatgagagtgaaagggatgkacaaatgcttagcacagtgcctggtgcagaatccccacttaataaatgctggctattatcataatcccgttaatacattttattaataacaaattataattgcaataacaacttctccagagctaagcccaaattcgaagatgagttagtgctccaagtggccccacttaaccatg

SEQ ID NO: 925838 - DNA, 539 bp, Homo sapiens
ctcctattcctactagagggcttaagataggctctgagcggcacttcccactttctcctctttttctgaagcttcgagccccaaacctcgccctttaaattcaccaagggaccacatgcatcatataagggtgaggaaaagggacctggatgtagacttcctgactatccaaaggaacctacttctctttgctgttctcaagttcaggcgtccggagaaaggcagggarctaggggctctgggtgctagcgtagacgtggcccttagctgagtggcgcgagaggggaggaggttggaagagcgcgtctatgcgttccacctgaacctgcaagctagtcgcttgctgcccaggtgccgattcgcggctgcatgcgccccactgcagcaaagagcagccgcagcctctgcctcggccaccactgctgctgggaaagagtcgtggggctgctgacgcggttgggaggagcctcgcctttaatgcaccagccgcctccagcctcctgcagcagcagcagcagcacgagcagcagctgcgagtg

SEQ ID NO: 925839 - DNA, 585 bp, Homo sapiens
aaacattaacagttggggaaatctgtgtgacgggtatatgagtgttcattgtattattcttgcaactttcctgaaacttgaagaaatattaattaaaaaataattaatcaatggaggccgcccaccagtgtgagaagtgctgtctacacatttaacaggcctgatgcgaggctcttctgggacttaaccttgggctccactccactttcacctctctaggctagtggcctgccctgcgtgtgggaatggctgcattgaattacgtggacagtgctataattatgtcgtcttccctttcatcttccttgcaggactccaagtgagaatgtgtggagtgagctaatgatttgccacatatctctgatgagtactatattatttgcatcataatattttcatttcctccccctgcacataacgycacattgacagcaaggtcagttaagttactataagggatttttaatgaaaacaattataaatttaaaataactgtgtttaaagcatttaacaatcactagggtcaagtgattacagcagttacaagccccatgggacatgttcacaccaaaacaaagtgaataa

SEQ ID NO: 925840 - DNA, 591 bp, Homo sapiens
gaactggacccacagacagtgagctggggaggcaagtaacctactgagacacaatttggggtggctaaggcagtgctggcatcatccctcctccaatcctgggcttcacagctcatggcttcaaaagagaccccttctttccacttgaagagagcagagagaagagtggggaggactttgtcttgcatcttggattttaactcagccacagcaggatagggcactagttagagttgtgaggccccattccaggccctarctcccagataacatttctagacataccctgggccagaagggaacctgcttccttgaaggaaagggcccagtgctggcagcattcatcacctgctaactgaagagcctttgagccctgaataaccagcagaaatacccaggtactacaccaagggtcctgggtgagcctctgagacttgatgtcttcagctgagattacgcacagctgtggtgcaaaacaccttctgctagagaagagtacagggaaaagtaaaggggacttggtgttgcaccttaggtatcagaatggccatgtgggagcagagcaccaaccgggttcttcgggttctcagt

SEQ ID NO: 925841 - DNA, 538 bp, Homo sapiens
gctaaaagggcacaaaatacagctcaggctgttgcttcaggtggtgtaactcccaagccttggcaacatccatgcagtgtttggcctctggttgcacagaagtcaagaattgagggttaggaacctctgcctagattttagaggacatatggaaatgcctggatgtccaggtagaagtttgctactggggtgcagccctcatggagaacctctggtaggggagtgcagaaggaaaatgtggggtagaagcatccacacagagctcccactgggacactgcctagtggagctgtgagaagaaggccatcgtcctccagaccccagaatggtaaatccaccagcagcttgaaccatgtgcctggaaaagctgsagaaactcagtgcaaagcctgtgaagacagcctgtagaggaatcgtaccctgcaaagctacaggggcagagttgaccaagactgtgggagccaacctcttgcatcagcatgacctggacgtaagacatggattcaaagaagatcattttggagcttttaggtttaat

SEQ ID NO: 925842 - DNA, 790 bp, Homo sapiens
ctaacatcctcttcctttgaccaggcactgcttcatctaaaatcacaaatgggccaggcatagtggctcacgcctgtaatcccagctatttaggaggcggaggtggggggattgttagggcccaggagtttgagaccagcctgggcaacatagtgagaccccatctctaaaataacaaaasaatgcaatgtaaaacaatacagtagaatacaaaaataatcggaggtatgtcctgcagaggtctctgggacccactgggacctgaacaagaatgagaccttgctgagcctatgctcctccgagtgtacttggggttagggtcttggggagtgtggcctcagctcctccgagtgtactcggggttagggtcttggggagtgtgacttcagctctgtgtttgaacttctgcaggcccgtcacggaccatctggacgagcaggcagtgcagggcctgaagcagattcaccagcaggtttgtgtgcagcctctgggtgtaccctcaggaggcatcacaggacctgcccccttagggcctcccaccctccccaggcagggtctgcagtcctggtggccactgtgctccatcagtcctgggctcagtgggggacctgcggtgtgatcactctgggaacaggctctctgctggcgtcatgcttgtgaacagccaccttggagggttgccctgggaggggaagagactcctaggaaatgagtgcagactttctgtgcacgtagccagcatgtccttggtctctgaggaaggcttatgaagctagtgcagtcggtggag

SEQ ID NO: 925843 - DNA, 790 bp, Homo sapiens
ctaacatcctcttcctttgaccaggcactgcttcatctaaaatcacaaatgggccaggcatagtggctcacgcctgtaatcccagctatttaggaggcggaggtggggggattgttagggcccaggagtttgagaccagcctgggcaacatagtgagaccccatctctaaaataacaaaagaatgcaatgtaaaacaatacagtagaatacaaaaataatcggaggtatgtcctgcagaggtctctgggacccactgggacctgaacaagaatgagaccttgctgagcctatgctcctccragtgtacttggggttagggtcttggggagtgtggcctcagctcctccgagtgtactcggggttagggtcttggggagtgtgacttcagctctgtgtttgaacttctgcaggcccgtcacggaccatctggacgagcaggcagtgcagggcctgaagcagattcaccagcaggtttgtgtgcagcctctgggtgtaccctcaggaggcatcacaggacctgcccccttagggcctcccaccctccccaggcagggtctgcagtcctggtggccactgtgctccatcagtcctgggctcagtgggggacctgcggtgtgatcactctgggaacaggctctctgctggcgtcatgcttgtgaacagccaccttggagggttgccctgggaggggaagagactcctaggaaatgagtgcagactttctgtgcacgtagccagcatgtccttggtctctgaggaaggcttatgaagctagtgcagtcggtggag

SEQ ID NO: 925844 - DNA, 830 bp, Homo sapiens
cccagctccccactctcatattctgtagccacgttttctaatggtgttggggggcttctattcatcactactacaggggagatatcagttatagccaataaggagcttggctcagttcccaagtatgaggctgtatattcaccatttcacttccttagacacatactttcataaaagacatacctgggtcaacagcacttcttatttccagcctcccttattgagctggctggcctcatgcccttccctgactccacgcagcaggcttggctggtgctcccagctcccgctcagtccagcaggagggataccctcctccactgcctgtaggaggtgggctcctagccttcactggcttctgcacctggattcagcaggccagctcaccacaagagtgtcagttccattgctgatccataaagatgtctgccttgcttttccgccagactatttctttttagcttcctcttctttgtgttttayatatcattgctctgtgtaatgcagaaaggatgtatcaaagtgtaaactcgtagcactctctgcctaaatggcacaacacactctttagagggaaaactatgtaaagctttgttcaagccaaagcttgcctgaattcattagccaatgcattcattgcctactctatccacagtataacagtagcatgaacaggaaatgtttcatctttaactttcccaatatcttcccaagagaaatttcctagtgtcttacatttctatattgggtggaaacttttctatgaagttctctctcattggcaagtcatgattacagaaatgtgtagacaggccataatttcagataca

SEQ ID NO: 925845 - DNA, 576 bp, Homo sapiens
ctcaagatggcttaaggacttaaacctaagaccagaatcgataaaagttctagaagataacattcaggaaactcctctagacattggcttaggcaaggatttcatgaccaagaacccaagacaaatgcaataaaaacaaagataaatagctgggacctaattaaactaaaaagcttttgcatggcaaaaagaacagtcagcagagtaaacagacaacccacagtgtgggagaaaatcttcgcagtctacacatctgacaaacaactaatatccacaatgtacaatgagctcaaacaaatcaggaagaaaaaaacaaacaaacaattccatcaaaaagtgggataagaacatgaatagaaaattctcaaaagaagatacacaaatggccakcaaacatattttaaaatgctatacatcactaatgattggggaaatgcaaatcaaaaccacaatgcgataccgcctcactcctgcaaaaatggctattatccaaaaataaaaaacagtacatgctggtgtggatagagtgaacagggaatgcttctaccctgctggtgggaacttaaactagtacag

SEQ ID NO: 925846 - DNA, 576 bp, Homo sapiens
ctcaagatggcttaaggacttaaacctaagaccagaatcgataaaagttctagaagataacattcaggaaactcctctagacattggcttaggcaaggatttcatgaccaagaacccaagacaaatgcaataaaaacaaagataaatagctgggacctaattaaactaaaaagcttttgcatggcaaaaagaacagtcagcagagtaaacagacaacccacagtgtgggagaaaatcttcgcagtctacacatctgacaaacaactaatatccacaatgtacaatgagctcaaacaaatcaggaagaaaaaaacaaacaaacaattccatcaaaaagtgggataagaacatgaatagaaaattctcaaaagaagatacacaaatggccatcaaacatattttaaaatgctrtacatcactaatgattggggaaatgcaaatcaaaaccacaatgcgataccgcctcactcctgcaaaaatggctattatccaaaaataaaaaacagtacatgctggtgtggatagagtgaacagggaatgcttctaccctgctggtgggaacttaaactagtacag

SEQ ID NO: 925847 - DNA, 733 bp, Homo sapiens
ttgttattctcagatatggtttttcttttttgtgtgtgtggttattttgtgtgtgtgtgtgtgtgtgtgtgtgtgtgtgtgtgtgtgtgtgtgtgatggagtcttactctgttgcccacactggggtgcagtggcgcaatctcagctcactgcaacctcccctcctgggttcaagtgattctcctgccttagcctcccaagtagctgtgattacaggcacctgccacccgcccatctaatttttgtatttttagtagagacagggtttcaccatkttggccagactggactcaatctctcgacctcaagtgatccacccacctcagcctcccaaagtgctggaattacaggcgtgagccaccacacccagcctcagatatgtgttaaacaaagatatatgaccaggtagtctagattaactatatatcataatttaccagttgtcagatgggcaaagataaaaatgtttgagaatatactgtgttagaaaatggaagggaaatgagaacactcatacattgcttatgggtgtgtaaattgtcacatcctctaaggagagaaactggattacatttctcaaggttaaccatgtaaataattttttttttaaatggaatctcgctctgtggccaggctggagtgcagtggtgcaatatcggctcactgcaacctccaattccctggtccaagcgattctcctacctcagcctcctgagtagctgggattacaggc

SEQ ID NO: 925848 - DNA, 733 bp, Homo sapiens
ttgttattctcagatatggtttttcttttttgtgtgtgtggttattttgtgtgtgtgtgtgtgtgtgtgtgtgtgtgtgtgtgtgtgtgtgtgtgatggagtcttactctgttgcccacactggggtgcagtggcgcaatctcagctcactgcaacctcccctcctgggttcaagtgattctcctgccttagcctcccaagtagctgtgattacaggcacctgccacccgcccatctaatttttgtatttttagtagagacagggtttcaccatgttggccagactggactcaatctctcgacctcaagtgatccrcccacctcagcctcccaaagtgctggaattacaggcgtgagccaccacacccagcctcagatatgtgttaaacaaagatatatgaccaggtagtctagattaactatatatcataatttaccagttgtcagatgggcaaagataaaaatgtttgagaatatactgtgttagaaaatggaagggaaatgagaacactcatacattgcttatgggtgtgtaaattgtcacatcctctaaggagagaaactggattacatttctcaaggttaaccatgtaaataattttttttttaaatggaatctcgctctgtggccaggctggagtgcagtggtgcaatatcggctcactgcaacctccaattccctggtccaagcgattctcctacctcagcctcctgagtagctgggattacaggc

SEQ ID NO: 925849 - DNA, 740 bp, Homo sapiens
tgctggatctcagatttctccaccatcacccttggctgactaggtctgggtaaggtctggatgtgtggagaatgagtgtagctccccttcctcccttccttctggctttggtgggcaggaaccctgtggtctggtgctagtctttagtgaggccggatgcctcgaccttggagcccttccgtggtctttgctaccatacaaatatccctgtctcaacttcctggcttcaggggtcttacagaggcccagtctgtatgtgtcccattgacatagctccctagtctccttaagaaggcctggggcttgcagaaggaagtgagccaggcttgctcacctgaccaccttctgggacctacgcaatagtctgggcctgtgggcttctctggactccctgtcaccccagcctcagcatctccagacactgggaactctattcccccagaagcctaccacaaccacgtctgattacatctgcatactaccacatttttcccgagtctgatgcattgagggactctaaagagactacarttttcccaggctgtgcccaagaagtaggggcaagccccagccctcagaccccctgagacttctctggctggtggtgcgcatctcctcttccagaagtttcaacgcagtgagggacaggcccaggtgcccgcttctcacctctctccctctccttttctcttaactacttttcttcttcccatagctcctcagagatgaaacaggatggg

SEQ ID NO: 925850 - DNA, 602 bp, Homo sapiens
acccccaaaatttcactcccagtccttagaggatcagccaggggccctcagtctccaacatacagatgagggactgcagtccagggaaggaaatggactgggcctcctgacacccagctcctgctccctccccaaagtgtaggagctagcaggagccttgccactgagaagtggggacatcagtgcttaatcagaccaacctctgctctgaggggctcccagtctggtgtaggccatagacattttaaaagtgtgatcaaggccrggtgcagtggctcacgcctgtaatcccagcacttctggaggccaagacagacagatcacctgaggttgggagttcgagaccagcctgatcaacatggagaaacccagtctctactaaaaatacaaaaattagctgggtatggtggtgcatgcctataatcctagctactcaggaggctaaggcaggagaatcccttgaacccaggaggcagaggttgcagtgagccaagattgcgccattgcactccagcctgggcaacaagagcgaaactccatctaaaaaaaaaaaaaaaaacaccactgaaaaacaaaagtgtgatcaatgctaggctggaagg

SEQ ID NO: 925851 - DNA, 801 bp, Homo sapiens
ggcaacctgctgagccagggcggggcctgtgtaccagccctgactctgccactcactggtgtgaccttgggaaacctcccctctgagcctccaggtcttcatccatatgtctgaccaccctgggttcttacgaagattcagatatggtatgtgacagcacctggagatattatggtgctggctgtgccacagacttgatgctggcttgggacaaattgcttccctctcctacaggctcttcatttgtaaagtggcaatagagtatttggacctgtccctgctacctcctagggctactgagaaactcaggtatgatggtgcctagaattatttataccaacaccacctggacaggatataacatgaagacaccaaaaggccacatggaggcaccgccatgctgaaacagccccattttaagaaaaacagtgttccagccaggcgcggtggctcacgcctgtaatcccagcactttgggaggccaaggcgggtgggtgacctgaggtcaggagtttgagaccaacatggtgaaactccatctctactaaaaatacaaaaattagctgggcgtggtggcgggmacctgtaatcccagctactagggaggctgaggcaggagaattgcttgaacccaggaggcagaggttgcagtgagccgagatcacaccactgcattccagcctgggcaacagagcaagactcagtctcaaaaaaaaaaaaaaaaaaaatcaatgttcctccatatccatgagacatctatggattcaaacaacctcagatgtattcagaaaaaaaaataga

SEQ ID NO: 925852 - DNA, 578 bp, Homo sapiens
atttcagcctcaggagctcagaggagagatgaaggctgaatctataaatgtgggagtcatttacatgtggatttatgtaaacctacaaaaatgggtgagatcctgggagtgagcatagacagagaagagggcccagaagccagccctggggmacacctacatcaggggtatagcagaggagcaagaaccagcaacagagactggaatgggacagccagtgaaataggaaaactagaacagcatgctaccacaaaagccagagaagcaaatgcttcaagaatgagagtctaagtactctgagaagtcaaatcaaataaagacagagaaagaaccatgggactcaggaatgtgggcatcactaatgacctgaacaagagcagtttttgtgagcagaccacctgttagagtggttaggaggggcaggagatgagaaagtggggacaacattcgccacttttctgagaagttttgctatacaggagagcagagaaatgggaccgaggataaagaggcgtatgaggtagcaaggattcttgtgttttgttcttatatgtgacattctattgcatgtttttaca

SEQ ID NO: 925853 - DNA, 754 bp, Homo sapiens
accccagggtgcagtcctaaggcctcttctttatctataatcacttatccaaggtccagatttaaaataccacccaatatagatgacttctaaacatatagctggccttcttcctgaatgctacacgtgtccatccaattgttatgagaggtatccacatggatgtctgacaggcacatcaaactgtgcatatttaaatatgaattcttgatcttcttgctccttcttcaatcttcgctatgtcagttaatgacaacaccatccttctaatagctctggccaaaaaatctcagcatcattcttgacacctctctttcactccccacatccaatctgtcagcaaatcctgttggctctgtcttcaaaatatatctgcttctcaccacctccaytgctaccagcctggttcaagctactgtcacagcctaccactaactgacacaggtggtcatgctgccctacctggagtgtgttctcaacccagcagctcaaaggatcctttagaagctgagtcagggggtctcactcctctgcctgaaaccatccagtgtcttcccatcttactgagagtagaagttagagccttaaaatggcctatggagccctgcagggtctgagagctggcccaccgcttatctccctggactgtccacagctctccccatctctctctattccagttgcacaggttccttgctgtgcctcacatgtgctgggcacacttcgcctctggccctgtagacttgctcttccc

SEQ ID NO: 925854 - DNA, 549 bp, Homo sapiens
tgatgacattccaccattgtgatttgttcctgccccaccctaactgatcaatgtactttgtaatctcccccacccttaagaaggttctctgtaattctcctcacccttgagaatgtactttgtgagatccacccctgcccgcaaaacattgctcttaacttcaccgcctaacccaaaacctataagaactaatgataatccatctcccttcactgactctcttttcggactcagcccacctgcacccaggtgaaataaacagctatgttgctcacacaaagcctgtttggtggtctcttcacaaggacgcacatgaaatttggtgccgtgactcggaccaggaccgcaccctgtagcctttctgtccaaacaacttgaccttactgttttagcctaaccctcatgtctgcrtgcagtggctgccactgctttaatacttttagaggccctaaaaatcacaaactatgctcaactcactctctacatttctcataacttccaaaatctattttcttcctcatacctgacgcatatactttctgctccccg

SEQ ID NO: 925855 - DNA, 629 bp, Homo sapiens
gccgaggtgggcagggattggattctacagactattgtatgctacattaagaatcttggccttttttctaaagcacatggagagtcatcaagaagtgtaggcatgggagtatcagactataatttgctacagctcagatgatggactggagtgaagcaaaattggatgtggggaatccagttaggaaattttggtgatcagagttgtggtgagatacagggagaaatgaatgaatataagaaataaataggaagtaaaatcaagtggatctggatatgggaaatgaaagagacaggggtgtaaagaatgactctcaatgtctgggatgtgcaactgtgagtatgatggtgtccatcagtaaggtagggaaaattgsaggggcatcagggtttgaagtagaaatataatgagttcagttttgggctttagagaaatatgagtggacactttcaagtgtgcagtagaatacatggagctggacttccaagaaaaggtcagggctggagatacgcatttgagagtcatccaagtatagttagtaactgtagccactggcatggatggaattttcttgggagactgtagacatttaatctagcatgttgactgaatacagaggatagtttctg

SEQ ID NO: 925856 - DNA, 603 bp, Homo sapiens
attgaagagaatgatgtcacagaagcccagagaaagagtggtggagccaggtaactgctgatggcatagaatgcatctaacagttcacatgaactctaaacttgttccttggatttaatgacttctgtgatgaagactcaacttcttagcatgacatataggaccttgctaaggaaacttttaaggttttattkttgtttttaaccttctaatatttttcactaaaaataaaataggaattataaaaaggtattaattttataaagcataataccttgctgtataaaacacaatattatttattccactaaaggtatcagaaaataagggagagaacatttcaaaatagaattggatgtcaggactttactcaggaacataatccatacgaatcccattttttctttgaaaaatcagagttattttaactcacagcactttttatagcacatctattataattatttatttgtaaatcaaatttctgtatatattggaatatgtataattatatatgtaatatatatgaaaataaaaaatattattcaaatgtattctgacagtttctctgaatcacatatctgtttccaattgtcagttttt

SEQ ID NO: 925857 - DNA, 568 bp, Homo sapiens; identical to SEQ ID NO: 923806

SEQ ID NO: 925858 - DNA, 573 bp, Homo sapiens
accttataaaatgagttagggagaaatccctctttttctattctttggaatagtttcagaaggaatggtatcagctcctttttgtacctctggtagaattcggctgtgaatccgtctgatcctgggcttttttttggttggtaggctaattattactgcctcaatttcagaattcgttattggtttattcagggattcaacttcttcctggtttagtcttgggagggtgtatgtgtccagsaatgtatccatttcttccagattttctagtttatttgcacagaggtgtttataatattctctgatggtagtttttatttctgtgggatcagtggtgacatcctctttatcattttttattatgtctatttgattcttttttcttctttattagtctggctagcagtctatctttttgatctcttcaaaaaactggctcctggattcattgatttttttgaagggttttttgtgtctctctttcagttctgctctgatcttagttatttcttgtcttctgctagcttttgaatttctttgctcttgtttctctagttctcttgtgatgttagg

SEQ ID NO: 925859 - DNA, 573 bp, Homo sapiens
accttataaaatgagttagggagaaatccctctttttctattctttggaatagtttcagaaggaatggtatcagctcctttttgtacctctggtagaattcggctgtgaatccgtctgatcctgggcttttttttggttggtaggctaattattactgcctcaatttcagaattcgttattggtttattcagggattcaacttcttcctggtttagtcttgggagggtgtatgtgtccaggaatgtatccatttcttcyagattttctagtttatttgcacagaggtgtttataatattctctgatggtagtttttatttctgtgggatcagtggtgacatcctctttatcattttttattatgtctatttgattcttttttcttctttattagtctggctagcagtctatctttttgatctcttcaaaaaactggctcctggattcattgatttttttgaagggttttttgtgtctctctttcagttctgctctgatcttagttatttcttgtcttctgctagcttttgaatttctttgctcttgtttctctagttctcttgtgatgttagg

SEQ ID NO: 925860 - DNA, 573 bp, Homo sapiens
accttataaaatgagttagggagaaatccctctttttctattctttggaatagtttcagaaggaatggtatcagctcctttttgtacctctggtagaattcggctgtgaatccgtctgatcctgggcttttttttggttggtaggctaattattactgcctcaatttcagaattcgttattggtttattcagggattcaacttcttcctggtttagtcttgggagggtgtatgtgtccaggaatgtatccatttcttccagattttctagtttatttgcayagaggtgtttataatattctctgatggtagtttttatttctgtgggatcagtggtgacatcctctttatcattttttattatgtctatttgattcttttttcttctttattagtctggctagcagtctatctttttgatctcttcaaaaaactggctcctggattcattgatttttttgaagggttttttgtgtctctctttcagttctgctctgatcttagttatttcttgtcttctgctagcttttgaatttctttgctcttgtttctctagttctcttgtgatgttagg

SEQ ID NO: 925861 - DNA, 744 bp, Homo sapiens
ataatagaacaccaagtagacttctaaggttttttaactctagtctctgactcccagatggtacttctggacccacctagggcttgggcagtgtccctgcccagaagggaaggacgaagatctgactgactttggcacctggtgattatagagcccaagggccttgagtgaacataggcagtagtcagggagtggttgcaaccggccttggaggatacccagtgctgtgctggcttcaggtctgacgcagtgcagtcatagtggtggtggcmacagaggtgcttgtgtcacaccaccctcggctttagctggctcagaacagagacggagactctgtatgtttgggagaaagttaagggaagagaacaagagtctctgcccagaaaactagataattctggatcttatccaagaccatcaaggcggttcctctacaagtcttcaagaatgacagtgttactgggctttggttaccccctaaggcagatacagcttagatcacaataccaaagtcctttcaagtatctagaaagtcttcccaagaaggacagctacaaataaccccagacagtgaagactacaataagtccctaacccttcaatgcccagacactaaagaacatttactgcatcagtactatccaggaaaacatgacctcaccaaataaactcagtaaaccaccagagaataatcctaaagatacagagatgtgacctttcagacagagaattcaaaatagctgt

SEQ ID NO: 925862 - DNA, 744 bp, Homo sapiens
ataatagaacaccaagtagacttctaaggttttttaactctagtctctgactcccagatggtacttctggacccacctagggcttgggcagtgtccctgcccagaagggaaggacgaagatctgactgactttggcacctggtgattatagagcccaagggccttgagtgaacataggcagtagtcagggagtggttgcaaccggccttggaggatacccagtgctgtgctggcttcaggtctgacgcagtgcagtcatagtggtggtggccacagaggtgcttgtgtcacaccamcctcggctttagctggctcagaacagagacggagactctgtatgtttgggagaaagttaagggaagagaacaagagtctctgcccagaaaactagataattctggatcttatccaagaccatcaaggcggttcctctacaagtcttcaagaatgacagtgttactgggctttggttaccccctaaggcagatacagcttagatcacaataccaaagtcctttcaagtatctagaaagtcttcccaagaaggacagctacaaataaccccagacagtgaagactacaataagtccctaacccttcaatgcccagacactaaagaacatttactgcatcagtactatccaggaaaacatgacctcaccaaataaactcagtaaaccaccagagaataatcctaaagatacagagatgtgacctttcagacagagaattcaaaatagctgt

SEQ ID NO: 925863 - DNA, 744 bp, Homo sapiens
ataatagaacaccaagtagacttctaaggttttttaactctagtctctgactcccagatggtacttctggacccacctagggcttgggcagtgtccctgcccagaagggaaggacgaagatctgactgactttggcacctggtgattatagagcccaagggccttgagtgaacataggcagtagtcagggagtggttgcaaccggccttggaggatacccagtgctgtgctggcttcaggtctgacgcagtgcagtcatagtggtggtggccacagaggtgcttgtgtcacaccaccctcggctttagctggctcagaacmgagacggagactctgtatgtttgggagaaagttaagggaagagaacaagagtctctgcccagaaaactagataattctggatcttatccaagaccatcaaggcggttcctctacaagtcttcaagaatgacagtgttactgggctttggttaccccctaaggcagatacagcttagatcacaataccaaagtcctttcaagtatctagaaagtcttcccaagaaggacagctacaaataaccccagacagtgaagactacaataagtccctaacccttcaatgcccagacactaaagaacatttactgcatcagtactatccaggaaaacatgacctcaccaaataaactcagtaaaccaccagagaataatcctaaagatacagagatgtgacctttcagacagagaattcaaaatagctgt

SEQ ID NO: 925864 - DNA, 744 bp, Homo sapiens
ataatagaacaccaagtagacttctaaggttttttaactctagtctctgactcccagatggtacttctggacccacctagggcttgggcagtgtccctgcccagaagggaaggacgaagatctgactgactttggcacctggtgattatagagcccaagggccttgagtgaacataggcagtagtcagggagtggttgcaaccggccttggaggatacccagtgctgtgctggcttcaggtctgacgcagtgcagtcatagtggtggtggccacagaggtgcttgtgtcacaccaccctcggctttagctggctcagaacagagacggmgactctgtatgtttgggagaaagttaagggaagagaacaagagtctctgcccagaaaactagataattctggatcttatccaagaccatcaaggcggttcctctacaagtcttcaagaatgacagtgttactgggctttggttaccccctaaggcagatacagcttagatcacaataccaaagtcctttcaagtatctagaaagtcttcccaagaaggacagctacaaataaccccagacagtgaagactacaataagtccctaacccttcaatgcccagacactaaagaacatttactgcatcagtactatccaggaaaacatgacctcaccaaataaactcagtaaaccaccagagaataatcctaaagatacagagatgtgacctttcagacagagaattcaaaatagctgt

SEQ ID NO: 925865 - DNA, 445 bp, Homo sapiens
tctgagttctgccattgactcactgggtgactttggaccaaatgcttaactctttctgtaggatgggagttgtagtagttaaacccatagtaactcacaaagtgattatgagaattaaatgaactaatgtttactaaagcaattcataaacttaaattgctgcacaaatataaggtatgatgtattatgacatgttagttatttgaaggagctcaaagaaaatcaagtcacattgcaacagaggatggttttgatatgaaaattattttctgaaatgcaaaaaaagctagctgtttttctatgttacttkggccaaagtggcattttcagcagtaatattagtcctggatggataaaaattcattttccaactcatctcatgatttggccgttgcatattctgcattacttttccaccgccccatcccctactccccaaacagcc

SEQ ID NO: 925866 - DNA, 530 bp, Homo sapiens
catttttctcctcagcacacggaactttctcgaggctagaccatatgttaggtcccaaaacaagtctcaaataattttaaaaaattaaaattatatcaagtatcttttctgaccacaatggaataaaagtagaaatccataactagaggaactttgaaaaccacacaaatacatggaaattaaacatgctcctgaatggctactggtcaygaaaaaggaaattttaaaatttcctgaaacaaatgaaaatggaaacacaccatacccaaacctgtgatacagcaaaagcaatataaagaggaacatttatagcaataaacacctacatcaaaagtacagaaagacttcaaataaataacctaactagaaaagcaagagcaaaccaaaggcaaaattactagaaaaatttatgatcagagctgaaatttaaaaattgagactaaagaaaactacaaaacatcaatgaaagaaagtttttttttttaaaaaaataggtaaacaaggttgctgtttgaactcttgtgaaggtg

SEQ ID NO: 925867 - DNA, 608 bp, Homo sapiens
ctgagctgcagctggagattgctggtaggttcacaggaacaagcagggttagtgtaaaatgtaggcaaaatattaaaaacaactagtgagtttggaatttaatgacaaatgtattataagttttgaaatataatttctctctctccagtcctcatttttgtttaaaaaacgtatcatcataggactgagcggtttgaaaaatagactttactttcatatttggcctgactgtttgcataaagtgcagcaagaataattatttctatataagcctttaggattggctttgatggaactctgttccccaaggaatctcagataagaccttttaaagcagagtccaacctgcaagttaagtgatcctttcctcctaaggtcccaagataaacttggagcttctggacctgttagaaagtgacattgtttactgactacaggtcagaaaycctgtataggtactgtgttggcaagtgtatgaggccagtttccccactgggtttttattgtctctgcaagccaagactgactccttaaagggaagcatacccttccagtcaaagccttggtagaataaacactttctccaatttcgttctgttgcaaaagga

SEQ ID NO: 925868 - DNA, 608 bp, Homo sapiens
ctgagctgcagctggagattgctggtaggttcacaggaacaagcagggttagtgtaaaatgtaggcaaaatattaaaaacaactagtgagtttggaatttaatgacaaatgtattataagttttgaaatataatttctctctctccagtcctcatttttgtttaaaaaacgtatcatcataggactgagcggtttgaaaaatagactttactttcatatttggcctgactgtttgcataaagtgcagcaagaataattatttctatataagcctttaggattggctttgatggaactctgttccccaaggaatctcagataagaccttttaaagcagagtccaacctgcaagttaagtgatcctttcctcctaaggtcccaagataaacttggagcttctggacctgttagaaagtgacattgtttactgactacaggtcagaaacyctgtataggtactgtgttggcaagtgtatgaggccagtttccccactgggtttttattgtctctgcaagccaagactgactccttaaagggaagcatacccttccagtcaaagccttggtagaataaacactttctccaatttcgttctgttgcaaaagga

SEQ ID NO: 925869 - DNA, 604 bp, Homo sapiens
tgctgttttggttactatagccttgtatatagtttgaagtcaggtagtgtgatgcttccagctttgttctttaggcttaggattgtcttggcaatgcgggcccttttttggttccatatgaactttaaagtagttttttccaattctgtgaagaaagccattggtagcttgatggggatggcattgaatctataaattaccttgggcagtatggccattttcatgatattgattcttcctatgcatgagcatggaatgttcttccatttgtctgtgtcttcttttattttgttgagcagtggtttgtagttcwccttgaagaggtccttcacatctgaaagggcttgtttctaggaaagaaaactggaggtgaaaaggggtgggaaaagaaactgatgccaacccctaagatgaacgttttagttgtgtatgatttctttaaaaccagtgagctcaactgcatgaggtggctcacgcctgtaatcccagcactttgggaggctgaggtgggtggatcacgaggtcaagagatcaataccaccctggccaacatggtgaaaccctgtctccactaaaaaatacaaaaatttgctgggcatggtgg

SEQ ID NO: 925870 - DNA, 604 bp, Homo sapiens
tgctgttttggttactatagccttgtatatagtttgaagtcaggtagtgtgatgcttccagctttgttctttaggcttaggattgtcttggcaatgcgggcccttttttggttccatatgaactttaaagtagttttttccaattctgtgaagaaagccattggtagcttgatggggatggcattgaatctataaattaccttgggcagtatggccattttcatgatattgattcttcctatgcatgagcatggaatgttcttccatttgtctgtgtcttcttttattttgttgagcagtggtttgtagttctycttgaagaggtccttcacatctgaaagggcttgtttctaggaaagaaaactggaggtgaaaaggggtgggaaaagaaactgatgccaacccctaagatgaacgttttagttgtgtatgatttctttaaaaccagtgagctcaactgcatgaggtggctcacgcctgtaatcccagcactttgggaggctgaggtgggtggatcacgaggtcaagagatcaataccaccctggccaacatggtgaaaccctgtctccactaaaaaatacaaaaatttgctgggcatggtgg

SEQ ID NO: 925871 - DNA, 724 bp, Homo sapiens
tccccatttcttgtttttgtcaggtttgtcaaagatcagatggttgtagatgcgtggtattatttctgagggctctgttctgttccattggtctatatctctgttttggtacgagtaccatgctgttttggttactatagccttgtatatagtttgaagtcaggtagtgtgatgcttccagctttgttctttaggcttaggattgtcttggcaatgcgggcccttttttggttccatatgaactttaaagtagttttttccaattctgtgaagaaagccattggtagcttgatggggatggcattgaatctataaattaccttgggcagtatggccattttcatgatattgattcttcctatgcatgagcatggaatgttcttccatttgtctgtgtcttcttttattttgttgagcagtggtttgtagttctccttgaagaggtmcttcacatctgaaagggcttgtttctaggaaagaaaactggaggtgaaaaggggtgggaaaagaaactgatgccaacccctaagatgaacgttttagttgtgtatgatttctttaaaaccagtgagctcaactgcatgaggtggctcacgcctgtaatcccagcactttgggaggctgaggtgggtggatcacgaggtcaagagatcaataccaccctggccaacatggtgaaaccctgtctccactaaaaaatacaaaaatttgctgggcatggtgg

SEQ ID NO: 925872 - DNA, 604 bp, Homo sapiens
tgctgttttggttactatagccttgtatatagtttgaagtcaggtagtgtgatgcttccagctttgttctttaggcttaggattgtcttggcaatgcgggcccttttttggttccatatgaactttaaagtagttttttccaattctgtgaagaaagccattggtagcttgatggggatggcattgaatctataaattaccttgggcagtatggccattttcatgatattgattcttcctatgcatgagcatggaatgttcttccatttgtctgtgtcttcttttattttgttgagcagtggtttgtagttctccttgaagaggtccttcacatctgaaagggcttgtttctaggaaagaaaactggaggtgaaaaggggtgggaaaagaaastgatgccaacccctaagatgaacgttttagttgtgtatgatttctttaaaaccagtgagctcaactgcatgaggtggctcacgcctgtaatcccagcactttgggaggctgaggtgggtggatcacgaggtcaagagatcaataccaccctggccaacatggtgaaaccctgtctccactaaaaaatacaaaaatttgctgggcatggtgg

SEQ ID NO: 925873 - DNA, 635 bp, Homo sapiens
tttcctacatgtcataaaactagaattattgaatgataaagctagatagatagctatattatatctcataaaagccaacttttatgaaacccttactatgtgtcaggcactgtgttaaatgctttccatactcatttcaagtaaccatcctaatagtcctatgaggtaggtcctaccaaactttccatttcatagatgaggaaaccaaggctaagatggctaaatggcttgttcagagtcatatagctaccagggctgaaatgcaaacctacactaagccactaggctatgagctaggtaccatatggtttttatgtttcagaagaggatccttagagtcccaaagaggtgtgtgagtttgctcagagccacccaattagttagtggccatcagggctggaacccagttttctggactctaaggtccctgatctttccattgtatacctcattctgcctctcagcatgagaggtggggctcctgtatctttktgaagctctccttttccttctcatgtttgcaaaattcacagtgaatactctcatgtaattgaaaattaaatttttatgtaaattacttttgacaatggcacagctcctgtttttttcattcctgctccttaagtcatattctc

SEQ ID NO: 925874 - DNA, 657 bp, Homo sapiens
atgggctacctttgatggaaatgaaagaatgattctgaaagtggaaacaaatgttcagtgggcatagccaagagccattaaaagtcctgcccaggtcttgagtcttaactaagaaactgtcaactgcatcgtgcttgatttaagaattgctatggcccactgtctcctgtatgttttctcatttcttcctttttactgggagggttctagcagttttcatattcctgtttcaccaatgtgtgttgggtgtgtggctgcagacaaattctctctttaattcacaggtcttccaattaagaggaactgtgtttgaagagctattattaaagaaccacccctgagaagctttattttcccctggacccaatttagagaatgacatactggacttctggctgatgctgtaatggggtaagactttgggggaccttaggaggcaggtgagtgaactttgcatgtgtgagagatataaattattgggattgatattttttctttttaaaatagttcatttktaattgctgtagatgcacaagttatacatatttatagggtacttgtgacattgatacaagcctacgacatgtaatgatcaaactggggtgattagggtatccatcacctcaagcacttatcatttctttgtgctaggaacat

SEQ ID NO: 925875 - DNA, 613 bp, Homo sapiens
actctttaagtcccacaattaccattgttcctggcctggacttcagtctggccttgcacattattcctgataccacacctgacccccatgactgtatctttctgatccacctgatattcaccccatttccccatatttccttcttctttcctgttcctcaccctgatcatgcttgatttattgatrgcggttccaccaggcctaatcgccacacaccagcaaaggcaggttatactatagtacaagccactagccccccgcctcttagaacctctcatttcctttccatcgtggaagtctatcctcaaggaaataacttctcagtgttccatctgctattctactactcctcagggattattcaggccccctcccttccctacacatcaagctccaggatttgccccacccaggactggcaaattagctttactcaacatgcccaagtcaggaaactaaaatacctcttagtctaggtagacattttcactggataggtagaggcctttcctacagggtctgagaaggccaccgcagtcatttcttccgttctgtcagacataattcctcagtttagccttcccacctcaatacagtctgataacagataagc

SEQ ID NO: 925876 - DNA, 590 bp, Homo sapiens
tcattactaaggtttaaattgatgtcaaggcattgaggggtcaattgtggtataaggcctaaaattatggttcaatattatgtgctgccttgacatctagcaaaactgggagggcctcatatgcttaaccacatgttcctcttctcactctgttttctcagataaggtcctttagccaagcaaccccttctcccttatcaaggagactaggcactgttcctctgatccctgagtagtgtgtttyggttctctgtcagcctgcagtttttcaaataagccaagaacatcatcctgtgggaggatcctccctcttaatactgcaaaacctgatttccacaacccatggttgttcactctattcttgagcacaacccctgtgtgactctgtggtgtgcagtgtcctccttccctgggctgtgagtatatgtgactaatgattgctgtcaatctcattttttcagtgtcaagtgcagtgtatttgtgcatactcataaacttaggacaaaaatccctccctcatcaacctgataaatcgataattaaatacagcttttcattaggtagccaataagcgctgatgaatgccaacc

SEQ ID NO: 925877 - DNA, 632 bp, Homo sapiens
gagaatagtaattggttcctcaaaaaattaaacatggaactaccatatgaccaaggaagtccgtttctgggtatatacccaaaagaatgaaagatagagatatctgtacaccatgttcatagcaacattattcacaataacccaaaggtgggaaacaacccaaatgtccacgacagatcagtggataaacaatataccgtatctacctgcagtggactattattcagctttagaaggaaggaaattctgaaacgtgccacaacatgagcgagccttgaagacattatgctaagtgaaataagccagtcacaaaaggacaaatattatatgatcctgcttatgcgaggtacttagagtagtgaaactcacagagacagaaagtagaatggccrttgccagggtctcggggatggggtgggattgaggagttagtgtttaatggagtttcagtttttcaagatgaaaagaattctggagatggatatggttgcacaatttagtgtacttaatgccattgaactgtacacttaaaaatggtcatgagggtaaattttgtgtattttaccacaatttcaaaaattttaccacaatttcaaacctctcaacaattctatgaagtaggtactattact

SEQ ID NO: 925878 - DNA, 601 bp, Homo sapiens
aatcccagctacttgggaggctgaggcaggagaatcgcttgaacccgggaggtggaggttgcagtgagccgaggtcatgccattgcactcccgcctgggcaacagagcaagactctgcctcaaaaaagaaaaaaaaatctttgtgytcatgttcattaattcattcaactcatgtgaatgtatcatctaccactaggtggggaggatacaacggagaataagcagacacagccccatctcatgcagctaatggcctatcattagaataaataaatttgataaaaaatgtagataaagcacatggaatgccaacttaacatagtcttggggaagtcagggaaggcttcctggaggaagggatgtttaatctgagtttacccagtgaaggaaatgtgaaggtgggagaggcttctttgtagttgcttttgggtgtgattttggttttataaatcagatacacttgcttgagaattggaaggcacgtgcatggtgccatgagtagtatatcattgctggtttttctggaacacgtttcattgtctgggcatcagcttcttgggagtcgagaggcagggtgaggctcatctattttttgttggat

SEQ ID NO: 925879 - DNA, 603 bp, Homo sapiens
ttatttatgtccataatcaaaaaatcaaaaaataatagatgttggtgaggatgcagtgaaaagggaacacttttacactgctcgtggaatgtaaactagtacaaccactatagaaaacagtgtggagattccttaaagaattgaaactagaactaccatttgacccaggaatcccactactggatatctacccagaggaaaaaagtcattatatgaaaaagatgcttgcatacacatgtttatagcagcacaacttgcaattgcaaagatatggaaccagcccaaatgcccatcaatcaatgagtgaataaagacattgtgatatatatatatatatatatatatcacatggatatgtgatatatatatatatatatatcacatggatatgtgayatataaaacatggaatactattcagccataaaaaggaacaaaataatggcatttgcagcaaactggatggaactggagaccattattctaaatggagtaactcaggaatggaaaaccaaacatcgtatgttctcactcataagtgggagctaagctatgggatgcaaaggcataagaatgatacggcggactctggggactccaggca

SEQ ID NO: 925880 - DNA, 640 bp, Homo sapiens
cacctaggtaggaaatggcaaagttagactcaaactcaggtttctaattccacatcctgtgcctttcactttccttccaggccatacggaagcctatctctcacaccacatctttcagggtggtttgtcaactgggtttatgttacaataaaatataactttcctgcataatcccttgatcttgaactgttgtaattgatcaaggcctatttgttgcctgagtataaatggaggcaaataatatactttgatctccttacacaggatytgcttccaagtatgttgcacaaacttgctaaatatcatctaatattaaagtggcagaaaaacattttattccatttatttttatttttttgctcagctagaatggccaagaagaagccaatgaattatagttgaatttgtatttataaatgttatcaccaagaaattgttagatttgatgttatcatttctgtaattacagaagaaatatccactccactggaagttaccacaatatgagagtaattgctatgccattacagaatagttgcatgatatggttattcttgtcacagaaactataaattatgtactaaatgtaatataatttataatgaaaaacttaacatggcttaaagtagctgctgaacca

SEQ ID NO: 925881 - DNA, 763 bp, Homo sapiens
ctctcttcaaagctgtcagacagggacatttaagtctgcagaggttcctgctgtctttttgtttgtctgtgccctgcccccagaggtggagcctacagaggcaggcaggcctccttgagctgtggtgggctccacccagttcgagcttcctggctgctttgtttacttaatcaagcctgggcaataacgggcgcccctcccccagcctggctgccgccttgcagtttgatctcagactgctgtgctagcaatcagcgagactckgtgggtgtaggaccctctgagccaggtgcagggtataatctcctggtgcgccgttttttaagcccatcggaaaagcgcagtatttgggtgggagtgacctgattttccaggtgccgtctgtcacccctttctttgactaggaaagggaagtccctgatcccttgcgcttccctagtgaggcaatgcctcaccctgcttcggctaacgcatggtgcgtgcacccactgacctgcaccctctgtctggcattccctagtgagatgaacccagtacctcaaatggaaatgcagaaatcacctgtcttctgcgtcgctcacgctgggagctgtagaccggagctgttcctattcggccgtcttataaaggacactctcaactcaataataaaaaagaccactgagtgaaaatatgggcaaaaaatttgaatagacatttcttcttcagaacaggaaagatttcaataaaattctagatgatgaaaagtgaacaagaatgtatc

SEQ ID NO: 925882 - DNA, 763 bp, Homo sapiens
ctctcttcaaagctgtcagacagggacatttaagtctgcagaggttcctgctgtctttttgtttgtctgtgccctgcccccagaggtggagcctacagaggcaggcaggcctccttgagctgtggtgggctccacccagttcgagcttcctggctgctttgtttacttaatcaagcctgggcaataacgggcgcccctcccccagcctggctgccgccttgcagtttgatctcagactgctgtgctagcaatcagcgagactcggtgggtgtaggaccctcygagccaggtgcagggtataatctcctggtgcgccgttttttaagcccatcggaaaagcgcagtatttgggtgggagtgacctgattttccaggtgccgtctgtcacccctttctttgactaggaaagggaagtccctgatcccttgcgcttccctagtgaggcaatgcctcaccctgcttcggctaacgcatggtgcgtgcacccactgacctgcaccctctgtctggcattccctagtgagatgaacccagtacctcaaatggaaatgcagaaatcacctgtcttctgcgtcgctcacgctgggagctgtagaccggagctgttcctattcggccgtcttataaaggacactctcaactcaataataaaaaagaccactgagtgaaaatatgggcaaaaaatttgaatagacatttcttcttcagaacaggaaagatttcaataaaattctagatgatgaaaagtgaacaagaatgtatc

SEQ ID NO: 925883 - DNA, 744 bp, Homo sapiens
ggagaaccactgctctcttcaaagctgtcagacagggacatttaagtctgcagaggttcctgctgtctttttgtttgtctgtgccctgcccccagaggtggagcctacagaggcaggcaggcctccttgagctgtggtgggctccacccagttcgagcttcctggctgctttgtttacttaatcaagcctgggcaataacgggcgcccctcccccagcctggctgccgccttgcagtttgatctcagactgctgtgctagcaatcagcgagactcggtgggtgtaggaccctctgagccaggtgcagggtataatctcctggtgygccgttttttaagcccatcggaaaagcgcagtatttgggtgggagtgacctgattttccaggtgccgtctgtcacccctttctttgactaggaaagggaagtccctgatcccttgcgcttccctagtgaggcaatgcctcaccctgcttcggctaacgcatggtgcgtgcacccactgacctgcaccctctgtctggcattccctagtgagatgaacccagtacctcaaatggaaatgcagaaatcacctgtcttctgcgtcgctcacgctgggagctgtagaccggagctgttcctattcggccgtcttataaaggacactctcaactcaataataaaaaagaccactgagtgaaaatatgggcaaaaaatttgaatagacatttcttcttcagaacaggaaagatttcaataaaatt

SEQ ID NO: 925884 - DNA, 763 bp, Homo sapiens
ctctcttcaaagctgtcagacagggacatttaagtctgcagaggttcctgctgtctttttgtttgtctgtgccctgcccccagaggtggagcctacagaggcaggcaggcctccttgagctgtggtgggctccacccagttcgagcttcctggctgctttgtttacttaatcaagcctgggcaataacgggcgcccctcccccagcctggctgccgccttgcagtttgatctcagactgctgtgctagcaatcagcgagactcggtgggtgtaggaccctctgagccaggtgcagggtataatctcctggtgcgccgttttttaagcccatcggaaaagygcagtatttgggtgggagtgacctgattttccaggtgccgtctgtcacccctttctttgactaggaaagggaagtccctgatcccttgcgcttccctagtgaggcaatgcctcaccctgcttcggctaacgcatggtgcgtgcacccactgacctgcaccctctgtctggcattccctagtgagatgaacccagtacctcaaatggaaatgcagaaatcacctgtcttctgcgtcgctcacgctgggagctgtagaccggagctgttcctattcggccgtcttataaaggacactctcaactcaataataaaaaagaccactgagtgaaaatatgggcaaaaaatttgaatagacatttcttcttcagaacaggaaagatttcaataaaattctagatgatgaaaagtgaacaagaatgtatc

SEQ ID NO: 925885 - DNA, 744 bp, Homo sapiens
ggagaaccactgctctcttcaaagctgtcagacagggacatttaagtctgcagaggttcctgctgtctttttgtttgtctgtgccctgcccccagaggtggagcctacagaggcaggcaggcctccttgagctgtggtgggctccacccagttcgagcttcctggctgctttgtttacttaatcaagcctgggcaataacgggcgcccctcccccagcctggctgccgccttgcagtttgatctcagactgctgtgctagcaatcagcgagactcggtgggtgtaggaccctctgagccaggtgcagggtataatctcctggtgcgccgttttttaagcccatcggaaaagcgcagtatttgggtgggagtgacctgattttccaggtgccgtctgtcacccctttctttgactaggaaagggaagtccctgatcccttgcrcttccctagtgaggcaatgcctcaccctgcttcggctaacgcatggtgcgtgcacccactgacctgcaccctctgtctggcattccctagtgagatgaacccagtacctcaaatggaaatgcagaaatcacctgtcttctgcgtcgctcacgctgggagctgtagaccggagctgttcctattcggccgtcttataaaggacactctcaactcaataataaaaaagaccactgagtgaaaatatgggcaaaaaatttgaatagacatttcttcttcagaacaggaaagatttcaataaaatt

SEQ ID NO: 925886 - DNA, 594 bp, Homo sapiens
acacatacaatctatcaagtttgaatcacaaaaaatccaaaacctatgcagacccataatatataataaaatcaaagctataataaaaagtcttccagcaaagaaaagcctggattcactgccgaattttaccaaaaatttaaagaacgatgaatactaatcctagtcaaaatattccataaaatagaggggaggagatacttttaatctccttctacaagtccagtataactcagatactaaaaccagacaaagacgcctcaaaaaaagaaaakacaggccagtattcttgaggaacattgaggcaaaaatcctcaacaaaataccaatgaaaaaaattcaacaacacattaagatcattcatcacgaccaaattgtatttatcccagaaatgaaaagatggttcaaaatatgcaaatcaatcaatgtgacacattatatcaacagaataaaagacaaaaatgcaatcacttcaacttatgctgaaaatgcatttgataaaattcagtatactttcatgatgaaaaccctccaaaacctggttatagaaggaatatacctcaatacaataaacaccatatatgagggacccac

SEQ ID NO: 925887 - DNA, 725 bp, Homo sapiens
gaatcactcatctccccatctctgcccatctatctattcaaccatatttccaccaattcaaaaaatcatgggtcaatctgtcatctataaaattatgcttccttttacccattaatctgcccatccttcaacccattcatcaaaccacaattccatctatcaatatatttactatctatctactcacctatctgtctattcacccatctatccatttagatctatttttagcttacatccacctgtttaaccatgtacttggcaatatatttcttgrtttatctattaagctatttgaaaatatttttggcacccaatatgtacaggatactgagttggcctatatgtgaatacaaagataggtaccactacaatataaggcataaatgtagcaaaatgtatgaacaaagtattcaggggattttgaggatagagcagtcagtgtttcatgggaaggaaaatgaaaaagagaaggaaaagaaatagcatttgatttggcacttgaattatgtgcaaattttaacagatggaaattgggtgggtagagttggggcttctggagaacatagggtttttagagttctttcagtttccagagagttttatatacttccatgctatatgaaccagagttcccctttggcttaaactagtttagctgcctttccatcacttggacaaagagcatgttgactctcaacaaaaactgaaatcccccgcctgat

SEQ ID NO: 925888 - DNA, 724 bp, Homo sapiens
catatgcatatctgtcccagagtttgtttcccagcgtaacggatgcaatacacttcttcttctcttgctgttttcttgcttctcttcttcttgccgctatgatttgcagactatgcactatgtgccactacactgttctgttttataaagcacttctaatcctacagctataagtcaaggcagatattgtttgctctgtcttaaaatgagaaggttgagacattragtagtgagttacttgcccaagatcaaagagctggcaacaggcaatgccaggattagaatgtggggatgtaggagaattcaaaaccagtggcttgctgtttatcacattgaattgaccaggttgcccttggatcagacctttgggacgtgaaccccctctttgcctgggcttgagtgagtgttccccttggatatagggctctgagctacttttgctgctttcccaagcagcatctgcttgacttctggggaggcctcagaaaacttattaattatggcagaagggaaaagagggaagcaggcacatcttatatgaccagagcagaaggaagagagagaagcgggaagtactacacacttttaaacaacgagatctcgcgagaactctaccaggagaacagaacaagggggatggtgctaaccaatttgaaaccacccccatgatccaataacctcccaccaggccccacctccagcattagagattacatttcaacat

SEQ ID NO: 925889 - DNA, 782 bp, Homo sapiens
aagtcagccatttcttattctttaaaagcttgaatactcagtctctttatgttttgtaaaattcacaggcaagaccacttgagcacctgtgggtagattttaagaatttttaaaaatagccataaaactagttgacccttaaacaagacaagggttaagggtactgaccctcacacagttggttatccacatggaactttaaaatccccaataacttaacaataatctactgttcactggaagccttgccaatgaaataaacagtcaacacatattctgtatattttatactgcattcttataataaagctagagaaattattaaaaatcataaagaaaatatatttcttatgcattaattggaagtggatcatcataaaggtcttcatcctcattgccttcacattgagtaggctgaggagaagaaggaagagaaataactagtcttcctgtctcaggagtgagagagatgggaaaaatatcacatataagtggttacatgcagctcaatcccacgttgttcgagggtcaactactattcagtttttctatctctcgttcagttggtttggtaatatacagttttctgggaatgtgtgaccacttaggttttaaagttarttagtataaagttataatattcttttaattattcttttatttttagttatggctttttcttacaatattatttatttttgcctccctttcttgcggggaaagaggtagggcaatcttgccagaggttggcaattacattatcgtttacagagaacaacgct

SEQ ID NO: 925890 - DNA, 725 bp, Homo sapiens
aagctgccactcctgtccttacaataaaaatgctagacaaataaatcacttttctcagatccactagaaaactgaatttataaggcaaaccatcaccctgaagagactgacaaaatccagagagtcacaaccaagatctacttccctggagcagaagctactgaagccaggaagtggtaggacamttaaatggtcactttgatgaactgctggaggctgagtgtggactagccccagaatgagaaactcctgggtcccccagtcttagggagaccccaggctaagagggacctgacatcatcatggattttgcctccaggaatctcttctcatggtaaatatccaagaaagattgcctgctggcactggcaggggaaggaaagagtaatccttctgaaatacctcccaaccttcttcataagaaagactttctccagaggaaaagacctcactagagctttgtctcagagtcccagggggaagggcattcctgtcacttcagccccctctctgcttcatgtctcccctaagcggggaagctatacaagaagaaaaacacgtgggtagggcagaagccatagacacaggcccactgaagaactgagatgtaattggaaaattatagaacaccactcctcacccctaaaactacaacaacagactctctctgaggaggagcatttagggaagcccaaagtcaagaggaaagacaaaaacaaaaccat

SEQ ID NO: 925891 - DNA, 725 bp, Homo sapiens
aagctgccactcctgtccttacaataaaaatgctagacaaataaatcacttttctcagatccactagaaaactgaatttataaggcaaaccatcaccctgaagagactgacaaaatccagagagtcacaaccaagatctacttccctggagcagaagctactgaagccaggaagtggtaggacaattaaatggtcactttgatgaactgctggaggctgagtgtggactagccccagaatgagaaactcctgggtcccccagtcttagggagaccccaggctaagagggacctgacatcatcatggattttgcctccaggaatctcttctcatggtaaatatccaagaaagattgcctgctggcactggcaggggaaggaaagagtaatccttctgaaatacctcccaaccttcttcataagaaagactttctccagaggaaaagacctcactagagctttgtctcagagtcccagggggaagggcattcctgtcacttcagccccctctctgcttcatgtctcccctaagcrgggaagctatacaagaagaaaaacacgtgggtagggcagaagccatagacacaggcccactgaagaactgagatgtaattggaaaattatagaacaccactcctcacccctaaaactacaacaacagactctctctgaggaggagcatttagggaagcccaaagtcaagaggaaagacaaaaacaaaaccat

SEQ ID NO: 925892 - DNA, 704 bp, Homo sapiens
tctaatattacaactttatttttaaaaataacaacaactaagccgttaggacataattcagttcagaaccttgtatcagctcctgaggcagctttcttattagtattttgcttcttagaaaaatgcagttggagtttgacacatagaaaggtattgagaactagayagcactcttctgacatcaccagctagtatgagtcaaaatggcgttactatatgtcaccatgccatgctgacaatatagatgcacatgagctttctaaaataaacatcttaaattacacactaaaataattcaggtcttacccaattaacttttcaatagctctctcaaaatatttctagtaaacagggctagaaaatactcttcattttaaaaatgctaaattaactaatgaaaaaagaaaaagaagagcagagcaagtgtataaggactgggtatttgggaagatggatctggaaatgacgaggggaatgggccggtcaaaatggtagataaggtaatcagaataggcctcatttgaggggatgagatttgagcaaaaacatgaaggaaataagagttagccatgacaatatctggagaaaaagcactccaggcagaggaaacagtcaatgcaaaaatcttaatttgaaaatatgctagtggaaacatactggaacaatagcaaaaaggccagtatagctatggcaaagtcaggaag

SEQ ID NO: 925893 - DNA, 646 bp, Homo sapiens
tggagtaaggggataagcaccaagggagatcagatattagggtcaagggattattatgaaactgatttagtaggatcagtagtaataaaaaactgggctatgcaggccttgccaggacagaatatgggccaatattgaggcctagtcaagaagtgggctaggggagcctgactaaagtttggtaaaggagagagtccttgtcagtggaaagtgacccttcttcctaggtgtcttagttcaggttgctataacagaatatcataagccaggtagcttacatttatttttcacagttctggaggctgggaagtccaaggtcaaggtgctgacagatccagtgtctggtgagggccaacttcctggtttacagatggctgccttctaattgtggyggcaaacagagccagctagctctctgtccttttcttctatggacactaatcccatccgtgagaactctgctctcatgacctacctaccttccaaaagcaccacctcttattatcacattggggattagatttcaacataggaattttgggagggcataaacattcagtccataacactaggttttagtattttcatctgtggaacaagggagtttccctaggatggctttttttctagtttataactaaaatta

SEQ ID NO: 925894 - DNA, 646 bp, Homo sapiens
tggagtaaggggataagcaccaagggagatcagatattagggtcaagggattattatgaaactgatttagtaggatcagtagtaataaaaaactgggctatgcaggccttgccaggacagaatatgggccaatattgaggcctagtcaagaagtgggctaggggagcctgactaaagtttggtaaaggagagagtccttgtcagtggaaagtgacccttcttcctaggtgtcttagttcaggttgctataacagaatatcataagccaggtagcttacatttatttttcacagttctggaggctgggaagtccaaggtcaaggtgctgacagatccagtgtctggtgagggccaacttcctggtttacagatggctgccttctaattgtggtggcaaacagagccagctagctctctgtccttttcttctatggacactaatcccatccrtgagaactctgctctcatgacctacctaccttccaaaagcaccacctcttattatcacattggggattagatttcaacataggaattttgggagggcataaacattcagtccataacactaggttttagtattttcatctgtggaacaagggagtttccctaggatggctttttttctagtttataactaaaatta

SEQ ID NO: 925895 - DNA, 742 bp, Homo sapiens
  misc_feature 4: n = A,T,C or G
acanaaccccatgacacaagtttacctatgtaacaaatctgtacttgtaccctgcccctaaaagttaaaaaattctctgctctaatgtcttgcattatacaactgcataaaaataaaaagattcatgggaagagtgagattggggaagaccattcaaaactgtaactagagcactcaaaaacacagtaacagttctaatacaaatactaacagagttaactttccacaagcaaatttatttagaccacagtcaatcctcagtggctttacaccttggttcctatgaatcctttgattatcaatttcatcaaaattaaaatacaacccaggakgtagccttcttcctaaatccattgatttaatacaaggaaaatacccttgcagatcctctagaaactgaatattgggaaagcaccattgttcttaaagccttcaagctagccattacgtgtgcattttgtcttctgttttaggatcttctttaattatgggaaaacatgctcctgatgacattaaagcaacaatgtgctggagaaaattgtgaatgaactaatatgactcccacattacacagatgttacacccatcacacatgaggtgattcatgtcaatgaaacatgttgtggcagaagaaattacgctgactacttccctccttctctccatcccatctttggcttggaggaagatggatagttcagagcatcttgcaactcatcgatttacctatctggagccctgc

SEQ ID NO: 925896 - DNA, 626 bp, Homo sapiens
tgcctgtggtcccagtactttgggaggccaaagtaggagaactgctggaggcgaggagtttgagaccaacctgggcaacacagcgagttcccgtctctgcaaaaatagccagatgtggtggctcacgcctgtaatcccagcactttgggaggccgaggcgggtggatcacttgaggtcaggagttcgagaccagtgtggccaacatggcaaaaccctgtctctactaaaaatataaaaattagccaggcgtgctagtgcacgcctgtaatcccagctacttgggaggctgaggcaggagaattgcttgaacctgggaggcagaggttgcagtgagccgagatcgtgttattgcactccagcctgggggacagagtgatactccatcttaaaaaataaataaataaaaataaataaataaaaataaaaaataaaaaataaaacttagctgggtatggtggtrcatgcctatagtcccagctacttgggaggctgaggtgggaggatcacctaaggccaggatttcaaggctgcagtgagctaatgatcacatcactgcactccagcctgggcaacagtgcaagaccctgactcaaaaaaaaaaaaaaaaagaaaaagaaatcctaaa

SEQ ID NO: 925897 - DNA, 742 bp, Homo sapiens
ttctactaaattcattttacaaggccaacattaccccggtaccaaagccaaccaaaatactacaagaaaagaaaattgcaggccaatattccaatgaacaaacatgcaaaaatcctcagcaaaatactaccaaattgaattcaatataatgataaaaggatcattcaccacaatcaagtgggatttatgcctgggatgcaaggatggctcaacatgcacaaatkggtaaatgtcatataccgcattaacagaatgaaggacaaaaatcatatgagcatctcaaaaaatgctgaagaagcatttgacagaatttatctttatgtaataaaaactctcaacaaattaggtatagaagcaatgtactacaacataataaaggccatatgtgacaagctcacagataacatactcagtggagaaaagttgaaaactttcctctgagatcaggaataagacaaagggatccactcttgcacttttattcaatatagtaccttaagttctagccagagtgattaggaaaaagaaaagtatccaaattaaaaagaagttaaactgtctctgtttgcagatgacatgatcttacatacagaaaaccctaaatatgccaacaaactattagactaataattcagtaaagttttaggatataaaatcaacacagaaaaatcaatcacatttctatatactaacaatgaactacctgaaaaagtaataaaacagtatcattcacaatagcata

SEQ ID NO: 925898 - DNA, 608 bp, Homo sapiens
gaaccactgctctcttcaaagctgtcagatagggacatttaagtctgcagaggttactgctgtctttttgtttgtctgtgccctgcccccagaggtggagcctacagaggcaggcaggcctccttgagctgtggtgggctccacccagttcgagcttccctgctgctttgtttacctaagcaagcctgggcaatggcaggcgcccctcccccagactyactgccgccttgcagtttgatctcagactgctgtgctagcaatcagcgagactccgtgggcgtaggaccctcccagccaggtgtgggatatagtctcctggtgtgcctttttttaagccggtcagaaaagtgcagtattagggtgagagtgacccgattttccaggtgccgtctgtggcccctttctttgactaggaaagggaactccctgatcccttgcacttcccgagtgaggtaatgcctcgccctgctttggctggcacacggtgcgctgcacccactgtcctgtgcccactgtctggcactccctagtgagatgaactcggtacctcagatggaaatgcagaaatcacccgtcttctgcgttgctcacgctgggagctgtagacc

SEQ ID NO: 925899 - DNA, 608 bp, Homo sapiens
gaaccactgctctcttcaaagctgtcagatagggacatttaagtctgcagaggttactgctgtctttttgtttgtctgtgccctgcccccagaggtggagcctacagaggcaggcaggcctccttgagctgtggtgggctccacccagttcgagcttccctgctgctttgtttacctaagcaagcctgggcaatggcaggcgcccctcccccagactcactgcygccttgcagtttgatctcagactgctgtgctagcaatcagcgagactccgtgggcgtaggaccctcccagccaggtgtgggatatagtctcctggtgtgcctttttttaagccggtcagaaaagtgcagtattagggtgagagtgacccgattttccaggtgccgtctgtggcccctttctttgactaggaaagggaactccctgatcccttgcacttcccgagtgaggtaatgcctcgccctgctttggctggcacacggtgcgctgcacccactgtcctgtgcccactgtctggcactccctagtgagatgaactcggtacctcagatggaaatgcagaaatcacccgtcttctgcgttgctcacgctgggagctgtagacc

SEQ ID NO: 925900 - DNA, 608 bp, Homo sapiens
gaaccactgctctcttcaaagctgtcagatagggacatttaagtctgcagaggttactgctgtctttttgtttgtctgtgccctgcccccagaggtggagcctacagaggcaggcaggcctccttgagctgtggtgggctccacccagttcgagcttccctgctgctttgtttacctaagcaagcctgggcaatggcaggcgcccctcccccagactcactgccgccttgcagtttgatctcagactgctgtgctagcaatcagcgagactccgtgggcgtaggaccctcccagccaggtgtgggatatagtctcctggtgtgcctttttttaagccggtcrgaaaagtgcagtattagggtgagagtgacccgattttccaggtgccgtctgtggcccctttctttgactaggaaagggaactccctgatcccttgcacttcccgagtgaggtaatgcctcgccctgctttggctggcacacggtgcgctgcacccactgtcctgtgcccactgtctggcactccctagtgagatgaactcggtacctcagatggaaatgcagaaatcacccgtcttctgcgttgctcacgctgggagctgtagacc

SEQ ID NO: 925901 - DNA, 608 bp, Homo sapiens
gaaccactgctctcttcaaagctgtcagatagggacatttaagtctgcagaggttactgctgtctttttgtttgtctgtgccctgcccccagaggtggagcctacagaggcaggcaggcctccttgagctgtggtgggctccacccagttcgagcttccctgctgctttgtttacctaagcaagcctgggcaatggcaggcgcccctcccccagactcactgccgccttgcagtttgatctcagactgctgtgctagcaatcagcgagactccgtgggcgtaggaccctcccagccaggtgtgggatatagtctcctggtgtgcctttttttaagccggtcagaaaagtgcagtattaggktgagagtgacccgattttccaggtgccgtctgtggcccctttctttgactaggaaagggaactccctgatcccttgcacttcccgagtgaggtaatgcctcgccctgctttggctggcacacggtgcgctgcacccactgtcctgtgcccactgtctggcactccctagtgagatgaactcggtacctcagatggaaatgcagaaatcacccgtcttctgcgttgctcacgctgggagctgtagacc

SEQ ID NO: 925902 - DNA, 561 bp, Homo sapiens
aaaaaaccattttggtaagtttctatttttctgagagttttatgaatacttaatttgtttgagtgctcatttactcctaagccaatttgggtattttagatttgtaatgccattgaatgtagaaaaatatcatgtatacctatcatacaaacatagatatatacatgtacacatacataaacatacagacagatgcaaccagatcttatggcattttattttaaaaattttagtcacggaataaataacagatggtgatgagaatacagagaaaagggaacacttatacactattggtgggaatgtaagttagtacaktcagtacgaaaaacagtatggagtttactcataaaatgaaaactggaactaccgtatgatccagccaatcccactgctgggtctgtagccaaaagaaaggaaatcagtacatagaagagctaactgtactcccatgttcattgcagcattatttacagtagccaagaaatgacattaacctaagtttcatcaaaggatgactaaataaagacaatgcagtatatatacacaatgtagtactat

SEQ ID NO: 925903 - DNA, 643 bp, Homo sapiens
atcttagctttcaaaagagttcgagcattactacccaaccacaaaagaaccctgaactgggaatgaatgtatccatgacccatttgtgagtaagtcaggtgaatcgattttgtccgtactagaagaggatcaattgcttgagatcacaaatgatggtggccttaaaagtatgtttgagacagcttcaaatcccatgttctggattaaactcaaggtgggatatcctgagattgccacaaaagcactgaagagtctgcttccatttccaacatgctatctttgtgaagcaggattttctgcagtgacagcaaccaaaacaagattacggagtagactggacataagcaacacacttctggtgtcactgtctcccaccgttcccagatgggaccttctaattgcaggaaaacaaggtcagggctcccactgattccacattatggtgagttgtataattattttattatatattacaatgtaataataatagaartaaagtgcgcaatacacgtaatgtgcttgaatcatcctgaaaccgtctgccacccggccctggtccatggaaaaatcctcttccgtgaaactggtccctggtgccaaaaaggttggggaccactggtttatccagggtcatccaggttgg

SEQ ID NO: 925904 - DNA, 678 bp, Homo sapiens
tcaaagattcaaatcatttggagatgatgcagagtggtcgtgctgttgaccaatagccatagagactgtgcattgaggactgtgaagtttttggaggcaatgacactgttaacaagaacccaatggaatcatccaggcagggcaggcaggccaggcccatgaataactatgctgtccattgtctattccttcagctatgcacatttatttttgaggctaattcttcaggctatctctttattctgtgagcttttctatatcctcccaattctattttctccttaacaaatccataatcattatcaataactgtcatcatgctgcatatagaatgtctccccatcttagcctagttttactttttaatttctcattttgtaacatagtaattatgaagaattaatatatttgttgcttgcaaatcagtgcctttgtgcrgattaaatctatctagaatgtttttccttctttttctatctccttttctccaacgtcaacttttcacttacatattcactgcttttcctaaaaggaaattctaaaagtacaatcatttctgaaaatctgtttctgaagtcctaaccaaaatgatgctttcacttttaaggtaatttcaatttttgttctagtgtccaccataaaatggataaatggaaatattatcagcattaattttat

SEQ ID NO: 925905 - DNA, 556 bp, Homo sapiens
aatactatgttgaataggagtggtgagggagggcatccttgtgttggttttcaaggggaatgcttccagcttttgtgcatttagtattatgttggctgtgggtttgtcataaacatctctcattattttgagttatgttccatcaatacttagtttactgagagttttaaacatgaagggatgttgaattttattgaaggccttttctgcatctattgagataatcatgtggttttgtcattggttctgtttatgcgataaattatgtttattgatttgcgtatgttgaaccagtgttgtaccccaggtatgmagctgacttgatcatggtgaataagatttttgatgtgctcctctatttggtttgccagtattttattgagaatttttgcatcgatgttcgtcacggatattggcttgaagttttctatttttgttgtatatctgccaggctttggtatcaggatgatgctggcctcataaaatgaattagggaggagtccctccctttcaattgtttcgaatagtttcataagcaaggatgttatctcctttt

SEQ ID NO: 925906 - DNA, 727 bp, Homo sapiens
gaattgctcctggtccaaactgcctagtcttgctggcactggcagcaggaaaaatggccaaatggagccacagtgatggtggccacccctccctgcccccccagaacttggtcttcttaagcagtctccagcttgctgtgctggtcaggggggattccaagccagtgagttttagcttgtggagttccttgggagtggggcctgctgaatggggacacttggctccctggtttcagcctccttcccaggggtgtggacagatctcctgtgtcactggagttcccagagccagaatatgcagactcctgtgtctcagtgcctgactgagtggctgcccactcaagcaactgccatgagtctgcacagctctgtgcttgggacccaagttcctggtggtgttgggctcatgaagagacctcctgatccaaaggttrcaaagctctgtggggaaagcaaggttttcagggtggagtagcacaatccctcactacctgtcttggctgtgggagggagtttctgttgccccttgcagctcctgggtaagccctcactccactccacttttcctcattctccatgggttgcaccaactgcctggtcagtccccatgagagaacctgggtacctcaattgaagatgcagaactcacttgctgttttcgttcttcccagtgggagccacagaccagagctgtttctattcaaccattttggctgcttcccccacg

SEQ ID NO: 925907 - DNA, 691 bp, Homo sapiens
ctgtgcttgggacccaagttcctggtggtgttgggctcatgaagagacctcctgatccaaaggttgcaaagctctgtggggaaagcaaggttttcagggtggagtagcacaatccctcactacctgtcttggctgtgggagggagtttctgttgccccttgcagctcctgggtaagccctcactccactccacttttcctcattctccatgggttgcaccaactgcctggtcagtccccatgagagaacctgggtacctcaattgaagatgcagaactcacttgctgttttcgttcttcccagtgggagccacagaccagagctgttyctattcaaccattttggctgcttcccccacgtagtagctttttttgtggattccatcaggttttctgtgtagatgatgatgtcatttatgagtaaacactgtacttcttcatttataatcttgatgcctttgtttctttttcaggccttattgcattggctaggaccaccactaacaatgttaaatagaagtggtgagagcatacatctctggcttgttcttgatcatagtagaaaggtattcagccttccaccgttaagtatgatgttactatacatcatttgcagatgtcctgtatcaggttgaagaaattttcttctattcatactttgctaggagcgtttttaatatcaggtattaatg

SEQ ID NO: 925908 - DNA, 600 bp, Homo sapiens
agccagtgatgagggaggaatgccaggagatattgtcacttaagaaattacctcggctgggcgcggtggctcacgcctataatcccagcactttgggaggctgaggcgggcggattacaaggtcaggagattgagaccatcctggctaacacggtgaaaccctgtctctactaaaaatacaaaacaaaattagccgggcgtggtggccggtgcctgtagtcccagctactcgggaggctgaggcaggagaatggcgtgaacccgggaggcggagcttgcagtgagccgagatcgcaccactgcacgccagcctgagcgacagagtgagactccgtctcaaaaaaagaaattaccttgttaaacccaacactgcccctcttttgtccattcacttctagttgccttcattcwtgcctgatgtgctggacttgggttttatcaagttgcttggcacgtccttaaagaatttaaatctccacagtgcctcctggacaatgactgcagggtgacccctgtctctcctctacacgatgactcttcaaacagttgacgattgcagtttttctttccttccttctttcagtggcttctctggtgctg

SEQ ID NO: 925909 - DNA, 852 bp, Homo sapiens
ccactgcattccagcatggaggacagagcgagactccatctcaaaataataataataataataaagaaagaaaatttactaagtctctataagaatagtaagagtctgtgacatttatgcagaattccaccacctacttacaacaaactccatctcagtgtgatggaagctctgctgtaggtgggagtgggcaagaacaaagagcttctactctcccaagctccagtctagggctacagtttcttcctggagaagcaagctgctagaatttcttattcctcactccccagctccatgttgcagaagctctattatgggcagaccaagaatattgggcccagtggttttcactttaactcacttttatagtcttgtttccatgccagaagagaagacaaaaaaagatcagggctaccacctcctcccaatgccccacacataaaacagggatatcactccaacagaagcaggcctttcttccttccctcagctctagagcagtgaaacagaggtttttcccagggggacaggcaggctgtgagaatagagaactccataggtctccctaagggcactgattttatttggaacaaagtgtggtaaagttgaagtccaaggctgctatcaaaawcaatggagattttggtagtaagcaattatgaggaggctggtagcttcatgatagcaataagctaaaccacagaacagaaagaattagggaaagagatagctaacaaaagcctttcctgggattgaaacaagcctcaaagactgtctttgcaaaggggttcaaatttaattggattaggctgtggagcaatttatggcccagagcattgctgaaaacaataa

SEQ ID NO: 925910 - DNA, 641 bp, Homo sapiens
gcggggaagattcacctggatggagaccggctcttcccgcgtcccagtggcctgcccagcagcgtaacggaactggggatggggttgcaggatgataccagcacttcaggaaccatggtaaggagcaagggcccaaggcaaggaagcccgtcgcataaggatgaaggggagcttgatcacctcctggggaacagccactaatccaacccagacgcgkctgggggtggcaggagtggcttgtcaacttggatgaacctcatgtccccactaataaagtgaaaatggttcactggatctggagacaggaactagtagtgtgtcggtgcatatgaacctgcccaggacatgagagaggctcgtttagtctgatgaggtgccctggggtacgagtggtgtatgtatgtgtgtgaatgtgggagcctaactaggcccaccggggacatgagagaggctcattttgtgtgatgaggagtgctggggcagggaaggagtatgaaagtgtgtgaaagagagacagtctcaggagaggccaatgcagggaatgagatggggaggcacagatcccttagcacgggctgtgtgctctgaggcgactgagggagaaatcagacctaggacactgcatatggctgaccttagga

SEQ ID NO: 925911 - DNA, 547 bp, Homo sapiens
ctcctttcctgacacatcattctgcataaaattaggtgattgtcttcctctgctcttggcccaggatagaaacaggttgtataataaagtagttctccccttgcctttccataggccacctgtccctcagctaaatcagaaagataaaagttagatgcggccaggcgcagtggctcacaccrgtaatcccagcactttgggaggccgaggcgggtggatcatgaggtcaagagatcgagaccatcctggccaacatggtgaaaccccctctccactaaaaatacaaaaattagccgggcgtggtggcgcatgcctgtagtccctactactcaggaggccgaggcaaaagaatcgcttgaacccggggggcggagtttgtggtgagccgagatcacaccactgcactccaacctggcgacagaacgagcttctgcctcaaaaaaaaaaaaaaaaaaaaaaaaaaaaaaaaaaggtagatgctactcaaaaaaaagttataggaataagaagtcccaaaggaagagtaatttcaaactttaaatgcctg

SEQ ID NO: 925912 - DNA, 547 bp, Homo sapiens
ctcctttcctgacacatcattctgcataaaattaggtgattgtcttcctctgctcttggcccaggatagaaacaggttgtataataaagtagttctccccttgcctttccataggccacctgtccctcagctaaatcagaaagataaaagttagatgcggccaggcgcagtggctcacaccggtaatcccagcactttgggaggccgaggcgggtggatcatgaggtcaagagatcgagaccatcctggccaacatggtgaaaccccctctccactaaaaatacaaaaattagccgggcgtggtggcgcatgcctgtagtccctactactcaggaggccraggcaaaagaatcgcttgaacccggggggcggagtttgtggtgagccgagatcacaccactgcactccaacctggcgacagaacgagcttctgcctcaaaaaaaaaaaaaaaaaaaaaaaaaaaaaaaaaaggtagatgctactcaaaaaaaagttataggaataagaagtcccaaaggaagagtaatttcaaactttaaatgcctg

SEQ ID NO: 925913 - DNA, 797 bp, Homo sapiens
taaagcagggagaagttggaaagagcagacaagtagagtcttccagcctcatctttctcccgtgctggatgcttcctgctcttgaacatcagactccaagttcttcagcttttggactcttggactgatgccagtgatttgccaggggctcttgggcctttggccayagactgaaggctacagtgttagcttctctacttttgaggttttgggacttggactggcttccttgctcttcagcttgcagacagcctactgtgggacttcaccttgtgattgtgtgagtcaacactccttcaataaactctccttcatatatacacctatcctattagttccgtccctctagagaaccctgactaattcagggtgcaaactgccggtggccttaccattcttacatcccagaatggaaagggtggtggctcccttctcacagctccactagggagttctctgctggagattctgtatgggggctccaaccccacatttccccttggcacttccctagtagagtctctctgagaggctccatccctgtgtcaggcttctccctgggcaccaggctttcccatacattctttgaaatctagttggaagctgataagcatcttttactcttgcatttggtgaacctgcaagcttaacactatgtggaagctcccaaggcttatggcttgtgccctgtggtgtagcagtgtgagctgtacgtggggccctttgaactgaggctggagccagagctgtcaggatgcagggagcagtgtcctgaggtctagcagggcagaagtgtc

SEQ ID NO: 925914 - DNA, 665 bp, Homo sapiens
aaaggaagaatatacaggatgggatagaagcaatattttaaaagataatggtggacatgaggcaggactagactgtagctccaacttggaagaacagagcagcgtgcggaggctcgcatcatgaattttagatccagaatgactgcaggaataaaccaggaatctatagaccctctgaaagaagcagactgctcctgcaggacctggtagatgccccaaatactgggagtgcccaaactgcagaagcrggaaagggaaatcctctgcccccaaacacacactctcactggggaaactgaaggtctagtttgtgggagaagtttctgaccttacctggagcagagtcaatttagagagctgagcgaaatacaggggtagaggaggcagcgggaaaggccctgggagctcactgggtccccaagcaggccattcttgcctgtcaccacagggatcggggggcagtcagaggcaaaggaaaaggaagtctcaagctgaactttttaacaatttgaactgggcaagagcctcctggccagaactcaggggaaggcgcgaatctgacgtgtagcctccacaggatggggaggaactaaagcccttttcttttgcatctgggaggtggatagcctggggtaagttctcagctttgcttgcccactgccagg

SEQ ID NO: 925915 - DNA, 665 bp, Homo sapiens
aaaggaagaatatacaggatgggatagaagcaatattttaaaagataatggtggacatgaggcaggactagactgtagctccaacttggaagaacagagcagcgtgcggaggctcgcatcatgaattttagatccagaatgactgcaggaataaaccaggaatctatagaccctctgaaagaagcagactgctcctgcaggacctggtagatgccccaaatactgggagtgcccaaactgcagaagcaggaaagggaaatcctctgcccccaaacacacactctcactggggaaactgaaggtctagtttgtgggagaagtttctgaccttacctggagcagagtcaatttagagagctgagcgaaatacaggggtagaggaggcagcgggaaaggccctgggagctcactgggtccccargcaggccattcttgcctgtcaccacagggatcggggggcagtcagaggcaaaggaaaaggaagtctcaagctgaactttttaacaatttgaactgggcaagagcctcctggccagaactcaggggaaggcgcgaatctgacgtgtagcctccacaggatggggaggaactaaagcccttttcttttgcatctgggaggtggatagcctggggtaagttctcagctttgcttgcccactgccagg

SEQ ID NO: 925916 - DNA, 467 bp, Homo sapiens
tctgacgtgtagcctccacaggatggggaggaactaaagcccttttcttttgcatctgggaggtggatagcctggggtaagttctcagctttgcttgcccactgccaggaaacaaacttggtgccgttagcaggcacacggtggaagtgagactggcccttcagattgtgtgggagctgggtgaggcctgtgactaccgaattgccccacttccctgacagcctgcatgactcagcagaggcagccrtaatcctcccaggaacacaactccattgacctgggaacctcacccccattccctacagcagccgcagcacagcaagacccaacggagagtctgagctcagacacgcctagccctgccccccattgatggtccttccctacctcctctggtagctgaggacaaagggcatatactcttgggagttctagggtcccacccactgctggtccctctccatact

SEQ ID NO: 925917 - DNA, 716 bp, Homo sapiens
ggattgagcagtgtgtctccatcggtgcaggttcccttgccacctttggcccaggtgactctggaacctgctgccaggttataaggagcttccctagtccctcccattcccaggagggaagtaccacccatgggagatatggcacaggaacatgaaagttagaggataccaagaggctgagccctgacaaagggtttcacttgcgctttattccctttttttaatgccaagcatttccgaccttgcttccgccctctgcctaaaggtaggatctttcaaccctttgagtagtctcaaaattccagggctggtgtgtcactgggtaatagtgacaatcttcagaggggtttgcaacaactggtgtgcaaaggagctctaagtttttaagaattgaccctgcaatcgaattctaggatagggaatgttccaacccatttcttgtttcacsaagagcagaaattaagagctgtggtgatatctactctcagtcatctttcaccttattcggacgtcagtggataagctttcctctcatctttcctttaaaaataggcgtgggcatgcacctcatatcaaaggagcaagctatggtgatttctaaacaaaaggattgtttacaaaagcttttcagacaatacagcttcctctgacgctgcggatcctcagcccatctcctggaagggcctcagagagtcagagtcgtagtgtattgtttc

SEQ ID NO: 925918 - DNA, 609 bp, Homo sapiens
ggctccaaaaaagacccactccttctgcttgaggagaggagagggaagagtggggaggactttgttttgcatctagaataccaattcagccacagtagcatagagcactggtcagagttgtgaggcttcttttccaggccctagatcccaggtgacatttctagagacaccctgggccagaaggaaacccgctgccttgaaggaaaagacccagtcctggcagcatttatcatctgctgactgaagagcccttgggccctgaataagaagaagtgatactcaggtactacgtcgagagccttgagtgagcctctgagacttgctggctttaggtgagactcagcacattccaagctgtggtggctatggggaaaaattcctttggcttgagaaaagcaggcrggaaagtaaaggggactttgtcttgcaccttaggtaccagcatagccacagagcagtagagcaccaaatgggctcttggagtccctgattccaggacttaactcttagatggcatttctggtcctgccctgggccagagggaagtccactgacctgaagggtgagtcacaggccaggtagcattcatgacaagctgatttaagaaac

SEQ ID NO: 925919 - DNA, 660 bp, Homo sapiens
ccacaaaagctgtggctatgggcccagggatctctgcactcttggggacccagggagccgccgcttcccttgcaggcttggaagtgcctgctcccactgtctggtttctccccactgttggctcccactccggttgcccaatccaatcttgaagcaaagttggggctgaacccgagtgctgttgcagcctggcagggtgtgcacaggcttggggcagtgctgacacagcagcacctgccatctcagacccctccrgactttgggtgccgacaaacatgagagagaggccaagggggtactgaggacagcccagcactggcctgcaggcggcccttggcatgaacagcctgggcatcatgaacaatggcaggaggcagacaggctcctggatggaagggggtgggtccctggtgaagcgccaccttcaagcccattgggcctgaagcctgggggccaggctgcccatccctggggccagagtgggaacttgtggtgctttgacctgggcccgcccatggccacccatagaccaatcagcccacacttcctccccctgaggcccatacccccacctcattcagctagacttgaggtgaggatggagagacacgggacaaccagcttccaagaggggctaccctctctgctgagagctgaaca

SEQ ID NO: 925920 - DNA, 671 bp, Homo sapiens
ggcatgaacagcctgggcatcatgaacaatggcaggaggcagacaggctcctggatggaagggggtgggtccctggtgaagcgccaccttcaagcccattgggcctgaagcctgggggccaggctgcccatccctggggccagagtgggaacttgtggtgctttgacctgggcccgcccatggccacccatagaccaatcagcccacacttcctccccctgaggcccatacccccacctcattcagctagacttgaggtgaggatggagagacacgsgacaaccagcttccaagaggggctaccctctctgctgagagctgaacactcattggtataacctgcctgtagagaagaggtaccctctctactgagagctgagcactcacagggaaaatctgcctagcagagaggagctaccctctctgctgagagctgaacactcatcagggcaccctggctatggagaggagctacccactgtgggtctcctctgagctgttccatcactcaataaagctcctctttgtcttgcttatcctccacttgtctgcatacctcattcttcctggatgcaggacaagaactcaggacccgctgaatggcagggctaaaaagagctgtaacacaagcagggctgaaacatgtcccttgttcgccacattgagggtga

SEQ ID NO: 925921 - DNA, 671 bp, Homo sapiens
ggcatgaacagcctgggcatcatgaacaatggcaggaggcagacaggctcctggatggaagggggtgggtccctggtgaagcgccaccttcaagcccattgggcctgaagcctgggggccaggctgcccatccctggggccagagtgggaacttgtggtgctttgacctgggcccgcccatggccacccatagaccaatcagcccacacttcctccccctgaggcccatacccccacctcattcagctagacttgaggtgaggatggagagacacgggacaaccagcttccaagaggggctaccctctctgctgagagctgaacactcattggtataacctgcctgtagagaagaggtaccctctctrctgagagctgagcactcacagggaaaatctgcctagcagagaggagctaccctctctgctgagagctgaacactcatcagggcaccctggctatggagaggagctacccactgtgggtctcctctgagctgttccatcactcaataaagctcctctttgtcttgcttatcctccacttgtctgcatacctcattcttcctggatgcaggacaagaactcaggacccgctgaatggcagggctaaaaagagctgtaacacaagcagggctgaaacatgtcccttgttcgccacattgagggtga

SEQ ID NO: 925922 - DNA, 671 bp, Homo sapiens
ggcatgaacagcctgggcatcatgaacaatggcaggaggcagacaggctcctggatggaagggggtgggtccctggtgaagcgccaccttcaagcccattgggcctgaagcctgggggccaggctgcccatccctggggccagagtgggaacttgtggtgctttgacctgggcccgcccatggccacccatagaccaatcagcccacacttcctccccctgaggcccatacccccacctcattcagctagacttgaggtgaggatggagagacacgggacaaccagcttccaagaggggctaccctctctgctgagagctgaacactcattggtataacctgcctgtagagaagaggtaccctctctactgagagctgagcactcacagggaaaatctgcctagcagagaggagctaccctctctgctgagagctgaacactcatcagggcaccctggctatggagaggagctacccactrtgggtctcctctgagctgttccatcactcaataaagctcctctttgtcttgcttatcctccacttgtctgcatacctcattcttcctggatgcaggacaagaactcaggacccgctgaatggcagggctaaaaagagctgtaacacaagcagggctgaaacatgtcccttgttcgccacattgagggtga

SEQ ID NO: 925923 - DNA, 737 bp, Homo sapiens
aacaaaagccactgtagccacaaactggtaagaagacttaaacagtattttttttaatgtaataaaattaaaataacaaaatttatcattttgaccacttaaagtatacagctcagcggcacgaagtacattcacactgccatgcaactttcaccaccaagtatctccagaatgttttcatctccccaagttgaaacactgtaccccttaaacaatagtttcccaattgccccttgctcagcccctggccgccactaccctactttctgtccctttgagttgacctctctatgtgtctcacataagtggaatcatataatatttgttcttttgtaagtggcttctttatttaccataatggcttcaagcttcatccatgttgtagcatatgtccaaatttctttcctttttaaggctcaataatattccattgtatttctaagccacattttgtttatttgttcatctstcaataaaaatttgtgttgctttcacttttgagtactgtgaataatgctgccatacccattggtgtacaaatatctgtttgagtctttgctttcaactcttttgggtatattctcagaagcagaattgccacatgatatagttttcccatgttaaatttctttagcaatggccatactgccttccacagtggctagactattttacattcccaccagcaatgcataaaggttccaatttcttcacatcttcaccaacacttgctattt

SEQ ID NO: 925924 - DNA, 737 bp, Homo sapiens
aacaaaagccactgtagccacaaactggtaagaagacttaaacagtattttttttaatgtaataaaattaaaataacaaaatttatcattttgaccacttaaagtatacagctcagcggcacgaagtacattcacactgccatgcaactttcaccaccaagtatctccagaatgttttcatctccccaagttgaaacactgtaccccttaaacaatagtttcccaattgccccttgctcagcccctggccgccactaccctactttctgtccctttgagttgacctctctatgtgtctcacataagtggaatcatataatatttgttcttttgtaagtggcttctttatttaccataatggcttcaagcttcatccatgttgtagcatatgtccaaatttctttcctttttaaggctcaataatattccattgtatttctaagccacattttgtttatttgttcatctctcaataaaaatttgtgttgctttcacttttgagtactgtgaataatgctgccatacccattgstgtacaaatatctgtttgagtctttgctttcaactcttttgggtatattctcagaagcagaattgccacatgatatagttttcccatgttaaatttctttagcaatggccatactgccttccacagtggctagactattttacattcccaccagcaatgcataaaggttccaatttcttcacatcttcaccaacacttgctattt

SEQ ID NO: 925925 - DNA, 825 bp, Homo sapiens
aatatttgttcttttgtaagtggcttctttatttaccataatggcttcaagcttcatccatgttgtagcatatgtccaaatttctttcctttttaaggctcaataatattccattgtatttctaagccacattttgtttatttgttcatctctcaataaaaatttgtgttgctttcacttttgagtactgtgaataatgctgccatacccattggtgtacaaatatctgtttgagtctttgctttcaactcttttgggtatattctcagaagcagaattgccacatgatatagttttcccatgttaaatttctttagcaatggccatactgccttccacagtggctagactattttacattcccaccagcaatgcataaagrttccaatttcttcacatcttcaccaacacttgctattttctgatattaaaaaaataacagccattctaatggttgtgaagtgatattacacacttcaaatgcaaatcaaatggttatttgcatttccttaatgatgattagtgatgttatacatcttttttcgcttattggccatctatatagcttcttcggagacatgtcaatttaagtctttgcccatttttaaattgagttgtttgttttcttctgtttttagccaatgaaaattttggaaccatttctataaactacatagccaattacaattttgaaaccatccctataaacttcataaagttaatcagggaagaagaaaggggcaaacaacaacaacaaaaacaacaacaaaacccaagttagcagcacaagcagcattcaccatgaggtcagtctgctccctgccc

SEQ ID NO: 925926 - DNA, 825 bp, Homo sapiens
aatatttgttcttttgtaagtggcttctttatttaccataatggcttcaagcttcatccatgttgtagcatatgtccaaatttctttcctttttaaggctcaataatattccattgtatttctaagccacattttgtttatttgttcatctctcaataaaaatttgtgttgctttcacttttgagtactgtgaataatgctgccatacccattggtgtacaaatatctgtttgagtctttgctttcaactcttttgggtatattctcagaagcagaattgccacatgatatagttttcccatgttaaatttctttagcaatggccatactgccttccacagtggctagactattttacattcccaccagcaatgcataaaggttccaatttcttcacatcttcaccaacacttgctattttctgatattaaaaaaataacagccattctaatggttgtgaagtgatattacacacttcaaatgcaaatcaaatgrttatttgcatttccttaatgatgattagtgatgttatacatcttttttcgcttattggccatctatatagcttcttcggagacatgtcaatttaagtctttgcccatttttaaattgagttgtttgttttcttctgtttttagccaatgaaaattttggaaccatttctataaactacatagccaattacaattttgaaaccatccctataaacttcataaagttaatcagggaagaagaaaggggcaaacaacaacaacaaaaacaacaacaaaacccaagttagcagcacaagcagcattcaccatgaggtcagtctgctccctgccc

SEQ ID NO: 925927 - DNA, 825 bp, Homo sapiens
aatatttgttcttttgtaagtggcttctttatttaccataatggcttcaagcttcatccatgttgtagcatatgtccaaatttctttcctttttaaggctcaataatattccattgtatttctaagccacattttgtttatttgttcatctctcaataaaaatttgtgttgctttcacttttgagtactgtgaataatgctgccatacccattggtgtacaaatatctgtttgagtctttgctttcaactcttttgggtatattctcagaagcagaattgccacatgatatagttttcccatgttaaatttctttagcaatggccatactgccttccacagtggctagactattttacattcccaccagcaatgcataaaggttccaatttcttcacatcttcaccaacacttgctattttctgatattaaaaaaataacagccattctaatggttgtgaagtgatattacacacttcaaatgcaaatcaaatggttatttgcatttccttaatgatgattagtgatgttatacatcttttttcgcttattggccatctatatagcttcttcggagacatgtcaatttaagtctttgcccatttttaaattgagttgtttgttttyttctgtttttagccaatgaaaattttggaaccatttctataaactacatagccaattacaattttgaaaccatccctataaacttcataaagttaatcagggaagaagaaaggggcaaacaacaacaacaaaaacaacaacaaaacccaagttagcagcacaagcagcattcaccatgaggtcagtctgctccctgccc

SEQ ID NO: 925928 - DNA, 825 bp, Homo sapiens
aatatttgttcttttgtaagtggcttctttatttaccataatggcttcaagcttcatccatgttgtagcatatgtccaaatttctttcctttttaaggctcaataatattccattgtatttctaagccacattttgtttatttgttcatctctcaataaaaatttgtgttgctttcacttttgagtactgtgaataatgctgccatacccattggtgtacaaatatctgtttgagtctttgctttcaactcttttgggtatattctcagaagcagaattgccacatgatatagttttcccatgttaaatttctttagcaatggccatactgccttccacagtggctagactattttacattcccaccagcaatgcataaaggttccaatttcttcacatcttcaccaacacttgctattttctgatattaaaaaaataacagccattctaatggttgtgaagtgatattacacacttcaaatgcaaatcaaatggttatttgcatttccttaatgatgattagtgatgttatacatcttttttcgcttattggccatctatatagcttcttcggagacatgtcaatttaagtctttgcccatttttaaattgagttgtttgttttcttctgtttttagccaatgaaaattttggaaccatttctataaactayatagccaattacaattttgaaaccatccctataaacttcataaagttaatcagggaagaagaaaggggcaaacaacaacaacaaaaacaacaacaaaacccaagttagcagcacaagcagcattcaccatgaggtcagtctgctccctgccc

SEQ ID NO: 925929 - DNA, 624 bp, Homo sapiens
gatctgaggtcttacccaactgtgatattaataagccaaagatgatccttgtacattgattatccctatgattacttcttcacagcaggctgggacccattaggtcaaaagcctaccagtgccaaactcaattgttttcacaaacaattttttttttgaaacagtgtctcactctgttgtccaggctagagtgctgtggcatgatcacagctcactgctacctctacctcccaagctcaagcaatcctcccacctcagtctcccaagtagctgggattataagcacgtgccacaacgtccaattaattttcatatttttttggtagagatggggtctcaccatgttgcccaggctggtcttgaactcctgagctcaagcgatctgcccacctgagcctcccaaaatgctgggattacaggtgtgagccacaaacaattttttaaaatatagtccaagtaagcagatctttagcattttgaacrggtctacttttcatatccggtgaaactgtccccaagacctactagccatatgtattagtccattttcatactgctatgaagaaatacccaagactgggtaatttataaagaaaaagaggtttcatggactcacagttccac

SEQ ID NO: 925930 - DNA, 524 bp, Homo sapiens
tgtcaggacttcctgaggctgtgtcatgggtactcaatcctcaaccttggcaaaataaactttctaagttaactgagacctctctcagatttttgggttcacattttggtaaccacgaagggattctgagtggaggtacccctgacctttgacgaatctcctatcagtgcttggtaccagcataagctaactttatggctcaaaccaataggataatttgctaaagcctggaagcaccccctccagagaatccctgatctcccaaaatttggtygagatttaaagtttattttgcctttttttgagtgggggtggggggagttttatttgcttccaataagaaaggcaagatttcctgtttccatgacaatgaaaggcaggtaactcctttatggagtttgagctcgctcccagcagggaagatgacttcgagttcttttttctgcttttaggatggtaggaagcagttttcagcctgagacccatcactaggtaagtagctgaatgggttttgtcttgggtaa

SEQ ID NO: 925931 - DNA, 549 bp, Homo sapiens
tgaattgtatgctgaatagattatttgtaggcataactcttccatactgatttaaatcacaagttctttgtctctctgttttggcttgaggaacagagattcataattgcctactaatatttatctttaccctttcttttctttctttttttttttgagacggagtcttgctcagttgcccaggctggagtgcagtgcgtgtgagcgatctcggctcactgcaagctctgcctcctgggttcacgccattctcctgcctcagcctcccgagtagctgggactacaggcrcccaccaccacgcccggctaagttttttttttttttttgtatttttagtagagtcagggtttcaccatgttagccaggatggtctccatctcctgacgtcgtgatccaccctcctcagcctcccaaagtgctgggattacaggggtgagccaccgcgcccggcctctttcccctttctaatgacagaaatgggcttggctagagactacaattccaagcctcctatgcagttttgctataaacatatatattttctgcct

SEQ ID NO: 925932 - DNA, 686 bp, Homo sapiens
gatgtaaaattgggaacctgtaaaattttttattaaatttaacaccacccacatgtttcatatttcgttgtgttttttgttaagatactttcttctttatgtcagtttaaggttcacggataaattgaagataaatcagtttccatttaccgcctcrtttgtgccccactcaaagcttcctctgttattaatttttaatttttgtaggtacgtagaagatgtatatatttatggattacatgagatattttgatacaggtatgcaatgtgtaataatcacatgaaaattcaaataatcacatcaaaatattcatcacctctagcacctatctcttgtgttacaaacagtccaattatacttttagttatttttaaatgtacaattaaactattttcactatagtcaccatgtcgtgctagctaatactaggtcttatttatcctttctaatttttttgcatcccttccccatttccatttctcctgacctgctcactacctttcctagcctctggtaaccatcattctactctctagctcctccatgagttcaactgttttaatttttagctcccataaataagtgagaacatgcaaaatgtgtctatctgtgcctggcttatttcaattaacataacgacctccagttccatccatgttgttgcaaatgacaagatctcattctt

SEQ ID NO: 925933 - DNA, 729 bp, Homo sapiens
tgagtgtctgcagcttttccaggtgaacagtgcaagctgttggtgtatctaccattctgggttctggaggaaagtggccctcttctcacagctccactagatggtgccccagtagggactctgtgtagtggctccaacatttcccttctgcactgctcttgcagaggttctccatgagggccctgcccctacagcaaacttctgcctgggtatccaggcttttccatacatcctctgaaatctaggcagaggttcccaaaccccaattcttgacttctgtgcattgacattctgtggctaaacaccacagggaacctgccaaggcctggggcttgcatcctctgaagccacggactgaggtgtactttgatcccttttagtcatggctggagcagmtaggacatggggcatcaagtcctagactgtacacagcatggggacccttcccagcccatgaaaccacttttttctcctaggcctccaggcccgtgatgggaggggctgctgtgaagacctctgacatgcactggagatattttccccattgtcttggggattaacatttggcttctcatgagaagccaaataaatgtacttatgcacatttctgcagcagcttgaatttctcctcagaaaatgggattttcttttttatcacattgtcaagctgcaaattttctgaatttttatgcactcctttccttattaaactgaatgcttttaatagca

SEQ ID NO: 925934 - DNA, 609 bp, Homo sapiens
aagcccactgcagaaatttgcgtgagtaatgaggagccgaatgttaatccccaagactgtggggaaattgtctccagggcatgtcagaggtcttcacggaagcccctgccatcacaggcccagaggcctaggaggaaaaagtggtttcatgggccggatscatggtctctgtgctctgtgcagtgtagagacttggtactctgtgtccgagccactccagccattactgaaaggggccaacatagagctcgggccgtggcctcagaggatgcaagccccaagcctttgcagcttccacctggtgttgagcctgtgagtgcacagaagtcaagaattaggtttaggggaacctctgcctagatttcagaagatgtatggaaatgcctggatgcacaggcagaagtttactgcaggggctgggctctcatggagaacctctgcatagggcagtgtgcaagggaaatgtggggttggagcccagagtccctgctgggacactgcctagtggtgctgtgagaagagggccatcgtccttcagaccccagaatggtagatccactgacagcttacatcatgtgcctggaaaagctgcagacactcaacatcagc

SEQ ID NO: 925935 - DNA, 739 bp, Homo sapiens
ttaatggccatttatagaataattaatgcaacagcaacagaatctatagtcatctcaagttctcatgacatgcaccaagatagaccacattctaggtcataagacacaccttaaaaatgtaaaagaatagaagtctttcaaagtatgatctcaaacaatagaattaaactagaaatcaacaacagaaagaagctggaaaatctcaaagtacctaaaaattaaacagtacacttctaaacaacacacgggccaaagaagaagtctcgggagaaattttaaagtatttcaagctaaatgaaaatgaaaatacatgttatcaaaattcacaggatgtagtgaaagcagtgcctagaaggaarttgaatgcatatattagaataaagaaagatctaaaatcaataatctaaattcccatcttagaaaactagaagaacaaaagcaaattaaatctaagccaaacagaagaaaacaaataataaaaatcagagcagaaatcaataaaattgaaaatcaatagagaaattcaacgaaaccaaaatctgggtgcttaaaacaattaatattgatgagcctctagccaggctaattaagaaaaaaaaaagaagacaccaattactggtataataactgaaaaggaggccatcactgctgatcccctttatcctaaaaatagtaaaagaatattatgaacaactcaaccccacaaatttgataacaaatttttggttcaaaaatttga

SEQ ID NO: 925936 - DNA, 613 bp, Homo sapiens
aatttattttattttattttattttattatttttttttgagatgaagtctcactgtgttgctcagcctggagtgcagtggcacaatcttggctcactgcaacctctgcctcccaggttcaagcgattctcctgcctcagcctcctgagtagctgggattacaggcaggcgccaccacgcctggctgatttttgtatttttagtagagatggggtttctccatgttggtcaggctggtctcgaactcctgacctcatgacccgccccattggcctcccaaagtgctgggattacaggcatgagccaccgtgcccagccctgaatttttaaaaagatttgaaattgcacattaaaggaggatactctgtaccagacaatatcaaaccagaatgatcatgaccaaaatatattggaataaaatttytgagctctaaagaaaaagaagatattttgggggatcacggcaaaaagaccaggtgacttaaaagggaaataaaatattggacaataattcattatgccagaaaaatgacatgaaagcattttaaggaaaatcaagtaaagaaaatattactcaaagattttatatccagtaaaactaaatttcaagtaga

SEQ ID NO: 925937 - DNA, 613 bp, Homo sapiens
aatttattttattttattttattttattatttttttttgagatgaagtctcactgtgttgctcagcctggagtgcagtggcacaatcttggctcactgcaacctctgcctcccaggttcaagcgattctcctgcctcagcctcctgagtagctgggattacaggcaggcgccaccacgcctggctgatttttgtatttttagtagagatggggtttctccatgttggtcaggctggtctcgaactcctgacctcatgacccgccccattggcctcccaaagtgctgggattacaggcatgagccaccgtgcccagccctgaatttttaaaaagatttgaaattgcacattaaaggaggatactctgtaccagacaatatcaaaccagaatgatcatgaccaaaatatattggaataaaatttctgagctytaaagaaaaagaagatattttgggggatcacggcaaaaagaccaggtgacttaaaagggaaataaaatattggacaataattcattatgccagaaaaatgacatgaaagcattttaaggaaaatcaagtaaagaaaatattactcaaagattttatatccagtaaaactaaatttcaagtaga

SEQ ID NO: 925938 - DNA, 536 bp, Homo sapiens
atcatgtacttaatgtctttttctgaaatagatcaaacagaagcttgctgttttatgactatgtctctctgccatgacttgtcagttacagtgttaccctattctttattctctctagtttttaaaattactttgcataggattgaacttgatactcttctagtgctcgttttttcatgtgaaatcaagttttcctaaacttttagaacaagtcagggttccctagggggacagaactaatagaatagagggatagatagatagatagatagatagatagacagacagacagacagatagatagatatagatagatagacagagaaaggggagtttattaagtattaaattayatggtcacaaggtcccacaataggccgtctgcaagcctgaggaacaaggagagccggtccgagtcccaaaactgaagaacttggagtctgatgtttgagggcaggaagcatccagcatggaagaaagatgtaggctgggagactaggccagtcttgccttttcacgtttttctgcctgcttta

SEQ ID NO: 925939 - DNA, 602 bp, Homo sapiens
ctgactagacacagccaggaagagcctctcccactgaaacagaccagaccatcgagtaaaacagcacactctgaacagatcttcagaaagaaagcattgagcatggacagagagaggacacacacgctgggctaaaaggggagaaagytaggaaccctatacaggatgaccaagcaccaagactcattcctggatctgagcagctcctaaggaagggatgagtgatatacacatggagtggctaattctttccatggacctccaggatcctagctgtgggagacccccacaaccaccacagacatctgcctggagtgttggcagagacagaactctggagagttagcagagagagaactccagcctgcacagagcccagaggtggaggaatgactgcagtggagcacagctatgagtgcccacccccgcaaggcccaccatactcctctaggcagctctagcctttgttggctgccagacctgggcagagcatggctgtcttgcccatgggaaaaaaaacagtctgatctgagcatccctctgtctgccagcctctccaagggttcctgcctggctgcacctacttgcagtgcagcctcagc

SEQ ID NO: 925940 - DNA, 792 bp, Homo sapiens
atgtccaatcaaccagcataaaaagcctgacatactaactcatggacaggaggtgtggaccagtgtaatacctcagaccttgctaggacctaggaaatgaaggggagcgtgctggaaatgtaagccagtgtcattgttccwgggcttgggttggagggtgggcatgatgcccactgcagtcatcaataaacatacaaataagtaaacaaaagaggggataaaggaaccaatgctgagtgtgtgtcataaaccaagacttaaaatgaaccctatcctgggtatcaaaagtccagaaaaaataaaaaggaaaaagaagcataaaaaagaaggtaaaattcatttataattccattagtgagagacattttctgaacactcagtctatcttatgcatatatgtagatagatgatattgatagatgagaaataaagacacaagcaatacaactacaacaaagttgggaccatactgtatacgccactttatatatttataggtttcttctatttctttttttttttttttgagatggagtctcactctatcacccaggctggagttcagtggcatgatctcagctcactgcagcctccgcctcctgggttcaagcaattcttcctgcctcagcctcccaagtagctgggattacaggtgcccaccaccacacccagctaatttttgttttcactagagacagggtttcaccatgttggccaggctggtctcgaactcctgacctcaggtgatccaaccacctcggcctcccaaagtgctaggtgtgaggcactgtg

SEQ ID NO: 925941 - DNA, 792 bp, Homo sapiens
atgtccaatcaaccagcataaaaagcctgacatactaactcatggacaggaggtgtggaccagtgtaatacctcagaccttgctaggacctaggaaatgaaggggagcgtgctggaaatgtaagccagtgtcattgttcctgggcttgggttggagggtgggcatgatgcccactgcagtcatcaataaacatacaaataagtaaacaaaagaggggataaaggaaccaatgctgagtgtgtgtcataaaccaagacttaaaatgaaccctatcctgggtatcaaaagtccagaaaaaataaaaaggaaaaagaagcataaaaaagaaggtaaaattcatttataattccattagtgagagacattttctgaacactcagtctatcttatgcatatatgtagatagatgatattgatagatgagaaataaagacacaagcaatacaactacaacaaagttgggaccatactgtatacrccactttatatatttataggtttcttctatttctttttttttttttttgagatggagtctcactctatcacccaggctggagttcagtggcatgatctcagctcactgcagcctccgcctcctgggttcaagcaattcttcctgcctcagcctcccaagtagctgggattacaggtgcccaccaccacacccagctaatttttgttttcactagagacagggtttcaccatgttggccaggctggtctcgaactcctgacctcaggtgatccaaccacctcggcctcccaaagtgctaggtgtgaggcactgtg

SEQ ID NO: 925942 - DNA, 677 bp, Homo sapiens
ttatagcttgggttctgaactgagctactttgatatgaatctaaaaagacatgccatattaaaatatgcctttagtctacggccaattaaagaaattagtgttaaaagaagaaatctgggtgattctgagatttagtttataatctgggaggagtgcaaatattattaatattataaattagtagtatgaaccataataataaaaataataaagcttctcatgtaaactccccaaatataataattatgttttataggtatctgactcagggcagaaaatagatcagctttataatattgactgtctaatgactacaacttcctttgttttaataaaaaattaagatggccaaataacaatgaaattgtgacattcaaatatacttttcaattataagcactgaggcaccccaaactctgkgggcacaactttttttgttttactccaactttaacaatatttttttttaatcactcaaataaagaattaaattaaccaagtcaagatggattaaagacttaaacataagacctaaaaccataaaaaccctagaagaaaacctaggcaataccattcaggacataggcatgggcaaagacttcatgactaaaacaacaaaagcaatggcaacaaaagccaacattgacaaatgggatctaatcaaactaaaaagctt

SEQ ID NO: 925943 - DNA, 597 bp, Homo sapiens
gtatataaatatcctggaactaccctgctttctggtgagcagaaatcttttggcagcaaataaatatctgttggccagcactgaacttctgagtgtgtggctgcctcctgatttcttgccctatagcccgtttccagttgctgcataatcatcaagcacaacacaagattaaaacaaatacttccttaggttgatatttttccatttttacacccagcaggtaaacaaacattcatcaattttctcacagtggactcacttccaatttcaaggaactgattatagagatttctttgaatctactagaaagggggagatgtaggtctgggttacatagttgttacaactttgctgaaaaccctctgagaattctgcaaagaaaactgtacatgaacccctctaggtcattcagccactggtggtatgtacacacrttgctgttctatagaactccagcagggccctcgcccctgagtcttgatttcagaacttaaaggattacccatgcgttcggctgattgctcaatgcttgtattcattcctctcgaaataacgctacaacttaaaacgtaagggtaatagaaatgaagttactat

SEQ ID NO: 925944 - DNA, 624 bp, Homo sapiens
atagacatatccaatctgaaaaatggagggaaaaagattggaaatgttgagcaggaactcagagatttgtggagagatagcaaatggtctcacatgtgtagttgaaggcctagaggagatcagaaacaaaatggaggagaaaaaaatttcttaaatttgatgaaaggcaaaaattatgtgtttcagaaaactcagcaaagtctatgaagtataaatgcaaagaaaactacatttggtttatcatagttaccttactgaaaaacaaagatgagaaaaatatttaaagtagctaaagaaatatgacacgttatgtaagagagaatcaattgtctctcagtcaaaaagatatcaactattgctgaagaattatcagaaacaatggtgktaagaagacagaggaacaatatatctgaagttctgagagaaggattaaaaatctgtcaacaaaaaattacatatataggctgggtgcggtggcttacaccagtaattccagcactttgggaggccgagacaggcagatcatctgaggtcaggagttgcagaccagcctagccaacatggtgaaaccccatctctattaaaaatacaaaaattagctgggcatgttggtgggcgcctgta

SEQ ID NO: 925945 - DNA, 776 bp, Homo sapiens
ccgaggcagaagaacataaattgtgatgatttcatggacatttgtcagtttccaaaattaatacttttataatttcttacacctgtctttactgcaatctctgaacataaattgtgaagaattcatggacatttatcgcttccccaatcaatactcttataatttcttatgcctstctttaatctcttaatcctgtcatcttcgtaagctgaggatgtgtgtcacctcaggaccctgtgatggttgcgttaactgtacaaattgtaaaacatctgtgtttgaacaatatgaaatcagcgcaccctgaaaaagaacagaataacagcaattttcagggaacaaggaaagataactgtaaggtctgactgcctgtggggtcgggcagaatagtgtcatatttttcttcttgcagagagcctatagatggacatgtgagtaggagaaatattgctgaattcttttccccacaaggaatattaataattgatagccctggggaaggaatgcattcctgggggtaggtctatagatggccgctctgggagtctcagtcttatgtggttgagataaggactgaaatacaccctggtctcctgcagtaccctcaggcttactaggattgggaaattccagcctggtaaattctagtcagaccagttgtctgctctcgaaccctgtttcctgttaagatgtttatcaagacaatgtgtgcacagcgggacataggccctcatcagtaattctaattttgccttgccttgtgatcttttatcgcc

SEQ ID NO: 925946 - DNA, 626 bp, Homo sapiens
ttgtgtggttcccaatgtcctcttctgccttagtgctgtacgggtaattttgaggtatttggtttttccgactagggttgtagtgataactcttagctgcttaaccactgcaattacgttatggaaactgacactttaagaaaatttactgaccaaaggaagtaagtactaataataccaaaacaaattgtttgtctttccaccaaacctgtacctgccttgcctttctatttcctaactcagaaaacgggcactatgtgtggaacctggtccttagtcatgccatgtactgcyggctgccaattcttggagagtcggcctcctaaataccttgttgattaagcaccttcctctccagcctcaccgccagttacttcctcattgctccctttgggttattgcatcctgccttgcatgccctatctggtttccggtcttcagctctcctgtcccgtccatccatcaagtagttgccagagaatccttctaaaatactatacggtataaacctggtctgcttaaactctctcaatgtattgcagggtctgatacgatcttcttagtttggaaggtaatgcccttcatgatctggccctgaaactctttcctctccctcaccgacacag

SEQ ID NO: 925947 - DNA, 626 bp, Homo sapiens
ttgtgtggttcccaatgtcctcttctgccttagtgctgtacgggtaattttgaggtatttggtttttccgactagggttgtagtgataactcttagctgcttaaccactgcaattacgttatggaaactgacactttaagaaaatttactgaccaaaggaagtaagtactaataataccaaaacaaattgtttgtctttccaccaaacctgtacctgccttgcctttctatttcctaactcagaaaacgggcactatgtgtggaacctggtccttagtcatgccatgtactgccggctgccaattcttggagagtcggcctcctaaataccttgttgattaagcaccttcctctccagcctcaccgccagttacttcctcattgctccctttgggttattgcatcctgccttgcatgcyctatctggtttccggtcttcagctctcctgtcccgtccatccatcaagtagttgccagagaatccttctaaaatactatacggtataaacctggtctgcttaaactctctcaatgtattgcagggtctgatacgatcttcttagtttggaaggtaatgcccttcatgatctggccctgaaactctttcctctccctcaccgacacag

SEQ ID NO: 925948 - DNA, 617 bp, Homo sapiens
ctgaagaaagcagaaacaaagaatttaaagtggattggctattttaaagctggttaaagttgcaaaagacaggaatagggaaacagaataataaataactggttggttaacatcaggttactcttttgtaaggatgccaattgaaactggcctgtttggaarattagatttttaggttattaggttattatctctctctcctgatttttccaaaggccagataagaatgtagtttctgtttggtgacttgaaactttatcgtgggtgattccattttgaattttagtctgttctgtttgggcctagtgcaggagcttagtgcaaaacaatagcctcctaaaatttaaaagactttaaagaacatacatgagtttttcatcagataatatttatttgtattcattaatttatttgattggttaagtcttggctcccgagaatctttgctcagaggaatttttcaatccttggctattattctccttatagttattgtatttacctccccggtgtattgaattatcctatgggttttaaatgctttcctgcacccacctggacgtcaaatgattgccatcagaaagagacaacctgaagaaaccaacaatgactatgaa

SEQ ID NO: 925949 - DNA, 617 bp, Homo sapiens
ctgaagaaagcagaaacaaagaatttaaagtggattggctattttaaagctggttaaagttgcaaaagacaggaatagggaaacagaataataaataactggttggttaacatcaggttactcttttgtaaggatgccaattgaaactggcctgtttggaaaattagatttttaggttattaggttattatctctctctcctgatttttccaaaggccagataagaatgtagtttctgtttggtgacttgaaactttatcgtgggtgattccattttgawttttagtctgttctgtttgggcctagtgcaggagcttagtgcaaaacaatagcctcctaaaatttaaaagactttaaagaacatacatgagtttttcatcagataatatttatttgtattcattaatttatttgattggttaagtcttggctcccgagaatctttgctcagaggaatttttcaatccttggctattattctccttatagttattgtatttacctccccggtgtattgaattatcctatgggttttaaatgctttcctgcacccacctggacgtcaaatgattgccatcagaaagagacaacctgaagaaaccaacaatgactatgaa

SEQ ID NO: 925950 - DNA, 617 bp, Homo sapiens
ctgaagaaagcagaaacaaagaatttaaagtggattggctattttaaagctggttaaagttgcaaaagacaggaatagggaaacagaataataaataactggttggttaacatcaggttactcttttgtaaggatgccaattgaaactggcctgtttggaaaattagatttttaggttattaggttattatctctctctcctgatttttccaaaggccagataagaatgtagtttctgtttggtgacttgaaactttatcgtgggtgattccattttgaattttagtctgttctgtttgggcctagtgcaggagcttagtgcaaaacaayagcctcctaaaatttaaaagactttaaagaacatacatgagtttttcatcagataatatttatttgtattcattaatttatttgattggttaagtcttggctcccgagaatctttgctcagaggaatttttcaatccttggctattattctccttatagttattgtatttacctccccggtgtattgaattatcctatgggttttaaatgctttcctgcacccacctggacgtcaaatgattgccatcagaaagagacaacctgaagaaaccaacaatgactatgaa

SEQ ID NO: 925951 - DNA, 606 bp, Homo sapiens
ggaagagtttagctttagataggaggacggccaatctctatgaccagagaggaggaggaatagatgagactaagagagataaacttctgtttgtgggggtggaggctgagagtggagagaggagctggggaatttgctttatgatgacctccattttatcttcaaagaaacagtttgtcccccaccaccctggtgtcttgtcctccttgctgtagataccagtaaatatgactgactgtcttccccacctgttcatctcaatcacattaaatgttattagcctctcgttactatcggactctttcctcttgtcatctttgtaaagagtagcttgttaatgccattacataggcccccacgtcctatagtgctgtggtraaaacaacaaggtcctaataatgggccataccaatgaactaatttctactatttaaaaggacacgggaaactgctttcagtggcctgccttcttagttctggtatattctgctctatactcaagagttattctgtttcctgtgccttcagaggaccacattcccagctttatgcccagagaagtctatgaaactaccccccaccggcatcctacagagttgggatttt

SEQ ID NO: 925952 - DNA, 595 bp, Homo sapiens
aaaatctcactatgttgcccaggctggtcttgaactcctgggctcatttaactgtgaagggaaaggaaagacttcagaaagttccccagtcctgaattttttctaagaggttattagaggatgattaccaaaaggaatctaagaattagacatgaatacaagaaacagtgatagacaaagaaataggtataactttgagataattaaaataaaygttaataaaaattaataataataattcagacagaaatatcagttgatctccacagtggaagttgtagaggtataggagaggcaaagtaaaagtatcctaacattcttgactagagaaaagacagagagagcaagacagagacagagacaaagtttttgatattgagaaaaatacaaatgtttaaatatctgaatttaaactagagctgttgaagtacaatgtacaacttgagaaagaaaatggaagcagcaacaacagtcaaaccaacaaaaagcaagaaaggaaaaaaaattagggagtataataaagaggagaaagaaaataacataggaggaatagctccaaattatggcgatcataaaaaagataaactggttaaag

SEQ ID NO: 925953 - DNA, 710 bp, Homo sapiens
tcctttgtagggatttaatcacaaatgaatttttaatcatttgtgattaaaaggatgaagctggaaaccatgattctcagcaaaccatcacaagaacagaaaaccaaacaccccttgttttcactcataagtgggaattgatcaatgagaacacatggacccagggaggggaacatcacacaccagggcctgtcagggggtagggagctgggggagggatagcattaggagaaatacctaatgtaaatgacaagttgatgggtgcagcaaaccaacatggcacatgtatacctgtgtaacaaacctgcacgttgtgaacatgtaccctagaacttaaagtataataataaagaaaagacaacaatgacacttgccacattaattcttcctttcacaaaagatttctctgcaccatgagataaggtttgacagcattttacccacagtagaacttctttgaaaattggagttaatcctttaaaaccctaccacttcttgattaactaagttgatgtaatattctaagtcttctgttgtcatttcaacaatgttcayagcatcatcaccattagattttatctgaagaaaccactttctctgctcatccataagaagcaactgctcatacatgcaagtttgatcacgagattgcagcaaatctggctgaaatatcttcagattctacttttaattctatttctattgctgtt

SEQ ID NO: 925954 - DNA, 710 bp, Homo sapiens
tcctttgtagggatttaatcacaaatgaatttttaatcatttgtgattaaaaggatgaagctggaaaccatgattctcagcaaaccatcacaagaacagaaaaccaaacaccccttgttttcactcataagtgggaattgatcaatgagaacacatggacccagggaggggaacatcacacaccagggcctgtcagggggtagggagctgggggagggatagcattaggagaaatacctaatgtaaatgacaagttgatgggtgcagcaaaccaacatggcacatgtatacctgtgtaacaaacctgcacgttgtgaacatgtaccctagaacttaaagtataataataaagaaaagacaacaatgacacttgccacattaattcttcctttcacaaaagatttctctgcaccatgagataaggtttgacagcattttacccacagtagaacttctttgaaaattggagttaatcctttaaaaccctaccacttcttgattaactaagttgatgtaatattctaagtcttctgttgtcatttcaacaatgttcatagcatcatcaccaktagattttatctgaagaaaccactttctctgctcatccataagaagcaactgctcatacatgcaagtttgatcacgagattgcagcaaatctggctgaaatatcttcagattctacttttaattctatttctattgctgtt

SEQ ID NO: 925955 - DNA, 815 bp, Homo sapiens
tctctgaaatccagcctgtaaacccaattgttcatgaaaatttctatttgtatgtctaatggttatctcaagtttaatatatccacactgaattattttcttttactcaattctgcttctcctccaggcttctcaattacataaaaggcaactctagcatgtcaattgcataagtcaatatttggagccattttgacatttttcttttctcatactgcatatttaatccattggcaaatccagccagatctatcttgaaaatatrtcagaattttaccactttcaccaccactactgccagcactctgattcaagccaccattatctctttcccggatttttgccatactatcctaattagtccttgcttccatctttgctcaccttcagtccttatcctactctcccaccagagtactcccatttaaatatgtcccattgtgtcatctgctggtcaaaatgatgactttaaatatttcccatcccactctgaataaaatccaaagtgcttacaatggctgacagggttctgtatgatctggcccctgctgtctctctgaccctgtctccttctcatctctcccttgcttacttcactcctgtcatattggcctcctttgctgttcctcagtcaccaaatacactcttgcctcaggacttttgcatttgctctttcctctgtctggaaaactctttcctctggtatcctcatggattgctctaactctttcttctggtatcctcatggattgctccctcacttccttgtgttgttgctgataggccaccatgccactaagccatctctgacgatc

SEQ ID NO: 925956 - DNA, 815 bp, Homo sapiens
tctctgaaatccagcctgtaaacccaattgttcatgaaaatttctatttgtatgtctaatggttatctcaagtttaatatatccacactgaattattttcttttactcaattctgcttctcctccaggcttctcaattacataaaaggcaactctagcatgtcaattgcataagtcaatatttggagccattttgacatttttcttttctcatactgcatatttaatccattggcaaatccagccagatctatcttgaaaatatgtcagaattttaccactttcaccaccactactgccagcactctgattcaagccaccattatctctttcccggatttttgccatactatcctaattagtccttgcttccatctttgctcaccttcagtccttatcctactctcccaccagagtactcccatttaaatatgtcccattgtgtcatctrctggtcaaaatgatgactttaaatatttcccatcccactctgaataaaatccaaagtgcttacaatggctgacagggttctgtatgatctggcccctgctgtctctctgaccctgtctccttctcatctctcccttgcttacttcactcctgtcatattggcctcctttgctgttcctcagtcaccaaatacactcttgcctcaggacttttgcatttgctctttcctctgtctggaaaactctttcctctggtatcctcatggattgctctaactctttcttctggtatcctcatggattgctccctcacttccttgtgttgttgctgataggccaccatgccactaagccatctctgacgatc

SEQ ID NO: 925957 - DNA, 587 bp, Homo sapiens
gtaaatacacatacacctagaaccatctgatcatcaataaaattaataaagttttattttttaattttacttttaatttaaaaatatatgaggtacaatgtaatgttttgattttaaaagcacacctttgagaggaggggccagttggccaactagaagcaactgtggttcacrgcattcacaaagaggaatgaaaggggctagtgaattcaggaccttgaactgaaatatccagcttctcacattgggattgactaggcaaacaactccactgacagagaacaacgaaaagcaggaggggatgatggcctatgcaggagtggcagggagccaaaggaacccccacctccagccaagggaattgtgagtaattatgcggccctgcccaggaccatgcttttcccactaatctttgcaacccgcagatcaggagaccccctcatgagcccgtaccaccagggcctggagtcagatgcacagagttgtgtggagtctcagcagagcagccactggggcacacacagagacccaagagttttacatactccagccccaggattcccgccaaggcagaagatccatcctta

SEQ ID NO: 925958 - DNA, 587 bp, Homo sapiens
gtaaatacacatacacctagaaccatctgatcatcaataaaattaataaagttttattttttaattttacttttaatttaaaaatatatgaggtacaatgtaatgttttgattttaaaagcacacctttgagaggaggggccagttggccaactagaagcaactgtggttcacagcattcacaaagaggaatgaaaggggctagtgaattcaggaccttgaactgaaatatccagcttctcacattgggattgactaggcaaacaactccactgacagagaacaamgaaaagcaggaggggatgatggcctatgcaggagtggcagggagccaaaggaacccccacctccagccaagggaattgtgagtaattatgcggccctgcccaggaccatgcttttcccactaatctttgcaacccgcagatcaggagaccccctcatgagcccgtaccaccagggcctggagtcagatgcacagagttgtgtggagtctcagcagagcagccactggggcacacacagagacccaagagttttacatactccagccccaggattcccgccaaggcagaagatccatcctta

SEQ ID NO: 925959 - DNA, 587 bp, Homo sapiens
agcacatcacggagaatagggtatccatcctctgaaacatttatcctttgagttacaaacaatccaattacattctttaagttattttaaaatacacaattaagttcttattaacgattgtcactttattgtgctatcaaatagtaggtcttattcattctttctatttttttggacctattaaccatccccaccttctcccgctcttgattttcctttgcatgcatgtattcataaagtttattagtattttgcaaatctttgtaggataagtctgacctgtccaggtcacaattatagggcacatatcttattttctgagagaagcagggattttattttattttttattgkttcacttattttctccctttcatttgcctctacttcgttctcttttaaatctttcacatgttttcattcattacttgcttcctgccttccttccctcaaacaaggccaggtgcttagttttgaaatctcattcaaaatggtgccacgtcatctgccagggccaagaatccagaggtgctgtcatatttctccttgccagcgtggatctcctccgagccccgccctccctcctc

SEQ ID NO: 925960 - DNA, 587 bp, Homo sapiens
agcacatcacggagaatagggtatccatcctctgaaacatttatcctttgagttacaaacaatccaattacattctttaagttattttaaaatacacaattaagttcttattaacgattgtcactttattgtgctatcaaatagtaggtcttattcattctttctatttttttggacctattaaccatccccaccttctcccgctcttgattttcctttgcatgcatgtattcataaagtttattagtattttgcaaatctttgtaggataagtctgacctgtccaggtcacaattatagggcacatatcttattttctgagagaagcagggattttattttattttttattgtttcacttattttctccctttcatttscctctacttcgttctcttttaaatctttcacatgttttcattcattacttgcttcctgccttccttccctcaaacaaggccaggtgcttagttttgaaatctcattcaaaatggtgccacgtcatctgccagggccaagaatccagaggtgctgtcatatttctccttgccagcgtggatctcctccgagccccgccctccctcctc

SEQ ID NO: 925961 - DNA, 723 bp, Homo sapiens
  misc_feature 703, 704, 705, 706, 707, 708, 709, 710, 711, 712, 713, 714,715, 716, 717, 718, 719, 720, 721, 722, 723: n = A,T,C or G
catatttacatggatcaattattgagtaaataaataaatgggtgagaaaaaacacatctcctctaaggaaaattttcaaataatttatttagatatttgtattcaaggatgtgaggcataagcctctctccattaagtatggcctgggcatagtgacttccttgcaaagagaagagtgtcaaatagaggaaaagaaaagttacgtggcattgaagaaactgagaaacattatttcagtcagacaattgaattcaacatcatcagtgatcagtcatgttgacagtatgtgctcttgataggatgtgatgagaatgacattttacttctgtggttttcctcctaaaaactcataatcatagtataattctggaaaaacaacagacaagtttcaattgtggtatgtacattccataaaaatgctagaccagtgcttctcaaactgccatggytgtctgaaacaataaaagtctaagaaactgtcagaaccaagaggagcctaaggagatgctgacaactacatgtaatgcgttatcttggattcaatactggagcaggaaacgtttgtaaagtaaaaactaaggaaatctgaataaagtgtgaacttcaggtaatttttgaaaacttatgataatgttaaaattatattaaataccttaaatattggttaaaactattcacatacaagattactatgtacaattgnnnnnnnnnnnnnnnnnnnnn

SEQ ID NO: 925962 - DNA, 568 bp, Homo sapiens
tgaagtgatcattttgtttgtttgcttttaattctgtttttctggtaaatcaaatgtattgatttgcataggttgaaccatccttacatcctagaataaaaccctcttgattgtgagaaattatctytttgaaatgctattggatttggtttgctagtattttgttgaggaattttgcaccaatgttcaccagggatattggactattgttttcaatgttgtgcctccttacttgattttgatttcagggtgatattggtgtcacagaataagttatggaggaaacctaactcctcaatattttgaaatagattcattaagattggcactagctcttctttgtatgtctgaaaaaattcacctgtgaatctgtctgttctggggcttttttgttgttgttggaagatttttttataactgatttaattttattacttattcttggtctgttcagtatttgtatttcttcctgctttaatattgggaggtattatgtttccaggaatttatctgtttcctctagattttctagtctgttcataccagtttctgataatcatttgtattt

SEQ ID NO: 925963 - DNA, 674 bp, Homo sapiens
ttgtgtgtagccagaaatagtaaccctaaggttcttgggaaatcacattttgtagtgttggactaggcagactggtttaggtattccacaactggaaagacgggcacagctcgtctgggccacttagtttgccagaatggagccygaatcctcttcaaaggatatgtacctgtagaagctgctggtagtgggactagttggggttagggggtgagagttaaagttttgttccctgattctagaagacaggaatcatacttgtaatcccagaaggtgatcagaaatgttattttaaaactcaaaaacagatccacagaccaccgactacagtgacagtaagtttggggcaggctctttaagtgcagaaggttccctgccttcgtgaaaacatcttatgtcttggcaactggctaccttcatatactgattcctttttcacaaataatgcaggaaaaagattgtatattctcccggaaataattgtccatttgtctcacaagattagggctcactgacaatgcacctaagttagccaagagctctgatgaagatgtacaagaataatgttgtttccatgcctaacacatctattctgtagtccatgcataaatgtgtaattgtgactttcaaactctaattatttaagaaatatgttttgtaaggttacagttgcc

SEQ ID NO: 925964 - DNA, 622 bp, Homo sapiens
acactctcaaaagatttctcagacagtttacaagaaataacaaaacctatccttactctacaatcccaaatagactctttggcagcagtgactctccagaactgctgaggcctagacctcctcactgctgagaaaggaggactctgcaccttcttaggggtggagtgtttcttttacactaaccagtcagggacagtatgagatgccaccggcygtttacaggaaaaggcttctgaaatcagacaatgtctttcaaactcttatgccaacctctggagttgggagacatggcttctcccctttctaggtcctgtgacagccatcttgctattactcatctcacacttgggccttgtgtttttaacctccttgtcaaatttgtttcctccaggattgatgccatcaagttacagatggtgttacaaatggaaccccaagtgagctcaactacaacttctatggaggacccctggaccaacccactgaccctttggctggcctagagagttcccttctggaagacactaccactgcagggccccttcttcacccctatccagcaggatgtagcttgagtgatcattgcccaattcccaacagcagttggggtgtcctgtttgtt

SEQ ID NO: 925965 - DNA, 741 bp, Homo sapiens
tttgcatttcactgattactaatgagactgacttccttttcctatatttattgggcaattgaatatcctcttttgtgaagtgcctactggtgattcttgcagatttttctataaggttgtatatattttacttactgatttgtaagacatcttttttatgttatggcaatgaagtctttgttggttatgtgttacaaaatcttttccatttatgcttgcttgccttttcgctctcttaatggtatgttttgatgaacagaagttcttaatttaatgtggtccaattaactgatcttttatttakgcttagcaacttttttgggtcttattacagttagatttccctaccacaaggtcataaaaatattctatattttcttcaaggagtcttatggttttgctatttcacagccttagctgttgttgcctttggggtctggggaatctgaggagactagggactggagtggtcctctggcatgtgcagcagctctggagaggtggccaacagctttttcatgcaggtctgattctgtttctctttactgggcagaatctcctgtctgaggtctatgaccacccccaccagtgttttccagccagcagtagttccaaacctccctggggtgaagctcccagaggaaggggtgggctgccatctttgctctttggcagccttagccgttctggctttcagaacttggagagtgcaaggtgactgcgggctggagcagaccccta

SEQ ID NO: 925966 - DNA, 725 bp, Homo sapiens
gtaagacactgtgcaggtgcactggtgcccagagaaaaagaagagagccagagctgttcatctttgcagacagaaagtggggagccagggtacagcacggctcagctcgtgcccagagagagaaagaggaagaaactgagtatgagggagaaaggaaacgggatgacagagagagagacagaagaagaaaaatgagtaaggggctaggcgcggtggctcacgcctgtaatcccagcattttgggaggccgagacgggcggatcacgaggtcaggagatcgagaccatcctggctaacacggtgaaaycccgtctctactaaaaatacaaaaaaattagccaggtacggtggcgggcacctgttgtcccagctacttgggaagctgaggcaggagaacggcgtgaacctgggaggcggagtttgcagtgagctgagatcacgccactgcactccagcttgggcgacagagcgagactccatctcaaaaaaaaaaaaaaaaagaaaaagaaaaatgagtaagagagagagagaaagactggaaaagccagagatcaaagagagacacagaaggtgagacttgggagaaaaataatgtaaaaggaagaaagagtacaagaagaagtgagaggatgccgagaagttggctgggctgggggaaggttctagaggctcaagcagcaaggaggtgcagggaaaggttacagtgcggccactaaggaaggaca

SEQ ID NO: 925967 - DNA, 751 bp, Homo sapiens
aggaaaactatttgggctggagatcaggagtttgcagcagtcagacacacaagtctggtactaccaaatttatttttaaattaattaattaatttatttattttcataaggacagggtcttgttatgttgctcaggcctgagcaacaaaactgaagtctcaaacttctgggctcaagcgatcctcccacctcagcctcccaaagtgctgggcttaccaggcatgagccaccatgcccagccagacacacgagtctggatttcagggataaagcttgactggaaacataaatytgggagtcgttaagttatagccattccaagcagttaggctggatgagatcatgaaaggagggagtgaagatagaaaagacaagaggtctgaggatggagccctggggctgaggaacatgttgggaagatgaggaggatgcaaaagagaccgagaaggggtggccattgcagtaggtgaagaagctagtgagtgatcccagaaacccagtaaactgtggcaaatgcagttaacagagccagtgagatgaggactgagaattaatcattggatttggcagtggtgagggcattggtgaactttacaagagtgattctggaatggtggggtgagagtgggttcaagagagaataagaggagaggaggtgaagagagcaaggatagactaatatttttgaagagttttcagtaaagaagagcagacaaatgtagggggttgagggaggtgatttacttattta

SEQ ID NO: 925968 - DNA, 866 bp, Homo sapiens
atgaaaggagggagtgaagatagaaaagacaagaggtctgaggatggagccctggggctgaggaacatgttgggaagatgaggaggatgcaaaagagaccgagaaggggtggccattgcagtaggtgaagaagctagtgagtgatcccagaaacccagtaaactgtggcaaatgcagttaacagagccagtgagatgaggactgagaattaatcattggatttggcagtggtgagggcattggtgaactttacaagagtgattctggaatggtggggtgagagtgggttcaagagagaataagaggagaggaggtgaagagagcaaggatagactaatatttttgaagagttttcagtaaagaagagcagacaaatgtagggggttgagggaggtgatttacttatttatttaagatctgagagaggttgatgacaatgctctcrtagaggcaagcaaactgatgatgcagaagagaaggagagaaatcagagagacctgatgagagaggatgtgaactagtgcccaggtgaaggagttcacttaggtaagagcacaggcagttcacgtacagtaacaagagggatgtcagaatatatggagacagatgcaggtagatggagggggcgtgtggaaattctttcagattgcttctattttctccatgaagttgagagcaagaccatcaacagagtgagcagagaggaggagggggtggaggttggaggagagaggagaataaaataattgttggggtgggtggaggagtgtacagagctaaggaaatccgagagtattggtgatcaacacaaacagcatttgaaggtcatgaatttaagtgagaccagctagttgggaggtatgttt

SEQ ID NO: 925969 - DNA, 644 bp, Homo sapiens
taaagcaggcagaagaacacggggggactagacttgctgagtcttctggcctccatctttctcctgtgctggattcttcctgcccttgaacatcagatttcaagttcttcagtgtttggactcttggacccacaccagtgctttgccaggggctatcaggcctttggccacagactgaaggctgcactgtcaacctccctacttttgaggtttttggacttgggctggcttctttgcccctcagcttgcagatggcctattgtggaacttcaccttgtgactgtgtgagtcaattctcctagtaaactccctttcatatattcatstatcctattagtcctgtccctctagagaaccctgactaatgcacaccttaataaaaaatgtcatcatcctggccaattccatctgcaaagaccctattccaagtaaggtcatattctgaggtttcaagtggatgtgtgttttttggggacactgttcaaccccaccacactgtctttgaatacatcaggctgcttcccagcccagggcttatgcctctgcagtgccctctgcctgggaccccgatgcccacatctctgtgtggctgcctcttcttcttcttctacactttgagcttaaatatcccttcttcttagcag

SEQ ID NO: 925970 - DNA, 604 bp, Homo sapiens
taagtcaagtgaattaatacatccatcatcttacatattttttgtgtgtggtgagaacatttaggatctactcttatagcaattttcaagtatgcaatacattattattaactataatcaccatactataccatagatctccaaaacttattcattctgttacactgtcactttgtaccctttggccaacatctccccattcctgctyccaccctgcctcagcccctggcaacaaccattctactctgtccctgtgaattcaacatttttagattccacatgcaatgagatcaggcagtatttgtctttctatgcccaacctctttcacttagcataatggcctccaggtttatccatgttgttgcaaatgataggatttccttctttttaaaggctgaatagtattccattattattatagtacattttaaaatccattcatccattgttgaactagattgattttatatcttggctattgtgaataatgctgcaatgaacatggaagtgcaggtatctcttgacataatggtatcatttccagaagtgggaatactggatcatatggtagttctatttttaaatttttgaggaacctccaca

SEQ ID NO: 925971 - DNA, 604 bp, Homo sapiens
taagtcaagtgaattaatacatccatcatcttacatattttttgtgtgtggtgagaacatttaggatctactcttatagcaattttcaagtatgcaatacattattattaactataatcaccatactataccatagatctccaaaacttattcattctgttacactgtcactttgtaccctttggccaacatctccccattcctgctcccaccctgcctcagcccctggcaacmaccattctactctgtccctgtgaattcaacatttttagattccacatgcaatgagatcaggcagtatttgtctttctatgcccaacctctttcacttagcataatggcctccaggtttatccatgttgttgcaaatgataggatttccttctttttaaaggctgaatagtattccattattattatagtacattttaaaatccattcatccattgttgaactagattgattttatatcttggctattgtgaataatgctgcaatgaacatggaagtgcaggtatctcttgacataatggtatcatttccagaagtgggaatactggatcatatggtagttctatttttaaatttttgaggaacctccaca

SEQ ID NO: 925972 - DNA, 604 bp, Homo sapiens
taagtcaagtgaattaatacatccatcatcttacatattttttgtgtgtggtgagaacatttaggatctactcttatagcaattttcaagtatgcaatacattattattaactataatcaccatactataccatagatctccaaaacttattcattctgttacactgtcactttgtaccctttggccaacatctccccattcctgctcccaccctgcctcagcccctggcaacaaccattctactctgtccctrtgaattcaacatttttagattccacatgcaatgagatcaggcagtatttgtctttctatgcccaacctctttcacttagcataatggcctccaggtttatccatgttgttgcaaatgataggatttccttctttttaaaggctgaatagtattccattattattatagtacattttaaaatccattcatccattgttgaactagattgattttatatcttggctattgtgaataatgctgcaatgaacatggaagtgcaggtatctcttgacataatggtatcatttccagaagtgggaatactggatcatatggtagttctatttttaaatttttgaggaacctccaca

SEQ ID NO: 925973 - DNA, 604 bp, Homo sapiens
taagtcaagtgaattaatacatccatcatcttacatattttttgtgtgtggtgagaacatttaggatctactcttatagcaattttcaagtatgcaatacattattattaactataatcaccatactataccatagatctccaaaacttattcattctgttacactgtcactttgtaccctttggccaacatctccccattcctgctcccaccctgcctcagcccctggcaacaaccattctactctgtccctgtgaattcaacatttttagattccacatgcaatgagatcaggcagtatttgtctttctatgcccaacctctttcacttagcataatggcctccaggtttatccatgttgttgcaaatgataggatttccttctttttaaaggctgaatagtattccattattattatagtacattttaaaatcyattcatccattgttgaactagattgattttatatcttggctattgtgaataatgctgcaatgaacatggaagtgcaggtatctcttgacataatggtatcatttccagaagtgggaatactggatcatatggtagttctatttttaaatttttgaggaacctccaca

SEQ ID NO: 925974 - DNA, 453 bp, Homo sapiens
aatataagtttccttggtgaccttgacaaaaacagatttggtgatgtggtgggcaaacacctgatagtaggagagggttgagacagcaagtatagacagctctttagggagtaattttgctgcaaagagaacagaaaaatgggatagtggctactaggggaaaagaaatcaatatatgggttaattaattaattaattaattwatttattttttagacagagtcttgctccgtcacccaggctggagtgcagtggtgagatcttggctcactgcaacctctgcctcctgggttcaaccaattctcctgccttagcctcccaggtagctaggattacaggtgtgtgctaccacgcctggctaatttttgtattttagtagagacggggttttaccttgttggccaatctggtctcaaacttcagacctcaggtcatcaggccgccttggcctcc

SEQ ID NO: 925975 - DNA, 638 bp, Homo sapiens
agctagtaatgtgctgagtctcatctaaagccactaagtctcagaggctttcccaaggcccttgatgtagtacctgggtatcactgctggctattcagggcccaagggctcttcggttagcaggtaatgaatactgccaggactgaaccctttccttcagggcagcggtttccttctggcccaaggttgcctagaaatgtcatctgggagctagggcccggaaggggggtacctcatgactcttatcagtgccctattatgctatggctgagctggtaccctcgatgcaagacaaaggcctccctacacttccgtctctcctcaagcagaaggaaggggtctcttttggagcctcaagatatgcagcctagggttaggggcagggtgatgcctgcactcccttggctgccccaaccrgtgtctcagtgtgttacatgccccctcagtctactgtctctgggcttagttcacactgagacacacataggagttgcagtccttgtgttctagactgcctttcaagtttactggagacacagagtgctgcagccctgggcggcaaggtttgcaggcactcaaccttggaccattgggatcagagattcccttctggccagggctcgtttaaatgctccctc

SEQ ID NO: 925976 - DNA, 289 bp, Homo sapiens
ggggggggttcttcgattttttttaattgacaaatgtacatattcatgaggtaagtagtgatgtttcaatataatgtaaagtgatcagatcaagataattagcatatttatcatctcaaacatttatttttttgtgtgtyggacatgttcgatatcatccatctacctatttgaaactatatattattaactgtagtcatcccactgtgatacagaatactagaacttactccccttatctagctgtaattttgtatcctttaacaaatctttcctctatacctccctt

SEQ ID NO: 925977 - DNA, 751 bp, Homo sapiens
gccagctgcatttttcagctccagaatctctgcttgattctttatatctccctctcttcattagatttgtctaatacaactctgaactccttctctgtgttatcttggattccactgagcttcttcaaaacagctattttgaattccctttctgaaagctcacatatctctctctctctccaggattggctacaggtgacttagtttggtgaggtcatgttttyctggaaggtcttgatgctttgggtgtttgtcagtgtctgggttttgaagagttaggtattcactgtagtcttttcagtctgggcttgtttctgcctatccttgggaaggctttccaggtatttgaagggacatgggtgtagtcatctaagtttttggtcactttacccgtttctactttaggggtgccccaagcccaataacactgtggctattgcaggcttgtacagataccaccgtggtggtcttgggtaacttccagaagaattccctggattaccaggcagagactcttgttctcatcccttacttccctccaaacagatgaaatctgtctctgtctctctgtctctctcccctctcctctctctttctttctctctctctctctctctctccagagctgcctgaagctgtgggaggggtgacacaagcactcctgtggccaccgccactgggactatattgggtcagaaatgaagccagcctaacactgggtctcacccaaggcctacaacaattactgcct

SEQ ID NO: 925978 - DNA, 613 bp, Homo sapiens
gagtagaatgtgggggttcatttatttgcagggaataattttggaaatagtctagtccattcatctcagctttactaaaggcatggaaacagagaccaagagatgccatttttttttcttagaagtctcttttatcctattattctacagaataaaaagtcttattccactatggtacccagagttcttcatagtctgatctcaatttgtcttttcagcttcctgtcctgttaataactcttatccatccaacccaacatggtctaagcttcaagccatattgaactcaccttcatggtgactcttgataactagacacagcttgctaattgggaaccaatcctcgtgaccacgttatagaagaattttagagaaactggttgggggatttgacatttacactcctyccagccccccacaaacacacatgacatagttggcttctttatttccacctttcagggctctcatcctcattcctgcttgggaggcaagcttatctgagtcttctacatcatgttaatccaaacacagattcctccatcctcagtttttagttaagacttgacttaccagcagccttacacctccattgcttctgtccatactggtc

SEQ ID NO: 925979 - DNA, 659 bp, Homo sapiens
atcaaaaaggggtattggccaacaaagatgaaactgcagtaaagaaatggaaaatgataaaactgaaagtacaatttgaattgaatataaatggaattatagaagagcgagctgcctgtgggatgctgaccctgctgagacactgtagatatgcagccaggaagggaatgaaggaacttatcagtgtaagttagggaagaaggtgtaacaaaaatgtcccagaatttaaaccagcaaaagcctcacattaaaggaattctagggaatatttcatgacattgaaagcacaaaagataaaatgttagatgctggttccaacttagaaaagagtatgacagctccccaaggcatagaaaagatgctagctccttacatgtatataacaagaaggcagtaagcactgttcaaactactcttgatatgtttttcacaaataaaataattatcaatgtatcaaatgttttaaattacagtgtattaagtacatgtgagttttactacytttttcatgttatatgtataactgagtatgagtttttaatgttttgacaaaattattcttagagacagggttttgctgtgtcacccaggctggagtgcagtggcatgatcatggcttactacagccttcacctcctgcaatcctcccatctcacctt

SEQ ID NO: 925980 - DNA, 581 bp, Homo sapiens
gtgtgcaccccatgcccagctaattcttaatttttttgtagagatgggggtctcactatgttgccagactggtcttgaactcctggcctcaaatgatcttcccaccttagcctcccaaaatgttgggattacaggcatgagccaccatgcccagcctgacaaaaatttttaaagaccatggaacaattgtaaaatttaccaatgattattcagatcactttgtatggtttcagttkgcgtgctcacttttacagttccatactactgtgcaaagaaaagatgacctgtaatatataataggttcattttacgactcctgttggctcaggacgtatgaaattattgagtataagggaaaaatccagtggttatagaattattgctatcattattactatttcaatgttttgaccaaatttataaacataatcctttaaatatttaaaacaccttattaactagactaataagtattacattttaggacacagaggagctgatccaaatactctgtttccccaccagataaacccaaaagatgtgagatataatactttgttgtgtgttcagacttcagctca

SEQ ID NO: 925981 - DNA, 581 bp, Homo sapiens
gtgtgcaccccatgcccagctaattcttaatttttttgtagagatgggggtctcactatgttgccagactggtcttgaactcctggcctcaaatgatcttcccaccttagcctcccaaaatgttgggattacaggcatgagccaccatgcccagcctgacaaaaatttttaaagaccatggaacaattgtaaaatttaccaatgattattcagatcactttgtatggtttcagttggcgtgctcacttttacagttccatactactgtgcaaagaaaagatgacctgtaatatataataggttcattttacgactcctgttggctcaggacgtatgaaattattgagtataagggaaaaatccagtggttatagaattmttgctatcattattactatttcaatgttttgaccaaatttataaacataatcctttaaatatttaaaacaccttattaactagactaataagtattacattttaggacacagaggagctgatccaaatactctgtttccccaccagataaacccaaaagatgtgagatataatactttgttgtgtgttcagacttcagctca

SEQ ID NO: 925982 - DNA, 751 bp, Homo sapiens
gccttcagtggaagcggacttgccgtgtgcaaaaaattccacagctagagcagagtgaatgaggaggggagtgtttggagatgagctcagagaaacagtaagacaccaagtcacgtaaggcctgatccaaatacaaaaaaaaccatttaagaattgatctgaaaaggaacatgatctggctcatattgtaaaaggctcactctggctttggcatgcgtaatggactgcaaagggaaagaaagagatgcgatcaattaggaagttttacaacaatccagacaagaagtgatggtgatttggccaggatgttaatggtcaatgtggggaaacagattcatatatcagataggattcaaagtaagaattgaaataaatttgtaatggattagatgtggaatgtgaaagaaaagagggttcaaggataactcaaagatttttcagcaactggaaaaaaaagatgctttttgtgcagatgggatagacttacggaaaaggagaggttttttccccccgagaaggtggaaacagagaggaaaggaattaagagttgtgttttgaatatttagaatttgaggtgtcttttaaatattcagatggaaatrttgaataggcaattggatgtttaaggttgaaatttaggggagaattgccaaaaaaatttttttttaatgtgtgaattaacagattagtgatgatgtttaaattcttgcatttggagatcatctgggaataaagaagagatagaaaagag

SEQ ID NO: 925983 - DNA, 614 bp, Homo sapiens
ggctagagtgcagtggcgcaatctaggctcactgcaatctccgcctcccaggttcaagcaattctcctgcctcagcctcccaagtaactgggattacaggcacctgccaccacacctggctaagttttgtattttcagtagagatggggtttcaccacgttggctaggctggtctcaaactcctgacctcaggtgatccacctgccttggtcttccaaagtgctgggattacaagtgtgagcaaccatgccyggcacaggcacattacatttattgtgcactttatttctattattattacattgtaatatataataattatacacctcaccataatgtagaatcagtgggaaccctgagcttgtttttctgcaactagaggtcccatctgggaatgatgggagacagtgacagatgcacacactgcagggggattgcattagatcatcagacatcagattctcataaggagcgtgcagcctagacccttcacatgttcagttcacattaagattggtgctcctatgagaatctaataccaccattgatctgacagcaggcaaagctcaggcagtaatgcaagtgatggggaatagctgtaaattcagatcaag

SEQ ID NO: 925984 - DNA, 614 bp, Homo sapiens
ggctagagtgcagtggcgcaatctaggctcactgcaatctccgcctcccaggttcaagcaattctcctgcctcagcctcccaagtaactgggattacaggcacctgccaccacacctggctaagttttgtattttcagtagagatggggtttcaccacgttggctaggctggtctcaaactcctgacctcaggtgatccacctgccttggtcttccaaagtgctgggattacaagtgtgagcaaccatgcccggcacaggcacattacatttattgtgcactttatttctattattattacattgtaatatataataattatacacctcaccataatgtagaatcagtgggaaccctgagcttgtttttctgcaactagaggtcccatctgggaatgatgggagacagtgacagatgcacacactgcagggggattgcattagatcatcagacatcagattctcatraggagcgtgcagcctagacccttcacatgttcagttcacattaagattggtgctcctatgagaatctaataccaccattgatctgacagcaggcaaagctcaggcagtaatgcaagtgatggggaatagctgtaaattcagatcaag

SEQ ID NO: 925985 - DNA, 574 bp, Homo sapiens
aaaaggccttcacatatttttttttttctcctaggaccttgtctctctctttttcttttttagttaaagatttttttttctcagttgactgagttctgttttttgttttgttttgttttgttttatttacttctgctgcctctcctttctcttgcaccctctgctgcttgagggacctaaactattatagtttataatagcctggctttccttcaagaaagcagagaaggcaccagactcctttttggggagaaacctgtttttccttatgaaaccccaagagtgtaagcagataagttcatctcagctcttaaattgcctgcttttgtattgtgttacctgacttattgactaaaagrgttgttgcaccaaagcctactctggtttttaaggaagagtgtagtttacacattagaagtgtcttcgtttaaaaaaaaattttaagtgcactgaaaaagcatcacatggtctagcctcataataattctcccttttgggagattcaggattcagtgtgggctctgcccagagctcagagatctagtcaaaagacaggtatttcctacataaataa

SEQ ID NO: 925986 - DNA, 601 bp, Homo sapiens
accttacatggtaaaagacactttgcagatgtgattaaggttaggagctagagatgaggaaattactttagattaggcaggtgggctcagtttaatcacatgaatccttaaaagtgaaagaagaaaacagtagagtggtcagagagttgagactgtagtagaggcagtagagattcaaagtgggataaagacttgacccaacatttgctggtttggaaaatggagaaaggggaatatgagtcagggaatgcttgkagcctctaaaagctggaaatggctgtaagctaacagccaccaagaaaatgaagacttcactgctgcaacatcaggaaacttaattctccctacaacctgaaaaacaaagaaacagatctccagaaaagaatcctgaacctctgacacattgattttaatccagtgagacactgtgttaattttatactgttgctataaccaattaccacaaacttagtggctaaaaagagcaaaaatttattatccttcaattctgtatgtcagaagctcagcactggtctcatcagactcaaagcaaggtgttgataggctgtgtccctttttggaggttataaaggataattaa

SEQ ID NO: 925987 - DNA, 617 bp, Homo sapiens
tcaaagtcattctccgtccagcttggttccattgctggtgaggagctgcgttcctttggaggagaagaggcactctgatttttagagtttccagtttttctgctctgttttttccccatctttgtggttttatctacttttgctctttgatgatgataacgtgcagatggggttttggtgtggatgtcctttctgtttgttagttttccttctgacagtcaggaccctcagctgcaggtctgttggagtttgctggaggtccactccagaccctgtttgcctgggtatcagcagcggaggctgcagaacagtggatgttggtgaacagcaaatgttgctgcctgttcattcctctggaaattttgtctcagaggagcacccagccagtacccggtactggrgggtacctcccagttaggctactcgggggtcagggacccacttgaggaggcagtctgtctgttctcagatctccagctgcatgctgggagaaccactactctcttcaaagctgtcagacagggacatttaagtctgcaaaggattctgctgccttttgtttggcaatgccctgccccagaggtggagcctacagaggcaggcaggcctccttgagc

SEQ ID NO: 925988 - DNA, 540 bp, Homo sapiens
accagaagtaaaaagaggagctggtaccattccttctgaaagtattccaaacaattgaaaaggagagactcctccctaacaaattctatgaagccagtatcatcctgataccaaagcctggaagtgacacaactaaaaaagaaaacttcggrccaatatccctgatgaacattgatgcaaaaatcttcaataaaacactggcaaactgaatccagcagcacctcaaaaaacttatccaccatgaacaagtgggcttctttccttgatgcaaagctggttcaatgtacacaaatcaataaacataatccatcacataaacagaaccaaagacaaaaaccacatgattatctcaatagatgcataaaaggtctttgataaaattcaacattgtttcatgttaaaaacgctcagtaaactagatattgatggaacttatctcaaaataataagagccatttatgacaaacccatagccaatatattgaatgggcaaaagctggaagcattccctttgaaaactggtgcaagacaaggaagccc

SEQ ID NO: 925989 - DNA, 590 bp, Homo sapiens
ctaccagaagtaaaaagaggagctggtaccattccttctgaaagtattccaaacaattgaaaaggagagactcctccctaacaaattctatgaagccagtatcatcctgataccaaagcctggaagtgacacaactaaaaaagaaaacttcggaccaatatccctgatgaacattgatgcaaaaatcttcaataaaacactggcaaactgaatccagcagcacctcaaaaaacttatccaccatgaacaagtgggcttctttccttgatgcaaagctggttcaatgtacacaaatcaataaacataatccatcacataaacagaaccaaagasaaaaaccacatgattatctcaatagatgcataaaaggtctttgataaaattcaacattgtttcatgttaaaaacgctcagtaaactagatattgatggaacttatctcaaaataataagagccatttatgacaaacccatagccaatatattgaatgggcaaaagctggaagcattccctttgaaaactggtgcaagacaaggaagcccactctcacctctcctattcaacatagtattggaagatctggccaggga

SEQ ID NO: 925990 - DNA, 473 bp, Homo sapiens
catttgtctttccaacagcccttcaaggcatcttcctggataatttatcccatttgcagaagagggcacctgggacacagagaaagtaaatgactggccaaggtcactgtattagtcggttttcatgcagctgataaagacatacctgagactgggtaatttataatgaaaaagaggtttaacgaactcacagttccatgtggctagggaggcctcataatcatggcagaaagcaaaaggcacttcttacatggcggcagcaagacagaaaacttgtgcagggaaactytcctttatgaaaccatcagatcttttgaaacttattcactgtcacgagaacagcacaggaaagacctgcctccatgattcaattacctcccaccaggtccctcccaagacgtgggaattgtgtgaactatgattcaagataagatttgggtgaggacacagccaaaccatagcagttaccaagt

SEQ ID NO: 925991 - DNA, 597 bp, Homo sapiens
ctgctccacaaaagtgtggtcagactgcctccctaagcatgtccctgatctattccttcttgctgggtaggacttcccaactagggcctccagccgctctcactgatgttttctggctgtcagaggtttgaaaacttcctgggacaaagctcctagacagaggggtgggctgccatctttgctgttttggcaacttagccattccagcctccaggttttggagagcccaagctgactaagggcagaattagtaccccagcacagcacaactgctctatgaaagcatggctagactgcttctttaagcaggtccctgatcctgttcctcctgactgggtgaggcttcccaacctgggtctccagccacctcctacaggtgcatttgggctggcaaygggtctatacccctctgggatggagtccccagaggaaagagcaggctgccatctttgcttttttgcagccttcactgctgatactgccacatactgaaaaatccataggcaactaggggctggagtggaaactcagcaaaacccacagcagccctatagaaaagtggccagactgaaaaaacaaacaaacaaacaaacaaac

SEQ ID NO: 925992 - DNA, 625 bp, Homo sapiens
atgtctaaactctaacaacgggagagacaggttttagggaggaaaacaaattttttttgaagatatgtcaagaaactaagaagccaaaatgttgaaagcaacctctatgtggaggtattaaagccaccaggaatagtgacagaaataatgtaagaaaatgagtgagccagagccaaaaatcttccaaagatgcggagacatgatgctagccagttgatgactgcaaatgcatraggagagaaaggtaagattggttagtatagtctgatgacataaaactcaactatgggtatttgtaggtaggaaggagagagaatgtccacaagcagcaacaagggaaatggaagatcctatccatcaccaggttcggggtaaaagtggtaagagaaaaaaaagttcatcatttgagaaggctgcagagaaaacattgtcctcagggacagccaagtgtctgttgaaaaggacagtaagggaaatggaatgttcaaaaccaatactgaggacataagaaattttgttgataactgtgactgcagaagggcacaggaaaaaggcttcaagagttaaaaagagatggatatgggacctcttgattcaagagaaggcttggatacttgaaaataac

SEQ ID NO: 925993 - DNA, 635 bp, Homo sapiens
attgacagggtaaacattttatttactctctcaatacccatttcagaacttaagttaaaaaatctcaatatggtttatttaatataaaaccaagttaattcttgaattttaaaatgttataaaaacactaacagatatgtatgtgaatatttatgctgctcaatatatggaaacaagtatttggaagttaagcaatcttgttgaaataaggacccatgattattttccttttatgactcattataaccagagtgttgtaagttgtagtaaactagtttacattttagtttatatttgttctaatatgtcattctcattttggtgttagttttcatttcaactgttattctagttatgaaatcattttagttttatttctagctagatgaagtaattgtgcattcctatatgaattcttattgttgaatctaaacacaaaagatgattataatacgaayaaccaacaaattgcaacaagtaataacttgaggacaaattgtaagaagtaataacttgaggacaaattgtaacaagtaataacttgcagcaatgggaaatgaaaatattggatttatattaggtttcatttgttgtcattattgcaaattaaaattgatattttggtttaatttgtt

SEQ ID NO: 925994 - DNA, 555 bp, Homo sapiens
actttatttgaatttattagatctgaaagctcatgctgcttccataggctgtttcttttttccttctccctccttggaactggcatattgtgcgacacaaatattagcactcaagaggtccttaaagttaaacaaaaaaaaagcaaaactcaatttacaaacggagaactgagtgtatagcaaagcaaatgacgtaccagggtcacagaggtttccgttgtcagcctagacataacacacaggaatctcttctctctgttatttgtcttttcttttggatggtgctttatgattatgattatacgggaataacaaaatgcatttggaatgaaattcgaaagggtatggtggtggaagcaratatatctctgctcaaaagcaagacctactgtccaaatgtaaacaatgttaggatctgatgttaatatagatccctttaacgaaaagataaatgagtgtaattttgcaatacattccagaaggggtatccctgggttttttgtttgtttgtttttttgttttgttttgtcagctcaaatcaattttctttgatgt

SEQ ID NO: 925995 - DNA, 578 bp, Homo sapiens
atttttgtagatgctatctatcaaaatgtggtaattctcctctatactaactggaaatttttattatgaatgagcattggattttttcaaatgcttttacaatttttgttttttgttttttttttttaagacggagtctcactctgtcacccaggctggagtgcwgtggcacaatcactgctcactttagcctcactcttctgggctcaagcaatcctcctacctcagacccttgagtacttggggctacaggcacgtgcctcgatgcccagctaattttttaatcatttgtagcaatggggtcacactatgttgcccaggttgatcttgcactcctgggctcaagggatcttcccacctcggcctcccaaattgctagggatactgcaccaggctttcaaatacattttctgcttcaattgatatgaccatataatttttcttgaatgttatcaaccttgttgatatggttgattatactgattgatttgggaatgaggaaccagccttgcatacccagaataagtcccacatggtcatggtgcacaattcttttaaatcatttttagatttgattt

SEQ ID NO: 925996 - DNA, 593 bp, Homo sapiens
atgtgtgtggctattgtaaatgggattatgttcttaatttggttctcagcttgaatgtcctggagtgcataaaagctacagatttttgtacattgattttgttccctgaaactttactgaagttttctatcaggtctgggattcttttgtaggaatcctgagggttttctaggtgtagaatcatattgtcaattaacaggaataatttgacttcctcttttactatttgggtgccttttctttctttcttttgcctgattgctctggctaggacttttagtactgtgttgaataggagtggtaagagtggatatccttatcttgttccagctcttgagggaaatgttttcaactttggtccattcagtatgatgttcaytgtgggtctgctgaagatggctgttgttattttgaggtatgttcctttgatgcctactttcttgaggatttttgtcatgaaaagatgttggattttatcgaatgccttttcgtatctattgagataatcatatggttattgtttttaattctgtttgtgtggtgaaccacatttattgatttacatattgtattagtctgttcttgcactgcta

SEQ ID NO: 925997 - DNA, 741 bp, Homo sapiens
ggtgctgcctgcatatcgtgcagaacaatctgtaaaccaggccctagtcttctcttcctctatcaaccaatcatagggaactctccatgaggctatcattagtgcaggctggggttgagaagacagggtgacaggagtggagaccatgggcatttgagccacttcctcacgtaacttacttgtgccttcaggacctgcctgagcccgatcacatatacagcacttccatctgatgatacaatgctgctgctgtgccatgacccactttatggctggatgggtcagaaagcacccagttcatgataggcagttcaagtcacatggtgacttgatgacccttggtcaaatgttcaatttccagcaaagccccataacagaccaagaaccgtctctcgaaaggagagtagttatctgcagaagatggcagggccttgctcgaaaatcctagaggcctccactgtgattcacctattgggcctgccaaaggctccaaacagcatcccyatctgccactgacacctcaagcaccattggatctgctgcgtcatatggcccaaatggcagagcagcttacacagcagcctggacctgttgcagagcctctcctgttctggacttcacttaaaactggcagcctttcaggtcacttggtaaatgggctggagtaacaaacccaagtgaggaatgtgttgcctccaaaatccaaataggcccactaggcattgtgcctctttcttggtt

SEQ ID NO: 925998 - DNA, 584 bp, Homo sapiens
tctaaccacaatatgcaatccttcccattcttctctccccattccaaaggcagaggagcctcaccttatagccactgccaccactggatacaaagaatactgccagactaccactgatgttcccttaatgcccaaggtctcttaagtcagtttgtgatgaatactgcctgtcctggtactcacacttcagggcaatgggcccccctctggcccacagcaggttcagaaattccattcgagagtcaagccctggcatcagggacctcaagagcccacttggtgctctaccctactgtggccatgttgggacccaaagccagcaagtctcagagggtcaccaaggccctgtatatagtagctgggtatcactgctagttaytcagggcccaaggactcttcatttagcgggtgatgaatactggaagaaccgaagcttctccttcaaggcagtagctttccttctgatccagggtgtatctagaaatgttgtctgggatctagggcctgcacatggcctcatgattctgaccagtgccctatcctgctgtggctgagctggtatccaagatgcagacaaagtcctc

SEQ ID NO: 925999 - DNA, 585 bp, Homo sapiens
acccctcccattcattcgaattctacccatgcccaaaactcacatgtgcacacacaaacacacacacatacacaaacacacacacatacacacacacacacacacacacacaccgtttttccaggaagcccacattcatttatccttcctctaaatgttagttacatggtattatccaaggaggatatatttacatttttatcatttcacttgtcttttcctattctgatctgtaagtccaggtcaaagccatttaaggataaggaacatttttcaagcctctrtgatacttctcacaagacttagctgggtacagagggagccctgcacatgttctatgctttattgatttatttttatgatatgtaaaatactgatataatctgaattattgtctcagtttgaactcaccaaatggctaacacttccagattctaggacacatataaactacaagtatttctgtgtgtaactgtgtatctgcttcatctgataaccactttagaaaacattttgacagtttcccagtgtgaagaaaaaggatttttgtttaattaatgaggcatttctcaggtccagatttta

SEQ ID NO: 926000 - DNA, 585 bp, Homo sapiens
acccctcccattcattcgaattctacccatgcccaaaactcacatgtgcacacacaaacacacacacatacacaaacacacacacatacacacacacacacacacacacacaccgtttttccaggaagcccacattcatttatccttcctctaaatgttagttacatggtattatccaaggaggatatatttacatttttatcatttcacttgtcttttcctattctgatctgtaagtccaggtcaaagccatttaaggataaggaacatttttcaagcctctatgatacttctcacaagacttagctgggtacagagggagccctgcacatgttctatgctttattgatttatttttatratatgtaaaatactgatataatctgaattattgtctcagtttgaactcaccaaatggctaacacttccagattctaggacacatataaactacaagtatttctgtgtgtaactgtgtatctgcttcatctgataaccactttagaaaacattttgacagtttcccagtgtgaagaaaaaggatttttgtttaattaatgaggcatttctcaggtccagatttta

SEQ ID NO: 926001 - DNA, 612 bp, Homo sapiens
aactcactatagtgacaacagtaccaaggagaacagtgctaaaccattaatgagaaacttcctccatgatccagtcacctcctaccaggccccaccttcaatactggggattatatttcaacatgatatttgagcaggaatacaaatccacaatacatcaccattcatctttctaatcacatgaatgatgctcacaccaataacaactttatgaatagtcactgcagatgcagatgcattgtagttttcacaaaatgttcttctctgaccacttgttcctctggtcaactttactttcaggtacttagaaatgaaatgggctttggtgttgcctaaagagtatgtttaatgaagaagaaattcatataatttataatttaggatgcygggtttattggcactaaaattttcaaattctaggaaggctcgattaagttaacaacaagccttgatctcagaaacagaagctatgcatccactgaacactcttttctattcagaatagagggtggagacagtgttggctcctgatgacatctaagactttagaccttttcaatggcatctttctaagagttcttgtaggcagggcagcctaagtgaaatctggta

SEQ ID NO: 926002 - DNA, 647 bp, Homo sapiens
acaaggtccgaaaaatccctcaaactacaatcttaggttttactgtattaataggttatctataggagccgctggggaggttaatagtcttgtggcctctggctttatgactcctgagtaatactttctaatcttgtggttattttcgtgtgtttgcaggagtggtctagtccccaaacaatgaggggatttgtttcagggaggttctcttgtcatcttygtttcaaagttaagctagcaactaaattcctcccaaagttagtttggccttttcccaggaatgaacaaaggcagcttagaggttaaaaggcaagatggcgtcaacttaggtcatctctctttcactgtcataattttctgttaccatttttgcaaaggcaatttcaggataagcataatgtacacattccctttctaaaagagagaaatggacaaaaagtaacagtcttcaagcaaatttgaaatcgagcagggcaaccattacatcttaaagctggggaatatttttttgactctttctctgactcctgaacacactggggtaaaggttggactcacaggccctcgggtactatcactcctatggctttgcttggtacattctccgtgggtgcttgtacaggttgcagtcaggtacatgaagtttt

SEQ ID NO: 926003 - DNA, 573 bp, Homo sapiens
  misc_feature 1, 2, 3, 4, 5, 6, 7, 8, 9, 10, 11, 12, 13, 14, 15, 16, 17,18, 19, 20, 21, 22, 23, 24, 25, 26, 27, 28, 29: n = A,T,C or G
nnnnnnnnnnnnnnnnnnnnnnnnnnnnnagtaataaacggttcctgtgctttcatgtgttctgttatttcctgtgtgtctcacttaacctaacaaccaaacctaaacctaacttctttttcactcagcgttctcttagagaatgcctatcatagctgggcatggtggctyatgcctgtaatcctagcactttgggaggccgaggcgggcagataacttgaggtcaggagttcgagaccggcacggccaacatgatgaaaccccatctctactaaaaaaacacaaaaatcagcagggcatggtggtgcacacctatagtcccagctacttgggaggctgaggcaggagaatcgcttgaacctgggaggtggagattgcagtgagtcgaaatcatgccactgcattccagcctaagcttcacagtgagattccgtctcaaaaaaataaaataaataaataaataaaagagaatgcctatcatggtagcaatagacgagatgtgggtcagacaaaaaccactagggcatctgcgagcataaacaagtttcctgtgaggggccgggcatggtggct

SEQ ID NO: 926004 - DNA, 573 bp, Homo sapiens
  misc_feature 1, 2, 3, 4, 5, 6, 7, 8, 9, 10, 11, 12, 13, 14, 15, 16, 17,18, 19, 20, 21, 22, 23, 24, 25, 26, 27, 28, 29: n = A,T,C or G
nnnnnnnnnnnnnnnnnnnnnnnnnnnnnagtaataaacggttcctgtgctttcatgtgttctgttatttcctgtgtgtctcacttaacctaacaaccaaacctaaacctaacttctttttcactcagcgttctcttagagaatgcctatcatagctgggcatggtggctcatgcctgtaatcctagcactttgggaggccgaggcgggcagataacttgaggtcaggagttcgagaccggcacggccaacatgatgaaaccccatctctactaaaaaaacacaaaaatcagcagggcatggtggtgcacacctatagtcccagctacttgggaggctgaggcaggagaatcgcttgaacctgggaggtggagrttgcagtgagtcgaaatcatgccactgcattccagcctaagcttcacagtgagattccgtctcaaaaaaataaaataaataaataaataaaagagaatgcctatcatggtagcaatagacgagatgtgggtcagacaaaaaccactagggcatctgcgagcataaacaagtttcctgtgaggggccgggcatggtggct

SEQ ID NO: 926005 - DNA, 573 bp, Homo sapiens
  misc_feature 1, 2, 3, 4, 5, 6, 7, 8, 9, 10, 11, 12, 13, 14, 15, 16, 17,18, 19, 20, 21, 22, 23, 24, 25, 26, 27, 28, 29: n = A,T,C or G
nnnnnnnnnnnnnnnnnnnnnnnnnnnnnagtaataaacggttcctgtgctttcatgtgttctgttatttcctgtgtgtctcacttaacctaacaaccaaacctaaacctaacttctttttcactcagcgttctcttagagaatgcctatcatagctgggcatggtggctcatgcctgtaatcctagcactttgggaggccgaggcgggcagataacttgaggtcaggagttcgagaccggcacggccaacatgatgaaaccccatctctactaaaaaaacacaaaaatcagcagggcatggtggtgcacacctatagtcccagctacttgggaggctgaggcaggagaatcgcttgaacctgggaggtggagattgcagtgagtcgaaatcatgccactgcattccagcctaagcttcacagtgagaytccgtctcaaaaaaataaaataaataaataaataaaagagaatgcctatcatggtagcaatagacgagatgtgggtcagacaaaaaccactagggcatctgcgagcataaacaagtttcctgtgaggggccgggcatggtggct

SEQ ID NO: 926006 - DNA, 579 bp, Homo sapiens
aggcatgtcaatagtctaagcactcttggtatgttgtaattgagaggtgaagccggctgggcttgagtcaggtggggacttggggaacttttctgtctagctaaaggattgtaaacacaccaatcagcactctctgtctagctaaagatttttaaacgcaccaatcagcacactgtaaaaacagaccaatcagcactctgtaaaatggaccaatcagcagggtgtgggcggggccaaataagggcataaaagctggccaccsgagccagaagcggcaactgctggagtccctttccaggtgtgaagctttgttctttcgctcttgctgctgctccctgtttaagtccagactacctttgtgagcttgtaacacagtgagggtctgtggctttattcgtgaagtcagctagaccacgaacccaccaagaaacaattctggacgtgccacctttaagagctgtaatacttgctgcaaaggtttgtggcttcactcttgaaatcagcaagaccacaaacccacggaatggagaaactccagacacaccatctttaagagctgtaacactcaggataagggtc

SEQ ID NO: 926007 - DNA, 579 bp, Homo sapiens
aggcatgtcaatagtctaagcactcttggtatgttgtaattgagaggtgaagccggctgggcttgagtcaggtggggacttggggaacttttctgtctagctaaaggattgtaaacacaccaatcagcactctctgtctagctaaagatttttaaacgcaccaatcagcacactgtaaaaacagaccaatcagcactctgtaaaatggaccaatcagcagggtgtgggcggggccaaataagggcataaaagctggccacccgagccagaagyggcaactgctggagtccctttccaggtgtgaagctttgttctttcgctcttgctgctgctccctgtttaagtccagactacctttgtgagcttgtaacacagtgagggtctgtggctttattcgtgaagtcagctagaccacgaacccaccaagaaacaattctggacgtgccacctttaagagctgtaatacttgctgcaaaggtttgtggcttcactcttgaaatcagcaagaccacaaacccacggaatggagaaactccagacacaccatctttaagagctgtaacactcaggataagggtc

SEQ ID NO: 926008 - DNA, 563 bp, Homo sapiens
gtcaattttcatgatatttattcttcctattcctgaggatggaatattcttccacttgtttatgtcctctcttatttccttgagcagttgtttgtagttctccttgaagaggtccttcacatcccttgtaagttgtatccctaggtattttattctctttgtagcaattatgaatgggagttcactacacagggaggggaacatcacacaccagggcstgtcagggggttgggggctaggggagggatagcattaggagaaatacctaatgtagatgacaggttgatgggtgcagtaaaccatcatggcacacgtatacctatgtaacaaacctgcatgttctgcacatgtatgatttgataaatatttggtttcagctccaatatgtaaagatcttagaagttattactcttatccttacaataagaaaaagctgaacaagctaaaaataaacaaattttcttagatctctcagaaaactgaggccacagggcaaactaccaccccaaaatccagcagatgagtgaatcttgagagtcactgctgaaatatgtttatctgaa

SEQ ID NO: 926009 - DNA, 563 bp, Homo sapiens
gtcaattttcatgatatttattcttcctattcctgaggatggaatattcttccacttgtttatgtcctctcttatttccttgagcagttgtttgtagttctccttgaagaggtccttcacatcccttgtaagttgtatccctaggtattttattctctttgtagcaattatgaatgggagttcactacacagggaggggaacatcacacaccagggcgtgtcagggggttkggggctaggggagggatagcattaggagaaatacctaatgtagatgacaggttgatgggtgcagtaaaccatcatggcacacgtatacctatgtaacaaacctgcatgttctgcacatgtatgatttgataaatatttggtttcagctccaatatgtaaagatcttagaagttattactcttatccttacaataagaaaaagctgaacaagctaaaaataaacaaattttcttagatctctcagaaaactgaggccacagggcaaactaccaccccaaaatccagcagatgagtgaatcttgagagtcactgctgaaatatgtttatctgaa

SEQ ID NO: 926010 - DNA, 563 bp, Homo sapiens
gtcaattttcatgatatttattcttcctattcctgaggatggaatattcttccacttgtttatgtcctctcttatttccttgagcagttgtttgtagttctccttgaagaggtccttcacatcccttgtaagttgtatccctaggtattttattctctttgtagcaattatgaatgggagttcactacacagggaggggaacatcacacaccagggcgtgtcagggggttgggggctaggggagggatagcattaggagaaatacctaatgtagatgacaggttgatgggtgcagtaaaccatcatggcacacgtatacctatgtaacaaacctgcatgttctgcacatgtatgatttgataaatatttggtttcagctccaatatgtaaagatcttagaagttattactcttawccttacaataagaaaaagctgaacaagctaaaaataaacaaattttcttagatctctcagaaaactgaggccacagggcaaactaccaccccaaaatccagcagatgagtgaatcttgagagtcactgctgaaatatgtttatctgaa

SEQ ID NO: 926011 - DNA, 629 bp, Homo sapiens
attttttactaatgtagaagtgcatattagtcattttttgtacttctattccacaatatttatttctttttgtgctttttatctttttgttgttttcattttttattttattttattttattgatttccattgtattcattgagcatcattgaggtggtaattttgactttttaggttaatttatttttttcttttaagaaatagatctagacattaattcaaattgtctcaggtaatttttacatctctcttttttataattgatttctggatattcatttttatctttgagccatattatcttgatattttgtatatgttgtaatcttaggttgcagtttgtgtaatataaagccacatgtcaaaatccttattaagttggcttttgtctggggaaatatgataccarttttttaggcgagagattcttggagtctttcaagcctgttgtatggatgttttctctgggcttgtgtgtcttttagttaaaaaattttccccatgttttttcttttcttttttgatttggagtttcactcttgttgcccaggctggagtgcaatgatgtgatcttggatcactgcaacctccaactcccaggttcaagcagttctcctgcctcagactc

SEQ ID NO: 926012 - DNA, 579 bp, Homo sapiens
tgctatgttggtcaggctggtctcactctagtgatacacctgtcttggcctcccaaattgctggaattacaggcatgagccactgcacccagccccaaatggcttttttttttttttttggatagaagtttatgaaaaaatttggttttacaatttatatttatgctgggtacagtggctcacacctataatcctaggacattgggagtctgaggtgggyggatggcttgagcccaggagtctgagaccagcctgggcaacatcgtaaatccctgcctctacaaaaaatacaaaaattagctgagcacgtatctgtagtcccagctactcaggagactgagatgggaggatcacgtgagcctgggaagtccagactgcaataagcagtgattgtgtcactgcgctccggcctgggtgacacagcaagaccctgtctcaaaaattgtatttaacagcataggacctacaatagctaaaacaacttaaaaataacaaatttggagaggtcacactacctgcaaggctcacttcaaagctacaggaggagattgatttgagtaataataaaactccgatctc

SEQ ID NO: 926013 - DNA, 579 bp, Homo sapiens
tgctatgttggtcaggctggtctcactctagtgatacacctgtcttggcctcccaaattgctggaattacaggcatgagccactgcacccagccccaaatggcttttttttttttttttggatagaagtttatgaaaaaatttggttttacaatttatatttatgctgggtacagtggctcacacctataatcctaggacattgggagtctgaggtgggtggatggcttgagcccagragtctgagaccagcctgggcaacatcgtaaatccctgcctctacaaaaaatacaaaaattagctgagcacgtatctgtagtcccagctactcaggagactgagatgggaggatcacgtgagcctgggaagtccagactgcaataagcagtgattgtgtcactgcgctccggcctgggtgacacagcaagaccctgtctcaaaaattgtatttaacagcataggacctacaatagctaaaacaacttaaaaataacaaatttggagaggtcacactacctgcaaggctcacttcaaagctacaggaggagattgatttgagtaataataaaactccgatctc

SEQ ID NO: 926014 - DNA, 725 bp, Homo sapiens
agggccttctcccgctcctgcagctccctgaggacccagcaagagcctgttaggacaggaagtggagccccagcccaagccctgttcccatccctgctggggaaaccaggcccagccagtaggacacaccttagaaagtgggattgctgaatgggcaaccagcttagagccaagagctgcgcttttgccccggggctagaagtgtgcacacctgagggtgcagggaacacaagctggagcccaacatttggcccccacttttccttgtaacttaggtctctgagcctcataacacttttatacaatggagaccataacacatttcctccagggtcaacatgagaatcaaatgggataatccacaatacccctttttatcctaaccttcggggcagacactggctccaagcatgaacaagaggctgtggatgagttctggagtcacctccacaacacactggctcatgactttgaacatgtcatttaacctctctggacctgtttccccctgtgtgaagtggagctgatggctcccatgccaccatgggcttcaactgaggactaaacaaggaaacaggtgtaaagyatgcagctcgggtacccaccaaagctgccgacactatgactatcacactgccaccctcaaagccccctgctctgcccagcaccctgcacattagctacaccctacgccttcttgccttcccagactctgcccagaggac

SEQ ID NO: 926015 - DNA, 551 bp, Homo sapiens
agttcagacataaattatgatatgtatgtgtatatggttaactttacaaggactagcacatgtaaagaaaggcttaaaacaattttctgtcaaccaaaacattagcaacaaaataaggaaaaggagactcagtatttccaagagatacgttttagaagtatggaattctagggacagattcatttacttgagtgagttaaaatgagaatggaaactattaaacattgagaaaagacctaaggaaataagatacagtgttaggggctaggtaaagaaactggatcaaaaccaaaacaaaatgaagcaaaactaaagagtagtttactgcaacctctttttttcaattytagtcatgaaccctgtctcctacatcagagactttcttgttccagtgaaagattatatctttctgtccttcatcacccttgacatggtaccttatacactgtagtcctcaatcaatatttgttgtttggttgaaaatagtaaatctcaaagagaaacagagtccgttgttttagatcaaaggaagcaaactgtcagcctgtagg

SEQ ID NO: 926016 - DNA, 588 bp, Homo sapiens
aataaaagttattttcttatctacatggggaagcacaattgaaagaatacatgtgaagccgggcgtggtggctcacacctgtaatcccagcactttgggagaccgaggagggtggatcacgaggtcaggagatccagaccatcctggctaacatggtgaaaccccgactctactaaaaatacaaaaaaattagccgggcgtggtggtgggcgcctgtagtaacagctactcaggaggctgaggyaggagaatggcgtgaacccgggaggtggagcttgcagcgagccaagatcgcgccgctgcactccagcctgggtgacagagcgagactccatttcaaaaaaaaaaaaaagaatacatgtgaaactgtaccataaactctcaaatgctggtagactccaggcctttaccttaggtagatctgcctccagaactcagcatctccaactctttctcttgttcaaccgcattctaatgccagcttctcttcttgccttctgagttcttacattctccttgccttcattctctctgtgtaagaaatgggaattatattatctacctgatgcaattggtataagggcaacc

SEQ ID NO: 926017 - DNA, 588 bp, Homo sapiens
aataaaagttattttcttatctacatggggaagcacaattgaaagaatacatgtgaagccgggcgtggtggctcacacctgtaatcccagcactttgggagaccgaggagggtggatcacgaggtcaggagatccagaccatcctggctaacatggtgaaaccccgactctactaaaaatacaaaaaaattagccgggcgtggtggtgggcgcctgtagtaacagctactcaggaggctgaggtaggagaatggcgtgaacccgggaggtggagcttgcagcgagccaagatcgcgccgctgcactccagcctgggtgacagagcgagactccatytcaaaaaaaaaaaaaagaatacatgtgaaactgtaccataaactctcaaatgctggtagactccaggcctttaccttaggtagatctgcctccagaactcagcatctccaactctttctcttgttcaaccgcattctaatgccagcttctcttcttgccttctgagttcttacattctccttgccttcattctctctgtgtaagaaatgggaattatattatctacctgatgcaattggtataagggcaacc

SEQ ID NO: 926018 - DNA, 593 bp, Homo sapiens
ccagtggaggctgcagaacagcaaagattgctccctgatccttcctctggaagcttcagcccaaaggggcaccagccagatgccagccagagctctcctgtatgaggtgtctgtcggcccctactgggaggtgtctcccagtcaggatacatgggggtcagggacacacttgaggaggcagtctgaccttagcagagcttgcacgctgtgctgggagatccgctgctctcctcagagctgtcaggccgggatgtttaagtctgctgaagctgtgcccacagctgcccyttccccaacatgctctgtcccagggagatgggggttttatctataagtccctgactgggaatgctgcctttttttcagagatggcctgcccagagaggaggaatctagagaggcagtctggccacagcggccttactgagctgcggtgggctccacccagttcgaacttcctggtggctttgtttacactatgagggtaaaaccacctactcaagtttcagcaatggcagatacccctccccacgccaagctcaagcatcccaagttgaccttagactactgtgccggcagcgagaatttcaggc

SEQ ID NO: 926019 - DNA, 653 bp, Homo sapiens
gatactccataaacagcccaagtggcagaacatccctagcagcagaatccactggctgcttcccaatctgaatgtttttgtactatccttgacttctacagttggcagagagagggaaaaaaatgtttcagaaagtagagatgttgaagggatggatgtccagaaatggaagatggggaaagagaaatgtttctctcacactttgtgatgcatcggaaacaataacgtggtcwctttagagatcccaaatgttttagaagtgcagaaggtaacaaaaacctcctgatatttcaaaatgcaaatcacccagcttcatctctttttaagaaccttcgcattactgtagggtacaaatagagaaacaagtacaactacagtcccagcgaaacatactcagactctcataaaaactccactggtgaaaacagttactcgaagaagccaagttaatcctgtgcctgagtcctccgagtcctgctaagacagctctggccagtgacattcacccatagtgcattcctctcggcccacctgctgccgtaggatcctagtttttcaagccctcaatgaagtaaagagctagagttgaagatggaaggcaacatacagctagaagcacaaaacatgagcatatactgttggccagagtcttt

SEQ ID NO: 926020 - DNA, 554 bp, Homo sapiens
atgtttttcaaagtaagtttatttatttccaaggatttttttaaacattagattatatccagtctagaagtttagtagtatttttagtcattaagattacagaacaaatcaataaatgccatgctatcagccttgaaatccatagtttggtagtcattttataacaattaatctgctatagtttcccaatattcttgtttcttataaaataaaataagatggagttatgctgcatgaatattcygaaaaggaacacgattgattatggaaactccattttaaataaatcaaaatacatatctttcaaaataagtacatctttaataagaattaaaaaatgaaaaatattaattacaaaattattttttaataattataaactaagaagaaatgtagtatccactagcatacttacaagaaaaattattgttatcaatgtaatattttatatgaatgtaaagggagtaggttgataaaaaacgaaaaaatagtgctttagtccaacaaataaatgttctctagacttaccctattgtttacaaaaagttaaatat

SEQ ID NO: 926021 - DNA, 582 bp, Homo sapiens
gtggttttttttttggtggtggtggtggtggtggtttttttgtttgtttgtttgtttgtttgtttgttaacatggagtcttgttccatagcccagactggattgcagtgacgcaatctcggcccactgcagcctctgcctcccaggctcaaatgattctcctgcctcagcctcccaagtagctggtactatgggtgtgcaccatcatgcccagctaatttttgtatctctactaragatagggtttcagcatgttggccaggctggtctcaaactcctgacctcagataacccacccgcctcagcctcccaaagtgctgggaccacaggcatgagccacctcccctggcctaaaaagtcatttcattccatgtaagatgatatatttgcagctttcagtaaataagacatcctttggggtaccattatcttgccctccactgtctacataacaaaccactgcaaaatataatgactaagagaatcccactttattttatctggtaattctttgaattgagttgggttgattttatatatttttttccctaccttcctggtgtgttgaagtcagtcactgtat

SEQ ID NO: 926022 - DNA, 640 bp, Homo sapiens
gaggtgggaggattgcttgagcccagaagtttaaggctgcagtgagttatgatcatgcctttatacttccagcctgggcaacaaaatgagactccatctctattttttaaaaaaagaaaaacagaaacccaaarctgatcaaactacatggcaatctaataaacaactgatatggtttggctgtgtccccacccaaatctcatcttgaattgtagttcccataatccccacatgttgtgggagggacccagtgggaggtaattaaattatgggggcagttacccccatgctgttctagtgatagtgagtgagttctcacgagatctgatggttctataaggggcttttccccctttgttcagcacttcttcctgccaccaggtgaagaaggatgtgtttgcctccccttccactatgattgtaagtttcttgaggcctccccagccctgtgcaactgtgagttgattaaacctctttcgtttataaattacccagtcctgggcagccctttatagcagcatgagaacagactaatacaaggaccaagatgactttttatttatttatattttattttatttattttattattttattaatttattttttactttatttattttatggtgctagcataatt

SEQ ID NO: 926023 - DNA, 640 bp, Homo sapiens
gaggtgggaggattgcttgagcccagaagtttaaggctgcagtgagttatgatcatgcctttatacttccagcctgggcaacaaaatgagactccatctctattttttaaaaaaagaaaaacagaaacccaaagctgatcaaactacatggcaatctaataaacaactgatatggtttggctgtgtccccacccaaatctcatcttgaattgtagttcccataatccccacatgttgtgggagggacccagkgggaggtaattaaattatgggggcagttacccccatgctgttctagtgatagtgagtgagttctcacgagatctgatggttctataaggggcttttccccctttgttcagcacttcttcctgccaccaggtgaagaaggatgtgtttgcctccccttccactatgattgtaagtttcttgaggcctccccagccctgtgcaactgtgagttgattaaacctctttcgtttataaattacccagtcctgggcagccctttatagcagcatgagaacagactaatacaaggaccaagatgactttttatttatttatattttattttatttattttattattttattaatttattttttactttatttattttatggtgctagcataatt

SEQ ID NO: 926024 - DNA, 618 bp, Homo sapiens
gaagataaatgtttgagacctgtcacagcaagggctccttggcatttctatctctgtgtggcctctgcccaaggtctctccagcatggtggcttcaaggcagctaagcttctcacattcaggaattccaaggtggcaggaggaggcacggggagagattgagatcaaggcagcaattgtattatctgtgtttgtagccttgtggtatctaktctccaaaatgatgcagcatgatttctactgccttttatttattacaagcatgttagtaaaattgacccacgtttaagaagagtggaaattagatttcaccctttgtgggaagaatgttgaagaatttacaaacatgttcttaaaccaccacagatgatcaattcagtttcacagacactgagtttgaatttctgggtgccttagtctggttcctgagcaaacaagagtcttgggtaaggattaatccttatgctttatttgagaagtacacactcaaggcagtgaaagtaaggaaaaacgaaaaaaaaggcagggaaggatggaaagcaattcaagatgatgctggtcactactacccaattaccgcaaagagacagggcaggtggcttggtaggagtgatgcgac

SEQ ID NO: 926025 - DNA, 653 bp, Homo sapiens
actgtatgatttcaactatatgacattctggaaaagacaaaattatggtgacagtaaaaagatcagaggttgccagggattagggaggagagagggatgacgagacagagcacaaaggatttttaggacaatgaaactgttctggatgatactgtaatggtgaatagatgtaattataaacccatagaatgtacaacaccaacggtgaacyccaatgtaaactgactttgggtgataatgatgtgtccatgtaggttcatcagttgaacaaatgtatcactctgatggcagatgttggtaatggggaggctatgcatgtctgaggacagggaatatatggaatatttctgtatcttccactcaattttgctgtgaacctaaaattgcactaaaaaagtatatttaaaaatattattgtggacctcaaagacttctgtttatgtaggatatatccataatgtcaaatataaaactacatgaagttagaaaaatggtaaaagtttattgtgcatacaaaggaacaattcacaaaccaggagaactcagcccaaggtggtaagaatccccactcagagcagttacaacatagtttttacacataaaggaggaagtatgtgaccttttctgtgactgcctgttacacatcatcattt

SEQ ID NO: 926026 - DNA, 748 bp, Homo sapiens
gtgcagctgcagacgcccaagctggggctgttgacccaggcatctctgcactctcaggggcccaggaaagccctccctgcccacacaggctccaaagtgcctgctcctactgcctggcctctccccactcccagctcccgctccagtcactgagaaaatttaaggtcacgccttggtgctgtcataacctagctgggtgtgcacacgcttgatgcagagctaactctggactttgggtgctgaagagcatgggagggatgcagacgtgggggctgagggcagcttggcactggcctgcaggtgcccctcagcataaacagcctggatgccatgaacagtggcaggaggcagacagtctccagggcagaaaagaccgggtccccagtgaagccccgctttcaagctggggagtgcctgaagcctggggccagggtgccagwcctgtggatcatagtgggaatttgtggtgctttttttgggcttgctcatggttgcccatggaccaatcaacaggcacttccttccatatgaggcccatgaaagccccggacacagccagactcacagagacaatgggacaacctgcctgaagagaggatctacccactccagggtctcctctctgctgagagctgaacactgatcagaacgtcctgcctgcggagaggagctacccaatgccggtcttctctgagctgttctgttgctcaataaagctcctttttaccttgttcaccctccacttgtc

SEQ ID NO: 926027 - DNA, 748 bp, Homo sapiens
gtgcagctgcagacgcccaagctggggctgttgacccaggcatctctgcactctcaggggcccaggaaagccctccctgcccacacaggctccaaagtgcctgctcctactgcctggcctctccccactcccagctcccgctccagtcactgagaaaatttaaggtcacgccttggtgctgtcataacctagctgggtgtgcacacgcttgatgcagagctaactctggactttgggtgctgaagagcatgggagggatgcagacgtgggggctgagggcagcttggcactggcctgcaggtgcccctcagcataaacagcctggatgccatgaacagtggcaggaggcagacagtctccagggcagaaaagaccgggtccccagtgaagccccgctttcaagctggggagtgcctgaagcctggggccagggtgccagacctgtggatcatagtgggaatttgtggtgctttttttgggctygctcatggttgcccatggaccaatcaacaggcacttccttccatatgaggcccatgaaagccccggacacagccagactcacagagacaatgggacaacctgcctgaagagaggatctacccactccagggtctcctctctgctgagagctgaacactgatcagaacgtcctgcctgcggagaggagctacccaatgccggtcttctctgagctgttctgttgctcaataaagctcctttttaccttgttcaccctccacttgtc

SEQ ID NO: 926028 - DNA, 636 bp, Homo sapiens
agcagcagagaaaatttcagaagttaaaaacaggtttttgcattaatccagtcagacaaaaataaagaaattagattttaaaagaatgaacagaatcatcaagaattatggaaactgcataaagcataaagtaaccaaacataaaaatccttggtattcctgagagagaagaaacacaaaaagttggaaacgcttatctgaggaaataattgacaataacttctctagtctaagaagagatttagacatgttgatacaagaagcccgctaaacaccaggtcaatacattgcaagattttttttttcttttttgatggaatctcactctgttacccaggctrgagtgcaatggcactatctcagctcactgcaatctccgcatcatcccagtttcaagtgattctcctgcctcagcctcctgagtagctgggattacaggtgtccaccaccatgcccagctagtttttgtatttttagtagaggcagggtttcactgtgttggccaagctggtctcaaactcctgacctcgtgatctaccctccttggcctctcaaagtgctgggattatggggtgagccactgcacccagctgcaagatggattttatcatgatacacactttagagagttgactg

SEQ ID NO: 926029 - DNA, 631 bp, Homo sapiens
caccctgtcaaaacagaccactcggctctaccaatcagcaggatgtgggtggggccagataagagaataaaagcacgctgcccgcgctagcagcggcaacacgcgggggtctccttccgcacagtggaagctttgttctttcactctttgcaatgactcttgctactgctcactctttgggtccacactgcttttatgagctgtaacactcactgcgaaaagtctgcagcttcactcctgaagccagcaagaccacgagcccactgggaggaacgaacaactccagacgcgcggccttaagagctgtaacactcaccgcgaaggtctgcagcttcactcctgagccagcgagaccacgaacccaccaraaggaagaaactccgaacacatccaaacatcagaaggaaaaactccaggcaggccaccttaaaagctgtaacactcaccgcgagggtccgcggcttcattcttgaagtcagtgagaccaagaacccaccgattctggacacacaagtgccagcttaaatgctgtctcctcaaagaggtcatctctgacaacacacattcacccatttgtctttgttttattctcttcataacatttatcactatcagaaattattttaagtat

SEQ ID NO: 926030 - DNA, 646 bp, Homo sapiens
gaaattcctgttgtgaattttttcacttccagaagttcaatttggttctttcttaaaatgactatgttgtttttcaacttttggatcattttactcttttccttagattgggtttcaaacttctcctgtatctttttgagctttcttgccatccagattctaaattcgatatctgtcatttcatccatttcagtctggttaagaaccattggtggggagctagtatgatcattttgaggtaagaagacactctcgcttttagagttgccagaattcttgtgttggttmtttctcatctgtgtaggctgatgttcctttaatctttttgaatgtcctgggatggggctttttgcttttatattttttgtgcccttgaaggtttactgtagtataagttgggtttattcaactgtcttaatttctgcatgcctccagggggccaaggcttttctcagcactcctgggctgtgtgctctaaccctggggggcagggaccaggcccttggctttgttctctggtccctcaaggtcaagcacctgttgcaccagaggagccaaggtactcccagttttctgacaaaaacaccccaatgaggactgccagcaaaagtgctctgatggggaaggggggtgtgggcaagtgtgc

SEQ ID NO: 926031 - DNA, 665 bp, Homo sapiens
cccttctagtcctatggtgtaaaaggaaatatcttcacataaaaactagacagaagctttctgaggaacttctttgtgatctgtgcattcacctcacagagttgaaactttcttttgattgagcagtttggaaactgtcttattgtagaatccacaaagggacatttgggagccctttgaggcctattttgaaaaaggaattatcttcacataaaagctacaaaaaacagaagatggccaaataggaacagctctggtctacagctcccagtgtgagtgatgcatttccatctgaggtaccaggttcatctcactagggagtgccagtccatgggtgcaggacagtgggtgcagtgcaccgtgcatgagatgagacaaagcagggtgaggcattgyctcactcaggaagtgcaaggggtcagggagttccctttcctagtcaaagaaatgggtgacagatgacaccaggaaaattgggtcactcccactctaatactgtgcttttccatcaagcataaaaagcagcacaccagaagattatatcctgcacctggctcagagagtcctaggcccacggaatctccctgatttctagcacagcactctgagatcaaactgcaaggtggcagcaaggctgggggaggggtgcctgcaactgcccgtgc

SEQ ID NO: 926032 - DNA, 759 bp, Homo sapiens; identical to SEQ ID NO: 918100

SEQ ID NO: 926033 - DNA, 587 bp, Homo sapiens
agagtgtcatgtcccaaggctgcacagagcagcagggccctggacccagcccacagaaccatttttccctcctaggcctccaggcttgtgatgggagaggctgctgtgaagatctctgaaatgtcctggagacagtttccccaatgttttggcgattaacatttggttccttgttacttatgcaaatttctgcatctggcttgaatttctccccagaaagtgagtttttcttttctcccacatggtcaggctacacattttccaaacttttatgctctgcttcccttttagatataagttccaacttcagaccatctctgtctttgtgcatatgagtgtacactttcagtaatagccagattacctcttgaaagctttgctgcttagaatttttttccaccagataccttaaatcatctctctcaagtttaaakttccacagatctgtagggcatggtcaaaatgccaccaatctctgttctaaagcgtagcaagagtgaccttttatacagttcccaataagttcctcatcttcatctgagaccacctcagcctggaccatatcactattagcatttgtgtcacta

SEQ ID NO: 926034 - DNA, 573 bp, Homo sapiens
gcagtgtatctcttaccctgtttcctccattcttaacatcttatgttataatacttttgtcaaaactaagaaacttgtattggtatagactttttttttttttttttgagatggagtttcactgtgttgctcaggctggagtgcagtggcaccatcttggctcactgcagcctccacctccagggttcaagcatttctcccgcctcagcctcccaagtagctgggattacaggcatccaccaccatgcccggataatttttgttaagatggggtttcaccatgttggccatgctggtctcaaactcctgacctcaagtgatccccccacytcagcctcccagagtgctgggattacaggcataagcccttgtgcctggccctaagcactagactttatttggagttcaccaaatattggtagtggtatattactgttaactaaactctaaactttatttggaatcttctattaatgttttctttctgtcccagtatccattccaaggtactatattacgtttaattgtcatgtgtctttagtcttatctgtgacattttctgtcttatttctt

SEQ ID NO: 926035 - DNA, 584 bp, Homo sapiens
tctaaggtcctttctatctccatccatccatccatccatccatccatccatccatccatccagctatccatccatccatccattcatccacccattcatccatccatgcatccatccatccattcacctatttatccactcgtccatccattcatccacgtatttatccacccacccctctattcatccatccattcattcatctatccattcgtccagccttctatttatccatccagtcatccatccatccacctatttatccactcacccatccattcacccactcagtcatccaaccattcatccatccacctgwttatccactcattcatctattcatccatccacctatttatccatccatccatctatccattcattcacccacccatccattcacccacctattcacccaatctgccaattcatccattcatgcacctattatccatctactcacctactcatatatacatactttcatacatacctcctttcctccctccctccccacctccctcatttcatgagtaaggccattttaagaacatccaagcttcttacttttttagaagctctat

SEQ ID NO: 926036 - DNA, 582 bp, Homo sapiens
gaggaaaaaataatttcccctctctactcttataagttcttggctggaacccctgtaacaaaagagagattagtaagagaaaaatgaaaagaagtttattaacatacatatctcatatgggcatgggagaaaactcagggaaagagtaactctcaaagaggtaacttagaactcttgtttatatggcatctttaacaaagaataatacatttttagaaaagtgacaagggccaggtgtggtggctcacscctgtaatcccaccattttgggaagctgaggcaggcagatcatctgagtcagaagttcgagaccagcctggccgacatggtgaatccccatctctactaaaaacacaaaatttagctgggtgtggtggtgcccgcctgtaatcccagctacttgggaggctgaggcaggaggatcacttgaacctgggatatggaggttgcagtgagccaagatcccaccattccactccagcctgggtgacagagcgaaacttcatctaaaaaaaaaagagaagtgacaagacaaaggagaaggatcctgagtctctaggggtggcaaattgtctcaagtca

SEQ ID NO: 926037 - DNA, 582 bp, Homo sapiens
gaggaaaaaataatttcccctctctactcttataagttcttggctggaacccctgtaacaaaagagagattagtaagagaaaaatgaaaagaagtttattaacatacatatctcatatgggcatgggagaaaactcagggaaagagtaactctcaaagaggtaacttagaactcttgtttatatggcatctttaacaaagaataatacatttttagaaaagtgacaagggccaggtgtggtggctcacccctgtaatcccaccattttgggaagctgaggcaggcagatcatctgagtcagaagttcgagaccagcctggccgacatggtgaatccccrtctctactaaaaacacaaaatttagctgggtgtggtggtgcccgcctgtaatcccagctacttgggaggctgaggcaggaggatcacttgaacctgggatatggaggttgcagtgagccaagatcccaccattccactccagcctgggtgacagagcgaaacttcatctaaaaaaaaaagagaagtgacaagacaaaggagaaggatcctgagtctctaggggtggcaaattgtctcaagtca

SEQ ID NO: 926038 - DNA, 729 bp, Homo sapiens
ggaggaaaaaataatttcccctctctactcttataagttcttggctggaacccctgtaacaaaagagagattagtaagagaaaaatgaaaagaagtttattaacatacatatctcatatgggcatgggagaaaactcagggaaagagtaactctcaaagaggtaacttagaactcttgtttatatggcatctttaacaaagaataatacatttttagaaaagtgacaagggccaggtgtggtggctcacccctgtaatcccaccattttgggaagctgaggcaggcagatcatctgagtcagaagttcgagaccagcctggccgacatggtgaatccccatctctactaaaaacacaaaatttagctgggtgtggtggtgcccgcctgtaatcccagctacktgggaggctgaggcaggaggatcacttgaacctgggatatggaggttgcagtgagccaagatcccaccattccactccagcctgggtgacagagcgaaacttcatctaaaaaaaaaagagaagtgacaagacaaaggagaaggatcctgagtctctaggggtggcaaattgtctcaagtcaaatatagatgcaggctagttaataaagtttgttatgtggattcctctcgtgtggtcttcaggctgttaagagtcaaaagtcatctccagggatcaacttagtccttcctggtggagcagggaggaggggcacctttgcaaatttgt

SEQ ID NO: 926039 - DNA, 729 bp, Homo sapiens
ggaggaaaaaataatttcccctctctactcttataagttcttggctggaacccctgtaacaaaagagagattagtaagagaaaaatgaaaagaagtttattaacatacatatctcatatgggcatgggagaaaactcagggaaagagtaactctcaaagaggtaacttagaactcttgtttatatggcatctttaacaaagaataatacatttttagaaaagtgacaagggccaggtgtggtggctcacccctgtaatcccaccattttgggaagctgaggcaggcagatcatctgagtcagaagttcgagaccagcctggccgacatggtgaatccccatctctactaaaaacacaaaatttagctgggtgtggtggtgcccgcctgtaatcccagctacttgggaggctgaggcaggaggatcrcttgaacctgggatatggaggttgcagtgagccaagatcccaccattccactccagcctgggtgacagagcgaaacttcatctaaaaaaaaaagagaagtgacaagacaaaggagaaggatcctgagtctctaggggtggcaaattgtctcaagtcaaatatagatgcaggctagttaataaagtttgttatgtggattcctctcgtgtggtcttcaggctgttaagagtcaaaagtcatctccagggatcaacttagtccttcctggtggagcagggaggaggggcacctttgcaaatttgt

SEQ ID NO: 926040 - DNA, 568 bp, Homo sapiens
gaaccccaacaggctaacagcagtcttctcagcagaaacctcacaagccaggaaagattgggagcctattttcagcattttaaaagaaaataaattccaaccacaaatttcatatcctgccaaactatgcttcataagcaaaggagaaaaaaaatattttccagacaagcaagcactaagggaatttattaccactagaccaaccttacaaaagctccttaagggagttctggaaatagaaacaaaagaataatacctgctaccacaaaaacacacttaagtacatagcccctataaagcaaccacacaatagaaactataaagcaaccagctarcaacttcatgataggatccaaacctcacatatcaatactaacctttaatccactgtcttgaatactagcctatccatctgttgtcttcaagagacccatttcaaatgtagcaacacccacgggctaaaagtaaagggttggagaaagatctatcatgcaaatagaaaacagaaaagagcaggagtcgctgttcttatatcagataaaacagactttaaatcaagaacaataaa

SEQ ID NO: 926041 - DNA, 461 bp, Homo sapiens
ttcatatcctgccaaactatgcttcataagcaaaggagaaaaaaaatattttccagacaagcaagcactaagggaatttattaccactagaccaaccttacaaaagctccttaagggagttctggaaatagaaacaaaagaataatacctgctaccacaaaaacacacttaagtacatagcccctataaagcaaccacacaatagaaactataaagcaaccagctagcaacttcatgataggatccaaacctcacatatcaatactaacctttaatccactgtcttgaatacyagcctatccatctgttgtcttcaagagacccatttcaaatgtagcaacacccacgggctaaaagtaaagggttggagaaagatctatcatgcaaatagaaaacagaaaagagcaggagtcgctgttcttatatcagataaaacagactttaaatcaagaacaataaag

SEQ ID NO: 926042 - DNA, 532 bp, Homo sapiens
ggtcacagagctctgaactgtgactgcgagaaagtgagatgtgctgcaagtgtaaaatgcacagatttccaagacctaccatgaaaaaggaacaggaaagatctcattaataattttgcttgctttgttttttctcattaataatttgtacatttatattggctatacattgaaatgattatatttttaatatattgggttaaataaaatagattattaaagtgactttcctttgtttctacttacctgcgatgtggctataagagaactwaaagtacacatgaggctgaattatactttcattgtccagtactgctttagagtcctcaactagcacttcttagtaatcatcatatcttaatctaaacaaaaataattacgtcatgtaatttacattttcaagttatatgtaaagaatgagtcagagttattttgtttgttttgcttcattaaatactcggcatcctaatttcctttctcctcttgctgcctggccttctgtgacaatatccactcaaccgtctgctgctga

SEQ ID NO: 926043 - DNA, 773 bp, Homo sapiens
ctggattgatagaatagtggaatggccttttgaaatcacatttacaatgccagctaggtgacaatactttgcaggtctggggcaaagttctccagaagactgtgtatgctctgaatcagcacccaatatatcgtactgttttcccattgccaggattcatgggtccaggaatcaagggrtggaagtggaagtggcaccactcaccgtcacccctagtgacccactagcaaacttttttgcttcctgttcccgtgacattatgttcgacaggcctagaggttttagtttcagagggaggaatgctgccaccaggagacacaacaatgattccattaaactggaagttaagattgccacctggacactttgggctcctccttcctttaagtggacagcttagctaagaaggctacgatgggagttacagtgttggccagggtggttgacctggactctcaagatgaaatcagtctactactccataatggagataagaaagagaatgtgtggaatacaggagatcctttagggcatctcttagtatcaccatgccctgtgattagggtcaatgagaaactacaacaacccaatccaggcaggactacaaatggcccagacccttcaggaatgaaggtttgggtcactccaccaggaaaaaaaccatgacctgctgaggtgcttgctgagggcaaagggaatacagaatgggtaatagaagaagcttgtcatcaataccagctacaaccatgtgatcagttccagaaatgaggact

SEQ ID NO: 926044 - DNA, 773 bp, Homo sapiens
ctggattgatagaatagtggaatggccttttgaaatcacatttacaatgccagctaggtgacaatactttgcaggtctggggcaaagttctccagaagactgtgtatgctctgaatcagcacccaatatatcgtactgttttcccattgccaggattcatgggtccaggaatcaaggggtggaagtggaagtggcaccactcaccgtcacccctagtgacccactagcaaacttttttgcttcctgttcccgtgacattatgttcgacaggcctagaggttttagtttcagagggaggaatgctgccaccaggagacacaacaatgattccattaaactggaagttaagattgccacctggacactttgggctcctccttcctttaagtggacarcttagctaagaaggctacgatgggagttacagtgttggccagggtggttgacctggactctcaagatgaaatcagtctactactccataatggagataagaaagagaatgtgtggaatacaggagatcctttagggcatctcttagtatcaccatgccctgtgattagggtcaatgagaaactacaacaacccaatccaggcaggactacaaatggcccagacccttcaggaatgaaggtttgggtcactccaccaggaaaaaaaccatgacctgctgaggtgcttgctgagggcaaagggaatacagaatgggtaatagaagaagcttgtcatcaataccagctacaaccatgtgatcagttccagaaatgaggact

SEQ ID NO: 926045 - DNA, 475 bp, Homo sapiens
gaatttttcaaccttaagaaaatcagtccacattgattaatttcaccaaattcataaccaacctgctatttaaaatgtaggtttgggtcctatttaaaaggccaaaatcactttgcatttcttccttctcccattccttttttccctccatagkccccagggatctaaggttagggttatctgtttgcctggtgaaaaaacccagaaggatggaagtaaaatgcttctatttacgtttcgtgactaaaatcgagagctctgtgatctatcttcctggagacttaaatttaagcgtcattttttatatttttttgtcatgagccaaactcaaaatatacttttaacatatagtcatttaagattaacaaagaataattttcaggatacagtaaacatgaaaatgtggggggtggggtgcaggggatgagtgtgtgtgttcaactgatgtgttggcaaaaagagagcctgtgcagat

SEQ ID NO: 926046 - DNA, 794 bp, Homo sapiens
cctctgtggcacacaataattttaatataaattattactgattataattattactgataatgtacactaagttatatcaaaatgataggagtttcacatgatttggaacacataccaatgacatatttatctaaagaaagccaaacaccatttaatatttgacaatgcttcctgtttaatttttataccaaataagccaaattttacctttacattagggtactattaatgttaaacccaattcttaataaactttatagacatatttacccaattttaatgtttgaccataaggtaagacttttatagaccttttataacccttaacaatttttgttaaagagcagattagtgctctaagagaaacccattgtgcttttaatgctcaatttacagaaaaactggatgatactccttcaactttagccaatatgtttacacacagaatttcctttactattaaccttccacarcttgcgtaaacctttatttctattttatccaacttaaaacaatcctttaaccttttaatctaggtaaaaatccatattcaccttcctccttataatctttttaaccaaagtatattttactttccttacgtaccttgcatgtaaactcttttttcaatagtcttaaatacatgctacactgttaactcttagcaacctttacttttggtgaaaaccttggtaaatttgagattttaattatgtactaggcctggagcctaggacctagacagaagtgcagataaggtctgacttattccagcatctaactccatgtgtccc

SEQ ID NO: 926047 - DNA, 566 bp, Homo sapiens
tcgtgctgtgaatataaaactatgtatctactctgttttgatactagttttgatatggtttggctgtgtgtccccactgaaatctcatcttgaattgtagcccccataattcccacatgttgtgggagggacacagtgggagataactgaatcatggcagtggttttatccatactgttctcatggtagtaaatacatctcatgagaactgatggttttataaggggttcctcctttcactcggttctcattctttcttgcctgccaccatgtaagatgtgacttttgtcttccmccatgattgtgaggcttccccagccagtggaactgtgagcccattaacctctttttctttataaattgttaagtctggggtatgtctttatcaggagcatgaaaatggactaatacaagttgcttatagttctgtattatttccttttttttttttttttttttctgtgagacagagtctcggctctgttttccaggctggagtgcagtggtgtgatctcggctcactgcaacctctgcctgctgggttcaagcgattctcctgcctcagc

SEQ ID NO: 926048 - DNA, 609 bp, Homo sapiens
ggagcagggggcagtgcccgtccgggaggctcaggccatgccggagcccacggggtgggggggtctggcatggcggcctgcaggtctggagccctgccccatggggaggtggctgaggcccagtgagaattcgagtgtggagcgggcaggtcagcagtgctgggggacccaccgcaccctctgcagctgctggcccggttgctaagcccctcactgccctgggccggcggctccagctggctgctccaagtgcagggccagctgagccagtgcccacctggaactcacgctggcctgcgagcgctgtgcacaaccccggttcccacccrtgcctctccctccacacctccctgcaagcagagggagccagctcctgcctcagccagcccagggaggggctcccacagtgcagcggtgggctgaagggctccccaagcatgaatagagtggatgccgtggcctgaggaggtgccgagagcaagcgagggctgctagcatgttgtcagctctcacttgtgtcttacagcgcctttcaagtggagctaggactctagggcactatggcccgtggtggtaaggcttttcaagaaactgaatccaattgctagg

SEQ ID NO: 926049 - DNA, 609 bp, Homo sapiens
ggagcagggggcagtgcccgtccgggaggctcaggccatgccggagcccacggggtgggggggtctggcatggcggcctgcaggtctggagccctgccccatggggaggtggctgaggcccagtgagaattcgagtgtggagcgggcaggtcagcagtgctgggggacccaccgcaccctctgcagctgctggcccggttgctaagcccctcactgccctgggccggcggctccagctggctgctccaagtgcagggccagctgagccagtgcccacctggaactcacgctggcctgcgagcgctgtgcacaaccccggttcccacccatgcctctccctccacacctccctgcaagcagagggagccagctcctgcctcagccagcccagggaggggctcccacagtgcagcggtgggctgaagggctccccaagcatgaatagagtggatgcygtggcctgaggaggtgccgagagcaagcgagggctgctagcatgttgtcagctctcacttgtgtcttacagcgcctttcaagtggagctaggactctagggcactatggcccgtggtggtaaggcttttcaagaaactgaatccaattgctagg

SEQ ID NO: 926050 - DNA, 577 bp, Homo sapiens
ctcttccaatgggcttaacaaacagcacaccaagagattatatcctgcacctggctcagggggtcctatgcccacggagcctcgctcattgttagcacagcagtctgagatcaaactgcaaagcagcagcgaggctgggggaggggtgcccgccattgcccaggcttgagcaggtaaacaaagaggccaggaagctcgaactgggtggaacccaccagagctcaaggaggcctgcctgcctctgtaggcttcacctctaggggcagggcacagacaaacaaaagacagcaataacctccgcagacttaaaggtccctgtctgacagcttcaaagagagtactggtyctcccagcacgcagcttgagatctgagaactggcagactgcctcctcaagtgggtccctaacccccgagtagcctaactgggaggcaccccccagtaggggcagactgacacctcacacggccgggtactcctctgagacaaaacttccagaggaatgatcaggcagcagcatttgcggttcaccaatacccgctgttctgcagccaccactgctgatacccaggcaaaca

SEQ ID NO: 926051 - DNA, 690 bp, Homo sapiens
cctatggagaaatacatcaaatgtagattattaaaattcagttgtagggtattaatgaaaagaccacttagtcaagtgagtagactcttcatccagctcattattaaatgtatttaattttacacggtttggtttatggggaccttgggtaaggaccatactccaaactcttggtattatcctcccaatagtcataataatattctccctggtacactgtattctctcaaaggttttaaatgtttgcatgcagccatctctagaacatcaartgatctctcttcaactggaatgacaaaagctgaaagaaatgtgcaaccatgaggacaccgtaacctatgaatgacatgctgagatcaaaaacccaaaatgatgataactgagagtggtgctaaggccctaagtattggttacactctcactaaagtgaaacctggccaaaaaatggaattttttttaaacaaaattatgggaggccattattttggactgagctcatgcactaggccccaacaaactgaaccaaactaaaatggagtcactcatgctaaatgtgacacaatcaaactaaggctttaagaaaacacagatcctagaacagatcaggttttgtttttctcctgtaaacaggatgttccagcataaggaagtaccctctattcagtccttggtgcctccttgcaaaaccca

SEQ ID NO: 926052 - DNA, 582 bp, Homo sapiens
cctatggagaaatacatcaaatgtagattattaaaattcagttgtagggtattaatgaaaagaccacttagtcaagtgagtagactcttcatccagctcattattaaatgtatttaattttacacggtttggtttatggggaccttgggtaaggaccatactccaaactcttggtattatcctcccaatagtcataataatattctccctggtacactgtattctctcaaaggttttaaatgtttgcatgcagccatctctagaacatcaaatgatctctcttcaactggaatgacaaaagctgaaagaaatgtgcaaccatgaggacaccgtaacctatgaatgacatgctgagatcaaaaacccaaaatgatgataactgagagtggtgctaaggccctaagtattggttacactctcactaaagtgaaacctggccaaaaartggaattttttttaaacaaaattatgggaggccattattttggactgagctcatgcactaggccccaacaaactgaaccaaactaaaatggagtcactcatgctaaatgtgacacaatcaaactaaggctttaagaa

SEQ ID NO: 926053 - DNA, 732 bp, Homo sapiens
tggactgagctcatgcactaggccccaacaaactgaaccaaactaaaatggagtcactcatgctaaatgtgacacaatcaaactaaggctttaagaaaacacagatcctagaacagatcaggttttgtttttctcctgtaaacaggatgttccagcataaggaagtaccctctattcagtccttggtgcctccttgcaaaacccactgttctattgtttttcagtgggtttcaaaatcaaataagtacatttacaaaagagatagtaacatcagtgactaagattttggccaatctctcaaaattgagaaaatgtctaaaagggggaattgttaaagccaactaaatatggcctgagaaggactccatacttctatatttgaatccttgtggatgaactgtaacctagcttaatagtgagacaaaattgaaaatctaacgtaatagtatgcacctrtaacagtggctgagtgttggccaatcccagcggccatacttcaactactcatagaggctgaatgttcaaactacgttcaaaaaaggcaaaagtcgagctgtaaccaatctcactgtttctgtacctcacttctgattcctgtatgtcactttaccttttttgtctatgagtttattctgaccacgagatacccctggagtctctgggaatctgctgtggttctgggggctgcccgattcacaaatcattcattgctcaattaaactcttataaatt

SEQ ID NO: 926054 - DNA, 574 bp, Homo sapiens
catgccttgcttccccttcaccttctgccatgattgtaagtttcctgaggcctcttcacccatgtggaactgtgagtcaattaaacctcttctgtttataaattaccttgtctcaggtagtatctttatagcagtgtgaaaatggactaatataacttatttggcaagatactttatatctacatactrtatacctatatgatatctactccctgaaacatctgttttcccagttaaaatcatgtaatgcagcaaaatactactccttttttagaaccctgttttaaaaagtaaaagttatgtattaatctttagaagactgcaagacagagaccatgtatatcatttagaattactttgatttcaactaacacagaaccaaactaaaaatggcaataagggtagcaagttagactcttccagttgtgttggcccactgaactggccactctggaagagtccgttctggtcacccagaagagtctaacttgctacctttacacagtaagtcacttgtcagcactttcctaaaatagtcttactgtttaggtgaccagttcagtgggcctacatg

SEQ ID NO: 926055 - DNA, 574 bp, Homo sapiens
catgccttgcttccccttcaccttctgccatgattgtaagtttcctgaggcctcttcacccatgtggaactgtgagtcaattaaacctcttctgtttataaattaccttgtctcaggtagtatctttatagcagtgtgaaaatggactaatataacttatttggcaagatactttatatctacatactatatacctatatgatatctactccytgaaacatctgttttcccagttaaaatcatgtaatgcagcaaaatactactccttttttagaaccctgttttaaaaagtaaaagttatgtattaatctttagaagactgcaagacagagaccatgtatatcatttagaattactttgatttcaactaacacagaaccaaactaaaaatggcaataagggtagcaagttagactcttccagttgtgttggcccactgaactggccactctggaagagtccgttctggtcacccagaagagtctaacttgctacctttacacagtaagtcacttgtcagcactttcctaaaatagtcttactgtttaggtgaccagttcagtgggcctacatg

SEQ ID NO: 926056 - DNA, 438 bp, Homo sapiens
tgcaaggggtcagggagttccctttcctagtcaaagaaaggggtgacagatggcacctggaaaatcgggtcactcccaccctaatactgcgcttttctgaagggcttaaaaaatggcacaccaggagattatatcctgcacctggctcggagggtcctacrcccacggagtctcgctgattgctagcacagcagtccgagatcaaactgcaaggtggcagcaaggctgggggaggggtgcctgccattgcccagacttgcttaggtaaacaaagcagcctggaagcttgaactgggtggagcccaccacagctcaaggaggcctgcctgcctctgtaggctccacctctgggggcagggcacagacaaacaaaaagacagcagtaacctctgcagacttaaatgtccatgtctgacagctttgaagagagcagtggtt

SEQ ID NO: 926057 - DNA, 438 bp, Homo sapiens
tgcaaggggtcagggagttccctttcctagtcaaagaaaggggtgacagatggcacctggaaaatcgggtcactcccaccctaatactgcgcttttctgaagggcttaaaaaatggcacaccaggagattatatcctgcacctggctcggagggtcctacacccacggagtctcrctgattgctagcacagcagtccgagatcaaactgcaaggtggcagcaaggctgggggaggggtgcctgccattgcccagacttgcttaggtaaacaaagcagcctggaagcttgaactgggtggagcccaccacagctcaaggaggcctgcctgcctctgtaggctccacctctgggggcagggcacagacaaacaaaaagacagcagtaacctctgcagacttaaatgtccatgtctgacagctttgaagagagcagtggtt

SEQ ID NO: 926058 - DNA, 615 bp, Homo sapiens
caccacccaaaccggtaatctggcccaaccagttctgccatcgcactcgggaacagcagacagcaagaaaaactcacttccgccccctgtgattccatctccaacctgaccaatgagcactaccggcttcccaagcccctgcccgccaaattatctttttttttttttctgagatggagtctggctctgtcgcccaggctggagtgcagtggygcgatctctcctcactgcaagctccgcctcccgggttcacgccactctcctgcctcagcctcccgagtagctgggactacaggcgcccgccactatgcccagctaatttttggtatttttagtagagacggggtttcaccgtgttagccaggatggtctcgatctcctgacctcgtgatccgcccgcctcggccttccaaagtgctgggattacaggcgtgagccaccgcgcccggccgccaaattatctttaaaaacttgaatccctgaatgctggggagactgaattgagtcacaataaaactccggtctcccacacatctggctctgcgtgaattactctttctccattgcaattcccgtcttgataaatcggctctgtctgggcagcagaaaaggcga

SEQ ID NO: 926059 - DNA, 632 bp, Homo sapiens
tttcttatatactttttttttttttttgagagagagtttcactcttgttgcccaagctggagtgtaatggcacaatctcagcttccacaacctctgcctcccgggttcaagcgattctcctgcctcagcctcccaagtagctgggattacaggtgtgcaccaccacgcccagctaattttttgtatttttagtagaaagggggtttctccatgttagccatggtstcgaactcctgacctcaggtgatccacccacgtcagcctcccaaattgctgggattacaggtgtgagccacgcgcccagtctcttatacagtaatatttaaaatgtttatttggcctgaagctgccagtagcattgttaggctgtcttaagaaaaacacatttgtttcataatttatcaaacgaaactggtctttgagctcatcttaaaataaccctagaaatgaatgtctctgcaacaagccatgaagttctacctcattcttcttcttttttaaatatataccatgaaaatgtaaaaggtacaagtcaagggtccacagcctgaggagtgtttgcctatagagacccccatgaaaccaccacctaggtgaagatatgcaccctggccagcagccaggaagtctac

SEQ ID NO: 926060 - DNA, 598 bp, Homo sapiens
tgtgagatgatcctagttcctctattaacgtccctaaaggtctctcacaaaatggcagcacatatttcattcttgtccttccctttgcttcctctttgttttccttaccgagagagtcatgttcctgagctaatgccagcagggccagcagggccagggtggaggtccaggctctgcatccacctccctaaccactgtggagcccggcctgcaccttgccctgtgatctgtgctggacatagtcacatttaacagcccttcaagtttccaggttttaagggagaaaaggatagttagcttggcattgtagatgcagatgccatgctatttaaagatgcatgttctatatataaactmtagttaatcatttgactaaaaccatcataactttcctttgcatagttcagatgattcattgttttgaaaactatgtaaactcaaatggaaaacaaccacgcactgatggttgcaacttatatttcccagtatagagttaatgagcagaaaaatggcagaaccgcttccacacatctaaggctgaacatttcttggaactattaatgaatgtactttactgtaaacattgaagcttagcagt

SEQ ID NO: 926061 - DNA, 628 bp, Homo sapiens
actgtaagttcaaactcgagaatattttagaaagcaaaagtttgctatgagaactataatgatacaaaggattacagttaaaaaaaaagtagatgacttatatgtaaatctttgtaatggtgtagcattttgtgacacaactaccccttaagaaaaactgcaaagtcatgcataagtatagtccccgagttttgggggaactaaagaggaactaaagcaaatggagaaactgaaggtaatcaaaataattaccttcaggtaggttatcatttcagcaactgggattattttatatacaataactgggcagcttaagaaaggggaaaaaaaagatggaggtcaagcaggcttcccactaaaccatgctgcttcttgaaaaacaaaacaacaamcaataaaaacataatgcaacttcccggtgagaaacaggttccttattgctattttggcaggttgctctctcactgtcttatcatttatttcaccatctgtagtatttcctgcaaaagtaaagccctcattttctgttagggatgtatgtgtttaccaagctgtacctaaaatcatttatgaaaatgcagccattcatcaggagacaaaagccaggacagagagcagtcccgtgtct

SEQ ID NO: 926062 - DNA, 576 bp, Homo sapiens
cccatgtgagagaacctaagataattactaataacccgggactcctggggaaaaacagaggaggcaccacagagcccattcttggaaaaacctctgttttcctcatgaaactccaggggcaaaaatgaaggtttaaacaagttgaaaatgttttgtgargggttggtcttgtaaagaaagttctgtgggtagaagcaattggctaaggcttgaaggggattatttaatttatttcaataggttgaacattaaaataaaagcacactaatgcagggccagaatctgggcccatgtgtctgaatcacagggttttcttagaaaactgatctgctatttaacagaaaattgtaagttctaaaaagttgatgaaaatcttaccttatggtcaaactaattaaaattggatagatttataaaattttatttaaaaactagctatagcattaaagatgcactaatggaaacatgaaatctggttttttcttttgaaaaaaatttttatgtcatattgagacaatggaagatttttgtttgccttttgagtaaactacaaaaagtggggagggagagaagaga

SEQ ID NO: 926063 - DNA, 549 bp, Homo sapiens
atgacagagttccatcaaagccaactttaaatgcctatgtaaaaaataattattcttgttatgctttatgcaaataatccagccaagtaaatatattttgcaaacaaatcagtcctatcttgatttgtttttaataaaaatggggactggagaaaaattatgtttcaaaaaawaaaactacaatacacctgttgttagctgttcttgggtttttttctccagtttggactaaatcctaaactctttgtaagctacaagtccccaagttgatgctttcaaatctttacttttaaaaccaggaattgcactccttaccatagtactcattatttaccctatagtatgtggttcccttaaatgctgtgctaagatgacactactaacgcctttgccatgaaagccttggaaccccacccaggtctgcatgagtgggctcagacagttgcaaagcagttccaatcctctcaccttggagtcaacacctacccccactatgcccctggtcagcaggaagaagttagttagaagttcttcaacttcattagccaa

SEQ ID NO: 926064 - DNA, 623 bp, Homo sapiens
tgaaacatgtcaaacccctaaggcttccactatatgatgattgatttttgtgggtgtttgaaagcacattcaaatttaaaatgattctcattgcactcttggttttaggtgccacagcattcaccctggcctgtactgtttttgcacactatggcccagacagccgaggttggggaagactctctagttcttctgtagctgttttcccaatatatccctggtaaattactggttagtttccttcttaaccccaaactaaacagcctcagtctaaatacactgtaagtttcccatgtcttttgctacaactttttttttttttgtatttttttttttagtagagacggagtttctccatgttggtcaggctggtctcaaactccygacctcatgtgatctgcccgcctcagcctcccaaagtgctgggattacagacgtgagccaccgtgcctggcttacaacttttacttaaccaagacttgtgttttgcccactctcaaccctcaacataaaatatcatatttactgtctctggaagcaaagctactggtttccattgccaacatcacccattgaaactgtagttttctgcatagcttgcatgtgggtgggggactggggaa

SEQ ID NO: 926065 - DNA, 623 bp, Homo sapiens
tgaaacatgtcaaacccctaaggcttccactatatgatgattgatttttgtgggtgtttgaaagcacattcaaatttaaaatgattctcattgcactcttggttttaggtgccacagcattcaccctggcctgtactgtttttgcacactatggcccagacagccgaggttggggaagactctctagttcttctgtagctgttttcccaatatatccctggtaaattactggttagtttccttcttaaccccaaactaaacagcctcagtctaaatacactgtaagtttcccatgtcttttgctacaactttttttttttttgtatttttttttttagtagagacggagtttctccatgttggtcaggctggtctcaaactcctgacctcatgtgatctgcccgcctcagcctcccaaagtgctgggattacagacgtgagccaccgygcctggcttacaacttttacttaaccaagacttgtgttttgcccactctcaaccctcaacataaaatatcatatttactgtctctggaagcaaagctactggtttccattgccaacatcacccattgaaactgtagttttctgcatagcttgcatgtgggtgggggactggggaa

SEQ ID NO: 926066 - DNA, 573 bp, Homo sapiens
gttctgtgtcctgattgtggcagttctaataccaaggtatctaaatgctaaaattcagtaataaattcaaccaaaaagaaacttgagtttcataatgtgaaaatatttagaaaagaataatgaaagagaacacagttgagaggaaacaaataaacaaaaaaatcccccagaaagtttaaaataataataaagtcattaaaattaatgaccttacatttatagaaacaagagatgtgtcagwtttatcattaatctggggataataaaggctgaatcttatacaatttttttgattagaaagtgaagagaattatttgcattccttttaaagcacttgataatacctagaaaaatttctttgtgccaatttctgatggtaaatatttttatatgtgcttctgtagatcattcactgataaccacagaaacactgacagtaaaaagcaattttggccaagcgcagtggctcacgcctgtgatcccagcactttgggaggctgaggcgggtggatcatgaggtcaggcatttgagaccagcctggccaacatagtgaaactctgtctctactaaaa

SEQ ID NO: 926067 - DNA, 616 bp, Homo sapiens
agggaccatgatttggaagaccaaacaggctcagcttctcatgggtcctcctcagctattctcactgggggcaaggggggtgccgcccagaggcacagtgacacgcagtgatgatgaggctggttgggttgccgtcggcctctaggttcccttctccccagttttctcatgttcctcaccacccagtctttgagaggcttggaggcattgtttttctctcactttctctccatatttatttatttatttttttgagatggagtcttgctttgtcacccaggctggagtgcagtggtacgatcttggctcactgctacctctgcctcctgggttcaagcgattctcctgcttcagcctccagagtagctgggactacagtcacccgccaccatacccggctaattttttgtatttttagtagagatggggtttcaccatgttrgccaggctggtctcgatctgctgacctcgtgatccgcccgcctcggcctcccaaagtgctgggattacaggggtgagccacggcacccggctctccttattctttacaatcaaaatgttcctgagaagaaacgctgtgaagcagtcttgctaagcctttccagagctaagttcc

SEQ ID NO: 926068 - DNA, 645 bp, Homo sapiens
aatctggttctgggatttttttggttggtaggctattagttactgcctgaatttcagaacttgttattggtctattcaggaattcaactttttcctggttcggccttgggagggttcatatgcccaggaatttatccattacttctagattttctagtttatttgcatagatctgtttaaagtattctctgatggtagtttgtatttctgtgtagtcagtggtaatatcccctctatcattttttattgtgtccatttgattcttttctcttttcttctttattagactagctagcattctattttattattttgttcacaaaaccatcccctggattcattgatttttttgaagagtttttctgtgcctccatttccttcagttccactctgatcttggttatttctygccttcttctagctttgtggtttgtttgctcttggttctccagttctcttagttgtgattctagggtgttgatttgagatctgtctagctttttgatgttggcatttagtgctataaatttccctctttacactgctttagctgtgtcccagagattctggtaggttgtctctttgtttttattggtatcaaagaacctattgatttctgacttaatttcatgatttaaaccagaa

SEQ ID NO: 926069 - DNA, 572 bp, Homo sapiens
tcaatggaaaattccagaaataaacaattcatcataagttttttattgatacataatctttgcacaaatttgtgggatacatgtgatagtttgttacatacatagaatctgtaatgattaaacctgggtatttaggatgtgcatcttctyaagtatctattatttctatgtgttgaaagcatttcaagtcctcacttatgtctattttgaaatttacaatacgttgttgttaactgtagtcgtcctactctaacatcaagcgttagaacctattctttctgtgtaactgtatttttgcacccattagccagcctctctttatttccaccccaacacacacccacatccttcccagcctctagtaaccatcattctcactctttacctccaggagatcaactttttaagctcccacataagtgagtacatgtgatatttgtcgttctgtgtctgtgttattttttaatgtaatgacctctaattccatccatgttgctgcaaacaacatgatttaatgcatttttacaggtgaataatattctactgtgtaaatgtaccacattttctttatt

SEQ ID NO: 926070 - DNA, 572 bp, Homo sapiens
tcaatggaaaattccagaaataaacaattcatcataagttttttattgatacataatctttgcacaaatttgtgggatacatgtgatagtttgttacatacatagaatctgtaatgattaaacctgggtatttaggatgtgcatcttcttaagtatctattatttctatgtgttgaaagcatttcaagtcctcacttatgtctattttgaaatttacaatacgttgttgttaactgtagtcgtcctactctaacatcaagcgttagaacctattctttctgtgtaactgtatttttgcacccattagccagcctctctttatttccaccccaacacacayccacatccttcccagcctctagtaaccatcattctcactctttacctccaggagatcaactttttaagctcccacataagtgagtacatgtgatatttgtcgttctgtgtctgtgttattttttaatgtaatgacctctaattccatccatgttgctgcaaacaacatgatttaatgcatttttacaggtgaataatattctactgtgtaaatgtaccacattttctttatt

SEQ ID NO: 926071 - DNA, 641 bp, Homo sapiens
agatttattaccataaacatttctcttactactacttttgctgcatctcataagttttggtgaattgtgtttcagttttagttggtctcaagatgttttttaatttcccattggatttatttttgactctggttgttcaagaatgtgttgtcaattgcaacgtatttgtgaatcttccagtctttcttctgctatcaatctctagtttcattccatatgtattagaaaatttacttggtatgattactatctwcttaaatgtgttaaaacatattttgttgccaaatgtgatatattctaaataatgttctatgtgcatttgaaaagaatgtgtattctgctgttgttgggtggcatgttctctatatgtgtctttggttaatttgatctagagttttgttcaagttaaatgttacttttttgtttttctgtctagttgttttatccattattaagaatggaatattgaaatatgctactactgttgtcttgctatttctttttttagttttatcaatgtttgctttatatatttttgtgctctgatgttggatgcatgtatatttataatagttatatctttcttgtgaattggcccatttatcattatataatgttcttcttgtctcttgtgacatgtt

SEQ ID NO: 926072 - DNA, 597 bp, Homo sapiens
cacagagggagcatttagaccagacctagccagagaggaatcacccatcatagtagtcagagcttgagttccagcaagcctcgccactgcgggccaaagggctctggggtcataaataaacttaaaaggctgtctaggccacaagaactgcaactattagcaagtactagtgctgagctgggctcagagccagtgaatttgacaccagctacggttgctaaaggagcacttatgccacccctcccccaaccctagtttgcacagttygaggctcaaaaagagatcccttccatccacttgaggagaggagaggaaagagtaaggagaactttgtcttgcagtttggataccagttcaaaaagagtaggatagggcgctgttagagttgtgagtcccacgttctagatcctagctctcggaaaacatttctagatacaagttgcttcagaagggaacccactaccttgaagggaaggacacagtcctggaaggatccactacctgctgactaaagagcctttggtccctgaataatcactagtgatactcaggtactccataagccttgggtgagactctgaaatgtgctggtttcag

SEQ ID NO: 926073 - DNA, 597 bp, Homo sapiens
cacagagggagcatttagaccagacctagccagagaggaatcacccatcatagtagtcagagcttgagttccagcaagcctcgccactgcgggccaaagggctctggggtcataaataaacttaaaaggctgtctaggccacaagaactgcaactattagcaagtactagtgctgagctgggctcagagccagtgaatttgacaccagctacggttgctaaaggagcacttatgccacccctcccccaaccctagtttgcacagttcgaggctcaaaaagagatcccttccatccacttgaggagaggagaggaaagagtaaggagaactttgtcttgcagtttggataccagttcaaaaagagtaggatagggcgctgttagagttgtgagtcccacgttctagatcctagctctcggaaaacatttctagayacaagttgcttcagaagggaacccactaccttgaagggaaggacacagtcctggaaggatccactacctgctgactaaagagcctttggtccctgaataatcactagtgatactcaggtactccataagccttgggtgagactctgaaatgtgctggtttcag

SEQ ID NO: 926074 - DNA, 629 bp, Homo sapiens
attcacaatagccaagaggcagatgcaacctgagtgtcccatcaacaaagaaggagataaacaaaatgcagtatatgcaatggaatgtcatccagccttagaaaggaaatcctgacacatgctacaacatagatgaacgctgaggacattatttcaagtgagataagccagtcacaaaaggacaaatacttcaaaaatcatagcaacagttattagaatggtggtttccaagggctggggggaggcagaaatagggagaaatggtgtttaatgaatcagtttcagttttgcaagatgaaaagtattctagagaagggtggtagtgatggttgccccacartgttaatgtacttaagtgctatactaagtatacttagaaccatacacctaaaactggttaaatcatacattttgtgttatgtatattttactacagtaaaaacagtcaaacctaggaagactctgagaggtggaaagagcaaggtgacttcttagagaccttgggacttgaggttggcactacggtgaggtgcctggattttctttatgtttccatgtaattcagccaaagcactggagaaacttgcaacctggaaccaccaaccactgtagacagacatgtcccaaga

SEQ ID NO: 926075 - DNA, 598 bp, Homo sapiens
ccaggtgctctgtcccagggagatgggagttttattgataagcccctgactgtgactgctgccttcctctcagagatgcactgcccagagaggaggaatctagagaggcagtctggctgcagtggctttgcagagctgtggtgggctctgcctagtttgaacttccctgtggctttatgaggggaaaactgcctactcaagcctcagtaatggtgaacgccccttcccccaccaagctcaagcatcccagatcaacttcagactgctgtgctggcagcgggaatttcaagccagtggatcttagcttgctgggctctgtggggatgggatttgctgagctagaccacttggctccctggcttcagtcctctttccagggtagtgaacagttctgtctcactggcattccaggtgccactggggtatgaaaaaaaactcctgcagctagctcagygtctgcccaaatggccaccaagttgtgcttgaaacccagggccctggtggtataggcccccaagggaatctccgggtctgcaggttgtgaagactgtgggaaaagcatagtatctgggctggagtgcaccattcctcatagcac

SEQ ID NO: 926076 - DNA, 580 bp, Homo sapiens
ggtgctctgtttcaggaagatgggagttttatctataagcccctgactagggctgctgcctttctttcagagatgccctgcccagagaggaggaatctagagaggcagtctggctacagtggctttgcagagctgtggtgggctctgcccagtccaaacttmcacggtggctttgtttacactgtgaggggaaactgcctactcaaggctcagtaatggcggacgaccctcctcacacaaagcttgagtatcccaggttgacttcagactgctatgctggcagtgacaatttcaagccagtggatcttagcttgctgggctctgtggggattggatctgctgagctagaccacttagctccctggcttcagccccttttccaggggagtgaatggttctgtcttgctggagttccagctgccactggggtatgaaaaaaactcctatagctagctcagtgtctgcccaaatggccacccacttttgtgcttgaaacccagggccctggtggtgtaggcacccaagggaatctcctagtctgcaggttgtgaagaccatgagaaaagcatagtatctgagc

SEQ ID NO: 926077 - DNA, 598 bp, Homo sapiens
gaagcttgtgtatgtagtatatacaaattttcctccttcattttctctaattcctgtgcctcatacctgtgtggtttcatgggaaagttgctaacgttttcctcatgtgaatttggtggctggaggcgttgagaaacagacaatgattttaatttgtcccagaggttccaccacatcatcagagctgctagtttgtccttgctctccatatttcacatccaatttttttcctgctgttcgacctgatgacaaaatccagcaccaaaagcagaatcaacagccttaaataggctgcttaacttgccctcacaattgagcacgttcaaaatcctataaaagcacactctattcatattattaacagtaagtctgcttatctgattgaaatatacctgataatgaacagtaagatacaatcatgaagtargcacaagacaatggactgcatgcatcttaggaagtgaaaagctgaacatgacctagacaagaagaatctgaaaattgacatagaaataaagaatatgtaaagaaaaaagaggttgcatatattttcctagtggtaattagaagacaatgcaggagacttcagaattattgt

SEQ ID NO: 926078 - DNA, 625 bp, Homo sapiens
ctctggcagggtggtgccaggtagctgggcctattgtcaggtcccatgattgggcatacaggtacaagctgtggtggcaaaaccacccctatgaactttatgaaattaatcagggaagaagggagggggaacaaaaataaaccaagcttgcagctcatttcatattaatcattagatcagcttactctctgacctgcttcctcatagttacttggtgcctattttcctagaatcatgtagatcatgttacaagattatagttccccttaatttccccatagaaaacaacttgaacagtatgaagcgttaagttttccctttgagacattccttcaagttgtatgtacaaatgaaactattacatcagctggtctaaaggacttcactggctcagctggtctgagggaccccataataagctgactcaccaaagaatgcagttttcctatcctgatgactttatgccccttgtcccaatcaatcaacaacscaattttccagccccttgctctccaaaatccctttaaaaactctatcctaggactccttagagaggcagatttgagggactcccccagccctctcactcagtgccctgtgatcattacattctttctctgctacc

SEQ ID NO: 926079 - DNA, 582 bp, Homo sapiens
ttagagagcagacaaccggtctgactagaatttgccaggctggaatttcctaatcctagcaagcgtgagggcactgcaggagacaagggcatatttcatcccttatattcaactgcataagacagacactcccagagttgccgtcaacagacctacccctgagaatgcattccttccccagggttattccttgctggtaaaggaattcagcgatatttcttctattcactttctgcaagaagagaaatatgwgtctgttctgcccggacccgcaggcagtcagaccttatggttatctcccttgtttcctgaaaatcgctgctaacctgttcttttttaggatgcccagatttcatattgttcaaacacacatgttttacaaacaatgtgtgcagttaaggcaatcatcacagggtcctgaggcaacatacatcctcagttgacaaagatgacaggattaagagattaaagacaggcataggaaattataagactgttgattggggaagtgataaatgtccatgaaatcttcacaatttatgttcagagattgcagtaaagacaggcataagaaattataaa

SEQ ID NO: 926080 - DNA, 741 bp, Homo sapiens
ggggaatagaaaccattttgaaatatgacagagaattctgttcttaacaagtctcactcaggagaaattattatttaactgcagcctaacttactggagttttatcagagtctaactggcttagaggaaggggaagggaaacacccaactccaaaccactcttactatcctgtcccacataaggcagacagagaagagtaaaattcaacaaaaaactgagaaacattcatgtagctcacagtccagagacactagctcactcaaaagactaagacataatcatatgattgytaagattcttcttatcccctgcaacatatcaccacattattaaaggcctattcacagcagttactttacccattacacgttgtcatgctaccaagagaaaatctcaagacatactaaaaggcaaataatatctctgccacatctgaatctggttttgatgcttgctttgtttcttctagaaattactaggccaggaattaaaaaaaaaaactgtggtgaatatgttaagatctctaatggataagtaaataacaatataaaatgggcaatgtaagcaataaacactataacagaagtggagaacacctttgatgggctttacagaaacaaatagaaaacagttacaaacatgatagatgtgaatcctactatatcaataaccactttaaatgtcaatgatctaaacacaccaattaaaagagagaaattgtcagactgcacaaaaggaag

SEQ ID NO: 926081 - DNA, 584 bp, Homo sapiens
tttattttcagtctgtgcgtgtctctataggataagtgtgtttcttataggccacagatcattgggtgtgtttttttcatacattcagccactctgtgtcttttgattgtagggttcagtccatttacattcaatgatagtactgataaataagcacttatttgtgtcactttgttatttgttttctggttgttttgtgstcttctctttcttatttctttctttcctgccttcctttagtgaaggtgattttctctcatgatatgatatcgtttcttgacatttatgtttcctgtaatcattgtatttcttttgtttaatgttaccatgaggtaacgggtacaggaaatacatgttttgtgtgatcattgtatttcttttgtttaatgttaccacgaggtttgcaagtactattttataacccattattttaacttaataacaacttaacactgtttacataaacaaacacacaaataagcaaagagaaaactaataaaaacttagttttaagttttgaagtttaatttatgccttaattttacctccctgctttgtaacgttttttagtttctgttgtatct

SEQ ID NO: 926082 - DNA, 584 bp, Homo sapiens
tttattttcagtctgtgcgtgtctctataggataagtgtgtttcttataggccacagatcattgggtgtgtttttttcatacattcagccactctgtgtcttttgattgtagggttcagtccatttacattcaatgatagtactgataaataagcacttatttgtgtcactttgttatttgttttctggttgttttgtgctcttctctttcttatttctttctttcctgccttcctttagtgaaggtgattttctctcatgatatgatwtcgtttcttgacatttatgtttcctgtaatcattgtatttcttttgtttaatgttaccatgaggtaacgggtacaggaaatacatgttttgtgtgatcattgtatttcttttgtttaatgttaccacgaggtttgcaagtactattttataacccattattttaacttaataacaacttaacactgtttacataaacaaacacacaaataagcaaagagaaaactaataaaaacttagttttaagttttgaagtttaatttatgccttaattttacctccctgctttgtaacgttttttagtttctgttgtatct

SEQ ID NO: 926083 - DNA, 617 bp, Homo sapiens
ggccccatccaaagccctgggagtggtcaagcagtgggtccacataataatgttatttatacattttgtgaaagtatcttaactgcaaacattttataatgctaggtttttttttcaactttagctatcactccattacattttccatgatgttaggtgtcaagtgtctttggaatggtcagggacatttttggcaatcagctaaggggtcatcaagttggaagtacatttagttggkctccagaaatatatcgatatgatttgcagtcccctctatgagtagttactgtggccatttggaagcaggaatggcttcagataataaactaatgacctctttttttattcatcacttatttaaaattgtgcatttttttttcttcaaaattatactgcaaatcatttcaggctctacaaaacctgtctagtattctttgttctacactatgttaaaaatagcttcagtgaggtccttctccttatctgttcttaaatctaacaaattagatatagaaaacaatcccttaattattatatattggataaccctatttttacattactatcctaagcatcatggctacaaagaggaattcaacaagattccttcctttaag

SEQ ID NO: 926084 - DNA, 699 bp, Homo sapiens
  misc_feature 94, 95, 96, 98, 100, 110, 188, 218, 222, 223, 236: n = A,T,C or G
agcccagcacagcgaggtgagagcatccattcatgtgggggccagcagagtcatgtgctctggcaggaccagccctggtctccagactctgacnnnananctgattaganaacgcaacaaggaaatgcaatttaattaaatctacatgcatttgtcaagtgccactaaagtgctgaaaggacccgganatgattcttgccaccaggagtcaacttgtnaacnntccttgacggcanttcttagctttgagagtaggagaaagaactatagatgccttctaggtaaaagtgtacaatacctggaggcccccctcatccgaagatcccctgtgaagaccccctgctcaatgcaggggatrgggggagacatgcacatgtctaatgttaaccaaagcaacgtgatcaaggtagtatagaaggaagggcctccactaaaagaaggggtggtcagggaaagatccggagagggcttggcactcgagctgcccctaaaggacacggatttcagcagtcctgggtggcagtaagcaggagaacagagagcattatggacacacactgggtgacatcctggcacagctcagaggtcagccctggtgttggggacagaagagaaaatgaatgtcccaatgtttcctttgtccattcacagccattttttgagtatcttcatgtgtgtcagactctgtaccaggtacat

SEQ ID NO: 926085 - DNA, 595 bp, Homo sapiens
gaccagaacagtgagttttgacaggtggaaacaaggaaacaaaacaatagaaaataaaaaagtggttaacttcaaattacttcaggctagttttttaagggctaaggcagaggggacttccttattatactgactcaggtactggaatctcctgttttcaggaaaactagtctgccttaaaattgcagtttgcttatgaggcacttaacatgagtggctccattttgttttggtcctgtctgttggggcctagtgcaggggctcagtccaagacaatggcctctcattttgtttaacagggtataggtccaaaaaaggagagaagaattattttcctttttaatagaagaccatatagtggactagtgccactaaatatttgttctgatatcataaatgtcatctttrccagctctgtactggaatacaacagggattatctgcaaaaataattgttgttggatattacattatattctccaatcaaatatagtattttttccttaattgtaaatgggtcattctttctatcatttaacaattcaaattgattttttacatgactacacacctacttgcctcatccatccacaac

SEQ ID NO: 926086 - DNA, 620 bp, Homo sapiens
aaaactcaaggtgctttttccaggcctgcccaaggacacccacggaccaatcagcacacacttcttccttccagagcttataaagaccgcagactcatctagattcacacagacgttgggacaacctgcctgtggaaaggagctacccactgtaggtctcctctccactgagagctagactctcaccaggacaacctgcctatggaaaggagctacccactgtagatctcctctccactgagagctagactctcaccaggacgacctgcctatggaaaggagctacccactgcaggtctcctgagaactgttctgttgctcagtgaaggtactctctgccatgctcaacctccagttgtctgcaaacctcattsttcctggatgcggcacaagaacttggaacccactgaatggcgggactgaaagagctgtaacacaaacagggctgaaacatgctccgccacttgccatgttgcgggtgacgagaaggagagaagagctggggacctttggggagcccagacccaggggctccttgagccaaggctgtgacaccctctttgggactctgtggttcctggcatctccaggcttcaagatgccaccgcggtcctctcgta

SEQ ID NO: 926087 - DNA, 615 bp, Homo sapiens
gtatatcttctttggtgagatatctgtttagatcttttatacatttttaaattttggattgttctttttctacttgagttttatgagttttttatatattttagataacagtcctttaacaggtatattgtttgcagatatttttctcccaattctgtggctttgcttcatattctgtttaccatgtcttttacaaagcagaagttgttaatttttatgaattctggctaaacaattatttatttcatggattgtgcctttggtgctatatctaaaaaggcattgcsaaacccaaggttatctagattttcctgatgttatcttctaggagttttataattctgcattttacaactaggtctatgaatcatgtttagttgatttgtgaagagtgtaacatctctatctagattcacttttgttttttgtatatggatgtctagttgttccaacatcgtttgttggaaagagtatctttctccattgtattaccattgttcctttgtcatggatcaggtgactatatttgtgtgggttggtgtaccattttttaattggtttctatactatttctaatattccttctaataattttaagaccaaaccactctcctt

SEQ ID NO: 926088 - DNA, 731 bp, Homo sapiens
caacatcctccattactgcttgattttctaatcgaccccaatcaggtctgactcccattaactgttcaaaggaaacaggcacaggtagttgtgcttgtgtattttcccttacctgagtttgagcttcgtcagcccaccaggttttaaactgcaagtactgaggtggagtgaaaacagattttgttaaagtatcccaatcatatggtattaatctattatcaagagaaacttttcaattaagtttgcacaaaaggagaatttggccsatattgactaatggcttgaattcctttaacagcttaaaaggaaaggtggtccaattagctatattctttcctccctgctggactatagttacgggaaattgccatgcttcaaggtctccctcggctctagccttttgaatagaattttgtatagcaccaccaattgctccaggttttaatgttgcaactacaggagcagtaagttttgtagctaattcatcttctggcccattaaggggagagaaaggaggtggcctttcacttaattcagcagttggaaccgacgggctagtaaaacatacttttttcagtttccctttcttttctttaattttctccattttctgttcctcacattcagaatctgaagttagatttttacactcatcctcctcttcttcatctgaatctgcctcatcatctgtttgaaatggctcaagagctgcttttattagcgcccacatt

SEQ ID NO: 926089 - DNA, 535 bp, Homo sapiens
gtttgtgtttaagctaagagttattacaaaaaagtctaaaagctacataattaaaatgtatataaagtaagaaagtcacaataaattaaggttgatttattatcgaagaaatacattttaataataaatttagtgtactctaagtgttaaatgtttacaaagtgatgtcctaggccttcacattcactcaccacttacyctctcactcacccagagcaacttccagtcctgcaagcttcatttgtgttgtgtcctatattccattttttatcttttacaccatatttttactgtaattttgctgcaattacctacagcattcagtaaagtaacatgctgtacagtgttgtagcctaggagtaataggcaacaccacatggcccaggtacagtaagctgcatcatctaggtttgggtaagtacactctatgaggctcacacaacaaaatctcctaacaacccatctctcagaacatatcttccttattaagcaatgcatggtggaagattgatttgtaaaactcttcccaaccact

SEQ ID NO: 926090 - DNA, 535 bp, Homo sapiens
gtttgtgtttaagctaagagttattacaaaaaagtctaaaagctacataattaaaatgtatataaagtaagaaagtcacaataaattaaggttgatttattatcgaagaaatacattttaataataaatttagtgtactctaagtgttaaatgtttacaaagtgatgtcctaggccttcacattcactcaccacttaccctctcactcacccagagcaacttccagtcctgcaagcttcatttgtgttgtgtcctatattccattttttatcttttacaccatatttttactgtamttttgctgcaattacctacagcattcagtaaagtaacatgctgtacagtgttgtagcctaggagtaataggcaacaccacatggcccaggtacagtaagctgcatcatctaggtttgggtaagtacactctatgaggctcacacaacaaaatctcctaacaacccatctctcagaacatatcttccttattaagcaatgcatggtggaagattgatttgtaaaactcttcccaaccact

SEQ ID NO: 926091 - DNA, 599 bp, Homo sapiens
atcccagcagttggaacttcagttcctacaagcttcaccactgtgagataaaattctctggggccctaaataaacttggaaggtagtctagaccacaaagattgcaactcctaggtgagtcctagtgctgaactaagcccagagacaacgcactggaatgacaggtgacctactgagacaccagtctgaaaagctaaaaaggagtgctggcatcaactcttccctaactctgggctgcacagcccatggctcygaaagagacccgttccttctgcttaaggaggaaaaagagaatagtggggaggactttgtcttgtttcttggatattagcccagctacagcaacccagggtaactgtcagagtcatgaggtcccttttccaagcccagctcctagacaacatgtctagacacaccctggatcagaagggaagctgctgccttgaagtaaaggactcagtcctcacaggattctcacctgctaactaaagagctctagggccctgaataaccagcagtgacaaccaggcactacgttgagggcgtttggcgaaactctgaaacttgctggattcaggtcagactcagcacattcccag

SEQ ID NO: 926092 - DNA, 599 bp, Homo sapiens
atcccagcagttggaacttcagttcctacaagcttcaccactgtgagataaaattctctggggccctaaataaacttggaaggtagtctagaccacaaagattgcaactcctaggtgagtcctagtgctgaactaagcccagagacaacgcactggaatgacaggtgacctactgagacaccagtctgaaaagctaaaaaggagtgctggcatcaactcttccctaactctgggctgcacagcccatggctccgaaagagacccgttccttctgcttaaggaggaaaaagagaatagtggggaggactttgtcttgtttcttggatattagcccagcyacagcaacccagggtaactgtcagagtcatgaggtcccttttccaagcccagctcctagacaacatgtctagacacaccctggatcagaagggaagctgctgccttgaagtaaaggactcagtcctcacaggattctcacctgctaactaaagagctctagggccctgaataaccagcagtgacaaccaggcactacgttgagggcgtttggcgaaactctgaaacttgctggattcaggtcagactcagcacattcccag

SEQ ID NO: 926093 - DNA, 508 bp, Homo sapiens
aggattctcacctgctaactaaagagctctagggccctgaataaccagcagtgacaaccaggcactacgttgagggcgtttggcgaaactctgaaacttgctggattcaggtcagactcagcacattcccagttgtttcgactgcaaggtgagattccttctacttgagaaaagtggagascagaataaagggggctttgtcttgcaccttaggtaccagctcaaccacagagggttaaagcagtaagcaggctctggaggttcctgattccagaatgtggctcttggacagcatttctggacctgccctaggggagcccactatcctgatggctgagtcccaggccaggtagcattcaccacaagttgactgaagaatccctgagccataaggtagcattggtggtagtctggcagtactcgctgtgggcctgtgatgacagtgaccatgagacgagggtcacctgccattcaaaagggaagaaaaggatagaaaggactatgtatt

SEQ ID NO: 926094 - DNA, 508 bp, Homo sapiens
aggattctcacctgctaactaaagagctctagggccctgaataaccagcagtgacaaccaggcactacgttgagggcgtttggcgaaactctgaaacttgctggattcaggtcagactcagcacattcccagttgtttcgactgcaaggtgagattccttctacttgagaaaagtggagaccagaataaagggggctttgtcttgcaccttaggtaccagctcaaccacagagggttaaagcagtaagcaggctctkgaggttcctgattccagaatgtggctcttggacagcatttctggacctgccctaggggagcccactatcctgatggctgagtcccaggccaggtagcattcaccacaagttgactgaagaatccctgagccataaggtagcattggtggtagtctggcagtactcgctgtgggcctgtgatgacagtgaccatgagacgagggtcacctgccattcaaaagggaagaaaaggatagaaaggactatgtatt

SEQ ID NO: 926095 - DNA, 617 bp, Homo sapiens
ggtggaataagcccagcagatatgagtgaaacttgagcagaagcaccaccagccacagaggtttccggctggcaaagtggcacccaaaggatcctgtgtcattactatagttggagataggaccttcaaagaggtaattaagtttaaatgaagtcaatgagcrggccctaatctaatatgattcgtgtccttatagaaacagaaataccagagatgtatgcacacagagaaaaagctgtgtgatggcacagcaagaaggtggccattttggaagccaagatagaagtattagaagaaaccaaacctgctgacagctaggtctcggacttccagcctccagaactgttagaaaataaattctattgtttaagccactcagtctatgatattttgttatggcagtcttagcaaactgatacactaggaatttcctttaatagtgtttgacatgcatatctgctggagattaatctcactatctttgtatgtatgaaaaatttccccttcattgttgaaagatatttttgctggtaaggaattgtgggtggacttttttcttaagtactttaagactgttgtttcattgtcctatggcttgcattagtttgttattatcc

SEQ ID NO: 926096 - DNA, 617 bp, Homo sapiens
ggtggaataagcccagcagatatgagtgaaacttgagcagaagcaccaccagccacagaggtttccggctggcaaagtggcacccaaaggatcctgtgtcattactatagttggagataggaccttcaaagaggtaattaagtttaaatgaagtcaatgagcaggccctaatctaatatgattcgtgtccttatagaaacagaaataccagagatgtatgcacacagagaaaaagctgtgtgatggcacagcaagaaggtggccattttggaagccaagatagaagtattagaagaaaccaaacctgctgacagctaggtctcrgacttccagcctccagaactgttagaaaataaattctattgtttaagccactcagtctatgatattttgttatggcagtcttagcaaactgatacactaggaatttcctttaatagtgtttgacatgcatatctgctggagattaatctcactatctttgtatgtatgaaaaatttccccttcattgttgaaagatatttttgctggtaaggaattgtgggtggacttttttcttaagtactttaagactgttgtttcattgtcctatggcttgcattagtttgttattatcc

SEQ ID NO: 926097 - DNA, 600 bp, Homo sapiens
ttgagataatgattttattttctttgaatatatgcccagaagtagcattgctggatcatatggtagccctatttttaattttttgaggaccctccatattgttttttagaaaggctgtgccaatttgcattcccaccaacaatgcacaagtatttccttttctccaccttcagtaacacttgtcttttgactttttggtaatagctatcctaacaggtgtgatgtgatatctcattgtagttttgatatttatttccctgatgattagtgatgttgagtacctattcatgtacctgttgatcwtttgtatttcttctttggaaaaacatctattcaacttctttgcccatttttaattgagttgtttggctttttcgttattaagctgcatgcgtttcttatgttttggatgttaaccccttatcagatatatggtctgcaaatatttttcccattagtaggttggaatttcatttagttgattgtttccttcactatgctaaaacttttaaatttgatacaagtcccacttgtttattttgctttggttgcctgtactttgggatgtcatatacaaaagtaattgctaaaatcaatgtc

SEQ ID NO: 926098 - DNA, 613 bp, Homo sapiens
atttaaatctttttggatttattaagaattattttggggcccaacatatgatctatcatggaggatgttctgtgtgtgcttcaggaaaatgtacattctgttgctgttgatagattgttctgtatacatacatctgtcaggttcatttggtctaaagtactttaagtccagtgtttccttattaattctctatctggatattatgtcaactgttgaaagtggagtattgatattccctcccattattgtattgctgtctatttctccctgcacatctattaatacttgctttatatatttaggtgttccagtgttgggagaatatatagttacaatttttatatccttttgataaattgacacctctttcattayataacaagcatatttgtctctttttacagtttttgacttaaagtctattttatgtgatagaagtataaccacttctgctctcttttggtttccatcagcatagaatatattgtttttaatccttcacttttagtctattgtattagaaaataaactgtaactgaaagtttccgacataccatggagacattttctccactgtcttggtgattagcatttggctcctcattacttatga

SEQ ID NO: 926099 - DNA, 613 bp, Homo sapiens
atttaaatctttttggatttattaagaattattttggggcccaacatatgatctatcatggaggatgttctgtgtgtgcttcaggaaaatgtacattctgttgctgttgatagattgttctgtatacatacatctgtcaggttcatttggtctaaagtactttaagtccagtgtttccttattaattctctatctggatattatgtcaactgttgaaagtggagtattgatattccctcccattattgtattgctgtctatttctccctgcacatctattaatacttgctttatatatttaggtgttccagtgttgggagaatatatagttacaatttttatatccttttgataaattgacacctctttcattacataacaagcwtatttgtctctttttacagtttttgacttaaagtctattttatgtgatagaagtataaccacttctgctctcttttggtttccatcagcatagaatatattgtttttaatccttcacttttagtctattgtattagaaaataaactgtaactgaaagtttccgacataccatggagacattttctccactgtcttggtgattagcatttggctcctcattacttatga

SEQ ID NO: 926100 - DNA, 646 bp, Homo sapiens
cctctctgttcagacaattctatcataaccttcacaagagaatttaaaacctgttgtgtaactgtagcttttacagtagaatcttctataaagcctatcacaaaggatagatttctaatcattgcttcttttattccaaactatggaaaaaggacctaacaaatgatgcccttctagaagagtgaaggcctcttggcaatgtgctctttaacccataatatgagtttagaggagtgaaccaatgttctgtttctgattgattataatatataaggttatccatatayaggctggctgaaaactccttcacaaataaaagtctaccccataagcccacataacagacacgtttttccacttctattgttcatagaggcataagcaaggaaaaaaaattcaaagataagtctcttaatagtagagaagtcttgacccatgatcttgggaaaagctgttcagatcaaggatgccatcttttctggggagtaactttcctgattagctttaccttaagggtttcagggggtgtacagtcccaagagtgtgatgggacactgctcaattgtgagattatgaacccaaggtttaaggtcctgaagttttgccgtattgtggatatcaaggacagtctttctctgatgttctc

SEQ ID NO: 926101 - DNA, 565 bp, Homo sapiens
agttacctggagatctgcctaagcatgaagcagagagggtcccccaacaccaagatctttgcacaggaggagtggggtgactcagactgctgaaccaggaaagcagttgctctgagtgacaggacatctgcctgagcatggagtggagagggccccccgcctccccagcccatgcatcaggatctctgcacaggaatggtaggataactcagacggttgaaccaagtgaacagttcctctgaatgcctgaagatctgcctgggtgggaggcagagarggctcttctgcaccaagctatctgcacaggaggggtatggtgactcaggcaagctggtgctctgaatgccttgaaatctgtttgggcatgcagtaaagagagactcaccacacaaggtctctgcacaagagaggtagggctattcaggttggtagactatacaagtaggtgctctgaatgcctggagacctgcctagacaagtgtcagagaggacccctgcaccccatactacaatctatgtccaggaagggttgggtggctcaggctgctggaccaggcaaatgggt

SEQ ID NO: 926102 - DNA, 601 bp, Homo sapiens
gaaatcaaggcagaaatctagttatttgaaacctgtgaaaacaaagagacaatgtaccagaatgccttggacacagctaaagcagtgttaagacgaaaatttataccactaaatgtccacatcaaaaaacaagatctcaaattgacacacagagcatcacgactaaaagaactagagaaccaatagcaaacaaaccccaaagctagcagaagacaagaaataaccaagatcagagtggaactgaaggagatagagacaggaaaaacccttcaaaaaaatcaatgaatcaatgaaaaaataaaatagaccactagctagactaataaagaagaaaatagagaagaatcaaatagataatttaaaaaatgataaaggggatatcaccactgacctcacagaaatacaataatcagagaatactataaacagctctatgcaartaaattagaaagtctagtaaaaatggacaaattcctggacacatccaccctcccaagactgaaccaggaagaagctgaatccctaaatagaccaataacaagttctgaaattgtggcagtaacaaatagcctaccaaccaaaaaaagaccaggacctgatg

SEQ ID NO: 926103 - DNA, 580 bp, Homo sapiens
acctttgctgggactacatcacagctcaaattatcccttgtcccaatctgcccccttcccttttcttccatgggagtttatcccaagagcactccctaataagccctacatactcatctctgcctcagaacctgctgccaaagagacatatatatgtgctggagctgccgcaacaaagtgccactgatgaggtggcctaaacaacaccgacttattggcttacagttctgcaggctggaaatccatgatcaaggygtccgcagcattggttccttctgagggccgtgaaggaaggacttgctccaggcctctccccttggcttgtagagaactgtctttatgttcacatggcagtctccatgtgtatagatctgtctccaaatttcccccccaacttttttttttttttttttgagacagagtcttgctctgtcacacaggctggagtgcagtggtacaatctcagctcactgcaacctccaccttttgggttcaagctgttctcctgcctcagtctcccgagtagctgggactacaggcatgcgccaccacacccagctaatttttgtatttttagtag

SEQ ID NO: 926104 - DNA, 616 bp, Homo sapiens
caggaaggaacacacctggtgggtacaatgagcagtaaggtggccaggaatatccgagagggagactgggaggcgatgcagtcagagacacgatggggaccttgtgagcattgaaatgactttgaccttcaccctgagtgaaacgggcagccattggaaggttttgttttattttttctgagactgagtctcaacctattgcccaggctggagtgcagtggtgtgatctcggctcactgcaacctccacctcccaggttcaggagattctcatgcctcagcctcctgagtagctgggattacaggcgcccgccaccasgcctggctaatttttgtatttttagtagagatggggtttcagcatgttgatcaggctggtctgaaactcctgacctcaagtgatctgcccgcctcggcctcctaaagagctgagattacaggcatgagccaccacacccagcccattggagggttttaaacagagaggtgatgtgatctgaattaatatctagtaaagatcagcccaatcatttaagtatttgagcctttttcagaaatcatgcactgaaatccggaaagagacatagctgccctcctttccaagggtccccagcagg

SEQ ID NO: 926105 - DNA, 596 bp, Homo sapiens
tggaatgtggctactgcaaatacgctgtgcccgggcccggtgcagtggctcacgcctgtagtcccagcactttgggaggccaaggcaggaggatcacttgaggctaggagtttgagaccagcctgggcaacatagtgagaccctgtatctaccaaaaattcaaaaattagccaggttgtggtggtgtgtgcctgtagtcctagctccttggggggctgaagtgggaggatcacttgagccagcaagttcaagactgcagtgagctatgatggtaccactgtactcragcctggacaacagagcaagaccctgtctcctaaaaaacataaagtaaaattttaaaaatacacagtgaattttgaagattcagtatgaaaaaagatattaaaaatttttttatattggttatatgttgaaatggtgtgctgggtatattgggttaatatattattagaattaatttcatttatttttatcttccattgtggctcctagagagtttaagttacatacgtagctggcattatattcctactggacagggctgcataagcatccgtccacttccatttccctctgttaagaggtcccaggca

SEQ ID NO: 926106 - DNA, 514 bp, Homo sapiens
  misc_feature 479, 480, 481, 482, 483, 484, 485, 486, 487, 488, 489, 490,491, 492, 493, 494, 495, 496, 497, 498, 499, 500, 501, 502,503, 504, 505, 506, 507, 508, 509, 510, 511, 512, 513, 514: n = A,T,C or G
tcaaaaaaaaaaagtctgaaagagcacaaataaagaatctaaagtcacacctcaaggaactagagaaacaagaacaaaccaaatscaaacccagcagcagaaaaaaaataatcaacgtcagagcagaactaaatgaaattgaaacacacacacacacacacaatacaaaagataaatgaaacaaaaagctggttctttgaaaagataaacaaaattgatagaccattagtgagattaaccaagaagagagaagattgaaataagctcaataagaaatgaaatggaagatattacaatgaacatcacagaaatacaagataattcaaggctacaatgaacacctttatgcatgcaaactagaaaatctagaggagatggataaattcctggaaatatacaagcctcctagactaaatcaggaaaaaataaaaactctgaatagaccaataacaagcagtgagattgaaatggtacatttnnnnnnnnnnnnnnnnnnnnnnnnnnnnnnnnnnnn

SEQ ID NO: 926107 - DNA, 745 bp, Homo sapiens
ttctattacctgactttgtttcaccgttctggccacaaacactttatacgcatttattccatgggtggaatgttggcgagtaatttatcatatcaactaatgaataataactatgacattacagtcccgatctaggagacaccaataacatctctgaaagtatagggattgtgttgatacaagcacttaatccactgctacccaacgactgctcacaaaaaacaaagccagaaacagcggaacaacctatgtgttgtctcacaactcttattattattttttattattattttttcttgcgatggagtctcgctctgttgcccaggctggaggacagcggcgtgatctcggctcactgcaagtttcgcctcctgggttcatgccattctcccgctcagcctcccaagtagttgggactacaggcgcccaccatcatgcccggctaattttttgtatttttagtagagacggggtttcaccgtgttagctgggatggtctcaatctcctgacctcgtgatctgcccacctcggcctcccaaagtgctgggattataggtakgaacgaccacgcccggcttcacaactcttttctgtctttcttctcaacaatttccaggtctgcctggggttcccacttctgtatttttctggaagaaatggtggatttctggatcattgatttcctcttgaataattgaatacacttttgagaactctctcaagaagaggataaaattgtctgaa

SEQ ID NO: 926108 - DNA, 567 bp, Homo sapiens
atcaaggctctagggtacattttacagaacccagaattgagccacacaatctatagccaaatgatctttgacaaacttaacaaaaacatacaccagaaaaaggacaccccattcaataaatggtgctggggaaattggaaatgaacatgcagaagaacaaaactagacccctaccctcaacacatacatactcaacacaaaatgaattaaagacttagatatgagacctcaaactataaatgtactcaaakaaaatacgaggacaactcttctgggcactgggcgaggtgaagaatttatgactaacaccacaaaacacacccaagaaaaaaatagacaagtgagaattaaactatagaggtatttcacagcaacagactgaacaggcaagttgcagaatgacagaaaattttcgcacaccttgcctgtgacaaggaactaacatgaagaatttacaaggaattaaactatacaacaacaggaagaagaaccaaataaccctattaaaatgagcaaaggacgtgagtagacatttccaaagaacacatacaaatggataataaatat

SEQ ID NO: 926109 - DNA, 756 bp, Homo sapiens
atgtgcaaacttatcaggaccaccaccggttaggaagagacagttactaaccctgaataagactaattcagcctcccgatccctgtaaagatacagagaatataacagcaaaatctatgaaataggatcaggcgaagggatggcaaagctcaagtccacatttcttgaagtcmacaggaggcacatggtcctgtctcacgtcacagggaaaggggaggcattggcttctatcccaggttcttgtaggtcgctgatgttcactctgaaataaatcttcaaaaacacacattggtgccttccacattttcttagactcctctgggagcccaaacttggccagaacctctggcctggagagacatgaatgagcatctggctcttgacctgaggtcgctggtcccggaattaacggaagttgccaccagctccttacagggcacgttcatgacatttctccagaagagagctccagagcaataagcttcctcattccccaggtaatcagtccttctctaaacccgaagtcagtttagggtgatccagggctactccctgttccctgtctgttccttacaggggtgctgtgggctttgcagtgagagggacttgggttcaaatcccccaccaagcaaatccccctacctggggccgagcttcccgtatgtgggaaaatgaatccctcaggttgattgctgcaagcaatgaaattcaactagaaaaataggtagacgtgagggcaagctgtctgtcatttag

SEQ ID NO: 926110 - DNA, 787 bp, Homo sapiens
ggtgcccaccaagattaagggtaggtctgcctttcccagctcactggctcaaatgttaatctcctttggcaacaccctcacagacacacccaggatcaatactttgcatgcttcaatccaatcaagttgacactctgtattaaccatcacaagtccaacccttgtcaacttgaacccatacgaatctcctgagatcatacataatcttcaaataaagacaataataaggtcataattacacctaatgtaatacaactatcttttgtacaaccagaaatgcaccaatctcccaacccaagtgctrttatgtaaagttaagaacacttaaatgctgatatgaagtcaataaattttatgtcacatgataaaggaaaaaagaaataaaatgaaggaattttcttagtacaagtgtgtacatgcacaaacatgtttttaacaaaagaagaaggaaatactgatgacaattacagtcctcatttctgcaacagatcacgtggttgtagctggtattgatgactacttcttctactaccgattctgtattccctttgccttcagcaagcatcacagcaggtagagttttttctcctagtggagtgatgcaaaccttcattcctgaagggtctgggccatttgtagtcctgcctggattgggctgttgtagtttcccgttgaccttaatgacagggcagggtaatgttaagagatgccctaatggatctcctgtattccatacatattcttccttacctccattgtggagtaatagactgattgcatcttgata

SEQ ID NO: 926111 - DNA, 747 bp, Homo sapiens
agatggtgcccaccaagattaagggtaggtctgcctttcccagctcactggctcaaatgttaatctcctttggcaacaccctcacagacacacccaggatcaatactttgcatgcttcaatccaatcaagttgacactctgtattaaccatcacaagtccaacccttgtcaacttgaacccatacgaatctcctgagatcatacataatcttcaaataaagacaataataaggtcataattacacctaatgtaatacaactatcttttgtacaaccagaaatgcaccaatctcccaacccaagtgctattatgtaaagttaagaacacttaaatgctgatatgaagtcaataaattttatgtcacatgataaaggaaaaaagaaataaaatgaagkaattttcttagtacaagtgtgtacatgcacaaacatgtttttaacaaaagaagaaggaaatactgatgacaattacagtcctcatttctgcaacagatcacgtggttgtagctggtattgatgactacttcttctactaccgattctgtattccctttgccttcagcaagcatcacagcaggtagagttttttctcctagtggagtgatgcaaaccttcattcctgaagggtctgggccatttgtagtcctgcctggattgggctgttgtagtttcccgttgaccttaatgacagggcagggtaatgttaagagatgccctaatggatctcctgtattccatacatattct

SEQ ID NO: 926112 - DNA, 642 bp, Homo sapiens
acagataagaaaggctacacaggtgacttgcctggaaatgcccataatagaaaattccatcccctgacacatgcgcaggaaggggaacaaagcaatatggagtaactcaagctaagggcccacatgtgcgttaggaggacgggatggagcgacgagaaatttgcaccttatgcaaatgagacactaatccctcatcggtttcctatagaagcctttgcattcaactgtgaaaacagcaacccccttccgggtcccttctcagcagcagagagctttctttcacttatgaaactttcgcctcaacctcactttttgtgtccatgctccttaattctcctggtcttgagacaaagaactckgggtgataccttacaacaagagactgcaacatcatggtgcacagatgagactgtaacagttacctagagctggagagagattgggggaagaaggggtgggtgttcttaccattaaaggatatgaaatttctctggggggtgatgaaaacattctaaaattggttgtagtgatggttgaacaattcagtgagtatagtaaaaaccatttaattctacattttaaataggtgaattgtgaattgtatgtcaatgaaactggtactcccaaaaagaaaaaaaaaat

SEQ ID NO: 926113 - DNA, 610 bp, Homo sapiens
cagtttcaggtgttttgtttgtttttgtttttgtttttttttgtttttgtttttgtttttttgacagtgttgttctgtcacccaggctggagtgcagtggtgtgatcttggcttattacaacctccacctcccaggttcaagcgattctccttcctcagcttcctgagtagctgggattacagacacccatcaccatgcctggctaatttttgtattttaagtaaagacggggtttcaccatgttggccgggctggtctcaaacttctgacctcaggtgatctgcctggcttggcctcccaaagtgctgggattacaggcataagccactgcgcccagccccagtttcaggttttttctatctattgaaactgcctttccctggcattggctgtaaccaattattattttagayagctaacaactgcctgaccatcacctgatggtcacctgacattcctggtggtagggggccctctcctgccctgttcacacctgactacataccgtaacaaagtgatgaaggagctaggaggaggtaaaaatggataacttgaaccaatgggtagaaataagagagccaagtcaactggagaaggattttgtaacaa

SEQ ID NO: 926114 - DNA, 796 bp, Homo sapiens
attactcgactaaaaagtaaaagagggaattctaatcatgtaattagtaaggcagcagaaggcattttaatatgtatctttcacattcttctcacaattttccaagatgctcaccaagacagtataagaactataaaaccatctgctgttgcaaaaaaagtacttttttttttttttagatggagtttcactcttgttgcccaggctggagtgcaatggtgcaatctcggctcaccgcaacctccgtctcccaggttcaagcaattctcctgcctcagcctcctgagtagctggaattacaggcacctgccaccacgcccagctaattttgtatttttagtagcaatgaagtttctccatgttggtcaggctggtctctaactcccgaactcaggtgatccaccygcctcggcctcccaaagtgctgggattacaggtgtgagccaccacgcccggccgcaattttcttctccttaccatcaggtagcactaaggttctgcctgatggactgacagggtggtattagcaaagacctagccagccgctaggaaaaagagatattccacaaaagccatggcactatttcatacactctaaagacaaaagaagaaaaagcctttggctactgaaatatacaaagctttttcataagctccttcatgaagttcacagtaaactgtgcaggacctggtgattctggaggagagattatgtgccttctttggtaagcataagtgagtggttcataagcactctccaaaaggtggaagaaattttttaaaggtgaagagtcag

SEQ ID NO: 926115 - DNA, 636 bp, Homo sapiens
cctaagggagcatttaaaatagccctagccagagggagaattgcagatcccagtggtccaaacttgactgcctgcaaacctcacaactgagggctacagcactctgagcctccaagtaaacttaaaaggcagtctagaccataaggactgcaattcaggcaagtcctatagctgaattcagcccagggacagtggactgaggtggaacatgatacacagaaacatcatccaaggaagcaaaaagagtgctgtyatcacccctcccctaacctcaggctgcacagcttgaggctccaaaagagaccccttcctttgtcttgaggaaagggaagagttgagaggagtttgtctttcatcttggataccaactcagccacagcaggataggacaccagtcagagtcatgaggtccccatttcagctctagctcccagatgacatttctagacacacctgggccagaagggaacctgctgccttgaagaaagagatgtagttctgccggcattcatcacctgctaaatgaagagtccttgggccccaagtaaacagcagtgatatccgggtactacatcaagggctttgggtgagcctctaagacttgctggcttcaggtgagtctcagcacattaccac

SEQ ID NO: 926116 - DNA, 636 bp, Homo sapiens
cctaagggagcatttaaaatagccctagccagagggagaattgcagatcccagtggtccaaacttgactgcctgcaaacctcacaactgagggctacagcactctgagcctccaagtaaacttaaaaggcagtctagaccataaggactgcaattcaggcaagtcctatagctgaattcagcccagggacagtggactgaggtggaacatgatacacagaaacatcatccaaggaagcaaaaagagtgctgtcatcacccctcccctaacctcaggctgcacagcttgaggctccaaaagagaccccttcctttgtcttgaggaaagggaagagttgagaggagtttgtctttcatcttggataccaactcagccacagcaggataggacaccagtcagagtcatgagktccccatttcagctctagctcccagatgacatttctagacacacctgggccagaagggaacctgctgccttgaagaaagagatgtagttctgccggcattcatcacctgctaaatgaagagtccttgggccccaagtaaacagcagtgatatccgggtactacatcaagggctttgggtgagcctctaagacttgctggcttcaggtgagtctcagcacattaccac

SEQ ID NO: 926117 - DNA, 722 bp, Homo sapiens
acaaggggtcaggagatttccctttcctagccaagggaagccgtgagtgactgtacctggaggagcggtacactcctgtccaaatactatgcttttcccatggtcttcacaactggcagaccaggagattccctcccgtgcctggctcagcaggtcccacgcccacggagccttgcttgctgctagcacagcagtctgagattgacctgggatgctgaagttgggcagggggtggggcatccgccattactgaggcttcagtaggcagttctatgctcacagtctaaacaaagtggcagggaagcttgaactgggcagagcctaccacagctcagcaaggcctactgcctctctagattccacctctgcgggcagggcatatctgaacaaaaggcagcagacagcttctccagacttaaacgtccctgcctgatagctctgaagagatcagtggttctcccagcatggcgttcaagctccaataatggacagactgcctcctcaagtgggtccctgayccacctcccagtaggggccaacagatacctcatataggctggtgtctcatactgagacacctctcagtaggggccaacagatacctcatataggctggtgcccctctgggacaaaggatcaggcagcaatatttgctgttctgcagtctctgttggtgatagccgggcaaacagggtctggagtggacctccagcaaactccaa

SEQ ID NO: 926118 - DNA, 818 bp, Homo sapiens
tcccagcactggaaatggtttgaaacagagagcagtggtaatggttaagggttaccaccaaaaggatgttgaggaaggtctgaattttaggagtgggaggacagccagagactaaatggaatgattcttcaaaattatataaaattattatgctatgtgaaaatattctaacagatttttaaaaactcaaatgtttcccaactccttttacaatgctagcgtaactctgacatcaaatctgatggtcataataaatgcaaaggggaagggataacacacaaaagttatgagcttaactattttgaagtgaacagttcagtagcgtgaagtgcattcacattgttgtgcaaccaatttccagaactcttttcaatttgcaatgttgaaactctgtacccatggaacaactccccactctgccttctccccagcccctgacaaccaccattctacttcctgtccctatgaatttgaatatactaggtayctcatgtaagtagaatcacatagcatttgtctttttataactggcttatttcatttagcataatgttctcaaggttcatccatattgtagcatgtgtcagaattgtgttcctttttaaggctgaatagtatgatattgtatgtctataccatattttgtttatccatttatctttcaatttgttgcttccaccttttggatattgtgaataatcatgctatgaacatgggtgtacaaatatctcttcaagactctgctcagttcttttggatatatacccagagtggaactgtcagtcaaatggtaattctatttttaattttttgaggga

SEQ ID NO: 926119 - DNA, 744 bp, Homo sapiens
taatgatttatccaaaatcttcatatgataaaagtgattttagtaagtaactgtaacatctcaggcttttgtttatcatgagacagacatgtattctcactttttttctaccctctgcccccaataatcacttatagaataaaatctgagttaaaaaagccatgcattttccaaccaaacatcttccctgacaaatattatttgaaattagattacagctatgtgccttctttttccactcctcagtggcagttagtggcagaaaacagatgatcaaagcaagagtgggattataatttgcacatattagcatagattattttaattgaatacaagtccagaaattacgtataaatggtttctaaatcaaatatggtttacaattaatgaagtacttatattaggttggtgcaattaccaaaaaccacaattacttttgcaccaacctcatagtaagaagcttacctgttaattcgctaaagtcaagatcacacctattcagataatcataaccatctagcagcttcagttgcaatatttcttctatctctcctaagatacagagagcaaaatcattattttattggattactttagtyttttaattttttaagacaatatgtgattatttgtacaatgctagagctctgagttgtgataaaggctatggtaaacaatcggtgttatatcatgcctccctcagtttttggacagccagtggttgcttaaataaataactaatgt

SEQ ID NO: 926120 - DNA, 672 bp, Homo sapiens
tgatgctgtgagacaatctaagaagaattaaaatttaaattcatgtattcctactttttcctctgttctctaactgtaatatattttaattacagatggaggaacagatagatgttagataaataggtatataatagatagatcatccaaaattcttattcttatggttttatgcagtcaatatttacctctaattttctacatgtttatccttccaattaagttcattacttcctgcacctttgatgtcatatatataaacaggaaataacacatggtggccgggatgtaragagagccacaagacttgtgaatacaatccacaggcaagcatgtggcgattccttttgcagttttggagggaatgccaaaccctatgtttgctgtggaaaagagtatggtagttcctcaaaacatcaaaatgatattgccatatgactcagcagcgccacatctcaggatagcaaaagaattgaaagcagagtcttgaaaaagtatttgcacatccatgtttgcagcagcattattggcaatagctaaaacgtagaagcaagtgaagtgtccaacaacagatgaatggataagcacaatatgatatatacatgcaatggaaaattattcagccttaaacatgagggaaatattctgacatatgttgcaacttggatgaaa

SEQ ID NO: 926121 - DNA, 672 bp, Homo sapiens
tgatgctgtgagacaatctaagaagaattaaaatttaaattcatgtattcctactttttcctctgttctctaactgtaatatattttaattacagatggaggaacagatagatgttagataaataggtatataatagatagatcatccaaaattcttattcttatggttttatgcagtcaatatttacctctaattttctacatgtttatccttccaattaagttcattacttcctgcacctttgatgtcatatatataaacaggaaataacacatggtggccgggatgtagagagagccacaagacttgtgaatamaatccacaggcaagcatgtggcgattccttttgcagttttggagggaatgccaaaccctatgtttgctgtggaaaagagtatggtagttcctcaaaacatcaaaatgatattgccatatgactcagcagcgccacatctcaggatagcaaaagaattgaaagcagagtcttgaaaaagtatttgcacatccatgtttgcagcagcattattggcaatagctaaaacgtagaagcaagtgaagtgtccaacaacagatgaatggataagcacaatatgatatatacatgcaatggaaaattattcagccttaaacatgagggaaatattctgacatatgttgcaacttggatgaaa

SEQ ID NO: 926122 - DNA, 826 bp, Homo sapiens
ctgcggggtacacgggtgctgggaccctgactgctgggctgggctgagctgcctgcggagacaagaggcccgccgcccagcgaccccaggctctaccttctgtcctggagaccctggttctgagccacacaccgcagccaaggccctggccagtggttctgagccacacaccacagccaaggccactgtggcaagtggtttggagccacacaccrcagccaagtccaccgtggccagtggttctcagccacacaccacagccaaggccactgtggcaagtggttcggagccacacaccgcagccaaggccaccgtggccagtggttctgagccacacaccacagccaaggccaccgtggccagtggttctgagccacacaccgcagccaaggccaacgtggccagtggcgaacagcctaggacatagaggtgggggctttccaggttgaggcacacccagccaagcagtaggccaggggacaagccaggaaggcaggactcatccccaagtccccaggggcccagtccagggaggaaacggaggtacagtcggtcctgctccctcgggggccacatgccataagaaggaagcgcagcagaagtggcagggctcctgcccacctcatgcccccaaccgcaggtgcagccagccgggaaggaagtgaaggcagtgggcctgggccccatcaccttggcaccccttccctgagcagggctgggtggccccgcaggactcttcctgctggagcccaggatccaaacctactccactcagagtctggctaccagccacagacctgggcccatagtcccgtttctagatctc

SEQ ID NO: 926123 - DNA, 643 bp, Homo sapiens
actggattggggtgggctggatggggtgggctggattgggatgggctggattggggtgggctgggcccagcaaagcacctgagcttgggctcccaagatactttcagggcatctgcaagttcaaaattgtttcagcaagaatactcagatgttggtgtctcttgctgttttccccratggtgcaaaagcaatgaccagtattgctgcggatctgcaagcaccgatctccgcagtggtcccaatgctgcttgaaggcgggcgtgggttctgccgtgccacacgcttgcaaaactcccaagccccaaaacagtcagtttcacctaggactgtctttgatgaagcacagaaaatactttttattaaatcatgaccttgaggctgggcgtggtggctcacgcctgtaatcccagcactttgggaggccaaggcgggaggatcatttgaggccaggagtttgagaccagcttggccaacgtggtgaaacaccatctgtgctaaaaatccatccaaaaattagccgggtatggttgggcgcctgtagtcccagctactcaggagactgaggcatgagaatcacttcaacccagaaggcagaggttgtggtgagttgagatcacgctactgcactccagcatgggcaaca

SEQ ID NO: 926124 - DNA, 643 bp, Homo sapiens
actggattggggtgggctggatggggtgggctggattgggatgggctggattggggtgggctgggcccagcaaagcacctgagcttgggctcccaagatactttcagggcatctgcaagttcaaaattgtttcagcaagaatactcagatgttggtgtctcttgctgttttccccgatggtgcaaaagcaatgaccagtattgctgcggatctgcaagcaccgatctccgcagtggtcccaatgctgcttgaaggcgggcgtgggttctgccgtgccacacgcttgcaaaactcccaagccccaaaacagtcagtttcacctaggactgtctttgatgaagcacaraaaatactttttattaaatcatgaccttgaggctgggcgtggtggctcacgcctgtaatcccagcactttgggaggccaaggcgggaggatcatttgaggccaggagtttgagaccagcttggccaacgtggtgaaacaccatctgtgctaaaaatccatccaaaaattagccgggtatggttgggcgcctgtagtcccagctactcaggagactgaggcatgagaatcacttcaacccagaaggcagaggttgtggtgagttgagatcacgctactgcactccagcatgggcaaca

SEQ ID NO: 926125 - DNA, 661 bp, Homo sapiens
agcaattcttcagaagattaaacttagttacatatgacctgaacattccattcctaattatgtatacaaacgaattgaaaaaaaatccacataatttgtgcattaattttataccacattatttgcaatagccaaaaagtagaaacaactcaagttcagcaactaatgaacagataaacaaaatgtggtctatccatatatctcagtcatttgtgttgctataaaggaacacctgaggctgggtaacttataaaggaaagaggtttacttggcccacatttctgccggctgtaaagaaagcatggcaccagcatctgctgcttgcgaggcctcagggtgcttccactcatgccagaaggtgaaggggagctggtgastgcagagatcacatggcgagagcacagaagcaagagagagagaggagggaggtaccaggctcttttaacaaccagctctcatggcaactaactcactaattactgcaatgatggcaccaagccattcatgaggaatctgaccccatgatccaaacacctcccaccaggccccacctccaacaccagggatcaaatttcaacatgagacacagtggggccaaacagtctctatccaaactacagcaccacaagatgttgtactatttggtcataaaaaggaatga

SEQ ID NO: 926126 - DNA, 599 bp, Homo sapiens
aggcaggggagacagaaaagttccactataaaacatttgatgagtccgggcgtggtgactcactcctgtaatcccagcactttgggaggccgaggtgggcggatcatgaggtcaggagatcaagaccatcctggctaacacggtgaaaccccgtctctactaaaaatacaaaaaattagccgggcgtggtggcaggcgcctgtagtcccagctacttgggaggctgaggtgggagaatggcgtgaacccgggaggcggagcttgcagtgagccaagatcgagccactgcactccagcctgggcgacagtgataccctgtctcaaaaaaataaaaaaaaagaayatttgatgagcactggcttataggattctccctgtggccttcattccattgcacagcctctaccgttttcccgtctggctctctgttttgcctttcagtaataatacaagaaggtgcaccattcttttggttgaaaagggaattaagaatgaactcaagttctttcgcattatttaccgtgtaatgtgaaaagaaatctacttttgtagggatgtcttttaaagatgtttttactttgaatttttagttttctcct

SEQ ID NO: 926127 - DNA, 600 bp, Homo sapiens
aacctcaagtaagcttactgttgttaccctaatgaaataccattttaagtaagttatatagaaaaaatgcataaatatattctccttacaaaaatgaaaaactttgatgtcatcttaagataatttactgaggccgagcgcagtggctcacacccgtaatcccagcactttgggaggctgaggtgggcggatcatgaggtcgggaaatcgagaccatcctgtctaacacggtgaaaccctgtctctactaaaaatacaaaaaaaattagctgggcgtggtggcaggcacctgtagtcccagctacttgggaggctgaggcagcagaatggggtgaagccgggaggcggagcttgcagtgagcagagattgcaccactgcackccagcctgggtgacagagtgagactccgtctcaaaaaaaaaaagaagataatttactaaatctaaactccttttaaaaattgctgaggactgcccgggcacggtggctcatgcctgcaatccgagcactttgggaggctgaagtaggcagatcacctgaggtcaggagttcgagaccagcctggccaacatggtgaaaccctctctctactaaaaata

SEQ ID NO: 926128 - DNA, 735 bp, Homo sapiens
ggtctcattgataatcctgagatcttgcactaacctccactgtctgttgggtttctgtactcctaaaattggagtattgcaggggctactgcatggttttactaggccttgggcttttatgtccttaacaatcttttggagcccttgttgggccttgggtctaagggggtactgcttttggtagggaaaggaggtygaatcctttagtttaacttgaacaagatgggcattctttgcttgtccatattgtccttctgttgcccagacttcaggattaatttcttcctcaagcaggggacaacaaatgggtgttccttctcctatgttcaggtgtataatggcccctgcttttgctagaatgtctctccctaacaagggagtggggctttcaggcataattagaaaagcatgtggaaagagtaaagttctccagtcacaagtcagtggctgggagaagtatctagtgactggctgtcctaggaccgctcggatagtgacagatctagaggacagttgtccgggacaggagagtaagactgagaaggccactccagtgtccaggagacagttaacctcctggccctcaatggtcaagcgtacccggggctctgtgagggtgatggcatgggctggcgcttgccccaggcaccctcagtcctgctgcgggaaaatctggttagtggcttctgactcagaggaccttcatcccctggggcagtgggccttccagtgatt

SEQ ID NO: 926129 - DNA, 658 bp, Homo sapiens
atctccatcctctcaagctgttaaaaacaaaagggcacacactcaggataaaagttaaactaagtttccgcaataatttgttattaagatatctaggccaggcacggtggctcatcctagcactttgggaggccaaggcggggcagatcacccaaggtcaggagttcaagaccagcctggctaacatggtgaaaccccatgcctactaaaaatacaaaaaaaaattcgctgggcatggtggtgcacgcctgtaatcccagctactcggtaggctgaggcaggagaatcgcttgaacgcaggaggcagaggttgcattgagccaagatcatgccattccactccagtctaggcaagaagagcaaaactctgcttcagaaaaaaaagatatctaaatgtgttatgataraatctacagtcaactctattatctagataaaataaataaataaataaataaataaataaataaataaataaaaagcaaaccccccaaaaagcaaaaacaaaaacaaaaacatctgaggaatctcatgggcattttcccacaacagccaaactcccagaatagaaacaattaagtctatatagagaaatacacattagatgtggtttttctcaaatcagatattttccattcaagttcataggaggttcaca

SEQ ID NO: 926130 - DNA, 645 bp, Homo sapiens
cctgttgctccacatccttctccagcatttactattttcagtgttttggattttgctgattctaataactgttgttttaatttacaaatccttaatgatatatgatgtagagcatgttttcatgtgcttatttgccacataccatttttggtaaggttttcatttatgtcttttgyccattttttattcaacttgttcattttcttattgttgagtgtaattggttagatctttttcttattatttattttcctatagttgagttttaaaggttaaaaatgtcagttatttccaaaatgagctatagtttcaatgaaatctcaattaaaacccagcaaattatttaatgtacattgacaaacggattcaaatttatatgggaaggaaaaaaatacagagtagccaacataatattaaaagagaggaataaagtcacagtgttacatgatccttggggtatagtttttctggccagaaaggtgcctctgaagccaggggcgcctttggctgcattttgccttggatctgcaaggcttgttttgcccactcagcttatcaagctatgctcagctcaccctagaggcctcagtctcacacctgccaagggagagtcaagtatggaacaaagaggggtgtgtgagtgaa

SEQ ID NO: 926131 - DNA, 573 bp, Homo sapiens
caattggtccatgggcagccataggcaagcccagaaaaggcaccacaagttcacactcaggtccatgggagtagcagcccacacaccagccttaaggccctctctggcctgaagttgaggcctcgccagggacctgctcccttctccccaggaacttgtctgcttcctgcttcctttcatggagcccagtctgtaggtgccaaggggaacctgcagcccagtgctgaacttcccttagtacccccttggtttccctcctatgctcattggtacccaaaatctagaggggactgaggtgggagggggctggtgtgtcagcactgygccacgtgtgtgtgtgtctcagcaggatgtaacagcgcctgggcttggccctgactttgctctaaaattggagtgggcactgacagcagggagaaaccaggccataggaacagacacttctgagcctgtggaggcagaggggccttcctgggcacccaagactgcagggatgatttgggtggctatagctacacccaggagggtgccccccccattctgtggagagggaggcctgggtctgcagctgtg

SEQ ID NO: 926132 - DNA, 634 bp, Homo sapiens
cgcagtgcctcacacctgtaatcccagcactttgggaagacaaagcgggcagatcacctgaggtcaagagtttgagaccagcctgaccaacatggagaaacccagtctctactaaaaatacaaaattagccggacatggtggcgcatgcctataatcccagctactcgggaggctgaggcagaagaatcgcttgaacccaggaggcagaggttgcagtgagcygagatcgcgccattgcaatctggcctggacaacaagagcaaaactccatctcaaaaataaataaataagtaaaaataataatctcacagaaatggccagggacaatggctcacgtctgtaatcccaacactctgggaggtggaagcgggaggattgcttgagcccaggagttcaagaccagcctgggtaacatagagagatcaagtgtctaaaaaaaaaaaaaaaaaagcaataaacaacaacaataataataaaaaaaactcacagaacgctcatatcagatggggccactctgaccgcgatggagtaggacaaaaccaagctcgctccataatcttgcctgagcacagacaaaatcaaggtcactgtgcaaaccacaaaaatgaccacgcatcccctcaccggctcaga

SEQ ID NO: 926133 - DNA, 588 bp, Homo sapiens
cgtggccaggacctgggaggtggggtcccagagagcctgctgcagcagcgggtgtggtacgggatgagggagaggacacaaggaggacatgaggaacacgggaaggaggcagagacagagaagtcaaataaaaagagacagagagactggggtggtggctcatgcctgtaatcccagaactttgggaggccaaggtaggcagatcacctgaggtcaggagttcaagaccaacctggccaacatggtgaaaccccatctctactaaaaatacaaaaattagccgggcgtggtggctcacgcctgtaatcacaactacttgggaggctgaggcaggagaatcgctggaatccgggaggcggaggttgcagcgagctgagactgtgccattgcactccagcctgggtgacagagtgagattccgtctcaaaaagaaaaaataaaaatamaaaaatacaaaaattagccaggcatggtggcgggtgcctgtaatcccagctacttgggaggctggggaatcgcttgaacctgggaggcggagattgcagtgagccaagatcgcgccactgcactccagcctgggtgacagag

SEQ ID NO: 926134 - DNA, 591 bp, Homo sapiens
ttagctgggcatggtggtgcatgcctgtagttccagctactccagaggcggaggtgggaggatggcttgggccccagaggtcaaggctgctgtgagtggtgatcacaccaatgcacaccagcctgggggacagagcaagaccctgtctcaaaaacacaaaaatacaaaaaacttgcaggctccaaaactacctgaacttcaacctaccttctttcaatacaatgcccagaacatagtctctctcaatgacccagtcaagcttaaaaaaaaaaaaagaaaaaaaaagcatcaccacttctctcttcaaaatctagccttgatatatattttgaggggatgcattctgaagtgtgtcagcatgatacatcrtatcatctgcaacttactttcaaatggcttaggaaaaaaatatggtatctgctgtctatttatctacctacctatctatcaagagataagcaaacatgatgaaataataacagttgttaaatccatgtgaggggtatttggctgtttgtgtgctatttttcagcttttctgattgagcttacttttttaaaaaggcaggaaaaagtatgtggccttgactgt

SEQ ID NO: 926135 - DNA, 590 bp, Homo sapiens
tcccagctactccggaggctgaggcaggagaatcacttgaacgcgggaggcggagcttgcagtgagccgagatcgcaccagggcactccagcctaacgacagagtgagacaccgtctcaaaaaaaaaaaaaaaaaaaaaaaaaaagatgttctattagatyagagtgtgccctaaatccagtgacttgtgttcttatcagaaggccatggaaagacacagaagacacaaggggaaggacatggtgcgaagacagaggcagagagcttggagtattgcagctacaggccaaggaacgccagagattgctggcaaccacagaagccaggagaggcgaggaaggattcttccctggacccttcacagggagcacggccctgctaacatgttgatttctgacttctggcctccagagctgtgagcgaatacatttctattgttttaaatgacaccatctctgatcattggttacggcggcccctaggaagctaatacatggccctatgaagctggggctcagacctccgagaagggcacacggctgctgctgatctgtttagggggagcaatgacgttagcgctgaggggaaac

SEQ ID NO: 926136 - DNA, 498 bp, Homo sapiens
ctgatcctcgaccttttttggttggtaggctattaattattgtctcaatttcagatcctgttattggtctattcagagattcaacttcttcctggtttagtcttgggagggtgtatgtgtccaggaatttatccatttcttctagatrttctagtttatttgtgtagagttgtttatagtattctctgatggtagttcatatttctgtgggatcggtggtgatatcccctccatcattttttattgcatctatttgattcttctttcttttcttctttattagtcttgctagtggtctattaattttgttgatcttttcaaaaaaccagctcctggattcattgatttttttgaagttttttttgtgtctctatctcctttagttttgctgtgatcttagttatttcttgccttctgctagcttttgaaggtgtttgctcttgcttctctagttcttttaattgtaatgttagggtgtcaattttagatctttcctgc

SEQ ID NO: 926137 - DNA, 565 bp, Homo sapiens
tcctgactgttagaaggaaaactaacaaacagaaaggacatccacataaaaaccccatctgtacatcaccaccatcaaagaccaaaggtagataaaaccgcaaagatggggagaaaccagagaagaaaaactgaaaattctaaaaatcagagtgcctctccccctccaaaggaatgcagctcctcaccaacaacagaacaaagctggatggagaatgactttgatgagttgaaagaagaaggcttcagatgaccaaacttctccaagctaaaggaggaagttcaacctatcgcaagaagttaaaaaccttgaaaaaagattagacaaatggctaaatagcataaccaacgtagagaagtccttaaatgaccccaatggagctgaaaaccatagcacaasaactacatgacgaatgcacaagcttccgtagctaatttgatcaactggaagaaagggtatcagtgattgaagagcaaatgaatgaaatgaagagagaagagaagtttagagaaaaatgaataaaaagaaatgaacaaagcctccaagaaatatgggactatgtgaa

SEQ ID NO: 926138 - DNA, 630 bp, Homo sapiens
ctcacacctgtttgcccatttctaaaatggggaagggaaggcacttgccccacagctgttgcagaatggtgagctagagcccgggaagcgcctacagcaggtctcggcctggagcagggcctcgcggctcagggtagtggctccctgtgcctgaggaggacaggcaccttggtttcttcaccatctcagtatccgcagggccgaggcatgtgtctggcacatgctagacgtcattgctagtggccctgcatgcaggacagaggaaggctgagccatggctgatccccgtaatccctttggaagggattctgaagcttmttgcagcttctgaagacaccacggcaagctgggaaccccctgatggggactccgggagcagggtagcagcatttagacggggctaagggagatggccacagagaccgcgttggcttccccgggagctgggatgcaagcacaaagaggaggtcaggcagtctcacctttcaacccaggcctgccatgtgctggggtggtgccaataaggactgcgtgcccgcacgtgactgataagtgaatggaggctctgagaagccaggtgtcctggcaaagccagccaggacagcagcaagagggaggagctcggtgcca

SEQ ID NO: 926139 - DNA, 614 bp, Homo sapiens
ctaataccacaatagtacagaagttcataagagattacataaaaatatatgccaatgaattgaataaactaaaagaaattgtcaattttttagaaacaaacaacctatcaagacagaatcatagaaaacagaaaatatgaacacaccaataatgagtaagaagatgaatcagtaatcaaaagtctcccatcaaaataaataaataaatgaatgaataataaawaaaagagctcaggacctagtggttccactggggaaatctaccaaacattttaaatgagaattactaccaatttttctaaaactctcccccaaaattgaagaggatggaccactcctaaacttgttttacaaggtcagcattaccctgattcaaaagccagacaaggacaccataagaaaagaaaatacaggccaatatcgctgtcaaacaaagaagcaaaaatcttcaacaaaatgttagcaaaccttatttcacagcacattaaagtattatacatcccaaacatttatccttgggatgcaagaatggttcaacatatgcaaataaataaatgtgatacatcctgttaacagaatgaaaagagacaaaaaccacatgatcatctcaatag

SEQ ID NO: 926140 - DNA, 619 bp, Homo sapiens
aggtaagatgaggtatttagctccatgacagcaacaagctaaaccattggtggtctagaaaattatcagggagaaccagggacagagatagctaagaagagccctcctgaaatagaaatgagcctcaaagactacctgtgcacaggagcacaattttaackggatcaaactgtggagcaatttatgtccccagggcattgttggaaacaatggagcaatcagcaggcaattagtggaggctaacaacagtgtgtaataccaatggagacaaacagcttaacagacaggtcacggacagggacagtcagaacacctatcatctcaggaaaactatatgcatgcccatagacaacattggaggcttcacagtagtggggcacagaattcattcaaacagtccagccatatctctaaacaaacagcaagcaaacaataagaggctcctagggggagaggttgagcacccagagttgatacaatataatatctaaaatttctgattctcaaccaaaaataataagacaaagaagtgggagagtgtgacccatacatagaaaaaaaatttaaaaaggaagcagacgagaatgactgctgttcagatggtccagctatcagattt

SEQ ID NO: 926141 - DNA, 619 bp, Homo sapiens
aggtaagatgaggtatttagctccatgacagcaacaagctaaaccattggtggtctagaaaattatcagggagaaccagggacagagatagctaagaagagccctcctgaaatagaaatgagcctcaaagactacctgtgcacaggagcacaattttaactggatcaaactgtggagcaatttatgtccccagggcattgttggaaacaatggagcaatcagcaggcaattagtggaggctaacaacagtgtgtaataccaatggagacaaacagcttaacagacaggtcacggacagggacagtcagaacacctrtcatctcaggaaaactatatgcatgcccatagacaacattggaggcttcacagtagtggggcacagaattcattcaaacagtccagccatatctctaaacaaacagcaagcaaacaataagaggctcctagggggagaggttgagcacccagagttgatacaatataatatctaaaatttctgattctcaaccaaaaataataagacaaagaagtgggagagtgtgacccatacatagaaaaaaaatttaaaaaggaagcagacgagaatgactgctgttcagatggtccagctatcagattt

SEQ ID NO: 926142 - DNA, 634 bp, Homo sapiens
atcgggtcactcccaccctaatactgcgcttttccaaagggcttaacaaacggcacaccaggagattatatcccacacctggctcacaggttcctatgcccatggagcctcactcattgctagcacagcaggctgagataaaactgcaaggtggtaatgaggctgggggaggggcgcctgccattacccaggcttcagtaggtaaacaaagtggccaggaagctcgaactgggtggagcccaccacagctcaaggaggcctgcctgcctctgtaggatccacctctggagcagggaacagacaaacaaaaggcagcagtaacctctgcagacttaaatgtccctgtctgacagctttgaagagagtagtggttctcctagcacgcagcttgagatctgagaacaggcagactgcctcctcaagtggrtccctgacccccgagtagcctaactgggaggcatcccccagtaggggcagactgacacctcacatggccgggtactcctctgagacaaaacttccagagcaaccaacgatcaggcagcagcatttgaggttcaccaatatccactgttctgcagccaccgctgctcaaacccaggcaaacagggtctggagtggacctccagcaaaa

SEQ ID NO: 926143 - DNA, 634 bp, Homo sapiens
atcgggtcactcccaccctaatactgcgcttttccaaagggcttaacaaacggcacaccaggagattatatcccacacctggctcacaggttcctatgcccatggagcctcactcattgctagcacagcaggctgagataaaactgcaaggtggtaatgaggctgggggaggggcgcctgccattacccaggcttcagtaggtaaacaaagtggccaggaagctcgaactgggtggagcccaccacagctcaaggaggcctgcctgcctctgtaggatccacctctggagcagggaacagacaaacaaaaggcagcagtaacctctgcagacttaaatgtccctgtctgacagctttgaagagagtagtggttctcctagcacgcagcttgagatctgagaacaggcagactgcctcctcaagtggatccctgacccccgagtagcctaactgggaggcaycccccagtaggggcagactgacacctcacatggccgggtactcctctgagacaaaacttccagagcaaccaacgatcaggcagcagcatttgaggttcaccaatatccactgttctgcagccaccgctgctcaaacccaggcaaacagggtctggagtggacctccagcaaaa

SEQ ID NO: 926144 - DNA, 625 bp, Homo sapiens
aacagtcaggaccctcagctgcaggtgtgttggagtttgctggaggtccactccagaccctgtttgcctggttatcagcagcagaggctgcagaacagcgaatattgctgaacagcaaatgttgctgtctgattgttcctctggaggtttcgtctcagaggggtacccggccatgtgaggtgtcagtctgcccctactgggaggtgcctcccagataggatactcaggggtcagggacccacctgaggaggcagtctgtccattctcagatctcaagctgcgygctgggagaaccactactctcttcaaagctgtcagacagggaagtttaagtctgcagaagtttctgctgccttttgttcagctgtgccctgcccccagaggtagagtctacagaggcaggcaggtctccttgagctgtggtgggctccacccagttcaagcttcccagatgctttgtttacctactcaagcctcagcaatggccgacgcccttcccccagcctcgctgctgccttgcagttcgatctcagactgctgtgctagcaatgagtgaggctctgtgcgtgtgggaccctccaagccatgtgcgggatataatctcctggtgtgccatttgctaaga

SEQ ID NO: 926145 - DNA, 625 bp, Homo sapiens
aacagtcaggaccctcagctgcaggtgtgttggagtttgctggaggtccactccagaccctgtttgcctggttatcagcagcagaggctgcagaacagcgaatattgctgaacagcaaatgttgctgtctgattgttcctctggaggtttcgtctcagaggggtacccggccatgtgaggtgtcagtctgcccctactgggaggtgcctcccagataggatactcaggggtcagggacccacctgaggaggcagtctgtccattctcagatctcaagctgcgtgctgggagaaccactactctcttcaaagctgtcagacagggaagtttaagtctgcagaagtttctgctgccttttgttcagctgtgccctgcccccagaggtagagtctacagaggcaggcaggtctccttgagctgtggtgggctccasccagttcaagcttcccagatgctttgtttacctactcaagcctcagcaatggccgacgcccttcccccagcctcgctgctgccttgcagttcgatctcagactgctgtgctagcaatgagtgaggctctgtgcgtgtgggaccctccaagccatgtgcgggatataatctcctggtgtgccatttgctaaga

SEQ ID NO: 926146 - DNA, 596 bp, Homo sapiens
tgttttggggaaaatggcagtcagattcctcccagaggtcttatctgcgggtccctggcaaaagggagctatcatctgaggctccagttgactgaccatttggagtttgatagcctctaggtgagagaaaaaacaaacaaacaaacaaacaaacaaacaaaaaaccaagctttataaggttaagtatgcatgagttaaacatgtgtattatagaagaaaataatctagtgacaaagattaacagaaataagaagtaaaatatactaacaatttgtaccccaagatgtttcattctggtgaaagaaattaaaccttctatgggagcagttaaattttagaagagagataacygttcttgccacacctgtagcagttaataggtgcaccctgagaattatggggcttatgggcttatatgatggccatcaaagcttctgtctctttcttgtgtctccctatctctattgtaaaagatcaaggtggccactttcaggaggtcgtctaatgtactatccaggtccaggacctgtttctgtgacttcctcctgatatcaggtgctgcttgagtaataaatttatcctccaggattaggtgt

SEQ ID NO: 926147 - DNA, 591 bp, Homo sapiens
tggctttgcttcaggctttagatctctctaggcatggctactctcctagctgcgattgaaaatttaaaaataacaatagtaaagaaaaaccctttactcttctatttgaattattttaaatagattatgcactatgatacaagtagttcactggaaacttaaatgttaactaaagaccatgagacctgtggaggaaagagggatagctttattttyttaaaaagtcaatctgcaggctggggagacactgccttccagtacaagtgaaagtatgctcccagaagaacaaagagaaagtccggcctaaatagggaaagttcttgttctggttctcaatcaggtccatttatgcacataaacatatcaaatttgttcagttctgatgggtcaaaacagtcgagctctgactagatggttttcaagccccaaaccagaagtctgacaggcgttggggagtgcaggttggtgttctagccaccattttatcttggctctgacaacaggaacttgtttggcttgattgttgaaagggaggtcctgtgacacttttacaatgcctttctcaacacaccatcatgacccctccttcac

SEQ ID NO: 926148 - DNA, 607 bp, Homo sapiens
catgcctgtaatcccagctactcgggaggctgaggcaggagaattgcttgaacctgggagacggaggttgcagtgagctgagatcgcaccattgcactccagcctgggcaacaagagcggaaactccatctcaaaaacaaacaaacaaacaaaacccyaaaggtcaggagtttgagaccagcctggccaatatggtgaaaccccatctctactaaaaatacaaaaaaaaaaaaaaaaaaaaaaaaatttgccgggcatggtggtgcatgcctgtagtcccagctacctgggaggctgaggcagaagaatcacttgaacccgggaggtggagtttgcaatgagccaagattgtgacactgcactgccagcctgggtgacagagcaagactgtctcaaaaaataataataataataataataatattaagccttcccatttatgcacatggagtgtttttccatttgtgtctttatttcagcaacattttatagttttcaatggacaagtctttcacatccttagttaagtttatttcttagtacctaattatttttgatgctattgtaaatggagttatttttataattttcttttctgattgcttat

SEQ ID NO: 926149 - DNA, 571 bp, Homo sapiens
cacaaagacaccaagttaattcagctgggtgaggagaattctttcaacaaggggtgcaggaacaattttatatccagaagcatgaaaagaaaacaaaacaaaacctgagcacttacctcacagctcatggaagaattaacttgaaacatatcataaacttaaatgtaagagttcaggcaattaaacttctagaaaaaaatgtagactgtcttagtgactttgggctaggcaaacattttaagaatatgtctcaaaaagtataactataaatgaaaaaaatgratacattgactttatgaaaatgaaaacctttttcttttcaaaagatactaataatcgcatgtcatgaactagggagccagagaataggagaaaatatttgcaaaatatgtatcacacatatataaagaactcttgaaactcagcaggaagaagacaaaaacccaattagaaatgggcagaagagttgaaggagcctctttttgtcaacatcattagtcattaagtagatacaaagtaaaaccacttttgttaggatggctaagatggaaaaggctgaccttatcaagag

SEQ ID NO: 926150 - DNA, 607 bp, Homo sapiens
gagcagacaccgagctagctgcaggaagtttttttttttgtaccccaaaaatgactggaaccccagcaagatagaaacgttaattcccctggacagggggctgaagcaagggagccaagtggtctcgctcagtggggtcccaatcccacagagccctgcaagctaagaaccactggcttgaaattctaactgccagcacggcagtctgaagtcgacctggtatgatcaagcttggtgggctgggggcggggggtgggcgcatccgccattactgaggcttgagtagaccgttttcccctaacagtgctaacgaagcctggaagttgagactgggtgaaactcaacacagtgcgacaaagtggctgtggccagactgcctctctagattcctcttcactaggcagggcaaatctgaaagaaaggcagcagtccsagtcaggggcttatagataaaactcccatcttcctgtgacagagcacctggggaaagggatggctgtgggcacagtttcagcagacttaaacattcctgcctgccggctctgaagagagcagtagatcttgacaaggagggttcttccagcacagcactcgagctctgctaagg

SEQ ID NO: 926151 - DNA, 567 bp, Homo sapiens
atctgtctggtcttgggctttttttgtttgtttgtttggtagtctattaattactgcctcaatttcagaactcattattggtctattctgggattcgacttcttcctggtttagtcttgggatggtgtatgtgtccaggaatttatctgtttcttctagattttctagtttatctgtgtagagttgtttatagtattctctgatgatagtttgtatttctgtgggatcagtggtgatatcccctttatcattttttmttgtgtctatttgattcttttctcttttcttctttattagtctggctagtggtctacctattttgttaatcttttcaaaaaaccagctcctggattcattgattttttgaagggatttttgtgtctctatctccttcagttctgctctgtcttggttatttcttgtcttctgctagcttttgaatttgtttgctcttgcttctctagttcttttaattatgatgttagggtgttgactttagatctctcctactttctgatgtgggcatttagtgctataaattttcctctaaaccctgctttacctgtg

SEQ ID NO: 926152 - DNA, 658 bp, Homo sapiens
cctgggtcaagtggggaatgggataacttttctgtctagttagaggtttgtaaaacgcaccaatcagctctctgtggctagctagaggtttgtaaaatggaccaatcagcacactgtaaaatggaccaataagtgctctgtaaaatggatcaatcagcactctgtaaagtggaccaatcagcactctgtaaaatggaccaatcagcaggttgtgtgtgggaacaaataagggaataaaagctggccaccccaaatgaagatggaaaccatcattctgagcaaactaccacaaggacagaaaaccaaacactgcgtgttctcactcataggtgggaattgaacaatgagaacacttggacacagggtggggaacatcacacaccgggrcctgtcatggggtcgggggaggggggagggatagcattaggagaaatacctaatgtaaatgatgagttaatgggtgcagcacaccaacatggcacatgtaaatatatgtaacaaacctgcacattgtgcacatgtaccctagaacttaaagtatatataaaaaaaaaaaagctggccaccccagccagcagcggcaacccactcgggtccccttccacgctgtggaagctttcttcgttcgctcttcacagtaaatcttgctgctgctcac

SEQ ID NO: 926153 - DNA, 658 bp, Homo sapiens
cctgggtcaagtggggaatgggataacttttctgtctagttagaggtttgtaaaacgcaccaatcagctctctgtggctagctagaggtttgtaaaatggaccaatcagcacactgtaaaatggaccaataagtgctctgtaaaatggatcaatcagcactctgtaaagtggaccaatcagcactctgtaaaatggaccaatcagcaggttgtgtgtgggaacaaataagggaataaaagctggccaccccaaatgaagatggaaaccatcattctgagcaaactaccacaaggacagaaaaccaaacactgcgtgttctcactcataggtgggaattgaacaatgagaacacttggacacagggtggggaacatcacacaccgggacctgtcatggggtcgggggagsggggagggatagcattaggagaaatacctaatgtaaatgatgagttaatgggtgcagcacaccaacatggcacatgtaaatatatgtaacaaacctgcacattgtgcacatgtaccctagaacttaaagtatatataaaaaaaaaaaagctggccaccccagccagcagcggcaacccactcgggtccccttccacgctgtggaagctttcttcgttcgctcttcacagtaaatcttgctgctgctcac

SEQ ID NO: 926154 - DNA, 740 bp, Homo sapiens
tggtgacttcttttgctcaagggttcacaagggcagcagactgatctgcacaagagggactgagcctggctgcggccgcacctgatgcctgtgcacacctgtccctggtggtctctcctgtggtgacttcttttgctcaagggttcacaagggcagcagactgatctgcacaagagggactgagcctggctgcggccgcacctgatgcctgtgcacacctgtccctggtgcaggcccttcccccgcagccccgtgaccttgtcctgtgaggctcacggtgcctgctccttctcagagtcctcatttctccctttaacgcacgccctgtcagcgcctccgtctagcccgtgtcctccagaccttygaggtcaggggcctcaattcctggcacagcccctccactccaggcctcccagaaacagactagagcatcaggatgtgcgccgcctggggtcccacagagtggtgcccccttttagtgtcttctaggccccttagtgacagactacagaaaatacctctcaggtcacaggtcacccctctttggtgaagagtccatagaattctctgctgcgctttgcaagcactttctcttctgcacgtttggaacctaccccggcctgtcgtgtctttctcctggcctcctcgcgagccgaacctactgtccggtcccgggaccccctgcccagggtcagaggggcgcctacctagctcacggtcttgggccggagggaatggag

SEQ ID NO: 926155 - DNA, 848 bp, Homo sapiens
cagtttcggaggcggccacgcgaggatcaactgtgcaacgggtggggccgcggctgaccgtggtggtcgcgggggctgagggccagaggctgcggggggggggcggcgggatgagctaggcgtcggcggttgagtcgggcgcggagtcgggggcagggggagcgggcgtggagggtgcgcacgaggtcgaggcgagtccgcgggggaggcgggcagagcctgagctcaggtctttctgcgtctggcggaacgggcctgggagggaggttttgccagataccaggtggactagggtgagcgcccgagggccgggacgcacgyacgggccgggtaggatggcgctggcgtcgatgcccgcgcgcttcagggcctggtctggccgcccctccatccttgtcggtttctcgggtcgcggaccccgcgcggcgccgggcgatgctggcctgcccgtggccaccacctcgcttcattcccgtctctttgggccgccgcattcgtccacgtgcccgtctctccctgcgcaaaattccaagatgagcaaatactgggctcacggtggagcgccgcgggggcccccctgagccggggcgggtcgggggcgggaccagggtccggccggggcgtgcccgaggggagggactccccggcttgcgacccggcgttgtccgcggtgctcagcgcccgcccgggcgcgccatggggaaccgcagcaccgcggacgcggacgggctgctggctgggcgcgggccggccgcgggggcatctgcgggggcatctgcggggctggctgggcagggcgcggcggcgctggtggggggcgtgctgctcatcggcgcggtgctcgcggg

SEQ ID NO: 926156 - DNA, 564 bp, Homo sapiens
gtcccctcttgcaggtagtgacggcagagactctgatggacccaagcgacctctctgaaaacattcaggcccccaccggggaggtgagctaggcctcccacgtgtgtggtctggtatctggagccctgcgggaggggaggaccatgtgcctcttgcttcctggccagggctttcggctggaggacgtggattggaacagcgttgcccgccggtatcccaacctcttcaccaacatggagcccagctcaaagcaaaagtaactgcacagagcagggactccccaggggccagaagggagggctcaccttggcargtgaagacgcaggacactaaaggaccatttagtgtccctggataagtctcttaaaccttccaatgcgcgttctctgatctgtagaatgcgttggggttgaggcagccatcactgtcctgccatgaactgagcctgggtactgggaggcaagaggggctccctgctgcactgccttgtgaggctggacgggggcagggctggggtctggagctggagtggccatcaagcagagcgtggtccacaggcagccc

SEQ ID NO: 926157 - DNA, 596 bp, Homo sapiens
aggccacctagagatttatcaaggacgcgccaccccaccaggagcccctcttgatcaccaagtgctttatcttccaagtagtaagtcaatcaagaggtttctaaagataatccatttttgataaattagaatggaaacagtgtctctataatatacatacaaaagtgtccagttttcaactgtgagcaacacaggtgcacagaccaggtgtcagcgcaggaacccgacggcaggcatgstgatgccccccatttcccgccactcccgacagctccccgggcatggccccgattcccgccactcccgacagctccccgggcatggccccgattcccgccactcccgacagctccccgggcatagcccgtgattgcctggcctcagccctcggccccctgcgtgggcggctcctccccggcctctggtttcttgtgcctgcgcatgtgcctgtacttgtccacgtacgccttcaccaggttggccaccttcacggggttgatctctccactcttgctgtggcagatctggagaaagaggtgcaatcaccaaatgccctttcacatccagatgttccgggccagagcccagggccaaag

SEQ ID NO: 926158 - DNA, 596 bp, Homo sapiens
aggccacctagagatttatcaaggacgcgccaccccaccaggagcccctcttgatcaccaagtgctttatcttccaagtagtaagtcaatcaagaggtttctaaagataatccatttttgataaattagaatggaaacagtgtctctataatatacatacaaaagtgtccagttttcaactgtgagcaacacaggtgcacagaccaggtgtcagcgcaggaacccgacggcaggcatggtgatgccccccatttcccgccactcccgacagctccccgggcatggccccrattcccgccactcccgacagctccccgggcatggccccgattcccgccactcccgacagctccccgggcatagcccgtgattgcctggcctcagccctcggccccctgcgtgggcggctcctccccggcctctggtttcttgtgcctgcgcatgtgcctgtacttgtccacgtacgccttcaccaggttggccaccttcacggggttgatctctccactcttgctgtggcagatctggagaaagaggtgcaatcaccaaatgccctttcacatccagatgttccgggccagagcccagggccaaag

SEQ ID NO: 926159 - DNA, 786 bp, Homo sapiens
tgtgctctgtggcctgtttcctgacgggccttgggccgggctcccggagggcagtgctcggggctgcaggcagcccttgaatccttcttcccctctggacagactgcctgagtttcgctgaaaagaaactggagctaaaaaacaaaaaagtcaatggcaatcatttcccacccactcttcttaaatgtcagtggtttaatttttatcacaactggttttctgtgaggtcgtgcgctttaaactcctgtctgcctgttgaggtggacacctcgcctttccacacccggagagctgcttcaacagccactctgtggatgacaaagtacagtgcctgaggccatcaggacacgatattaaccaggggcgggggcagtaccccatcaggacatgttcttatgaacatgaagctgtggggctgggtaagaactcggagctaactgagaaactgctcaagaagggaaatcaatgcagaaaaatggctgaggaatggtccccccaacttcagctacatcttccgtgactgagacatgggctgagtgcttgsgaacagcctgaggaccagcagcccacagaggaaggggccgtggcagggaaggcactcacccgccctcttggcgctgagggagccgtcgcggtggatgatgacatcactgctgcccagcatcaggaggctctggcccgacaggatgctgcccagcaggtcaggcactggctcctcctccaagtctggctctggcaccgcggcagggaggcgcctcctgtgggcacagacccaaggccctgccg

SEQ ID NO: 926160 - DNA, 514 bp, Homo sapiens
ggctgaggcaggagagtcgctgcagtgagccgggaggcagatgctgcagtgagctgagatcacaccactacactccagccggggcaacagagcgaaactctgcctcaaaaaaataaagtaggccaggcacagtggttcacgcctgtaatcccagtactttgggaggccaaggtaggcagatcacgaggtcaggagattgagaccatactgrctaacatggtgaaaccccgtctctactaaaaatacaaaaaattagccgggcgtggtggtgggcgcctgtagtcccagctactcgggaggctgaggcaggaaaatggcgtgaacccaggaggcggagcttgcagtgagccaagatcgcaccactaaactccagcctggggggttgagtgtgacattgtctcaaaaaaaaaaagatgcatgaagatctggaaatggaagaaagttggaaaacactttggggtcaaaggcccagtggacagcccacagcactggaacagtgaggggcctggacatg

SEQ ID NO: 926161 - DNA, 770 bp, Homo sapiens
actcaggaaactcacaaaacatggatttaggctcagactcgtgagaaaggagggacggcgaggtgtctgcgaatgtgagcagaggcgtggctatctcccggctgctgggagcagagggcaggaccaagcaggggctggggacctggaagggccggcggagcgcactgcaaggcccctgtactcccacaggccatgaggaggagggcgaactgacgatgagacaaacgtggtggccgcctgcaggacccccaaggaggcccctgcagtgtctgcaaaaggacagccagcgattcctgcaccaacaacagcgtgagtggagcagaggcctgggtatgtggctaacaacgaggtgacaggtgggggcacaagcggctgtgctcaaggacgagtcaaagctgggacgaccgggaccacccgccacagagcaaaggccttcaccaggagcccrtcctcggtgcggctccagccgcggcacgtcaaggcctcctggctccggctgttccgtagtccaaaccctgacccagctacttcccacccaagagaaggccccagatcgagcagcctcactggttctttcaacaagggaaagatttccagaatcctctctccataatttcacagcagaaaaattattcaaatcaacagggaaagcccctcgcaggaggctaacggggaagggggcatctgcttacagccaacgacacaaagcagggatgaggagacaagtgtcacaggctcccgggaagccagggccacgcagggccagagca

SEQ ID NO: 926162 - DNA, 806 bp, Homo sapiens
catggcatcagtcatgattcaaagggccccagatacagcttgggctgctactcgggagagcgcaagctgtaagctttggtggctttcacgtggtgttaagcctgtgggcacacagagtgcaagagtgaaggcttgacagcccctgcctagatttcagaggatgtatgagaaaacctgggtgcccaggcagaagcctgcttcaggggcagagccctcacagtaacctctactagggcagygtggtgggaaaatgtggggttggagcccccacacagagtccccactggggtactgcctagtgtaactatgggaagggggccaccaccctccagaccccagaatggtagatccaccagccacttgcagcatgcacctggaaaaatcataagcactcaacctgtgagagcagtagtcagggctgatccatgaaaagaccacagaagtggagctgcccaagactatgggaacctatcccctgcaccagtgtgctctgaatgcagaatatggagtcaaaaaagagagattattttggagctctaagatttaataactgccctgctgggtttcagacttgtgtggcgcctgtagcaccttccttttggttgatttcttccttttataatggcaatgtttactcaatgtctgtacccacatggtatcctggaaataaattacttggttttgattttaccagctcataggtggaagggccttgccttgtctcataagattttgggctttggacttttcagttaatactggaacaagttaacactttgggagactactgggaaggcatgactgta

SEQ ID NO: 926163 - DNA, 659 bp, Homo sapiens
ccaccgccacgtcctggcccatggggtgtggtgtgtgtctgttctgggttgtgttcttacaaggaatggctgtgcactttccttgcttttacctgccaccaccgggtttttggctgaattagccacctttggcccagaayggaaggtctatgttgaggttggcacagctatccttagggtccccagtcacctacgtctgaaccgttacacaagaaaaaacaaagtccaatcttgtttaaaccatggtatttgggataattttgctatagaagcttggacagtactccaatcaataaagatagggagacattatttacatacattaatgaaaacaacacgaatgctactaataccagaagtgttatccacccttttttggacttattgtgttttacgtactatcctaagagcattatgattcagagatataattgagtcctcacagcaatcttgcaagtctgttattattaccttgtattagtctgttcttgcactgctctaaagaaatactggggactgggtaatttataaaggaaagagatttaattgactcacagttcctcatggctggggaggcctcagggaacttacaatcatggtggaaggggaagcaaacatgtccttcttcacaaggtggcaggagagtgtgagcgtgtgaa

SEQ ID NO: 926164 - DNA, 614 bp, Homo sapiens
caggtccctcaaaggcgagacagcaccgactgacatggggaaatcccttcatgggaggcttacaaggttattcgtgaagcggcaggaacaggcattgctgtgaagcatgttttaagtggtcccctggatgcacacgtgctattggtgtacatgctagtacacacatcacgtctcattagcatcttaactctccacccaggggcgtgtttgttactatyataataagcataggtcagcccaaggacactaagcatgggtttctgtgcttgcgtgaattcggggattttcagccgggcttggtggctcatgcccgtaatcccagcactttgggaggccaaggcaggtggatcacctgaggtcaggtgttcaagaccagcttggccaacgtagtgaaaccccatctctactcaaaatacaaaaattagccaggcgtgatggcgggtgcctgtaatcccagctacttgggaggctgaggtggcagaatcatttgaacccaagaggtggaggttgcagtgagctgagatcgcgccattgcactccagcctgggcgacagagccagcctctgtccctaaataaataacgaggattttcccctcttcccttctccctcctt

SEQ ID NO: 926165 - DNA, 614 bp, Homo sapiens
caggtccctcaaaggcgagacagcaccgactgacatggggaaatcccttcatgggaggcttacaaggttattcgtgaagcggcaggaacaggcattgctgtgaagcatgttttaagtggtcccctggatgcacacgtgctattggtgtacatgctagtacacacatcacgtctcattagcatcttaactctccacccaggggcgtgtttgttactattataataagcataggtcagcccaaggacactaagcatgggtttctgtgcttgcgtgaattcggggattttcagccgggcttggtggctcatgcccgtaatcccagcactttgggaggccaaggcaggtggatcacctgaggtcaggtgttcmagaccagcttggccaacgtagtgaaaccccatctctactcaaaatacaaaaattagccaggcgtgatggcgggtgcctgtaatcccagctacttgggaggctgaggtggcagaatcatttgaacccaagaggtggaggttgcagtgagctgagatcgcgccattgcactccagcctgggcgacagagccagcctctgtccctaaataaataacgaggattttcccctcttcccttctccctcctt

SEQ ID NO: 926166 - DNA, 763 bp, Homo sapiens
ttcccaacccccctcacttcccaagacaacccccagcttcaggtcctcatggggaggggagggcacgttcttgacacatgggaacttcgctcaggagggcctccccttcccctctccctcagagttttcactgccgtctcgtctttagaaagctgtttgaattccccccgcccccagtttggaccgtgtagatataactggatatacggatttttctctttgtgcaggcttcttatgccgttggtatacagggcaggaaagagaggaataaagggagagagcagtgtggaaaccacggtggttttgctttgttcttactaggttttggtgccaccttccctgcctgcgcttgtgccccctctcctccttggcactggcggcctccttgcctcccttccaccmgtgctgccatcccgtgcctgtcgtgttggttcttcacacgtgctctgttctcggggttgttccattcatgccttcttggagggtgagggtggcttgggaaccgacccagtgatcatgcctactttcttctttgtatctccctccttcccagcccacccgggcagcagactctgatggaaggaaggtgccgtaggtgggcttttagaaactaacgggactggttttcaaagcagttatcttgggaaactgtttattccagcgatgtgacttttttcagaatatttcttggaatcatattcagagtctggggctgtgtgttgagcagccttaaggatgctagacactcatttagtgcccaggg

SEQ ID NO: 926167 - DNA, 609 bp, Homo sapiens
tgaaagagacctgaacaccatggaatactatgcaaccataaaaaaggatgagttcatgtcctttgtagggacatggatgaaggtggaaaccatcattctaagcaaactatcacaaggacagaaaaccaaataccgcatgttctcactcataggtggraattgaacaatgagaacacttggacacagggtggggaacatcacacactggggcctgtcatggggtgggggaagtggggacggatagcattgggagatatacctaatgtaaatgatgagttaatgggtgcagcacaccaacgcggcacatgtatacatatgtaacaaacctgcatgttgtgcacatgtaccctagaacttaaagcgtaataaaaaaaataaaaaataaaaataggccaggcgcagtggctcacgcctgtaatcccagcactttgggaggccgaggcgggcggatcacctgaggtcaagagtttgagaccagcctggccaagatggtgaaaccccatctctactaaaaatacaaaaattagccaggcatggtggcaagcacctataatcttagctgcttgggaggctgaggtgggagaattgcttgaacctggaaggtggtgg

SEQ ID NO: 926168 - DNA, 649 bp, Homo sapiens
aaagatgagagagaaaatgagaaagttattgaaattgaggaagagttatgatcaagttataccttcctagcctggatatgctttataattccccagtcaaatatcctaactgctaacctcaaacacgctataattttctagccctcacagaatcaatggcatcagtatatccatccattttcatctcattaggcctgactcaataawaactcacactgtttgtctacttttcttcccttttcaagcttttgtctctgaatacagttttttgttgctgctgtaataaattacatcaaactttctggctcaaaacaacacgaatttattatcttacaactttagcagtttgaagcctaacgtgggtctcactcggctaaaactaaggagttgggagagctgctacccttctgaaagctccggggaggtatccatgtccttgcgtcttctggctggtagagacccacatttcttggctcattgcccccttcctccgtcttccaacccagcaagtccttctcacacggcatcactctgaccttgtttccatcatcccatatccttctcagaatctaactttttaccctcttccacttttacagactctagtgatttcactgggcccacagggaaaatccaagataatctccca

SEQ ID NO: 926169 - DNA, 588 bp, Homo sapiens
ctcccttccctacacatcaagcttgaggatttgccgcccaggactggcaaattggctttactcaacatgccccgagtcaggaaactaaaatacctcttggtctaggtagatactttcactggataggtagaagcctttgccacaaggtctaagaaggccaccgtcatttcttcccttctgtcagacatattcctcagtttggccttcccacctctatacagtccgataacggactggcctttattagtcaaatcacccaagcagtttctcaggctcttagtattcagtgaaytaacggtcttttaaaaacacacctcaccaagctcagtcaccaactgaaaaaggactggacaataccacttgcccttctcataattcaagcctgtcctcggaatgctacaaggtacagcccatttaagctcctgtatagatgctctttttattaggccccagcctcattccagacaccagaccaactaggactgagcccaaaaaaacttgtcatccttactatcttctgtctagtcatactcctattcactgttctcaactactcataaatgccttgctgttgtttacactgccagt

SEQ ID NO: 926170 - DNA, 557 bp, Homo sapiens
gatctctcagaagaaactctacaagccagaagagagtggggaccaacattcaacattcttaaagaaaagaattttcaaaccaggatttcatatccagccaaactatgattcataagtgaaggagaagtaaaatcctttacagacaagcaaatgctgagagatttttgtcaccaccaggcctgccctgaaagagctcctaaaggaagcactacacaagtaaaggaacaaccggtaccagccactgcaaaaacatgccaaattgtaaagaccatcaaggctaggaagaaactgcattaactaacgagcaaaataactagctaacatcataatgayaggatcaaattcacatataacaatattaaccttaaatgtaagtaagctaaatgctccaattaaaagacacagaatggcaaattggataaagagtcaagacccaccagtgtgctgtattcaggaaacccatctcacatgcagagacacacataggctcaaaataaagggatggaggaagatctaccaagcaaatggaaaacaaaaaaaggcagaggttgcaatcc

SEQ ID NO: 926171 - DNA, 602 bp, Homo sapiens
acattgtcagcagcctaggcatttgctcatgttatgtttgtggaaggactaacataggagaccaatggccttgggaagcaaaaaagttaatgcctcaagataactttactctgagtgactctttccccaaacagatgcccacaagttcaagcgtctggctcttaaaaacttctattattagaagatactktgttgctcgctgaggaaaggcttttacagacccagtaggagaaataacctgcttaggatggcaatattacaatgaaacattaaggaaaactttgtggcagggcacagatgactacagagcaccttatccaaatctgttctcccgtttctcttctctaaaccacacttggtatcaacttgaatctccaaatacttggcaagcaacccccagtctttattggatctgtgggctatgggcatatcaacagttgccagttaaatgggcaggggcctgtgtgcttagaacaattagaccatctttattcctactcccactgcaatagagaaaaactttaggggatcctgtgtatgatgaacttagaagaagaaacaaaagagatgcagacataaagagagatataaaaataggatat

SEQ ID NO: 926172 - DNA, 602 bp, Homo sapiens
acattgtcagcagcctaggcatttgctcatgttatgtttgtggaaggactaacataggagaccaatggccttgggaagcaaaaaagttaatgcctcaagataactttactctgagtgactctttccccaaacagatgcccacaagttcaagcgtctggctcttaaaaacttctattattagaagatactttgttgctcgctgaggaaaggcttttacagacccagtaggagaaataacctgcttaggayggcaatattacaatgaaacattaaggaaaactttgtggcagggcacagatgactacagagcaccttatccaaatctgttctcccgtttctcttctctaaaccacacttggtatcaacttgaatctccaaatacttggcaagcaacccccagtctttattggatctgtgggctatgggcatatcaacagttgccagttaaatgggcaggggcctgtgtgcttagaacaattagaccatctttattcctactcccactgcaatagagaaaaactttaggggatcctgtgtatgatgaacttagaagaagaaacaaaagagatgcagacataaagagagatataaaaataggatat

SEQ ID NO: 926173 - DNA, 629 bp, Homo sapiens
gtagtcccagctactcgtgaggctgaagcagaagaatcgcttgaacccgggaggcacaggttgtggttagccaagatcgcaccattgcactccagcctgggcaacaagagtgaaactctatctcaaaaataaataaataaataaataaataawaaataaataaattaaattaaaaagaaagaattgaaatcagatcttgaagagatacattactctgatgtcattgcaggattatgcacactagccatgatgtggaaacaacctaaatgtccatcaaaagatgaatgaataaaatgtgggatacacatacaagcaaatactattcagtttttaaaaaagaagggatttttgcaatatgtgacagaatacatgaatcttgaggacattatactaagtgaaatgggccatttaacagaaagacaaatattgcatgattctgcttatataaggtatctaaaatgtcaaatttgtggaatcaagagtggaatgttggctatagggtcaatgatggggagactgatatttgggagaaagtaaatagtcaccaatgaatgggtgtaaagttctgttaagcaagataaatatgccctacaaatctgctatacaatgttgtacatatagtctacaat

SEQ ID NO: 926174 - DNA, 629 bp, Homo sapiens
gtagtcccagctactcgtgaggctgaagcagaagaatcgcttgaacccgggaggcacaggttgtggttagccaagatcgcaccattgcactccagcctgggcaacaagagtgaaactctatctcaaaaataaataaataaataaataaataatwaataaataaattaaattaaaaagaaagaattgaaatcagatcttgaagagatacattactctgatgtcattgcaggattatgcacactagccatgatgtggaaacaacctaaatgtccatcaaaagatgaatgaataaaatgtgggatacacatacaagcaaatactattcagtttttaaaaaagaagggatttttgcaatatgtgacagaatacatgaatcttgaggacattatactaagtgaaatgggccatttaacagaaagacaaatattgcatgattctgcttatataaggtatctaaaatgtcaaatttgtggaatcaagagtggaatgttggctatagggtcaatgatggggagactgatatttgggagaaagtaaatagtcaccaatgaatgggtgtaaagttctgttaagcaagataaatatgccctacaaatctgctatacaatgttgtacatatagtctacaat

SEQ ID NO: 926175 - DNA, 443 bp, Homo sapiens
cttattcattatcacagtaacagcacggtaaagatctgtacccatgattcaattatctcccaccacagtccctcccacaacacctgggaattcaagatgagatttgggtggggacacaaccaaaccatatcattctgcccctgacccctcccaaatatcatgtcctcacatttcaaaaccaatcatgccttcccaatggtgccccaaattcttaactcatttcagcattaatcaaaagtcacagtccaaagtctcayccaaaacaaggcaagtcatttctgcctatgagtctgtaaaatcaaaagtaagttagttatttcctagatacaatggaggtacaggcattggatagatacagccattccaagtgggagacattggctaaaacaaaggagctacaggccccatgcaaggccaaaatcgggcaggatagtcaaatctta

SEQ ID NO: 926176 - DNA, 443 bp, Homo sapiens
cttattcattatcacagtaacagcacggtaaagatctgtacccatgattcaattatctcccaccacagtccctcccacaacacctgggaattcaagatgagatttgggtggggacacaaccaaaccatatcattctgcccctgacccctcccaaatatcatgtcctcacatttcaaaaccaatcatgccttcccaatggtgccccaaattcttaactcatttcagcattaatcaaaagtcacagtccaaagtctcatccaaaacaaggcargtcatttctgcctatgagtctgtaaaatcaaaagtaagttagttatttcctagatacaatggaggtacaggcattggatagatacagccattccaagtgggagacattggctaaaacaaaggagctacaggccccatgcaaggccaaaatcgggcaggatagtcaaatctta

SEQ ID NO: 926177 - DNA, 563 bp, Homo sapiens
tagttcaaccattgtggaagtcagtgtggcgattcctcagggatctagaagtaggaataccatttgacccagcaatcccattactgggtatatacccaaacgattataaatcatgctcctataaagacacatgcacacgtatgtttattgtggcactattcacaatagcaaagacttggaactaagccaaatgtccaacaatgatagactggattaagaaaatgtggcwcatatacacaatggaatactatgcagccataaaaaatgatgagttcatgtcctttgtagggacatgggtgaagctggaaaccatcattctcagcaaactatcacaaggacaaaaaaactaaacaccgcatattctcactcataggtgggaattgagcaatgagaacacatggacacaggaaggggaacatcacacactggggcctgttgtgggatggggggatgggggagggatagcattaggagatatacctaatgtaaaatgatgagttactgggtgcagcacaccaacatggcacatgtatacatatgtaccaaacctgcacgttgtgccc

SEQ ID NO: 926178 - DNA, 563 bp, Homo sapiens
tagttcaaccattgtggaagtcagtgtggcgattcctcagggatctagaagtaggaataccatttgacccagcaatcccattactgggtatatacccaaacgattataaatcatgctcctataaagacacatgcacacgtatgtttattgtggcactattcacaatagcaaagacttggaactaagccaaatgtccaacaatgatagactggattaagaaaatgtggctcatatacacmatggaatactatgcagccataaaaaatgatgagttcatgtcctttgtagggacatgggtgaagctggaaaccatcattctcagcaaactatcacaaggacaaaaaaactaaacaccgcatattctcactcataggtgggaattgagcaatgagaacacatggacacaggaaggggaacatcacacactggggcctgttgtgggatggggggatgggggagggatagcattaggagatatacctaatgtaaaatgatgagttactgggtgcagcacaccaacatggcacatgtatacatatgtaccaaacctgcacgttgtgccc

SEQ ID NO: 926179 - DNA, 579 bp, Homo sapiens
agaatggtggtaaacgtaattggtaaacattcctattgcaaaagggaggaatggaagaaataggttaaaagacagaagtaaaaggccccataaaagtccaaaatccatcagggcagacattaagtctttaagctccagaataatctcctttggctcagtgtcccagatcctgggtacactagtgctaggggtaggctcccaaagcctgaggcagccctggccccatggctttgcaaggcacagcagaagtggttgctttcacaggtttgggtctggtgcctgtggcttttatgggctgaagttgcatgctgctggtggctccataattctagggtatctgcaacattcctcttcccacagctccactgtccaccgctgtggctctacccctgaggcaggtctacactcccaagctttctgatacagcctctgaagtccacrtggaagtcaccaggcctctacctgtcttgtattctggacacattcagacttagcattacatggatgccactaacgcttactgcatgtgctctctggagcagtggcccaagcagtatttgggccccattagctgtagct

SEQ ID NO: 926180 - DNA, 578 bp, Homo sapiens
atggagaagaagaaggaagtaaagatcgcaaaacaattagaacatgaacaaccaaatggcaggagtaagtgctaacttatcaataataacatcacatgtaaatggactaaactctccaatcaaaggttatatggctccaatcaaaggctaaatggataaaaacaaggcccagaaatctattgcctacaagacacacatagattgaaattcaagagataataaaacttattccatgcaaaygaaagccaaaacaaaccagtagtagctatacttacattggacaaaataaatttcaagaaaagaatctataaaaaagagacaatgttattgcataatgaaaaagaagtcaattcagcaagaggatttaataatggtaaatacatatgcactaaacactggagtacccagatatataaggcaaatattattagagctaaagagagagagatgccaatctaataatagccaaataattcaacaccctgcttttatcatttcacagatcatcagacagaaaattaacagaaatactggacttaattcataaaatagaccaaatagacctaatatttacgaac

SEQ ID NO: 926181 - DNA, 578 bp, Homo sapiens
atggagaagaagaaggaagtaaagatcgcaaaacaattagaacatgaacaaccaaatggcaggagtaagtgctaacttatcaataataacatcacatgtaaatggactaaactctccaatcaaaggttatatggctccaatcaaaggctaaatggataaaaacaaggcccagaaatctattgcctacaagacacacatagattgaaattcaagagataataaaacttattccatgcaaacgaaagccaaaacaaaccagtagtagctatacttacattggacaaaataaatttcaagaaaaraatctataaaaaagagacaatgttattgcataatgaaaaagaagtcaattcagcaagaggatttaataatggtaaatacatatgcactaaacactggagtacccagatatataaggcaaatattattagagctaaagagagagagatgccaatctaataatagccaaataattcaacaccctgcttttatcatttcacagatcatcagacagaaaattaacagaaatactggacttaattcataaaatagaccaaatagacctaatatttacgaac

SEQ ID NO: 926182 - DNA, 578 bp, Homo sapiens
atggagaagaagaaggaagtaaagatcgcaaaacaattagaacatgaacaaccaaatggcaggagtaagtgctaacttatcaataataacatcacatgtaaatggactaaactctccaatcaaaggttatatggctccaatcaaaggctaaatggataaaaacaaggcccagaaatctattgcctacaagacacacatagattgaaattcaagagataataaaacttattccatgcaaacgaaagccaaaacaaaccagtagtagctatacttacattggacaaaataaatttcaagaaaagaawctataaaaaagagacaatgttattgcataatgaaaaagaagtcaattcagcaagaggatttaataatggtaaatacatatgcactaaacactggagtacccagatatataaggcaaatattattagagctaaagagagagagatgccaatctaataatagccaaataattcaacaccctgcttttatcatttcacagatcatcagacagaaaattaacagaaatactggacttaattcataaaatagaccaaatagacctaatatttacgaac

SEQ ID NO: 926183 - DNA, 552 bp, Homo sapiens
cattgggcaaatacaccagctccaaatgagagaaattggccaaaacaaaaaggccataggcctcatacaagtctgaaatcaaatagggcagtcattaaatcttaaagttccaaaatagtctcctttgactccayggctcatatccacatcatgctaatgcaagaggtgggctcccacagtcttgggcagttgctcccttgtggctttgcaggatataatccccctcctggctgccctcatgggctggcgttgagtgcctgcggctcttccaggtgcatggtgcaagctgttggtggatctaccattctgggtctaaaggatgatgatgatggtcctcttcttacagctccactaggctttccccagtgggactctgtgtgggggcttcaagcctacatttcttttccacactgcagaggttctccatgaaggctccatccttgcagcaaacttctgcctggacatccaggcatgtccaagcatcttctgaaatcttcatggaggttcccaaaatgcaaatattgtcttttgtgcacccactggaccaacccc

SEQ ID NO: 926184 - DNA, 552 bp, Homo sapiens
cattgggcaaatacaccagctccaaatgagagaaattggccaaaacaaaaaggccataggcctcatacaagtctgaaatcaaatagggcagtcattaaatcttaaagttccaaaatagtctcctttgactccatggctcatatccacatcatgctaatgcaagaggtgggctcccacagtcttgggcagttgctcccttgtggctttgcaggatataatccccctcctggctgccctcatgggctggcgttgagtgcctgcggctcttccaggygcatggtgcaagctgttggtggatctaccattctgggtctaaaggatgatgatgatggtcctcttcttacagctccactaggctttccccagtgggactctgtgtgggggcttcaagcctacatttcttttccacactgcagaggttctccatgaaggctccatccttgcagcaaacttctgcctggacatccaggcatgtccaagcatcttctgaaatcttcatggaggttcccaaaatgcaaatattgtcttttgtgcacccactggaccaacccc

SEQ ID NO: 926185 - DNA, 552 bp, Homo sapiens
cattgggcaaatacaccagctccaaatgagagaaattggccaaaacaaaaaggccataggcctcatacaagtctgaaatcaaatagggcagtcattaaatcttaaagttccaaaatagtctcctttgactccatggctcatatccacatcatgctaatgcaagaggtgggctcccacagtcttgggcagttgctcccttgtggctttgcaggatataatccccctcctggctgccctcatgggctggcgttgagtgcctgcggctcttccaggtgcatggtgcaagctgttggtggatctaccattctgggtctaaaggatgatgatgatggtcctcttcttacagctccactaggctttccccagtgggactctgtgtgggggcttcaagcctacatttcttttccacactgyagaggttctccatgaaggctccatccttgcagcaaacttctgcctggacatccaggcatgtccaagcatcttctgaaatcttcatggaggttcccaaaatgcaaatattgtcttttgtgcacccactggaccaacccc

SEQ ID NO: 926186 - DNA, 595 bp, Homo sapiens
catgtatcaggcaattcttatttccaatatcaaaacaaaagcctttaatttttcacccttcagtatgctgtttatagtttttttttgtcaattaagaaagatcaagttaaggaagttttcttttgtcctgttttgctaggagctttgttttttaattcataattgtatattgcttttttctgtatcttttaagataatcacatgatttttcccttatattccattactgattgattttaaaatgttaaacaaccttgcatttctcgaaacatttcagttaggttgtgatgtattactctttttatatrttagtggatttcgtttctcaattttttagaattctgaagtttttagaattattctatttcctcatgtaaaaaagtttttcgaattttgcatcttttttctcttaaagaatttgtcaggtttttaataatcaaaatcattccgttcttatgactaaaatgggagaatgtgagattgtaagaacgtgactttttcaaccattttaaatcttttcctttatataactttcttttttggaatagctgatttgcattggtgtgattttgttctctaatgttaggtagaattt

SEQ ID NO: 926187 - DNA, 605 bp, Homo sapiens
ctgtaaatatcaattaggtttgtttggtctatagtacacattaagtctgatgtttctttgttgcaggaagtcaggggccctgaacggagggacctgctgaagccgtgatagaagaacataaattgtgaagatttcatggacatttgttagttctccaaattaatacttttataatttcttacgcctgtctttactgcaatctctgaatataaattgtgaagatttcatggacgtttatcacttccccaatcaatactcttataatttcctatgcctgtctttactttaatctcttaatcccrtcatctttgtaagcagaggatgtatgtcgcctctggaccctgatgattgtgttaactgcacaaattgttcataaagcgtgtgtgtttgaacagtatgaaatctgggcaccttaagaacaggatcacagcgattttcagggaacaagggagataatcttaaagtctggctgcctgggagccgggcggaacagagccatatttctcttcttaccaaaaacgggtaagagaaatatagctgaattctttccccagtaaggaatatgggggcctctaaaatggccgctctgggagtgtctgccttat

SEQ ID NO: 926188 - DNA, 587 bp, Homo sapiens
aaaggtaatgtgttttcttctttctaggttactttttcttatgtttttaacagagactaactttagattacctataattcaagaaatatctattctcaacatcccacatcactgtatgttctttgctaggttattgggctcctgctgtgcaatttagatccttctttgtcattattttctcaagggttttcaaatttccctctttgaggattatagcaatgcacacttacccctgcagcccgytgggtggcaggcagctttgctacctcatgtggctaggtgatttcacagaggtggcaatgataattcacagagaagtaaacaggaagcaccttaaattcaaggttgtggaatgtcgctcctgctgctggtcttctgggaatgttgtgcattttttctttttaaaacttagggtttctgtagaaataatctgttccatcctacattaaatgagaattagaaagatatactcagtcaaatcagtgatttgctggagtggagtcaatggcctgaaactcccttgctggaaagatggctctggagtatgtgagctggattcaggaggcagataacagccagggacagca

SEQ ID NO: 926189 - DNA, 587 bp, Homo sapiens
aaaggtaatgtgttttcttctttctaggttactttttcttatgtttttaacagagactaactttagattacctataattcaagaaatatctattctcaacatcccacatcactgtatgttctttgctaggttattgggctcctgctgtgcaatttagatccttctttgtcattattttctcaagggttttcaaatttccctctttgaggattatagcaatgcacacttacccctgcagcccgttgggtggcaggcagctttgctacctcatgtggctaggtgatttcacagaggtggcaatgataattcacagagaagtaaacaggaagcaccttaaattcaaggttstggaatgtcgctcctgctgctggtcttctgggaatgttgtgcattttttctttttaaaacttagggtttctgtagaaataatctgttccatcctacattaaatgagaattagaaagatatactcagtcaaatcagtgatttgctggagtggagtcaatggcctgaaactcccttgctggaaagatggctctggagtatgtgagctggattcaggaggcagataacagccagggacagca

SEQ ID NO: 926190 - DNA, 587 bp, Homo sapiens
aaaggtaatgtgttttcttctttctaggttactttttcttatgtttttaacagagactaactttagattacctataattcaagaaatatctattctcaacatcccacatcactgtatgttctttgctaggttattgggctcctgctgtgcaatttagatccttctttgtcattattttctcaagggttttcaaatttccctctttgaggattatagcaatgcacacttacccctgcagcccgttgggtggcaggcagctttgctacctcatgtggctaggtgatttcacagaggtggcaatgataattcacagagaagtaaacaggaagcaccttaaattcaaggttgtggaatgtcgctcctgctgctggtcttctggraatgttgtgcattttttctttttaaaacttagggtttctgtagaaataatctgttccatcctacattaaatgagaattagaaagatatactcagtcaaatcagtgatttgctggagtggagtcaatggcctgaaactcccttgctggaaagatggctctggagtatgtgagctggattcaggaggcagataacagccagggacagca

SEQ ID NO: 926191 - DNA, 587 bp, Homo sapiens
aaaggtaatgtgttttcttctttctaggttactttttcttatgtttttaacagagactaactttagattacctataattcaagaaatatctattctcaacatcccacatcactgtatgttctttgctaggttattgggctcctgctgtgcaatttagatccttctttgtcattattttctcaagggttttcaaatttccctctttgaggattatagcaatgcacacttacccctgcagcccgttgggtggcaggcagctttgctacctcatgtggctaggtgatttcacagaggtggcaatgataattcacagagaagtaaacaggaagcaccttaaattcaaggttgtggaatgtcgctcctgctgctggtcttctgggaatgttgtgcattttttctttttaaaacttagggtttctgtagaaataatctgttccatcctayattaaatgagaattagaaagatatactcagtcaaatcagtgatttgctggagtggagtcaatggcctgaaactcccttgctggaaagatggctctggagtatgtgagctggattcaggaggcagataacagccagggacagca

SEQ ID NO: 926192 - DNA, 796 bp, Homo sapiens
taactaaaattccaccaagatattcttgtatggttggcccactcttttggaattacatcatagttcaattatcaatatcacagtgtatcttcatcctaatatacctggcacatttcctatatgttataagttgaggtggaaatttaggagcttttaatcattctctttataaaataatgtcatatatttttataaataatacatataattttaagatagtaaaatatctgcatgcttaaatcaaatatattctacaacaaacatattcccactatatgttactagtatctgggaagattgatgcctatctaccctttgctcaggtaaaacttcgaaaagagcctccttttaaatttaaagagctcctaacacattgttcatacttttaacctgcagaactyagggcaatcctagccttcttctgctcccaaaacttatgaaacaaaacatcaaatagaaaaacacaacagttctcacattcctttcagggtaacagagtggctgagccttgttattactccccagataatactagcttctgtcctcccaaagccacttaatcctgctcaattcaaaaatcaagtcctctgggagagtgagcagagcctgtgagctcattctgaaacctgtcattgtcttttccagccctgcctcccaacaacctctgctgactccagtgcgtggttggatgatacatgttttgatagctggatctctgagtcattttttttttttcagaaatcctcttaacaggcttcctaaggatgccatggagaaaagtaagcaagtagaaaat

SEQ ID NO: 926193 - DNA, 796 bp, Homo sapiens
taactaaaattccaccaagatattcttgtatggttggcccactcttttggaattacatcatagttcaattatcaatatcacagtgtatcttcatcctaatatacctggcacatttcctatatgttataagttgaggtggaaatttaggagcttttaatcattctctttataaaataatgtcatatatttttataaataatacatataattttaagatagtaaaatatctgcatgcttaaatcaaatatattctacaacaaacatattcccactatatgttactagtatctgggaagattgatgcctatctaccctttgctcaggtaaaacttcgaaaagagcctccttttaaatttaaagagctcctaacacattgttcatacttttaacctgcagaacttagggcaatcctagccktcttctgctcccaaaacttatgaaacaaaacatcaaatagaaaaacacaacagttctcacattcctttcagggtaacagagtggctgagccttgttattactccccagataatactagcttctgtcctcccaaagccacttaatcctgctcaattcaaaaatcaagtcctctgggagagtgagcagagcctgtgagctcattctgaaacctgtcattgtcttttccagccctgcctcccaacaacctctgctgactccagtgcgtggttggatgatacatgttttgatagctggatctctgagtcattttttttttttcagaaatcctcttaacaggcttcctaaggatgccatggagaaaagtaagcaagtagaaaat

SEQ ID NO: 926194 - DNA, 796 bp, Homo sapiens
taactaaaattccaccaagatattcttgtatggttggcccactcttttggaattacatcatagttcaattatcaatatcacagtgtatcttcatcctaatatacctggcacatttcctatatgttataagttgaggtggaaatttaggagcttttaatcattctctttataaaataatgtcatatatttttataaataatacatataattttaagatagtaaaatatctgcatgcttaaatcaaatatattctacaacaaacatattcccactatatgttactagtatctgggaagattgatgcctatctaccctttgctcaggtaaaacttcgaaaagagcctccttttaaatttaaagagctcctaacacattgttcatacttttaacctgcagaacttagggcaatcctagccttcttctgctcccaaaacttatgaaacaaaacatcaaatagaaaaacacaacagttytcacattcctttcagggtaacagagtggctgagccttgttattactccccagataatactagcttctgtcctcccaaagccacttaatcctgctcaattcaaaaatcaagtcctctgggagagtgagcagagcctgtgagctcattctgaaacctgtcattgtcttttccagccctgcctcccaacaacctctgctgactccagtgcgtggttggatgatacatgttttgatagctggatctctgagtcattttttttttttcagaaatcctcttaacaggcttcctaaggatgccatggagaaaagtaagcaagtagaaaat

SEQ ID NO: 926195 - DNA, 796 bp, Homo sapiens
taactaaaattccaccaagatattcttgtatggttggcccactcttttggaattacatcatagttcaattatcaatatcacagtgtatcttcatcctaatatacctggcacatttcctatatgttataagttgaggtggaaatttaggagcttttaatcattctctttataaaataatgtcatatatttttataaataatacatataattttaagatagtaaaatatctgcatgcttaaatcaaatatattctacaacaaacatattcccactatatgttactagtatctgggaagattgatgcctatctaccctttgctcaggtaaaacttcgaaaagagcctccttttaaatttaaagagctcctaacacattgttcatacttttaacctgcagaacttagggcaatcctagccttcttctgctcccaaaacttatgaaacaaaacatcaaatagaaaaacacaacagttctcacattcctttcagggtaacagagtggctgagccttgttattactccccagataatactagcttctgtcctcccaaagccacttaatcctgctcaattcaaaaatcaagtcctctgggagagtgagcagagcctgtgagctcattctgaaacctgtcaytgtcttttccagccctgcctcccaacaacctctgctgactccagtgcgtggttggatgatacatgttttgatagctggatctctgagtcattttttttttttcagaaatcctcttaacaggcttcctaaggatgccatggagaaaagtaagcaagtagaaaat

SEQ ID NO: 926196 - DNA, 566 bp, Homo sapiens
cctgcctgcagaaaggaactacccactttgggtctcctgagagctgttctgttgctcagtgaagctcttcttgttcagtgaagctccggttgtccgtgtacctmattcttcctagacacaggagaaaaatttgggacctgccaaatgacaggactaaagatgtgctgctggattctgtttgcaagtattttgttgatgacttttgcattgatgttcatcaaggatattggcctgaagttttctttttctgttgtgtctctgccaggttttggtatcaggagtatgctggcctcatagaatgagttggggaggagttcctccttctcaattttttgtaatagtttctgtaaaaatggtaccagctcttctttgtacatctggtagaattcggctgtgaatccaacaacccattaaaaagtcagtaaaggacatgaacagacacttttcaaaagaagacatacaggtagtcaacaagcatatgaaaaaaagctcagtatcactgattattagagaagtgcaaatcaaaactccaatgtgatactatttcacaccggtgggaatagcta

SEQ ID NO: 926197 - DNA, 463 bp, Homo sapiens
caactactaatttgcaacagtaagaggaaaagccatagacaaacaggactctctctgctagttatcctagactgcatttcttttccccttatttcaatcctcaaacatgccagagtggacttaacctagtcccaaaaataatccattaagcaagtctgtcctcagtagtgtcaccgtccacccagttgtacaagccagaaaccaartcattcttgacacttcttttgcctctctaaaattcaattcacaaagtccttgcaattttacctgctgaaaagctttcagatccatgccaacctcccattttttgcagcagcagccttgtctaaactaccataacttcttgtttggcatgacacaatggccctgaaatggcccagttgtatctctgctgctccccccactctctccccacaatattttcaaaatgaatatctaaaaatgtgaactctgtttaaaatcc

SEQ ID NO: 926198 - DNA, 555 bp, Homo sapiens
aacgaggactgtaactaccatgagtatttcctccttcttttgttaaaaacatgtttgtgcatgtatatacctgtactaagaaaatatatcttcattttcttttcctttatcatgtgacataagatttactaacttcatatcagcatttaagtattgttaactttatgtaatagtatttgggttggggattggtgggtttctggttgtatgaaggayagctgtattgtgttaggcataattttgaccttattgtctttatttgaagactgtgtgtgatctcaggagatgtgtatgggttgaagttgacaagtggtggacttgtaatggttaatattgagtgtcaacttgattggattgaaggatgcaagtattgatcctgggtgtgtctgtgagggtgttgccaaaggagattaacgtttgagtcagtgggctggggaaggcagacccacccttaatcaggtgggcaccatctaataagccaccagtgaatacaaagcaggcagaaaaatgtgaagaggcgagacaagcctagcctcctagcctatatctttctcc

SEQ ID NO: 926199 - DNA, 607 bp, Homo sapiens
ctggccggcagctccgagtgtggggccgccaagcccatgcccacccggaactctagctggcccgcaagcgccgggcgcagccccggttcccacctgtgcctctccctccacacctccctgcaagccgagggagccagctccagcctcggccagcccagagaagggctcccatggtgcagtggcaggctgaagggctcctcaagtgyggccagaatgggcgctgaggccaaggaggcaccgagagtgagtgagggctgcgagggctgccagcacgctgtcacctctcaccacctctcagccattgcttttgctgggcttcttaaaaactccctcaagtgtgaacagttcagggccagttaagaattaaaggagagtttatacataaaatttggggcttccctctgtgggtctgccctttctaagatttgctctattactttccaactgttttgtcagccctgaactccatgctctgagtccccaaatcaagagaattgtggctttcttctagagtcagagatgccccatgcgtaatagtctgatcttttcaaagagtcactctaaaaatctaattcagatcatatccatgttctgctgaaaactctat

SEQ ID NO: 926200 - DNA, 548 bp, Homo sapiens
tttcaaacaggaggaaaaagcatggggattttccttgactgttgatattctctagctctgtgcttttttggaatttcatgccatatatgagtattttgtgttgggtatatatagagggcaacattcataaataggaaaacttcaagatttagaggtgttacttcatgtatttctgttctgagaatggaggttcttggacaaatgtatttgaagtacagagcacagagggttaatacatataatattcaaataactattaccaaatatcaaggagacaatgagcccaatgcaaattatatcaaaaaacaaatcaaacgcattcaagtggaaaatgaatatgaaaaaatatcagatttactagttgtcagaatgtaagttatatttacaattaatyattttatagccattaaatttaacagaataattttaaaatcagtaacatcaattgctattggggatgcttgaaaaattcatatattgctgttagaaatgtgagttttcacaaaattttaaaaaccattgtaaatatctactaaaattaagataaa

SEQ ID NO: 926201 - DNA, 650 bp, Homo sapiens
gtgatatcccctttgtcattttttattgcatctatttgaatcttctctcttttcttctttattagtattgctagtggtctatcaattttgctgatcttttcaaaaaagttttttttttttttcaataaaaagctcctggattcattgattttttgaagggttttttgtgtctctatttccttcaattctgctctgatcttagttatttcttgccttctgctcgctttgaatgtgtttgctcttgcttctctagttcttttaattgtgatgttagggtgtcagttttagatctttcctgctttctcttgtgggcatttagtgctatamatttccctcaacgcactgctttaaatgtgtcccagagattctagtttgttgtgtctttgttctcattggtttcaaaaaacatctttatttctgccttcatttagttatgtaccgagcagtcattcaggagcaggttgttcagtttccatgtagttgagcggttttgagtgattttcttaatcctgagttctagtttgattgcactgtggtttgagagatagtttgctataatttctgttcttttacatttgctgaggagtgctttacctccaactatgtggtcaattttggaataagtgcagtgtggggctgagaataatgta

SEQ ID NO: 926202 - DNA, 626 bp, Homo sapiens
ctagtggtctatcaattttgctgatcttttcaaaaaagttttttttttttttcaataaaaagctcctggattcattgattttttgaagggttttttgtgtctctatttccttcaattctgctctgatcttagttatttcttgccttctgctcgctttgaatgtgtttgctcttgcttctctagttcttttaattgtgatgttagggtgtcagttttagatctttcctgctttctcttgtgggcatttagtgctataaatttccctcaacgcactgctttaaatgtgtcccagagattctagtttgttgtgtctttgttctcattggtttcaaaaaacatctttatttctgccttcatttmgttatgtaccgagcagtcattcaggagcaggttgttcagtttccatgtagttgagcggttttgagtgattttcttaatcctgagttctagtttgattgcactgtggtttgagagatagtttgctataatttctgttcttttacatttgctgaggagtgctttacctccaactatgtggtcaattttggaataagtgcagtgtggggctgagaataatgtatattctgttgatttggggtggagagttctgtagatgtctatcaggt

SEQ ID NO: 926203 - DNA, 626 bp, Homo sapiens
ctagtggtctatcaattttgctgatcttttcaaaaaagttttttttttttttcaataaaaagctcctggattcattgattttttgaagggttttttgtgtctctatttccttcaattctgctctgatcttagttatttcttgccttctgctcgctttgaatgtgtttgctcttgcttctctagttcttttaattgtgatgttagggtgtcagttttagatctttcctgctttctcttgtgggcatttagtgctataaatttccctcaacgcactgctttaaatgtgtcccagagattctagtttgttgtgtctttgttctcattggtttcaaaaaacatctttatttctgccttcatttagttatgtaccsagcagtcattcaggagcaggttgttcagtttccatgtagttgagcggttttgagtgattttcttaatcctgagttctagtttgattgcactgtggtttgagagatagtttgctataatttctgttcttttacatttgctgaggagtgctttacctccaactatgtggtcaattttggaataagtgcagtgtggggctgagaataatgtatattctgttgatttggggtggagagttctgtagatgtctatcaggt

SEQ ID NO: 926204 - DNA, 626 bp, Homo sapiens
ctagtggtctatcaattttgctgatcttttcaaaaaagttttttttttttttcaataaaaagctcctggattcattgattttttgaagggttttttgtgtctctatttccttcaattctgctctgatcttagttatttcttgccttctgctcgctttgaatgtgtttgctcttgcttctctagttcttttaattgtgatgttagggtgtcagttttagatctttcctgctttctcttgtgggcatttagtgctataaatttccctcaacgcactgctttaaatgtgtcccagagattctagtttgttgtgtctttgttctcattggtttcaaaaaacatctttatttctgccttcatttagttatgtaccgagcagtcattcaggagcaggttgttcagtttccatgtagttgagcggttttgagtgattttcttaatcctgagttctagtttgattgcactgtggtttgagagatagtttgytataatttctgttcttttacatttgctgaggagtgctttacctccaactatgtggtcaattttggaataagtgcagtgtggggctgagaataatgtatattctgttgatttggggtggagagttctgtagatgtctatcaggt

SEQ ID NO: 926205 - DNA, 672 bp, Homo sapiens
cccctttccaggacatccctgaaggacagtggtgaagggaaatcttcccagtgggcagaggttcgagcagtgcacctggttgcgcactttgcatggaaggagaaatggccagatgtgtgattatatactgattcacgggctgtagccagtggtttgctagatgttcagggtcttggcagaagcaygatcggaaaattggtgacaaagaaatctggggccaggcacggtggctcacgcctgtaatcccagcacttcgggaggccgaggcgggcagatcacgaacgaggtcaggagattgagaccatcctggctaacactgtgaaacaccgtctctactaaaaacacaaaaaattagctgggcatggtggtgggcgcctgtagtcccagctactcaggaggctgaggcagaagaatggtgtgaacccgggaggcggagcttgcagtgagccaagatcacaccactgcactccagcctgggtgacagagcgagactccgtctcaaaaataagaaaaaaaaagaaaaagaaaaagaaaaatttggggaagaggtatgtggatagacctctgtcagtggtcaaaacctgtaaagctatttgtatcccatatgagtgctcaccaacgagtgacctcaacagaggaggattttaataatcaagtggataggatgactgt

SEQ ID NO: 926206 - DNA, 609 bp, Homo sapiens
tttatttttatttttattttatttatttatttttttagatggagtcttgctctgtcacccaggctggagtgcagtggcgcaatctcggctcactgcaagctccacctcctggttaatgccattctcctgccttagtctcctgagtagctgggactacaggtgcccgccaccacgcccagctattttttatttttatttttatttttagaagagatggggtttcaccctgttagccaggatggtcttgatatcctgaccttgtggtctgcctgcctcagcctcgcaaagtgctgggattacaggcgtgagccaatgcacccggccttatctttgtttttattgcatttgcttttgtgtgcttgggcatgagatccttgcataagctagtgtctagaagggkttttccaatgttatcttctagaattttcatagtttcaggttttagatttaagttcttaatccatcttgagttgatttttatataaagtgaaagataaggatccagtttcattctcctacatgtggctagccaattgtcccagcaccatttgttgaaaagggtgtcctttctccactttatgtttttgtttgctttgtcgaggatcagtg

SEQ ID NO: 926207 - DNA, 671 bp, Homo sapiens
aaaatgtccgtaatgctcaaagcatctacagattcaatgcaattcctatcaaattatcaacatcatttaatgtagaattaggaaaaaaaacttaacatttatgtagaatcaaaaaagagccacaatagccaaagcgatcctaagcaaaaggagtaaagtgagaagcatcacattaccttaattcaaattatactgcaaagctatagtaatcaaaacgacatgatactgatacagaaatagaaacayagatcaatggtagacaataaagagcagagaaataaattcacatatctacaaccaactggtctttgacaaagtcaacaggatactgtttaataaatggagctgggaaaattggatagccatatgcagaagaataaaactggacccatatccctcattatctaccaaaattaactcgattaatttaagaagacttaaatgtaagaactcacactattaaaaaaaaaaaaagtcatagaagggaacctaggaaaaactcttttgtacactggcttgggcaaaatacttatgaccaggtatcaaaagcaaatgcaacaaaatgaaaaataaacaatgggacttaattgaactgaaaatctttcatacagcaaaatatataatcaccagagcaaacagacaacctatagaatggaagaaaatatttgaaa

SEQ ID NO: 926208 - DNA, 594 bp, Homo sapiens
atcctcccctcaccctaacatggggggatgttagaactctcagctcattcttcagtgtctacatttatttggccagatgtaatggctctgctagggttcacaaaaacttttcttaaacatcttttttacaagttctgattaagtgagctagaacctcactttgaaatgtgaaaactcttaaccacccattttcttggagattagcctaaactgaggcagaaagtcccattttaacatactgttatactataatttattttttaaaaaggacaagtggttttaaacttttgctacaacataagccattatcctcatttcacctatgtataactaaggggaattcaaaaaacttaaatatgtttccaatggaatagtaggctttcctgtgaattaccacagatwaaaaggagaagacaaagtttatttcaaaagtcttacagaaatttttctttagagtcacagaggccaggaaagtatgcctaccttatataaataaaagccctgtcacaacccattttcaaagcagatgtatagcaggatccagcaggggtttgcatctgtttcatgtgtgctggccttcctctgtagaagctc

SEQ ID NO: 926209 - DNA, 672 bp, Homo sapiens
aagctggcactgcgggcatttatttagtacagatttaatgacaaaggctttgagtcaacacacttgcaggtaatcaacatggttgccaccgtccccctccccctgtgcccccccaccacccccagcccccattgagcagtcctgcatgtggatgattacaggccaggttccaaggcctaagtaaactaatgtgtctagatcagtttctttatacccccttgttatctaacctaagctttcaggcaccaggtaagagaatctggctgccttcagccaaatccttttccaaagcttttgtaaaacctcctggacttccaaggaggtttgcttctttctataatttcctcttataatttttcccaccacctgactgaactcctataccttccccttttctgttttttatatcaggttttgttgattgaagagtacagatgtgtgcagcaacaggtctctcaggcatggtggtcactgcttgtattctggctttgatcctagaattagtaaataacataagacaaacrtgagtataattagcaacattcttttccaatcaagcagtgacctgcagtgttacttggcatttcagtttgatgagtgctgttactaaggaaccccactaggggtatgttaatccctcttagctaagcagtcgcatttgttagaagctgg

SEQ ID NO: 926210 - DNA, 608 bp, Homo sapiens
gcatgagagctaattaagtgagaattggtatcaatggatacatgtacatatttaagttttccaaattcagggacatgtgtaacatctgtttgccataacggatttggttctagtcctctagggttaacacctcttgaaggaggggacatgcttgtgagctggcaatctgggcattgcaggctaatttgtttagtctctgggtaagttgaaattgttaggtaagtttctccagttttggtggaaaaattgatgtgactgggtggcttgaccaagcactgatgtcataacttgtaggtttgcttgatcatcgacataaaccaatgggccagscagtgagatgtgggcccaaatgtgtgtaataaaaataggatgtgtacgttgatctagcaattgctgaaatcaaagaaaaagtacacgcagggtgggctccagagtggagttaatgagggctgtctctgggttctgcaataaataaacagagtaagcagagtcactaacaatattgatgagctgagtggaaatagttttccaaggccaatattaaggctcccacctcagctctctgagttctaataaatccagaacgagtgagggaattatgcaatctc

SEQ ID NO: 926211 - DNA, 692 bp, Homo sapiens
agatttaatttttgtgggctgccccataaatgcaaaagttaaaagaagatgtttaatgacatattgggtgaactctccaggaaaagcatgagagctaattaagtgagaattggtatcaatggatacatgtacatatttaagttttccaaattcagggacatgtgtaacatctgtttgccataacggatttggttctagtcctctagggttaacacctcttgaaggaggggacatgcttgtgagctggcaatctgggcattgcaggctaatttgtttagtctctgggtaagttgaaattgttaggtaagtttctccagttttggtggaaaaattgatgtgactgggtggcttgaccaagcactgatgtcataacttgtaggtttgcttgatcatcgacataaaccaatgggccaggcagtgagatgtgggcccaaatgtgtgtaataaaaataggatgtgtacgttgatctagcaattgctgaaatcaragaaaaagtacacgcagggtgggctccagagtggagttaatgagggctgtctctgggttctgcaataaataaacagagtaagcagagtcactaacaatattgatgagctgagtggaaatagttttccaaggccaatattaaggctcccacctcagctctctgagttctaataaatccagaacgagtgagggaattatgcaatct

SEQ ID NO: 926212 - DNA, 732 bp, Homo sapiens
agactgaaggcctcctggcaatgttctctttaatccaggatgtgggttaagagttttgactgattggccgggcgcggtggctcacgcctgtaatcccagcactttgggaggccgaggcgggtggatcatgaggtcaggagatcgagaccatcctggctaacaaggtgaaaccccgtctctactaaaaatacaaaaaattagccgggcgcggtggcgggcgcctgtagtcccagctactggggaggctgaggcaggagaatggcgtgaacccaggaagcagagcttgcagtgagccgagattgcgccactgcagtccgcagtcyggcctgggcgacagagcgagactccgtctcaaaaaaaaaaaaaaaaaaaaaaagagttttgactgattatgaggcaacgtacgtactactaaagtttctcacctacattgggcctttatcttttatctattaaagcataaggttattcatttataaggctggctgcaaaattcttcacaaatgaaagtataccctataagtgcacttaataggcccccttttaatttctattgttcatagtggcataaacaaggaaaaaatattcaaagataagagtctcgtgagagtagaagccttgatctgtgatcttgggaaaagttgttcacatcaaggatgtcatctttttctggggagaagctttcctggttagttttaccttaagggttccgatgggtgtacagttccagga

SEQ ID NO: 926213 - DNA, 732 bp, Homo sapiens
agactgaaggcctcctggcaatgttctctttaatccaggatgtgggttaagagttttgactgattggccgggcgcggtggctcacgcctgtaatcccagcactttgggaggccgaggcgggtggatcatgaggtcaggagatcgagaccatcctggctaacaaggtgaaaccccgtctctactaaaaatacaaaaaattagccgggcgcggtggcgggcgcctgtagtcccagctactggggaggctgaggcaggagaatggcgtgaacccaggaagcagagcttgcagtgagccgagattgcgccactgcagtccgcagtctggcctgggcgacagagcgagactccgtctcaaaaaaaaaaaaaaaaaaaaaaagagttttgactgattatgaggcaacgtacgtactactaaagtttctcacctacattgggcctttatcttttatctattaaagcataaggttattcatttataaggctggctgcaaaatycttcacaaatgaaagtataccctataagtgcacttaataggcccccttttaatttctattgttcatagtggcataaacaaggaaaaaatattcaaagataagagtctcgtgagagtagaagccttgatctgtgatcttgggaaaagttgttcacatcaaggatgtcatctttttctggggagaagctttcctggttagttttaccttaagggttccgatgggtgtacagttccagga

SEQ ID NO: 926214 - DNA, 605 bp, Homo sapiens
aggagccagcaaaaaggcagaaaagacaaacacattaagtcaaaggaaaatcaaagggaagttgatgtcacagagtccaagggaagatagtattataaatagaactacgaaaataaccttcatacacgaggtgacatgagaacagataatccaccattagatttggsaaaggaaggatcattgatcttaacagtagctactgctagaactaccaccataaaacagaaaaaaagcaattggagaaaataaatgtaatctttttgtgaaaagttttacactaaaaggaagcaaagaaatagggagtatcaaaacttctttgtttttattttaagctaacgtttatcttagcatgttaattatgctaaagagaatgattcagtaaaatgtaaaaatgtatgatgcttggaaaggaggtagcaattatgggattgatgcctttgagaaagtgagaggggatgcaatctagcaaataagcagaaggattggccttatgtaaaagcccatttttaaaagagagaaaacctactagatgagtgggttggtagatttaatggtacaagcatgtgaaaattctcttcttctcttctattttctcctgaaataag

SEQ ID NO: 926215 - DNA, 809 bp, Homo sapiens
ggagaaccactgctctcttcaaggctgtcagacagggacatttaagtctgcagaggttactgctgtctttttgtttgtctgtgccctgcctccagaggtggagcctacagaggcaggcaggcctccttgagctgtggtgtgctccacccagttcgagcttcccggctgctttgtttacctaatcaagcctgggcaatggtgggtgcccctcccccagcctcgctgccgccttgcagtttgatctcagactgctgtgctagcaatcagcgagactccgtgggcgtaggaccctccaagccaggtgcgggatataatctcctggtgtgccattttttaagcccgtcggaaaagtgtagtattcaggtgggagagacccgattttccaggtgccgtctgtcacccctttctttgactaggaaagggaactccctgaccccttgtgcttcctgagtgaggcaatgcctcgccctgcttcggctcrtgcacagtgcgctgcacccactgtcctgcacccactgtctggcactccctagtgagatgaacccggtaccttagatgcaaatgcagaaatcacctgtcttctgcattgctcacgctgggagctgtagaccggagctgttcctattcggccatcttggctgccctccttcaaaaatatttttaaaaagtcatttcacagagtatattctctgactagatcactattcaactgaattcaaatcaataacaggccaagtgcagtagctcacacctgtaatcccagcactttgggaggccaaggtgggtggatcacctgtggtcaggagttc

SEQ ID NO: 926216 - DNA, 583 bp, Homo sapiens
ataatataaaaaaaaatggatcataaacatatgtaaacgtaaaactacaaagcttttagaaaaaactgtagaaaatcttcaggattttatactggataccaaaagcataacctgtttttttaataaaaaattggacctcatcaaaatttaatttgctctgcaaaacatacctataagaggataaaaaagcaagctatagaacggagtaaaacatttgcaaaccacatatctggcaaagaactattattctctgcaatatataaakaattctcaaaactcaacattaaaaaaaatactccaattagaaataggcaaaagacacaaagagacatttcactgaagagaatatagatggcaaatatgtacatgaaaagatgttcaaaaacattagctgtcagagaaattaacagctaatggaaattaacagtcacaatggaaactacacacctattagaatgattcataaaaagtagtgatgaccccaaatgctgaatatgtggagaagctggattgctcacacattgctggtagaaatgtaaaattgtacagccattctgggaaataatttggacattactttaaa

SEQ ID NO: 926217 - DNA, 869 bp, Homo sapiens
tgtaagttgtattcctaggtattttattctctttgtagcaattgtgaatgggagttcactcatgacttggctctctgtttgtctgttattggtgtataggaatgcttctgatttttttcatattgattttgtatcctgagactttgctgaagttgcttatcagcttaaggagattttgggctgagatgatggggttttctaaatatacaatcatgtgatctgcaaacagagacaacttgacttcctctcttcctatttgaataccttttatttatttcccttgcctgattgccctggctggaacttccaatactatgttgaatcagagcggtgagagagkgtatccttgtcttgtgccggttttcaaagggaatggttccagtttttgcccattcagtataatattggctgtgggtttgtcataaatagctcttattattttgagatctgttccatcgatatctagtttattgagaatttttggcatgaaggggtgttgaattttatcaaaggccttttctgcatctattgagataatcatgtggtttttgtcatgtggttctgttcatgtgatggatcacatttattgatttgcatatgtggaaccagccttgcatcctagggatgacgccgacttgatagtggtggataagctttttgatgtgctgctggattcggtttgccagtattttatcgaggattttcacattgatgttcatcagggatattgggctgaaattttctttttttgttgtgtctctgccaggttttggtatcaagatgatgctggcctcataaaatgagatagggaggattccctctttttctagtgtttggaatagtttcagaaggaatggtaccagctcctc

SEQ ID NO: 926218 - DNA, 596 bp, Homo sapiens
actgtcttataagtgccatctcctggcaggaggccaaacagcacaagactagtgcaataaacaaaactattaatacaactaaggatcctcacagggttcatttcactcccctgccacctccaccagaggaggtactgctatccatgcctgagagacctgaaggtgkttcacatcacaggactctgtgcagatacctcccagtactagtctggagcccagtagctccacttggtggctatgtccagaagagaaatgacaatctctgacgtttggctctcaggaagccacatccctagggaaaaagggagagcactacatcaagggagcacattgtgtgacaaaataatctgaactgcagcccttgagctccagatcttccctctgacatagtctacccaaatgagaaggaatcagaaaaataattctgataatataacagaacaaagttccttaacaccccctaaaaaatcacactagctcaccaacaatggatcccaaccaagaagaaatccctgaattgcccgaaaaagaattcagaaggtcgggtattaaactaatcaaggaggcatcagagaaaggtgacgtacaacttaatg

SEQ ID NO: 926219 - DNA, 571 bp, Homo sapiens
ctgtcttataagtgccatctcctggcaggaggccaaacagcacaagactagtgcaataaacaaaactattaatacaactaaggatcctcacagggttcatttcactcccctgccacctccaccagaggaggtactgctatccatgcctgagagacctgaaggtggttcacatcacaggactctgtgcagatacctcccagtactagtctggagcccagtagctccacttggtggctatgtccagaagagaaatgacaatctctgacgtttggctctcaggaagccacatccctagggaaaaagggagagcactacatcaagggagcacattgtgtgacaaaataatctgaactgcagcccttgagctycagatcttccctctgacatagtctacccaaatgagaaggaatcagaaaaataattctgataatataacagaacaaagttccttaacaccccctaaaaaatcacactagctcaccaacaatggatcccaaccaagaagaaatccctgaattgcccgaaaaagaattcagaaggtcgggtattaaactaatcaaggaggcatcag

SEQ ID NO: 926220 - DNA, 596 bp, Homo sapiens
actgtcttataagtgccatctcctggcaggaggccaaacagcacaagactagtgcaataaacaaaactattaatacaactaaggatcctcacagggttcatttcactcccctgccacctccaccagaggaggtactgctatccatgcctgagagacctgaaggtggttcacatcacaggactctgtgcagatacctcccagtactagtctggagcccagtagctccacttggtggctatgtccagaagagaaatgacaatctctgacgtttggctctcaggaagccacatccctagggaaaaagggagagcactacatcaagggagcacattgtgtgacaaaataatctgaactgcagcccttgagctccagatcttccctctgacatagtctacccaaatgagaaggaatcagaaaaataattctgataatataacagaacaaagttccttaacaccccctaaaaaatcacactagctcaccaacaatggatccyaaccaagaagaaatccctgaattgcccgaaaaagaattcagaaggtcgggtattaaactaatcaaggaggcatcagagaaaggtgacgtacaacttaatg

SEQ ID NO: 926221 - DNA, 599 bp, Homo sapiens
aggtggctgaatacatttccataagtaaagaggagctgaatgttaatcaccaagatgatggggatgatgtctccagggcatttcagacatcttcaaggcagcccctcccatcactggcccagaggcctaggaaggaaaaatggtttaatgggcaaggcctagggcccagatggctctgtgcaccctttggacatggagcttcatgttccagccactccagcttcagccctggctaaaaggagccaaggtacagcttagcccatggcttcagtgggtgcaagccccaggccttggtggcttctatgtggtgttgggcctgcaggtatgcagaagacaagagttgagctttgggagcctccacctagatttcagagggtgtatggaaatgcctggatgtccaggcaaaagtctgctttgkggtcagagcccccctggagaacctctactagggcatcgcaaaagggaaatgtggggttggagtccccacacggagaccctgctgaggcactgcctagtggagatgtgagaagagggccctgcagaaaggtagatctaccgatagcttgcatcatgtacctggaaaagccataggcacttaa

SEQ ID NO: 926222 - DNA, 656 bp, Homo sapiens
ccacccagattgagggtgggtgtgcctctcccagtccactgactcaaatgttaatctcctttggcaacaccctcacagacacacccagaaataatactttgcacccttccatccaatctagttggcactcaatcttaactgtcactctaccgcatccacacacacacacacacacacacacacacacacacacacacacataacatccactatcacttcaaaatgccttttatgtactgaattgtgccccccacctccaaattcatacgttggcatcttaactctcagtacttcagaatgtgactgtttggtgatagggcctttataaaggtaattaatgtaaagtgaggtcataagtgtggatcaaatccaaacatgactgatatccttgagacgagattgggacacagacacacagaagaaagaatccgtgaagacgcaataagacatggccatctrcatgccgaggagagaggcttcagagaaaacaaccctgcaagcaccttgaccttggacttctagccttcagaagggagaaaataagtttctgttgttcaaaccacctagtctatggtactctggtataactgccccagcaaactgatacagctcctcatcattttctcgacacctctgagaaaaatattaattttgca

SEQ ID NO: 926223 - DNA, 542 bp, Homo sapiens
attcttgaagaataatgggagttgggtaggagtgaggaagagttccaagcagcagaaagagcatgtgaaaaggtccacaggcaagacaggggacatcaaagaaattcatacttgtcagcgtcgggggcgggtgacaagagatgaggctagagagagataagcagaggccaagtagtgaaggtataccaattttttttttttttttttttaagacggagtcttgctctgtcgcccaggctggagtgcagtggcgcgatctcggctcactgcaagctcygcctcccgggttcacaccattctcctgcctcagcctcctgagtagctgggactacaggcgcctgccaccgcccctggctaatttttttttttgtatttttagcagtgacggggtttcaccgtggtctcgatctcctgacctcgtgatccacccgcctcagcctcccaaagtgctgggattacaggtgtgagctaccgcgcccggcccaggtataccaatgttaaagagcttgcccatatcccgagataagggagccagtgaaggg

SEQ ID NO: 926224 - DNA, 542 bp, Homo sapiens
attcttgaagaataatgggagttgggtaggagtgaggaagagttccaagcagcagaaagagcatgtgaaaaggtccacaggcaagacaggggacatcaaagaaattcatacttgtcagcgtcgggggcgggtgacaagagatgaggctagagagagataagcagaggccaagtagtgaaggtataccaattttttttttttttttttttaagacggagtcttgctctgtcgcccaggctggagtgcagtggcgcgatctcggctcactgcaagctctgcctcccgggttcacaccattctcctgcctcagcctcctgagtagctgggactacaggcgcctgccaccgcycctggctaatttttttttttgtatttttagcagtgacggggtttcaccgtggtctcgatctcctgacctcgtgatccacccgcctcagcctcccaaagtgctgggattacaggtgtgagctaccgcgcccggcccaggtataccaatgttaaagagcttgcccatatcccgagataagggagccagtgaaggg

SEQ ID NO: 926225 - DNA, 590 bp, Homo sapiens
ctacaggtgcacgccgccataatagccattctgactggtatgaagtggtaatctgattgtggttttgatttgcacttctctaataatcagtgatgttgagctttttttttaatatgcttgttggccacatgtatgtcttttgaaaagtgtctcttcatgtcctttgcccacgttttaatggagttgtttgttttttccttgtaaatttaagtttctgatagatgctggatattagatctttgtcagatgcataatttgcaaaaagttttctsccattctgttgtaggttgtctgttcactctgttgatagtttcctttgctgtgtagaagctctttggtttaattagatcccatttgtcaatttttccttttggcacaattgcttttggtgtcttgcataatgaaatctttgcctgttcctatgtccagaatggtatttcctaggctgtcttttgggtttttatggttttggattttacatttaagtctttaatccatcttgagttggcttttgtatatggcataaggaaggggttcagtttcagtcttttgcatattgctagccagttatcccagcaccatttattgaa

SEQ ID NO: 926226 - DNA, 827 bp, Homo sapiens
gtgctagagcaaaatacgaaagttgcttgaggaacagaaggacagagtgtgacggaaaatggtggtttgtttatatttccttaaagcccagccggcttcacctctcaagactgtgacaaagaatggtgggttgtttatatttccttactttttgggcacacaacactatttttcatccgctttttcatgtgtctatgtcactaaattttaggcaatggattatcggtrtaaatggtgttaaccagttttatttcaaacatctcctacacacacagaaagaataaaatgtaacttaatctttaaataaaataaaataaaatcttcctcagtctttcatccattattttgctcgtggtcacttgatgggtgctgacatccagaatcaccttggaaaccaagtgctgaagatggtggctctgtcagctcgggttctgaatggacatttgatagaagctgcctcctccaaaactcccaactaacctcctgtcctaatgagaggtgaagccagatggacatcctgggtcatcgagtggggacttggagaccttttctatagctagctagaggtttgtaaaatgtaccaatcagtgccctgtaaaaatgcagcaatcagcactctgtagctagctggaagtttgtaaaatgcagcaatcagcgctctgtaaaatggaccaatcagcactctgtaaaatggaccaatcagcaggacatgggcaggaacaaataagggaataaaagctggccacccctgtcagcagctgcaacccgctggggtcaccttccacgttgtggaagctttgttcttctgttcctctgcaaaaaatcat

SEQ ID NO: 926227 - DNA, 827 bp, Homo sapiens
gtgctagagcaaaatacgaaagttgcttgaggaacagaaggacagagtgtgacggaaaatggtggtttgtttatatttccttaaagcccagccggcttcacctctcaagactgtgacaaagaatggtgggttgtttatatttccttactttttgggcacacaacactatttttcatccgctttttcatgtgtctatgtcactaaattttaggcaatggattatcggtgtaaatggtgttaaccagttttatttcaaacatctcctacacacacagaaagaataaaatgtaacttaatctttaaataaaataaaataaaatcttcctcagtctttcatccattattttgctcgtggtcacttgatgggtgctgacatccagaatcaccttggaaaccaagtgctgaagatggyggctctgtcagctcgggttctgaatggacatttgatagaagctgcctcctccaaaactcccaactaacctcctgtcctaatgagaggtgaagccagatggacatcctgggtcatcgagtggggacttggagaccttttctatagctagctagaggtttgtaaaatgtaccaatcagtgccctgtaaaaatgcagcaatcagcactctgtagctagctggaagtttgtaaaatgcagcaatcagcgctctgtaaaatggaccaatcagcactctgtaaaatggaccaatcagcaggacatgggcaggaacaaataagggaataaaagctggccacccctgtcagcagctgcaacccgctggggtcaccttccacgttgtggaagctttgttcttctgttcctctgcaaaaaatcat

SEQ ID NO: 926228 - DNA, 611 bp, Homo sapiens
gtactaagggaattctatgatctctctttatttggccatcacaaaagactcctactctacacatggtttctaagaatatccacttatttatttagttagttcaactattccatacaaaattaatgaaatctcctgaactgtgtcccttaaatccagttttcactgggtatactaaaaacccaaataattaaacrcttacctcaaatgttgtgtttaaaatacacaatgggttacagaggctggaggtggggagaatgagatgatggtcaaagggtacaaaatctcagaaatgtgggattttttttcccttttgagttctattgcacagcctggtgaatatagttaataatagagtatgcacatttcaaaatctaaatttcaaatgttctcaccataataaatgttaagtatttgaggtgatggatatattaactggcttaattattccacactgtattcataaattataacatcactttgtaccccataaatttatacacttatgaattgttaatttacaatttaaaaagttaaacccagttctctgttagaagaaaaagagaaaatacacacacaatgatattgattccaaagtgattaagatactaaca

SEQ ID NO: 926229 - DNA, 611 bp, Homo sapiens
gtactaagggaattctatgatctctctttatttggccatcacaaaagactcctactctacacatggtttctaagaatatccacttatttatttagttagttcaactattccatacaaaattaatgaaatctcctgaactgtgtcccttaaatccagttttcactgggtatactaaaaacccaaataattaaacacttacctcaaatgttgtgtttaaaatacacaatgggttacagaggctggaggtggggagaatgagatgatggtcaaagggtacaaaatctcagaaatgtgggattttttttccyttttgagttctattgcacagcctggtgaatatagttaataatagagtatgcacatttcaaaatctaaatttcaaatgttctcaccataataaatgttaagtatttgaggtgatggatatattaactggcttaattattccacactgtattcataaattataacatcactttgtaccccataaatttatacacttatgaattgttaatttacaatttaaaaagttaaacccagttctctgttagaagaaaaagagaaaatacacacacaatgatattgattccaaagtgattaagatactaaca

SEQ ID NO: 926230 - DNA, 624 bp, Homo sapiens
gtagtattatagtctgtccactagatggcagaaagacaccactgccgtggtggtggacagtatatcagggttggaacagaaacttggtaaaatattgtacatgttcattggatttacagatgaaacttactgaaataaatactgaaacttttgaatttcctaaagagaactaccaaaaactacttcacgatcttaccatcttcctttggattttacaagttatgtctcatctttcagttactttacagtttattcattttttattttaatttttaatttttttaaggcagagtctcactctgtcacccaggctggagtgcagtggtgcagtctcggctctytgcaacctcccctccccggttcaagtgattcttgtgcctcagcctcccgagtagctgggaccacaagtgtgtgccaccatgcctgcctaatttttgtatttttagtagagatgtggtttcaccatgttggcctgattggtcttgaacacctgacctcaggtgatccactcacatcacctcccaaagtgctgggattacaggtgtgagtcaccgcacctgagcagttacttcacacttaattaattaatttaaaatgcatgaaatatgttttttaacttgtagc

SEQ ID NO: 926231 - DNA, 624 bp, Homo sapiens
gtagtattatagtctgtccactagatggcagaaagacaccactgccgtggtggtggacagtatatcagggttggaacagaaacttggtaaaatattgtacatgttcattggatttacagatgaaacttactgaaataaatactgaaacttttgaatttcctaaagagaactaccaaaaactacttcacgatcttaccatcttcctttggattttacaagttatgtctcatctttcagttactttacagtttattcattttttattttaatttttaatttttttaaggcagagtctcactctgtcacccaggctggagtgcagtggtgcagtctcggctctctgcaacctcccctccccggttcaagtgattcttgtgcctcagcctcccgagtagctgggaccacaagtgtgtgccaccatgcctgcctaatttttgtatttttagtagagatgtggtttcaccatgttggcctgattggtyttgaacacctgacctcaggtgatccactcacatcacctcccaaagtgctgggattacaggtgtgagtcaccgcacctgagcagttacttcacacttaattaattaatttaaaatgcatgaaatatgttttttaacttgtagc

SEQ ID NO: 926232 - DNA, 599 bp, Homo sapiens
taaatgaatgatagttggaatatttccaaatatttaaggataaaacaacatactttatataaaaacgggtcaaaaaatctctcaaataaattttaagaatgttgtactaaataaaaattaatagaaattattaaaatttgttagaagagtgaaagtcgtgtttaaagaaatatttatgctattaaatacacatatgagaaaaagcaaaaactctaaawgtataacacagcttccttctaaggaaactaaagaaaagaatgtagtactaaaggaagtagaagaaacacagaagaaataattagaacagaaaacaataaaattaaaaacaggaaatcaatagagaaaaacaatgaaatgcaactaggtttttgaaatgtattgataaattgttttgaagtttttttgaaattaaattgataaaactctagccaggctaaccaaacaaaagtgagaagacacaaattacaaatattagaaatgaaagagtggtcattactactgatttcatgatattaaaagataataaggaatactgtgaacaactctatcccacatatatcataaatatcataacatagatgaatcaatttcttcaacca

SEQ ID NO: 926233 - DNA, 586 bp, Homo sapiens
ccagctccacagtagccttgaaaagagcagtcttacaacaatggtggctgtaaaaatgagattttcagcctacagagggcagagcatatttgaagcttcccaaaaagtcccacctccagaacactttcactattttacctctttttcagcttcctggaaaaaccccctttacagagtgctgtcattatttaatctgactcagaacttgttctatgagaaaagttctagcctcaaaaaatttcctaaaaaccattaggaatagttaataaacattgctgttccctgaggctgtgatacaagttaggacaaagaagggtctggcaaaaaattwaaaaaaaaaaatctgaagacaactatagtagggtttttaaaacctgaaaatttccaaggaatctaaaaggtaacttctgtgtagggctgtgtgcatggccaggaaccacatgcaaggggtcaactctttcattctgaacgaccttgaggacttttgcaggcaagatacaaaagccaacacagaattgtgaatagcataaatgtttaaggcatgctgaaatatacacatagagctccttatgtatttaagaaaatc

SEQ ID NO: 926234 - DNA, 663 bp, Homo sapiens
caagctaaccaagcagtaacttcagcggctgcaccctgtaagaaatatacacattgcagaattagttcaagagattcctaaacaatcagaacaacagcattagcaacaaaaacagtaatagcaacaattatggggaaagaggcagagggattaaatttctagagttgccacagtatgtaattttaagtgcacaattttcattaatattatgagacacaagaaacagaaaattatgactcacacaaagaaaaraatacatcaagagaaactatctctgaggtagcctagatattggatttaacagacaaatgttttaaataagttattataaatatgttcagaagaaaagaaaatcacatctaaggaattaaaagaaagcatgacaacaattaaaagaaagtctcaccagatatatcaataaagaggtaaaaaagtatgtttaaaataaaaattctagagttgaaaaatacgataattaaaataaaatatttattaaaaggtttcaacagcagatctatgggacactatcaagcataccagtgaaagcctcagaagaagagatagacaaataaatgtacagattaaaaaaagatgaataataatgtctgaaaacttttaaaattcaatgaaaacattaattgacatagtcaagaaaatcaacaa

SEQ ID NO: 926235 - DNA, 598 bp, Homo sapiens
tgtatatttcaaagtagctagaagacaaatttgaaatcttctgaacacaaatcgtaaatgtttaaggtgatggatatcctaaataccctgatttgatcattatacattatatgcatttattaaaatattacatgcgccccataaatatgtacagttagttactgtgtaacaataaaaggccaacattcctttccttgtgcatctccaccagagctcttcagtgatgagatgcattgttaatgatgaataatattttgaaaggaatcttttttttcccagaggattagattccaacagtgggcttacacattcagtataccatgctgtaaacatatgtgctatcgtccaggctttgttgttcratttatagggcatagacagagtagcactggcataattcttcaggactccgaaacttttagaatggtaaatgagcattagcttccacttaaagtcagcagctacactagctcctaacaagaaagccagtctgtcctttgatgctttgaacctaggcatttacttctcctctctagctatgtaagtcctagatgacatcctctttcaatagaatgctgtttcacctacatggaaaatc

SEQ ID NO: 926236 - DNA, 710 bp, Homo sapiens
agtgtgggcctcaccccggtcagaactgagaggctctagggaggcaagtcactgatacacttgggctcaaaacacacatttttgtttttctttctttctgctttccctcctgattctctttggagtttattttcactttcttgaaataaagacctacattttggcatattactttcattaaaaagtctcacaccaggctttggaggcaggcagcagccccgtgcctgcagagcagagaccatgcctaacaggcccggccaggctgagaagctctgcagtgattagtctggggagcaagtccgcctgtgagtaattaccaagttgccaaatggtgctggagctttggaagccattccaatagcatatttctgtattamtttgctttcggacatgagccataaaattatacagctaagctaataaagctaattacctgcatgcatatccgacttcctttcagccctgtaagccacccaaacagtcttgcatctcagcctgtgcacaagaatggcaaggctggctgaaggcagcgattacagccacagttgtaatactacaacatacagtggcaatggtggcagtgatgggggtggctactatctcttaaatacgtggaccctggcatttggagcaagaggtcaatccataatgatgatgacaatagtagttcctatcattattgccactatagagaacatttccaaggtgct

SEQ ID NO: 926237 - DNA, 710 bp, Homo sapiens
agtgtgggcctcaccccggtcagaactgagaggctctagggaggcaagtcactgatacacttgggctcaaaacacacatttttgtttttctttctttctgctttccctcctgattctctttggagtttattttcactttcttgaaataaagacctacattttggcatattactttcattaaaaagtctcacaccaggctttggaggcaggcagcagccccgtgcctgcagagcagagaccatgcctaacaggcccggccaggctgagaagctctgcagtgattagtctggggagcaagtccgcctgtgagtaattaccaagttgccaaatggtgctggagctttggaagccattccaatagcatatttctgtattaatttgctttcggacatgagccataaaattatacagctamgctaataaagctaattacctgcatgcatatccgacttcctttcagccctgtaagccacccaaacagtcttgcatctcagcctgtgcacaagaatggcaaggctggctgaaggcagcgattacagccacagttgtaatactacaacatacagtggcaatggtggcagtgatgggggtggctactatctcttaaatacgtggaccctggcatttggagcaagaggtcaatccataatgatgatgacaatagtagttcctatcattattgccactatagagaacatttccaaggtgct

SEQ ID NO: 926238 - DNA, 710 bp, Homo sapiens
agtgtgggcctcaccccggtcagaactgagaggctctagggaggcaagtcactgatacacttgggctcaaaacacacatttttgtttttctttctttctgctttccctcctgattctctttggagtttattttcactttcttgaaataaagacctacattttggcatattactttcattaaaaagtctcacaccaggctttggaggcaggcagcagccccgtgcctgcagagcagagaccatgcctaacaggcccggccaggctgagaagctctgcagtgattagtctggggagcaagtccgcctgtgagtaattaccaagttgccaaatggtgctggagctttggaagccattccaatagcatatttctgtattaatttgctttcggacatgagccataaaattatacagctaagctaataaagctaattacctgcatgcatatccgacttcctttcagcmctgtaagccacccaaacagtcttgcatctcagcctgtgcacaagaatggcaaggctggctgaaggcagcgattacagccacagttgtaatactacaacatacagtggcaatggtggcagtgatgggggtggctactatctcttaaatacgtggaccctggcatttggagcaagaggtcaatccataatgatgatgacaatagtagttcctatcattattgccactatagagaacatttccaaggtgct

SEQ ID NO: 926239 - DNA, 710 bp, Homo sapiens
agtgtgggcctcaccccggtcagaactgagaggctctagggaggcaagtcactgatacacttgggctcaaaacacacatttttgtttttctttctttctgctttccctcctgattctctttggagtttattttcactttcttgaaataaagacctacattttggcatattactttcattaaaaagtctcacaccaggctttggaggcaggcagcagccccgtgcctgcagagcagagaccatgcctaacaggcccggccaggctgagaagctctgcagtgattagtctggggagcaagtccgcctgtgagtaattaccaagttgccaaatggtgctggagctttggaagccattccaatagcatatttctgtattaatttgctttcggacatgagccataaaattatacagctaagctaataaagctaattacctgcatgcatatccgacttcctttcagccctgtaagccacccaaacagtcttgcatctcagcctgtgcacaagaatggcaaggctggctgaaggcagcgattacagccacagttgtaatactacamcatacagtggcaatggtggcagtgatgggggtggctactatctcttaaatacgtggaccctggcatttggagcaagaggtcaatccataatgatgatgacaatagtagttcctatcattattgccactatagagaacatttccaaggtgct

SEQ ID NO: 926240 - DNA, 775 bp, Homo sapiens
tctgatgagcctgatgagggaggctgccacagtgtttctgaaatccaggtgccaaaaacactcctgccaatttctcttgcttgcttgctttaatgacataccaggagcaaaagtggccagagaggttcctcattctttccctctctaccttcagctctctgggcctgagcttcgtgtcccagctctgtctagtgtccacgggatggatttggacccgtcctttacctctcgcctgcctctgtgtgaggaaggcaggaagatgcacttttccttgggaacctcagatctgggtcctgggctttggcctctgggccgcgtctcacctggaactgggggaggaagccctgcctcacctgccctcctatggaggctgccccagctctcactgccagccatgcctgtctggaggcccagggaatgacatgtcctgtgtgtccacrtagacttgactcctggcagtcacttcattgcctgagcttcagtttcctcatctgctttgtgaagacaaaacccatttcaggccaggagcggtggctcacgcctgtaatcccagcacattgggaggccaaggcaggcggatcatgaggtcaggagtttgagaccagcctggccaatatggtgaaaccgcatctctactaaaaatacaaaaagtagccgggtgtggtggcacgtgcctgtagtcccagctactcaggaggctgaaacaggagaaccgcttgaacctgcgaggcagggggcaggggtttcagtgagccgagagtgtgccactgtacta

SEQ ID NO: 926241 - DNA, 616 bp, Homo sapiens
gctgagatgaacacgcacgggctggagccacgcggagccctctgcagcctcaactccgccccgagctggcttcgcgtgcctgggcagggcctcaccgtgcgccgagtgctcttcataaagtaggaatcgaatccatgcccggcaggttgatctaaagagcagcgttagaggccatgcccgatgcatggccagtggccagccgttggtgatggtgctgttacctcctggtgcccctttgttacagtgataatttcaaagctgtccccctccagatcgcacggctggagcacgtcatggctcgtgtgcagggcaggcattccgggacttttgtttccttcttgtggaggtgaccggacccaatttctgctcaagtagttggttgttatttggggccccatttgcctggattctcagtggcattgagagtggaggcagagaaagttctcctggcattggtcaggagtgaggagccaccygcttagtgaacagagaagattcgctatggagaactgtgtccgaggtgtaacattggtagctgggcccgtttaggcagaggacaacactgaggtgtgccagttatggggcggctgcagggaggggtgtggtccctcggggt

SEQ ID NO: 926242 - DNA, 767 bp, Homo sapiens
gaatgtgtactgaaaatatccactccataatgtggataaaacctaatctgtattcactggatgtctatgaaagacagcacagaccaatcattgatgcatctgagaaaatacaaagagctataaagaggaaagtgttagcagtggaagaggcaggcggagggtggcacagtcgtgggacactcaaatccgcatggcaaatgcctagccccattagtcaccatgaccgggtctctatggaaacgcctggaagatggtcctcaaaatagacagtcagggagcatgctgggtttctgcagcaggcacagaaaggtccagccctacctcctgctcttcccacctggaggatgggagcagcacaccctttccaggactgttcatgggctgagacggaggggtctcgggagctccagcccgatgtgcagattcggggtccagttgtgagcatggccctgctcctggcccagccctgccctctgcctcctgccttgccatcagaccctctgcagcaggaacacactcactccgggattcaggccccagaagcagggagattctkgtggtcccccactgcccgtagtctggcatcagcacccacagcacagcccccaaagatcacacccgcctctgtgagcctgaggaacatgctctctgctgggctccaagcctgaggaacatgaggaacatgctctctgctgggctcctgggggtttcttcaaacctccactaagtatcttcactttacaagagggaaacccaagttcacagga

SEQ ID NO: 926243 - DNA, 737 bp, Homo sapiens
atgcggtcctagctggttctaccttccaccacccattcagtattccctttgccttcagaaagcaccttggcaggtcatggtttttttcctggtggagtgacccaaaccttcattcctgaggggtctgagccatttgtagtcctgcttggattgatctgttgtmgttttccattgaccttaatcacagggcatggtaatactgagaggcaccctaatggatctcctgtattcaatgcatacttttccatacctccattgtggagtagtagattgatttcatcttgatagtctgggtcaatcaccccagccaacaatgtaactcccttcttagcctgttgaattaaaggtaggaggagcccaaaaagtccacgtggcaatcttaacttccagtttaatgaaatcatcgttgtgtctcctggtggcagcgttcttccctcttgaactaagacctctaggccagcagaacttaatgtcgtgggaacaggaagcaaacattttgctagtgggccactaggggtgatggtaagtgctgccacttccacttccaccccttgattcctggacccatgaatcctggctgtgagagaaacagtaccatatattggatgctgattcagagcatacaacgccttctggagaactttgccctagccctgcaaagtgttgtcacctagttggcattgtaattgtgacttcaaaaggccattcatgcagaaccatctgtgaatcaggcccta

SEQ ID NO: 926244 - DNA, 560 bp, Homo sapiens
aggagtggtgagagaggcatctttttcttgtgccagtttccaaagggaatgcttccagcctttgcccattcagtatgatattggctatgtgtttgtcatatatggctcttaatattttgagatatgttccttcaatacctagtttattaagagtttttaacataaagrgatgttaaattttatcaaaggccttttctgcatctattgagataatcatgtggtttttgtctttgtttatgtttatgtgattaattacatttattaatttgcatgtgttaaatcaaacttgtatcctggggaataagccaacttgattgtgagagacaggctttttagatgtactgcctgattcggtttgttcgtattttattgaagatttttgcttcgatgttcatcaggggtattggcctgaagttttcttgttttgttgttgtatctctttcaggttttggtaccaggatgatgctggcttcataaaatgagttagggaggagtccctccttttcaattgtttgggatagtttcggtaaaaatgataccagctcttctttttacctctg

SEQ ID NO: 926245 - DNA, 560 bp, Homo sapiens
aggagtggtgagagaggcatctttttcttgtgccagtttccaaagggaatgcttccagcctttgcccattcagtatgatattggctatgtgtttgtcatatatggctcttaatattttgagatatgttccttcaatacctagtttattaagagtttttaacataaagggatgttaaattttatcaaaggccttttctgcatctattgagataatcatgtggtttttgtctttgtttatgtttatgtgattaattacatttattaatttgcatgtgttaaatcaaacttgtatcctggggaataagccaacttgattgygagagacaggctttttagatgtactgcctgattcggtttgttcgtattttattgaagatttttgcttcgatgttcatcaggggtattggcctgaagttttcttgttttgttgttgtatctctttcaggttttggtaccaggatgatgctggcttcataaaatgagttagggaggagtccctccttttcaattgtttgggatagtttcggtaaaaatgataccagctcttctttttacctctg

SEQ ID NO: 926246 - DNA, 560 bp, Homo sapiens
aggagtggtgagagaggcatctttttcttgtgccagtttccaaagggaatgcttccagcctttgcccattcagtatgatattggctatgtgtttgtcatatatggctcttaatattttgagatatgttccttcaatacctagtttattaagagtttttaacataaagggatgttaaattttatcaaaggccttttctgcatctattgagataatcatgtggtttttgtctttgtttatgtttatgtgattaattacatttattaatttgcatgtgttaaatcaaacttgtatcctggggaataagccaacttgattgtgagagacaggctttttagatgtactgcytgattcggtttgttcgtattttattgaagatttttgcttcgatgttcatcaggggtattggcctgaagttttcttgttttgttgttgtatctctttcaggttttggtaccaggatgatgctggcttcataaaatgagttagggaggagtccctccttttcaattgtttgggatagtttcggtaaaaatgataccagctcttctttttacctctg

SEQ ID NO: 926247 - DNA, 566 bp, Homo sapiens
aatgtcaggcgagcagttggacgtacgtatctgaaaatcagggggggtgtatgtgtcagatatatacatttgggagtcaacagcttatagatggaatttaaaagcatgaaacagaatgagatccctgagataacaggggtagatagagaagatgtccaaagactgagctttgggtaacttcaagataaagagatccagagaggaggagggaccagcaaagactgggaaagaacaggaggaaaggttgggggaaagctagcagagagccctggtaacctaaagccaaaaaaakaagcgcttagaggaggacgatgtcattaaccaggtcaagggctgctgataggtctagcaaggtggacactggagaactgacaaaatgcagttagccagaggcaaagaatgacctttgcaaagcagaggccattgttttgatggtgttccggggtgaaaacgcagttgaagtgagtgtagtagagaatgggagaatggaaattggaaggtgccagaattcataacgtttttaggagttttgccataaagagagagaagtgaagtggtagctggag

SEQ ID NO: 926248 - DNA, 566 bp, Homo sapiens
aatgtcaggcgagcagttggacgtacgtatctgaaaatcagggggggtgtatgtgtcagatatatacatttgggagtcaacagcttatagatggaatttaaaagcatgaaacagaatgagatccctgagataacaggggtagatagagaagatgtccaaagactgagctttgggtaacttcaagataaagagatccagagaggaggagggaccagcaaagactgggaaagaacaggaggaaaggttgggggaaagctagcagagagccctggtaacctaaagccaaaaaaataagcrcttagaggaggacgatgtcattaaccaggtcaagggctgctgataggtctagcaaggtggacactggagaactgacaaaatgcagttagccagaggcaaagaatgacctttgcaaagcagaggccattgttttgatggtgttccggggtgaaaacgcagttgaagtgagtgtagtagagaatgggagaatggaaattggaaggtgccagaattcataacgtttttaggagttttgccataaagagagagaagtgaagtggtagctggag

SEQ ID NO: 926249 - DNA, 726 bp, Homo sapiens
gccagcactaagggaggcctggcctttctctctgctgcagccgtggtggcttttgtcttgttgctgcaacatgcatagcacagtgtcacctcagaacctgtgcctggctgttccttctgcccccctcagaggctcttgttcccaatatccacttggctgcctgcttagtccttcacgtctttgctcaaaagtcacttctcacggccaggagcagtggctcacactgtaatcaacactttgggaggccgaggcaggcctctaaatagattagaataagggaatccagaacactggtggaagaggtgggtcaccattataagcaggggaggtcttattgagaaggtgacttttttttttgcttgtttgttttttgagacagagtcttactctgtcgcccaggctggaatgcaatgacttggtcttggctcactgcagcctccgtctcctgggttcaagcaattctcctgcctcagcctcccragtaactgggattacaggcgcacgccaccacactggctaattttttgtatttttaatagagatggggtttcaccatgttgcccaggctggtctcgaactcctgacctcaggacaatctgcctgcctcagcctcccaatgtgctaggattacaggcctgagccaccacgcctgacctgtttattacttcttgtatgtgaactcccattagagtgtcagctctacaagggcaaggatttgttcactgc

SEQ ID NO: 926250 - DNA, 581 bp, Homo sapiens
attttgggaagaaataaaattgttaatattgtgtttttaaaggccaggtacctaggtaatgatgacattgctaattctattattcttcatcatggataaattttaaataattctgaacatttctccaagctgcacagcctaatgatgttcactaaatgttgttgatggagagatccagctagggtattaattgctcactaatagtttcttttctattttttttttttttttgagacagagtcttgctctgttgcccaggctggagtgcagtggcgccatctcggatcactgcaagctccacctcccgggttcacgccattctcctgcctcagcctccccgtagctgggactacaggcacctgccaccacgcccggctaattttttgtatttttagtagagacagggtttcaccgtgttarccaggatggtctcgatctcttgacctcatgatctgcccgccttggcctcccaaggtactgggattacaggtgtgagccaccgcgcccagccaatagtttcttaataatagtgaattatgggaacatgcctattctatccaattagggattttcttaaggga

SEQ ID NO: 926251 - DNA, 705 bp, Homo sapiens
gtgaccatagaagcactgctactcagtagcaatgccagatagggcctgagagctttcaaatccaagtacaatattatttttactggacttattatcctggaagagacctgacaaggatagagccctgacagattttctttaaacagttgtgaagacacactgcctttcacagtagagaaccaaagatgatgccacaacctgggtacaaggtcccacttgatctctaggctagacaattaccgatcttaagccttactcatctatgaaatggttattttaataccattttggaatgtggttatgaggtaagataatgttctgtaaatctaagatactgacaatatgagcaaaagaaataaaacaaattgattatttgcaaatctttttcacaaacctgattttcttccccttctctctttgaatttacaggttcgtacacttatttattcagcaaaactttcctcwtcactagatcttccccttttcttttccagcactcaatctgggagcaaagctcactccaccccacacccttcccaggccttttcactgacaggttcctttcccctttgttcaatggggttggcttttctgtttccagcccctctccatgtctttagctcgctccatgtggcaggcctgagggaagacttgggaacaggggtttgagtccccaggaggagagccttgggtgtaatctatttt

SEQ ID NO: 926252 - DNA, 652 bp, Homo sapiens
acagctgaattctaccagggatacaaagaggagctggtccctaccattcattctgaaactattccaaacagtagaaaaagagggactcctccctaactcattttatgaggccagtatcatcctgataccaaaacctggtagagatacaacaaaaaaaggaaatttcaggacaatatccctgatgaacattgatgcaaagatcctcaataaaatactggcaaactgaatctgacagcacatcaaaagcttacccctcatgaacaagtcagcttcatctctgggatgcaaggctggttcaacgtacacaaatcartaaatgtaatctattacataaacagaaccaatgacaaaaccacatgatctcaatagatgcagaaaaggccttcaataaaattcaacaccccattcatgctaaaaactcccaataagctaggtattgatggaatgtatctcaaaataataagaactatttatgacaaacccacagccaatatcatactgaaagggcaaaagctggaagcattacctttgaaaaccagcccaagacaaggatgccctctctcaccacttctactcaacatagtattggaagttctggccaggacaatcaggcaagagaaataaaggtattcaaataagaagagtgaaagtc

SEQ ID NO: 926253 - DNA, 583 bp, Homo sapiens
ccaccaggtccctcccccagcactggggattataattcaacatgagatttgaatggggacacagagccaaaccatattattcctcccatgacccctcccacatctcaagtccttctcagatttcaaaatcaatcatgcctttccaacagttccccaaagtctacagtccccmaaaatcttaacttattccaacatcaactgaaaaatataagtccaaagtctcatctgaggcaagcaagtcctttcttcctatgagactgcaaaataaaaaataagttagttacttccaagatacaatgagggttcaggcaatgggatatggtcctattccacaagggagaaattggccaaaaagaaggggataagccccattcaaatacaaaacccagtagggcagctattaaatcttaaagctccaaaataatgttctttaactccatgtcttacatggtaccatgctgttttggttactctagccttgtagtatagtttgaagccagggagcatgaagcctccagctttgttctttttgcttaggattatcttggctatctgggctcttttttggttccatatgaaattt

SEQ ID NO: 926254 - DNA, 659 bp, Homo sapiens
ctgcatcttgcacagccacaggtgcagagctacccaagtgggcgaagagcccacttcttgcaccagtgttccctgtatgtgggacatggagtcaaagaagattagagctttaagatttaatgactgccttgttggctttcaaacttgcatggggcctgtagcccctttattttgactggtttctcccttttggaatgggaatgtttacctaatgcctatacccagattgtatcttggaagaaattatcttcttctttatttcacagtctcatagatggaagaaatttgccttgtctcagatgagactttggattttggacttttgacttctgaattgacaagaatgaattaagactttgggggactgttaggaaggcatgattgtattttgcaatgtaagaaagacttgagatttgrgggggccagggatggaataatatagtttggatatttgtccccacccaaatctcatattgaaatgtaatccccaatgctggacatgggccctggtgagaggtatttttatcatgggggtggatgcatcatgaatggcttgggccgtcccctcggtgttaagtgagctctcattctgggttcacacaagatctggtcatttaaaagtgtgtgcctccctgccatccccgatacacacacactat

SEQ ID NO: 926255 - DNA, 560 bp, Homo sapiens
  misc_feature 294: n = A,T,C or G
ctcttgctggagaggtgttgcggtcatttggaggagaacaggcactctggctttttgagttttcagcatttttgcattgattctttctcatctttgtgggcttatctaccttcaatatttgaggttgctaacctttgaatggggtttttgtagggtcttttttgttgacattattgtttctgtttgtttgtttttcttttaacagtcaggccactcttccatagggctgctgcagtttgctgggggtctgcttcagaccctagttgcctccatttttccatgccggagggttcnccagtgagccctgcaaaacagcaaagatggcaacctgctccttttctggaatctccgtcccaggtgggtactgacctgttgccggcctgagtatacctgtaggaggtggctggagacctrtgttgggaggtctcatcccatcaagaggaatgggatcagggacctgcctaaagaagcagtctggctgctttttgttagagcaagtgtgctgtgttgtgggggacccttcctcatccagactgtttggattctccaatgctggcagg

SEQ ID NO: 926256 - DNA, 597 bp, Homo sapiens
aactgtgtatgtttctgtgtggagggagtttgtacaatatgaatatttccctcagccagcatctcccaccttaactactataaatagtcttactcgtctcctgcttcctctcttaaactacaggggtctattctccaactagcagccagaatgggctgttaaaatataaatttgttcttgacctttttctgtaaaaccctccaaaggcattattatgccctccctataaaatccaaactttgccctcatgttacaaggtcctttgctcaaatgtcaccttctcagaaaggcctctytgggccttgcgagttcatccttagcattccctgtctcccttctctgctttgtaattttttatagaacttatcactgtgttattaactgcatgttttgaaaaaatgctgattatatcactattactgtgcttccttcatgtagcgaaacacgtttgagattcattcatgttgtgtgtctccgtaattcattcctttgtattggtgggtagtagttcactatgttgacatatctaaatgtatccatttgccagctgaaagacttctggatcatttctagtttatggggcttatgaataaagtt

SEQ ID NO: 926257 - DNA, 592 bp, Homo sapiens
agtgccttcagcttttccaggttcacagtccaagctatcagtgggtgtaccattctggggtatggaggatggtgaccttcttctcacagctccactaggcagtgccccagtggggattgtggggtgggggggcaccaacttcacattttctctctgcactgccctagtacaggttctccatgggagctctkcccctgcagcagacttctgcctggacattcagacatttccatacatcttctgaaatctaggtggaggttcccaaacctcacgtcttaccttctgcacacctgcaggccccaaaccatgttgaagctgccaaattttggggcttacatcccctgaatcagtggcccaatctttaccttggcaccttttaaccatagctaaagctggagcagcagtgacacaaggtgccatgtcctgaggctgcacagagcagcagggacctgactctggtccgtgaaatcatttatccctcctaggctccagaactgtgatgagaggggctgcaaagaaggtctctaaaatgccctagagacatttcacccattgtcttggctattaacattctgctcctctttacttatgc

SEQ ID NO: 926258 - DNA, 564 bp, Homo sapiens
tgtcaagtggtagctatcattgtcatcattatcatcatcgtcatgatcagaccctggttaagggctcaggagtgagacaggtggcatcctattctccaaaagccaggtcaggtgccagccaagagggccaggctctaggcccagtggctggacacagacagagaaaggaggaacagctcagcggccagccacagatagaagcccagcctagcaggtggatcccaagaagccgaaggcaatgtcactgcaaacagrtggtaggtaatccagtcacgggattggcatcgggaggtaaggggggttctggcaagagacagagcctaatgccaagcaacacttggacatccttgggaaagagaagctgtcctccactggccaaggatctcagctctgaggggagaggggagggtgtgatggttaatactgagtgtcagcttgattggattgaaggatgcaaagtattgatcctgggtgtgtctgtgagggtgctgccaaaggagattaacatttgagtcagtgggctgggaaagggagacccatccttaatctgggtgggcaccatct

SEQ ID NO: 926259 - DNA, 562 bp, Homo sapiens
cagcaccatggaactttgcagtaaaatgtatacccatgctggtatctggcaggattcatttggaaagaaagctatcttcaaataaagctacacaatgcttcaagaaacaaatgttctgctcactgatttttttaatgatgtaataaagtccatcgtggacacacatgtaattgcttctcctctttatctttcttatcagggacgagggacccctgatggctccttactatgaagtgtttatgggatatacttgaataatttttacatacttacagccatgatcttgttctttccttttcayacattaagacactgaagcttagaaagctaaagtaagtagtttccccaagcccatctagagagaaataaacagatctggaacacaaacaggtattctcggctgggtccagtggctcacatctgtaatctcagcactttgggaggctgaggcaggcagatcacttgaggccaggagttcaagaccagcttggccaacatggtgaaaccccatctctactaaaaatacaaaaattagccagtgtggtggtgtgcacctgtaatc

SEQ ID NO: 926260 - DNA, 637 bp, Homo sapiens
cctgtctgttagaaggaaaactaacaaacagaaaggacatccacaacaaaaacccatctgtacatcaccatcatcaaagaccaaaagtagataaaaccacaaagatggggaaaaaacagagcagaaaaactggaaactctaaaaagcagagcrctctcctcctccaaaggaacacagttcctcaccaacaacagaacaaagctggacggagaatgactttgacgagctgagagaagaaggcttcagatgatcaaattactccgagctacaggaggacattcaaaccaaaggcaaagaaattgaaaactttggaaaaaatttagaagaatgtataactagaataaccaatacagagaagtgcttaaaggagctgatggagctgaaaaccaaggctcgagaactacatggagaatgcagaagcctcaggagctgatgcgatcaactggaagaaagggtatcagcaatggaagatgaaatgaatgaaatgaagcgagaagggaagtttagagaaaaaagaataaaaagaaacgagcaaagcctccaagaaatatgggactatgtgaaaagatcaaatctacgtctgattggtgtacctgaaagtgatggggagaacggaaccaagttggaaaacactctg

SEQ ID NO: 926261 - DNA, 637 bp, Homo sapiens
cctgtctgttagaaggaaaactaacaaacagaaaggacatccacaacaaaaacccatctgtacatcaccatcatcaaagaccaaaagtagataaaaccacaaagatggggaaaaaacagagcagaaaaactggaaactctaaaaagcagagcactctcctcctccaaaggaacacagttcctcaccaacaacagaacaaagctggacggagaatgactttgacgagctgagagaagaaggcttcagatgatcaaattactccgagctacaggaggacattcaaaccaaaggcaaagaarttgaaaactttggaaaaaatttagaagaatgtataactagaataaccaatacagagaagtgcttaaaggagctgatggagctgaaaaccaaggctcgagaactacatggagaatgcagaagcctcaggagctgatgcgatcaactggaagaaagggtatcagcaatggaagatgaaatgaatgaaatgaagcgagaagggaagtttagagaaaaaagaataaaaagaaacgagcaaagcctccaagaaatatgggactatgtgaaaagatcaaatctacgtctgattggtgtacctgaaagtgatggggagaacggaaccaagttggaaaacactctg

SEQ ID NO: 926262 - DNA, 725 bp, Homo sapiens
acagaaagatctcttccctgtattattttaactgcttcagatactaagactgctactgctaccattacccataaacaatgaggccaaccctttgccactacatcaatttccttactcaggtataccacgggttgcaagctcatccctcagacctgcgtaaggactcctagagctattcctgtttcttctgtgacatataaagaaaagtcttgccccgttggcaagcttacaactggggtttgggttagggccttctttagggcctggaaagccacttctgyttcaggtgtccatcttactatatgggtattggctttctgagtttccttaattaatgtacataatggcctggctatttcactgtatctgggaatccatattcggcagaaggctgttatgccaaggaaccctcttagttgctttagggttttgggatgaggataagccagtatacgctggatacgttcctctctgagggccctggtgactttggataattttagccctaagtatttaacctgctgtgagcagagctgagccttttgtttggagccacaggtagcgaggaaatttaagagcgcttgggtggcttgatgccacaaggtttctgaatgggtggctataattaaatcatccccatactgaagaacaagaatgtccagctatgacaattggctcaagtcttgggctaatgcctggccaaatagacgggggctatccttgaa

SEQ ID NO: 926263 - DNA, 648 bp, Homo sapiens
cttgtaatcccagtgactcaggaggctgaggcagggcaatagcttgaacctgggaggcggaggctgcagtgaaccgagattgcaccactgctctccagcctaggcaacagagcaagactctgtctaaaaaaaaaaaaaaaaaaaaaagacattggataagagtcagtgacctggatgtatttctgacttaatccaattcaaccaatatttactaagcccctcctatatgcctggaattcagctatrccattggtatccaagataaatatgacacattccatgtcctcagtgaaatcccagtctatcaggaggcatctgataccatgctaaatgtttctctagcagttagacaaaatgctatgggaacaccatagagaggatgattgattctgtccagagaaacctgcagagaattaatatttgcattggcctttgaggatgagaatgagttcaggaggctgggaaagggaggagaagaggagtgaggtcagtggggaaaaaaaccaccagaacaaaagcacagggaggcgattgctggggaagtccaagtatctggagcacaagaagggaagtagcggggatgaagctgaaaagcaaggctagggtcagattttggaaaagcttttactgtcttactgaggagtggaa

SEQ ID NO: 926264 - DNA, 590 bp, Homo sapiens
tacagtctgtaacaattctttgatttttcctcttctttcactttgacactttcaaagagtactggtaagttattttgtagaatgtccttcagttgactttttcctatgtttttacatgattataatgaagttatgcaacatttgcagttatattgcagtaatgatactatataacttctcagtgaatcatatttaggggtttattaagtctttactggtaataatgaactttaatcacttatctatcaggtttctcttctgtaaagctacaatctttccctttgtaattcatatgtacctggagggatgtaccacgaaacaatgcaaacctggttcttcaacttttgcccactcatttggcattttttcttcagtaagatgggcccctaatgatccctcctccccccagtatttagactcttgtgtarcctcctacatggtctctgggttggcatgtttggcagaaataatatgccacttctaagattaggtgataaaagacaccgaggctttccttgtaggcatgctttcttatgtgttctgtgtctccctctcttgggtcacttcttctgtggaaaatcagctgctgt

SEQ ID NO: 926265 - DNA, 590 bp, Homo sapiens
ggttccccgcccccgtcatattggaggctttgcagttgcaggaggagtcgaggaaatggaacttggcatggaatgtatagttccatcatcaaatgctttacagacagcaagaattacatttaccatatattaactgttttaagaaagataaatgtgtattcaaaagcatcacataaaaaaggtgaggtaggttatttattartgctggaagctcttgtgtttgaagctactgtggtctacatataaacaaagatgtaactgagtgcatataatcaagcctgattactatttaccaggctgactttattactcactctcaattctttgcaaatcagagactttataaaactacagctttgaaaaataacaagaagacatttacatttttaaaaatggagagcccaaatattcttgaggattaacagtcatatatatcacaatgacaataattttttaattgaaaatctatgttatcagaaagcaacaacagtggctcacaatagagactccactaaacatttagctggtattttccacacgttgctctgatgaaaaagggtaagcagtaaaaatgtgcttctgagagtttt

SEQ ID NO: 926266 - DNA, 655 bp, Homo sapiens
agtctccttacaaatacttttgtacaagtgagctttttatatgctctccagccacaggctgcagcaggcaggggtagcagtgaccttgtggacaagagtaaccaggctgtagagtccaatagggagccagaaaacaactctgggactctcctgcagatctgaagccctccctcctaacaccccctccaccagccaccgacacatggcaaactgccctaagacttcgtcatcaatctgggaaggagaagaggtaagacaatctgaaaaagcaagtatttcctcatgaagggctctggtacacaaaaaggagacttacactaccatcaaaatttcacaaaatacacccagaggtttgtttttttttttttttaaaaaaaaaaaaaaaaagaaaaaagaaactgtcagaaaactagtccaaacatgaaaaatggtgagtcatgaaaacacagtgtgagctgtgaacttttttttttctccaagtcagtgtaaaatgtatgcargttttgttagaataaaatggagaatggagaggatggagtgtcctcttaggggaagacctcccatccactgcctcctgggagccaccagccctcctccacccccaacctatgttgtcccagatcatacatgcatatcagagttagctagtgtcaaa

SEQ ID NO: 926267 - DNA, 850 bp, Homo sapiens
ataattcatcatttaactataattaagtcaagtgtcacaaggaaaaatgtgcataaagggaagaactcatttggtactgaagggatcaaagaagtcttttttgaagaagtcacatttaagctgcagatcaaagaaggaggagttaggtaggcaaagggaagaagagattgtttcaggtggaggaaccactcaaaggcctggaagctaaagagaacatgccccattcaagcagtgatattctggtaatgttaataattggctctacacaaaaaccaatataggcatgtccaggcacatatatgttgattatgtatttcactgatatcaaagataagtaacacataatttacaaataataaaacacacaattttctatattgtaaattgtacacacagccaattgattctcacagaatgcttttgttgatttttttccaaactcttacacttgtagccaacttacagttagaactgatgagcaagtgtggttcccatatcaatgttgattgccatttccatttaaatgaacaagcaagattgaaaataaaccaatgacctaagtcagaatttcacttatttgtcaatgtcttgagcagcttctttrctgaatcccaaaatacttttcagatgtttaaagaatatgtcctgtgttctggggggcaatatacaatgtaacagctaccagaatcaacacatttttaaaatttaatttgcattctttatgttttctctatcacttttgtaagtctagactagagttcagcaaactgtgagcctgttgttttggtaaataaagttttattgaaacacagccatactcatttatttatatatgtatattctatgactg

SEQ ID NO: 926268 - DNA, 850 bp, Homo sapiens
ataattcatcatttaactataattaagtcaagtgtcacaaggaaaaatgtgcataaagggaagaactcatttggtactgaagggatcaaagaagtcttttttgaagaagtcacatttaagctgcagatcaaagaaggaggagttaggtaggcaaagggaagaagagattgtttcaggtggaggaaccactcaaaggcctggaagctaaagagaacatgccccattcaagcagtgatattctggtaatgttaataattggctctacacaaaaaccaatataggcatgtccaggcacatatatgttgattatgtatttcactgatatcaaagataagtaacacataatttacaaataataaaacacacaattttctatattgtaaattgtacacacagccaattgattctcacagaatgcttttgttgatttttttccaaactcttacacttgtagccaacttacagttagaactgatgagcaagtgtggttcccatatcaatgttgattgccatttccatttaaatgaacaagcaagattgaaaataaaccaatgacctaagtcagaatttcacttatttgtcaatgtcttgagcagcttctttgctgaatcccaaaatacttttcaratgtttaaagaatatgtcctgtgttctggggggcaatatacaatgtaacagctaccagaatcaacacatttttaaaatttaatttgcattctttatgttttctctatcacttttgtaagtctagactagagttcagcaaactgtgagcctgttgttttggtaaataaagttttattgaaacacagccatactcatttatttatatatgtatattctatgactg

SEQ ID NO: 926269 - DNA, 850 bp, Homo sapiens
ataattcatcatttaactataattaagtcaagtgtcacaaggaaaaatgtgcataaagggaagaactcatttggtactgaagggatcaaagaagtcttttttgaagaagtcacatttaagctgcagatcaaagaaggaggagttaggtaggcaaagggaagaagagattgtttcaggtggaggaaccactcaaaggcctggaagctaaagagaacatgccccattcaagcagtgatattctggtaatgttaataattggctctacacaaaaaccaatataggcatgtccaggcacatatatgttgattatgtatttcactgatatcaaagataagtaacacataatttacaaataataaaacacacaattttctatattgtaaattgtacacacagccaattgattctcacagaatgcttttgttgatttttttccaaactcttacacttgtagccaacttacagttagaactgatgagcaagtgtggttcccatatcaatgttgattgccatttccatttaaatgaacaagcaagattgaaaataaaccaatgacctaagtcagaatttcacttatttgtcaatgtcttgagcagcttctttgctgaatcccaaaatacttttcagatgtttaaagamtatgtcctgtgttctggggggcaatatacaatgtaacagctaccagaatcaacacatttttaaaatttaatttgcattctttatgttttctctatcacttttgtaagtctagactagagttcagcaaactgtgagcctgttgttttggtaaataaagttttattgaaacacagccatactcatttatttatatatgtatattctatgactg

SEQ ID NO: 926270 - DNA, 573 bp, Homo sapiens
tcccacttttggaggaaggacttggtcagaggtgactggatcatgggggcggatttcccccttgctgttcttgtgatagtgagtgagttctcatgagatctcatggtttaaaaatgtgtggcatcccccccttctctctctctctctcctgtcacatgaatacgtgtgtgcttccccctttgccttctgtcgtgactgtaagtttcccaaggcctcacccagtcttgcctcctctatagcctgaaaaactgtgagtcaattaaacctcttttcattataaactacccagtcmaggtagctctttatagcaatgtgaaaatggactaatacacttggttaggggtattcctaggtattttattctttttatagcaattgtgaatgggattgcattcctgatttggctctcagcttgactgttgaaagctggaggcatcatgctacccaacttcaacctataccacagggctacagtaaccaaaatagcacagtactggtacaaaaacagacacatggaccaataaaacagaatagagagcccagaaataagcctcatacctaacatccatctgg

SEQ ID NO: 926271 - DNA, 631 bp, Homo sapiens
aaaggggccgaatccaggaggctgagcaacgactgactgccagccttgcctccactgtacctcacagggtaaggcccaatggcctggaactccagccactccccaccggggctctcgggctagcagcacctctgtacctccctgggacggagctcgccgagggagaggcaggcccctattttggctgtcctccagccctcgccactcttgccctcaggctgtggaggatgcacggtgactagcgactggcatggaccccagcacacctgccccacggaaaacctgccagactgttctccaagtggatcccagttcccagtgtccctcactgggcggggcctcccgaccagcgactcgtgcctctgcctgaagacctcaggtggaggtggctctgtatttctctacggaggaaatcccagaarcagcccacatcccctccgtcattgcagcagcagtggtgccgccccaaccaccctcaggctggggaaggacaaagagcctggtcgctgggctggcacctccagcacactccagcccaatacagagatgagcccaagttctcttccctgtgaggccccacaccccgccattcttcagcaggcgggccccccacctcaggaccgcagatgag

SEQ ID NO: 926272 - DNA, 605 bp, Homo sapiens
gaataagtctcacatgatctggtggttttaaaaggggagtttccctgcacaagttctcttctcttgtctgccaccatgtgagatgtgactttcaccttccagcatgattgtgaggcctccccagccacatagaactgtaagtcctttaaacttctttcttttgtaaattgcccagtcttgggtatgtctttatcagcagcatgaaaatggactaatacactgccattatacttctttcacagatgaggaaattgaaccttgcagagattaagtgatttgttcaaaatcactcaggcaataaatggcaaagtcaagatttgaastcactttctctgaggccaattctccctacactcttccaagctacttttaaaaagtatcactaaaaaaggcagatgggagcagtggctcatgctgcactttgtgaggctgaggcaagaggattgcttgaggccatgagttcaagaccagcctggccaacatattgagatactcatctctacaaaaagcaaaaaaattagccaggcgtggtggcctgcacctgtactcctagctactaagtaggctgaggtgagagagtcacttgagcccaggaggtagaagct

SEQ ID NO: 926273 - DNA, 682 bp, Homo sapiens
cccatgacctcagcttcatcaggagacccactgcaagtactggcccaacaggagggaaaggagctgagtcagatgataccactgaggggcatgagcaaatgaaaaaacaggaacccagccgtgaagctgggcctgagtgttggagatgccactatagagaccctggtcttagcaatccagacttttccccagtagaagggaaaggcaaagattatcctggccgggactgtgtaaggactttgaaggtcggccatccatctcaccctgctgtttccctccttccctgcagaacagccgttcacctgaatgttccaggcttttggttaacaacccctggtcttctatacccattcacactcaaaatcagggggaattccttgaaatggttaaaatgcaaaagtgaaatttagaagccctatgaatgaaacaacaatccaacaaaaaattcccaacactttaagcaaatgcttttcwggcagagccttcaaattgctactgtcccactatcttctggaattgtgtgtgtgtgtgtgtgtgcgcgtgtgtgtgtgcacgcgtgtgtgtgtagagcaacaggtgaagcagcaaccataaggtagcctacttcaggtctggcacctgttttcactgctgtcatgccctcttcactgagatcctgacttaaatatgtacacatgtgaat

SEQ ID NO: 926274 - DNA, 657 bp, Homo sapiens
agctgggcctgagtgttggagatgccactatagagaccctggtcttagcaatccagacttttccccagtagaagggaaaggcaaagattatcctggccgggactgtgtaaggactttgaaggtcggccatccatctcaccctgctgtttccctccttccctgcagaacagccgttcacctgaatgttccaggcttttggttaacaacccctggtcttctatacccattcacactcaaaatcagggggaattccttgaaatggttaaaatgcaaaagtgaaatttagaagccctatgaatgaaacaacaatccaacaaaaaattcccaacactttaagcaaatgcttttcaggcagagccttcaaattgctactgtccyactatcttctggaattgtgtgtgtgtgtgtgtgtgcgcgtgtgtgtgtgcacgcgtgtgtgtgtagagcaacaggtgaagcagcaaccataaggtagcctacttcaggtctggcacctgttttcactgctgtcatgccctcttcactgagatcctgacttaaatatgtacacatgtgaatgctgatttcttagcatgaattttaactcagctcctgctcgagcatcaatgattcccaattcccatcagagtgaatggccccttcctggtctctgcagtc

SEQ ID NO: 926275 - DNA, 682 bp, Homo sapiens
cccatgacctcagcttcatcaggagacccactgcaagtactggcccaacaggagggaaaggagctgagtcagatgataccactgaggggcatgagcaaatgaaaaaacaggaacccagccgtgaagctgggcctgagtgttggagatgccactatagagaccctggtcttagcaatccagacttttccccagtagaagggaaaggcaaagattatcctggccgggactgtgtaaggactttgaaggtcggccatccatctcaccctgctgtttccctccttccctgcagaacagccgttcacctgaatgttccaggcttttggttaacaacccctggtcttctatacccattcacactcaaaatcagggggaattccttgaaatggttaaaatgcaaaagtgaaatttagaagccctatgaatgaaacaacaatccaacaaaaaattcccaacactttaagcaaatgcttttcaggcagagccttcaaattgctactgtcccactatcttctggaatygtgtgtgtgtgtgtgtgtgcgcgtgtgtgtgtgcacgcgtgtgtgtgtagagcaacaggtgaagcagcaaccataaggtagcctacttcaggtctggcacctgttttcactgctgtcatgccctcttcactgagatcctgacttaaatatgtacacatgtgaat

SEQ ID NO: 926276 - DNA, 613 bp, Homo sapiens
cctacaataggccatctgcaagctgaggagcaaggaaaccagtctgagtcccaaaacctcaaaagtagggaagctgacagtgcagccttcagtctgtggttgaaggcctgagagcccctggcaaaccactggtgtaagtccaagagtccaaaagctgaagaacttggagtctgatgttcaagggcatgaagcatccagcacagcagaaagatggtgactggaagactcagcaagtcggcttctcccaccttcttcatgctttattctagccactctgacagttgattagatggtgcccacccacaktgaggttgggtctgcctctcttagtttactgattcaaatgttaatctctttggcaacaccctcagagatacacccaggaacaacactttgcatccttcaatccaatcaagttgacacttaatgttagccatcacaagagataaaaaacaaacaaacaaacatttgtttagcatgtgctatgggctaaacactcttctgaacaccttagatgtatcaagtcatgattctcacaaccaccctgaactatgtactattatcatcctcaaattataatgaagaaactaaggcagacagataatccacctgc

SEQ ID NO: 926277 - DNA, 620 bp, Homo sapiens
cacaaggtgaagtcctacaataggccatctgcaagctgaggagcaaggaaaccagtctgagtcccaaaacctcaaaagtagggaagctgacagtgcagccttcagtctgtggttgaaggcctgagagcccctggcaaaccactggtgtaagtccaagagtccaaaagctgaagaacttggagtctgatgttcaagggcatgaagcatccagcacagcagaaagatggtgactggaagactcagcaagtcggcttctcccaccttcttcatgctttattctagccactctgacagttgattagatggtgcccacccacattgaggttgggtctgcctctcttagtttactgattcaaatgttaatctctttggcaacaccctcagagatacaccyaggaacaacactttgcatccttcaatccaatcaagttgacacttaatgttagccatcacaagagataaaaaacaaacaaacaaacatttgtttagcatgtgctatgggctaaacactcttctgaacaccttagatgtatcaagtcatgattctcacaaccaccctgaactatgtactattatcatcctcaaattataatgaagaaactaaggcagacagataatcc

SEQ ID NO: 926278 - DNA, 552 bp, Homo sapiens
aatagccctcactcgggcactagaattagaaggaaaaaaggtaagtatatatacagactctgagtatgcttacctagtcctccacgtccacgcagcaatatggagagaaagggaactcctaacttccgagggaacacctatcaaacatcaggaagccattaggaggttattattattggctgtatagaaacctaaagaggaggcagtcttacactgctggggtcatcagaaaggaaaggaaagggaaatagaagggaactgccaaaagagccacaaagtgggaccctccattagaaatgtttatagaaggacccctagtatggggtaatcccctctgggaaaccaagccccagyactcagcagaataaatagaatggggaacctcatgaggacgtagtttcctcccctcaggatggctagccaccgaagaaggaaaaatacttttgcctgcagctaaccaatggaaccttacttaaaacccttcaccaaacctttcacttaggcattgatagcacccatcagatggccaaatcattatttactggaccaggt

SEQ ID NO: 926279 - DNA, 592 bp, Homo sapiens
aacaaaggacttcacagtcacactcttccctcagcttcatcctaagaacacaatttcctgagaggcccctgggtttaatatttgccccagaagctatttcttaatgttagcattgtttgctatctagagaggtgggaatcttcataaatagcaagccctgtctcctttttttttttttttgagacaaggtcttgctctgtcactcaggttggagtgcagtggcgtgaacatggctcactgcaacctcgatctcctgggctcaagcgatcctcccacctaagcctcctgagtagttgggactacagacatgcaacactacacctagctaaattttgaattttttgtagagatgaggttttgccacattgcccaggctggtctcaaactcctgggccctagtgatctgttcacctcagcctcccaaaatgctgggattacaggtgtgagscactgtgcccggctcctttttaaaaccaaacaaacaaacaaacaatctttcctctagcattttactataagcagcaagctatgaggcagtaccctcaacagtcttggctaacagtccttagcccaattacctagttcactagtg

SEQ ID NO: 926280 - DNA, 561 bp, Homo sapiens
aactcctgggctcaagcgatccgcccatcttggcctcccaaagtgctgggattacaggtgtgagccaccaaacctggtcataatttattttaaagcaacttccagacaacccatcatttcattcataaatacttcggtatatatctgtaacagatacagacttaacccacacacacaactatgttagtatattcacccaacaccatyagcaataattctttaatatcatttactatccatgttcagttttccctaattgtctccaacatgtatttctatggttggttgtttcatgtcagggttttcattttgattagagtcatttctcctagagaacttcaaacattctggtcttggctggttgctgtattatggttttatttaacatctcctctatcctctgtatttcctggaaactggtagttatgtcagaggcatgatcaaattcaggttcattattctggtaagaatctatcgtagtgatgcattcaatgtcagatgtccctcttttcgtgttgctacgattgatcaggggttgagacttatcaacatttctcctca

SEQ ID NO: 926281 - DNA, 899 bp, Homo sapiens
ctaatgaaaaggcagctgaactctaccgggtgtggagaagttcctgtcttcctaaaccaccaacaccaaaaaaccaaaaaataagtcggattaccatcttgtcaacagaataaagccaatctcctacaatctcttgtctgaatcatctcattcttctagtggctcctatctcactctctcctaagacatgaagctgaatgtcgycacagttcccagtttagagggtcactctccatcacctgcccaaaactcaatcccttgcctgcaagagtccctttgtcttaaagaagctgcaaggtcactaaagtcatttacagaatttaaactgtgttatgaggggataaaataataactaacagagctattaaaagagctaattctcttgcctttaattgaagaaaagctatcttactttttaatgggaccagtgatgccaatataaactatataactactacgaaaaatattcatgagaagactgggcttatagttgatctacctgcttgctatctctccttcatccaatttatgtcttcctaaagtcagatcacaatagtggacacctgggaaatactcggtattccaagtaacactatagatctttaaggccactggaaggggacaatgcagaatccatcccaggtagcaactcttcctaaaagatgccaccaggaaccaaggatggtagccagcatcgctaactttaacgtgcacacaaaccacatattctgactcagtagctctggggtgggagctgagctttagcatctctacaaagctccgggggatgcatgtgctactgtctataagccacactgagcagcaaggtatccacattttctagaattgcttctctctcactgcttcctctgtcctgcctctctctggatgccacacaa

SEQ ID NO: 926282 - DNA, 570 bp, Homo sapiens
caactgacagacaaggagattctctcctgtgcctggctcagtgggtcccatgcccacggagccttgctcaccgctagtgcattagtctgagattgacctgtgaggcagcagcctagcagtgggagggccatcagccattgctgaggctcgagtaggtaaaaaaaaaagtggccaggaagctcaaactgggcggagcccacygcagctcagcaaggcctactgcctctatagactccacctctgtgggcagggcatagctgaacaaaaggcagcagaaacttctgcagacttaaacgtccctgtctgacagccctgaagagagcagtgcttctcccagcatggcgtttgagctctgaggacagacatacggcctcctcaagtgggtccctgacccccatgtagcctaactgggagacacctcccagtaggggctgacagacacctcatataggtggctgcccctctaggaagtagcttccagaggaaggattaggcagcaatatttgctgttctgcagcctccgctggtgatacctaggcaaacagggtctggagtggacctccagcaaac

SEQ ID NO: 926283 - DNA, 632 bp, Homo sapiens
cacacccagaatcaaagccaaagtactctactcaaccaacaccatagatacattttaagaaaaaatcatccattatgatagcaaattcaaaaaattggaagagttgattctcacaccagatacccagatatcaatgtaaatatataagaaacattaaaaaaacaaggacacttcaaaaggagcacaataactctctggcaacagattccaatcaaagagaaatttatgaaatcccagaaaaagaatttaaaattattttaaagaagctcagtaagatacaagggaatacaaaaaagcagtaaaaagaaatcagaaaaacaactcaggatatgaatgagaaatttaccaaaaagatggacagatataaaaaaagaaccaatcagaaatcctggaactgaagatttcactgaatgaaagatgaaacatattgaaaagcttcartaacaggctagatcaagcagaccaatgcatttcagaacacaaagacaggtcttttgaaatagctcaatcagacaaaaaataaagaaaaaacaatgagcaagggctatgtgatatatggaataccataaagctataaaatacttgaatttgtggtgtcccagaaggcaaagagaaaacaaaagggttagaaa

SEQ ID NO: 926284 - DNA, 751 bp, Homo sapiens
acatgtttatctgctgaccttctctccactattgtcctatgaccctgccaaatccccctctccgagaaacacccaagaatgatcaataaatactaaaaaaatttaaaaaaaaagaaaaacttaacattaagtattgtttattgaatcctattaaaattaaatatacacaaaattatcatcttgggacttagaatcatttaaaataaagatcgaccctgtaagttaacctaacttcttagaaaagtcatctttccctcttaatgtcctatttatccaaactctacttccatcctagccgcctcctagaaggagtagggtgggagagggggaaggaataatraaagaaggaagagtcagaggaaagaagaaagaaagaaacataaaagttcttaataattaaagtttaatattattcaataatatcagtttggctaaacctaaaagggctactccaacatctttacattaaagagactatgatatgaatgaatggcaatgagtggtctaattagaaccaaaggacatttaccctggattcatatcctcttaagtcagaactacatcttaaatttcactaaaattatctccatctcaactccatttttcccctttaaacctcttatacttcattcttgtggggtacattctaaaaggtttttaaaaatcttttgaagtgactacttgctcggcatatctttgagaaaatattcattcttccaactttccattagcatcccctaaggtgttactc

SEQ ID NO: 926285 - DNA, 737 bp, Homo sapiens
ttgagatgaaggtgctcaccctccgggcttcactctgatacttgacagcctttttggtatctgccacggcccgctccacaaagcccactgactggtccatgttgttctcaatacggtcaatcatggatccctttccccagatgcaagaggtggtggcagcagaaacagagacagggagagggaagagaaagagcgagacacagcaaacaaaatggactctcttctctgaaggccacaggagagtctcaccttccgggcctgactctggtatttcacagcttttttcgtttcatctcgtgccttctccacgtggtccactgtgtgcatgacattcaactctatgttatctaacatctcaccctgcaaagaacagactctgatcacaccaagtaaacgtctcaggtcagtcctagccaatgcggggaagggattctctttcttacaatcttcagtggcaagaagagcatccacaaaccttgatgcatggccttccataggacacccattcacagtccttggtggtrgggtggcagtcacttgttcaagaaacattcagtgaattttactacttctctgtgaccagcactccaccaggcatccagaacatactatctagatacctagtaactacctataaatatactctgagatatccccagacaacctttgttattttttttacacttaagcacatggagaggaaccaaaataaggatatctcattgttattaggacat

SEQ ID NO: 926286 - DNA, 603 bp, Homo sapiens
atcaggagaaggaatatggcaagccaatcaaatacctggagaccttacaggtttagtatagaataaaactgtcttcctaaataggtcattttcatcaggtgacagtaagtcgaaaaaagggtgagacaattttctttcattctcatcaataccttgtaagataattaccacagcaccgcactttctggatgtatgcagcagtggttaggagcagagtctgaagctggtctgatcagggttctaatatatatgggctttatccatgstagcttatgattcccctagggcgagctgcttaatctttctgagctcaagttacttcaccttttaaaccttagttcctcatctgtaatgtggggataacaatgccaaccttacagggctttcttgaggattaaatgaaacagggcatgtaaatgctcagtataggtgcgcattcaaattatagctgaaatattttgtgggttttgttattgtcattactattattattatatgatccaagacagaattcaacaaacattcactgagctgcattttgtgtgtgctccatctctactatgtagtaaatgagtctgacttggcttcattttccaagaagct

SEQ ID NO: 926287 - DNA, 624 bp, Homo sapiens
gtctcatactattgccttgcatctaccccatgctcagtcaaaccacctctggtgtcaagaaattacacattataaacatcatatatgtacacctatgaatcgttttatatgtgtgtgcatacattatgatacagccctgatctttaaaaggagcaaaaatcagagaatcgtatgtcttaaagaactrtttccttacttttttatgctaggtaatgcccatgtgacaaacatgtaaatattcatcaaagaccacatgtatatattttaaaggcattttttcttctccccaactgtatgtatagctagaatctgcttgctgtgtaaccttttcttctgcatggagcttttggtgaagcaaggccatttgtccagtgtttcatagccttaagcatgtttgcccttcgttttttgaatgttcaaaaaatgtttaagtgatcaagaaaaagctctaactttcgacttttgttaattttatgacatgacactggccaaaatattgtttcaattactgttgagccattcttatcatttccctgacataaaatatgcaatgttttagacagtattctaccaagagtctctcaatttttacaaaaactctttttttccattatgcactggata

SEQ ID NO: 926288 - DNA, 654 bp, Homo sapiens
ttggatgagagagagagcagtgctggttgaggttcatgtctctctgtttcatggtctggctcccagggaccagccagtgtggaccaggacccggggcatcttgtcctacatttcctctcagcctgagccctccacaagagttctctgsacaagccttgcttatgagtgcccctgagagcttcctttggtgtggccaatgtcccttctacaaccttattagagcgatgcatggagcagagttaaataaacagaaatctcttaagcatttgactacagactcaacttcccttgtcaaatagcctgggctttatcattttggttattttgggagtgaggtggggtgggtagtctttcttgtttttaggaaatggtatatagaaggcatatacagaagtggtatgcaaattccacatcccctgcccatgcagaggttagaaattgagcccatcactactaatattaatttcctatagccccaggcttatgagagattttttaggaaaatgagaagagaagccatggaccacaatcccgaggagatacatcagggagttggaagaacacattagttgtccctaagtttgatggggcccagccgggctgtccattctgctgaagtggcatggcttttcctgatttctctcacctgataat

SEQ ID NO: 926289 - DNA, 622 bp, Homo sapiens
aggatgccctctctcaccactcctattcaacatggtgttggaagttctggccagggcaatcaggaaagataaacaaataaggggtattcaattaggaaaagaggaagtcaaattttccctgcttgcagatgacatgattgtacatttagaaaaccccatcatctcagccccaaatctccttaagctgataaggaacttcagcaaaatttcaggatacaaaatcaatgtgcaaaaattacaagtattcctatacaccaataacagacaaacagagagccaaatcatgagtgaacacccattcacaattactacaaagagaataaaatacctggaaatccaatttacaagggacgtgaaggacctcttcaaagaggactacaaaccactgctcaataaaatraaagaggacacaaacaaatggaagaatattccatgctcatgggtaggtagaatcaatatcgtgaaaatggtcatactgcccaaggtattttatagattcaatgccctccccatcaagctaccaataactttcttcaagttatttaaagtagaattggaaaatctactttaaagttcatatggaacaaaaaaagagcctgcatagccaagacaatcctaagcc

SEQ ID NO: 926290 - DNA, 659 bp, Homo sapiens
ctgaactgagaacctctcttcccgtttggcatactttcctctaattgattctccactctttacctattttacatatatctacccttccctaattggttttttacactgtgtgcctttgttttagcctttttttgcatactcacaaaccaatgagcatacactcccctattctgagcccataaaggccccagccccagccccaatgagagagaccaccctcgcatgccctctccactgagaattgtttctcatcattcaataaaattattctccgccctcctcaccctttgatatcagcacaacctcattcttcttggatgtggaacaagaactcaggacccaccaaacrcaggtacaaagaaggctgtaatactgtggccctccacgctctgccagtggagggcagctaccccacgcgacgggaagcagcagcgggcgggagcaggggcgacaggacagacagagctgttaacatgccgccatccatggggctgcagatggtgggactaaaagagctattagcacacggtaacaccccctctgaggtttcagggttgcggacacccgtctgggcgccaccatgttcccctcagtgtgacatgcctggtccagcagcaatccctacatacagcccgcttctgtctcactgcttggagcag

SEQ ID NO: 926291 - DNA, 589 bp, Homo sapiens
ttgattctgtccaaatgcaattgggtgttagcaagctatgtagaaagcactatgccaagcaacaaaatgatgacacatatttaaataattatcacaataagaaaagctaatgtagttgtatgaaaagtgctacagaaacctggagtgcttaagcattgattaaatatatgaaggaaatcaggacagtgtttacacagaaaaataaaagaagataagcmaagtattggctctagtttataggcagaatcatgaattttaggctcatgatgcagtgagtgttaatgttattagaaactggtagcaaaatttctcataagaatattttgtcttctttagtcaactgtaaaggagttttgagaatatttaaccaattcttctttgtgtatcttaaaatattttatgagtcacacaactgaattactttttaatagagcatgttttctttccaaactaatttttggtgaaaaaaactgagctatttccatgtacaaatatttaattaaatctaagatgtattcgatcaaatattattatgtggatttttctataatacaactaactgctcaatctcatcaccaaaaagtatgat

SEQ ID NO: 926292 - DNA, 589 bp, Homo sapiens
ttgattctgtccaaatgcaattgggtgttagcaagctatgtagaaagcactatgccaagcaacaaaatgatgacacatatttaaataattatcacaataagaaaagctaatgtagttgtatgaaaagtgctacagaaacctggagtgcttaagcattgattaaatatatgaaggaaatcaggacagtgtttacacagaaaaataaaagaagataagcaaagtattggctctagtttataggcagaatcatgaattttaggctcatgatgcagtgagtgttaatgttattagaaactggtagcmaaatttctcataagaatattttgtcttctttagtcaactgtaaaggagttttgagaatatttaaccaattcttctttgtgtatcttaaaatattttatgagtcacacaactgaattactttttaatagagcatgttttctttccaaactaatttttggtgaaaaaaactgagctatttccatgtacaaatatttaattaaatctaagatgtattcgatcaaatattattatgtggatttttctataatacaactaactgctcaatctcatcaccaaaaagtatgat

SEQ ID NO: 926293 - DNA, 583 bp, Homo sapiens
acatgtacccttgaacttaaaataaaaatttgacaaaataattttaaatttaataactgtttttattaattgctatgacaaatagatgaagaatatagagtacttgtacaccactatcaaccacatctcttcaaaattttactagatgttccagccattgcaaaaataagtaaaatgcatacagagattggagaaaaagtaaacattttccgaaagtttgtagatgacagaattgtttatgcagaaaatattaaggtaactataaaactcctatcagaactaaaatatgtacttaacaaggcttgaaaatataagtcccatacttctttaaaaaacagttttttctagatggtaagaagtatcatgaagaagcagaaatagagaaaaaaagagatgatgctatttacartagcatcaaacaccatcttcaatgacattaaaatcataaaatacttatggtattgatgtgaagatagacaagcacattaatggaagacaagggagtccgtaaaaaggtacacatgattatatacacacatctttaagataacttacttagcaagtgcaaatagtcttttcaaat

SEQ ID NO: 926294 - DNA, 583 bp, Homo sapiens
acatgtacccttgaacttaaaataaaaatttgacaaaataattttaaatttaataactgtttttattaattgctatgacaaatagatgaagaatatagagtacttgtacaccactatcaaccacatctcttcaaaattttactagatgttccagccattgcaaaaataagtaaaatgcatacagagattggagaaaaagtaaacattttccgaaagtttgtagatgacagaattgtttatgcagaaaatattaaggtaactataaaactcctatcagaactaaaatatgtacttaacaaggcttgaaaatataagtcccatacttctttaaaaaacagttttttctagatggtaagaagtatcatgaagaagcagaaatagagaaaaaaagagatgatgctatttacagtagcatcaaacmccatcttcaatgacattaaaatcataaaatacttatggtattgatgtgaagatagacaagcacattaatggaagacaagggagtccgtaaaaaggtacacatgattatatacacacatctttaagataacttacttagcaagtgcaaatagtcttttcaaat

SEQ ID NO: 926295 - DNA, 645 bp, Homo sapiens
ctgcagcagagttttgcttagacatccagggatttcctgcatcctctgaattgtaggtggaggctcccagacctcaacgtttgccttctatgtaccttcaggccaaacaccatgtggaagccaccaaggcttggggcttgtaccctctgaagcaatggccagagctgggccttggccacttacacatggcttaagctggagtggctgggatgcagggtaccatgtcccaaggctgcacagagcagcagggccctgggcctagcccagagaacgatttttctctcctagctctccaggcctgtcatgggaggggctgccacagcgaaggtctcagaaatgccctggaggcagttttttctattatcatggctattaatatttggctcttttttactggagtgttgaattcctccccagaattttttttttcttttctacctcatgrtcagactgcaaatttaccagactttaatgttttgcttcactttacacataaattctggtttcaggtcatttatttctttatgcaagtgaacataaggcttttagaagcagccaggcaacctctcaaatgctttgctgcttagaaattttttctgccagatactctaaatcatctatctcaagttcaaattccacagatct

SEQ ID NO: 926296 - DNA, 708 bp, Homo sapiens
gcagactgcctcctcaagtgggtccctgacccctgacccccaagcagcctaactgggaggcaccccccagcagtggcagactgatacctcacacggccgggtactcctctgagacaaaacttccaggggaaccatgagacagcagcattcgcggttcacgaaaatccgctgttctgcagccactgctgctggtacccaggcaaacagggtctggawtggacctctagcaaactccaacagacctgcagctgagggtcctgtctgttagaaggaaaactaacaaacagaaaggacatccacaccaaaaacccatctgtacatcaccatcatcaaagaccaaaagtagataaaaccacaaagatgggggaaaaacagagcagaaaaactggaaactctaaaaagcagagtgcctctcctcctccaaaggaacgcagctcctcaccagcaacagaacaaagctggacggagaatgactttgacgagttgagagaagaaggcttcagacgatcaaactactccgagctacaggaggaaattctaaccaaaggcaaagaagctgaaaactttgaaaaaaatttagacgaacgtataactagaataaccaatacagagaagtgcttaaaggagctgatggagctgaaagccaaggctcgagaagtacctgaagaatgcagaagcctcaggagctgatgcgatcaactggaagaa

SEQ ID NO: 926297 - DNA, 708 bp, Homo sapiens
gcagactgcctcctcaagtgggtccctgacccctgacccccaagcagcctaactgggaggcaccccccagcagtggcagactgatacctcacacggccgggtactcctctgagacaaaacttccaggggaaccatgagacagcagcattcgcggttcacgaaaatccgctgttctgcagccactgctgctggtacccaggcaaacagggtctggattggacctctagcaaactccaacagacctgcakctgagggtcctgtctgttagaaggaaaactaacaaacagaaaggacatccacaccaaaaacccatctgtacatcaccatcatcaaagaccaaaagtagataaaaccacaaagatgggggaaaaacagagcagaaaaactggaaactctaaaaagcagagtgcctctcctcctccaaaggaacgcagctcctcaccagcaacagaacaaagctggacggagaatgactttgacgagttgagagaagaaggcttcagacgatcaaactactccgagctacaggaggaaattctaaccaaaggcaaagaagctgaaaactttgaaaaaaatttagacgaacgtataactagaataaccaatacagagaagtgcttaaaggagctgatggagctgaaagccaaggctcgagaagtacctgaagaatgcagaagcctcaggagctgatgcgatcaactggaagaa

SEQ ID NO: 926298 - DNA, 605 bp, Homo sapiens
tgaaaatcaaaaccacaatgagatactatctcatgccagtccgaatggcaattattaaaaagtcaagaaacaatagatgctgatgaggctctggagaaataggaatacttttacacattggtgggaatataaattagttcaaccactatgaaagacagcatggcaatttctcaaggatctagaaccagaaatacaatttgacccagcaatctcattactgggtatatacccaaaggaatataaatcattctacaataaagacacatgcacatgtatgtttattgcagcactatttacaacarcaaagtcttggaaccaacccaaatgcccatcaatgatggactgggtaaagaaaatgtggtatatacacaccatggaataccaagaagccataagaatgaatgagattatgtcatttgcagggacatggatgaagctggaagccatcatcctcagcaaactaatacaggaacagaaaaccaaacaccacatgttgtcactcataagtggagcttgaaaaatgagaacacatggacactgggaggggaacaacacacaccagggcctgttggaatgtgggggatgagggaagggaacatagagga

SEQ ID NO: 926299 - DNA, 619 bp, Homo sapiens
agtggcaggcaagtgagcaaaccttcgtctttatttatagccacttcatcagtatttatagccactctccatcacttgcattactgcctgagctccacctcctgtaaaaccagcagtggcattaatttctcataggaacatgaaccctattgtgaactgtgcatacaacggatytaggttgcatgctccttatgagaatctaatgcctgataatctgtcactgtctcccatcacccccagatgggaccatctagttgcaaaaaaaaaaaaaaaaaaaaaaaaaaaaaaaaaaaccaggctcagggcttccaccaattctacattatggtgagttgtataattattacattatatattaccatgtaataataatagaaataaagtgcacaataaatgtaatgctcttgaatcatccccaaaccaccccctccccaggccatggaaaaattgtcttccacaaaactggtgcctggtgccaaaaaggttggggattgctgtgttaatcaactatttgtgttgttggtagggcttccagtaaacagtaggctattagttaagttttaagggagtcaaaagttagatgtggatttttgagcatgtgggtgtcaatatcactaac

SEQ ID NO: 926300 - DNA, 619 bp, Homo sapiens
agtggcaggcaagtgagcaaaccttcgtctttatttatagccacttcatcagtatttatagccactctccatcacttgcattactgcctgagctccacctcctgtaaaaccagcagtggcattaatttctcataggaacatgaaccctattgtgaactgtgcatacaacggatctaggttgcatgctccttatgagaatctaatgcctgataatctgtcactgtctcccatcmcccccagatgggaccatctagttgcaaaaaaaaaaaaaaaaaaaaaaaaaaaaaaaaaaaccaggctcagggcttccaccaattctacattatggtgagttgtataattattacattatatattaccatgtaataataatagaaataaagtgcacaataaatgtaatgctcttgaatcatccccaaaccaccccctccccaggccatggaaaaattgtcttccacaaaactggtgcctggtgccaaaaaggttggggattgctgtgttaatcaactatttgtgttgttggtagggcttccagtaaacagtaggctattagttaagttttaagggagtcaaaagttagatgtggatttttgagcatgtgggtgtcaatatcactaac

SEQ ID NO: 926301 - DNA, 586 bp, Homo sapiens
atactcaatggtaaaagtccagatgtcttttccctaagatcaggatcaggaacaggacaaggatgtccattctcactgctcctattcaacattatactgaaagtcctgggcagtgcaataaaacaataaaaagaaataaaagatgtacaaattggaaaggaggaatatactttattctcagaaataattttctacataaaataatatttaaaaatctgcaaaaagcacttattaccaattagtgtgtttagcaaagtcagaaaatacaagatcaaatatgtctagaatgagcatcctgaaaactacmaaatactgaagaaagaatcaaagacttaaataattgaatgatgaatcatgttgttcatgaattggtgaactaaatatataagtatttagtattccaattattcccagattggtcaacagctttattgcaaaaattctcagtaagatttattctgggccaggcgtggtggctcatgcctgtaatcccagcattttgggagactgagatgggtgaatcacctgaggtcaagagtttaagaccagcctgatcaacaaggtgaaatcccatctctactaaaaa

SEQ ID NO: 926302 - DNA, 718 bp, Homo sapiens
ttgctacaggggtgggggccctcatggataacctctgctagggcattgtggaagggaactgtggggtcagatcccccacacagtctgtactgaagcactgcctagtggagctgtgagaagagggccaccatcctccagagctcaaaatggtagattcactgacagcttgtactgtgtgcctggaaaactcacagacactcartgccagcccatgaaagcagccaggagggaggctgtacctggaaagccacagggccagagctgcccaagaccataggaacccacctcttgcatcagcataatctggatttgagacatgaagtcaaaggggatcattttggagctttaagatttgactgacccactggattttggacttgcttggggcctgtagcccctttcttttggccaatgcctcccatttggaatggctgcatttatccaatgcctgtacccccgttgtatctaggaagtaattaacttgcttttcatattacaggctcataggcggaagggacttgccttgtctcagtacaaatactttggactctggacttctgacttaatgctgaaatgaattaagatttgggaggacagttgggaaggcatgactggttttgaaatgtgaggacatgagatttgggaggggtcaggggcagaaagataaggtttggctgtgtccccacccaaatctcatcttgatcccacatgttgtggg

SEQ ID NO: 926303 - DNA, 574 bp, Homo sapiens
aatgctcaccaaagggtgacctcagcagaggagtattttaataatcaagtgaataggatgattgtttttgtggctagcaatctatctctttccccagccacatctgtcatcatccagtgggctcatgaacaaagtggccatggtagcagaaatgaaggttaggtatggactcagcaacatggacttccacttaccaaggccaacctggytacagccaccactgagtgatcagtctgccagcagtaaaaaacacatatgattccctgatatggcatcattccccagggtgatcagccagctacctggtggcaggttgattacattggaccacttccaccatggaagagcagtgttttgttcttactaaaaccaacatttaccctagatatggatttaccttcactgcatgcaatacttctgccaaaactatcatttgttgacttatagaatgtcttatccagcattatgatattccacacagcattgcttctgatcaaggatctcctttcacaacaaaaaaagttcagtaagaggcccatgcttatggaattttactggcctttctatgttccac

SEQ ID NO: 926304 - DNA, 623 bp, Homo sapiens
ctggagtggctgggactcagggtgccatgttctgaggctgcatagagcagcgggaccctgtacctagctcatgaaaccattattcccttctaggcctccaggtctatgatgggaggggctattgtgaaaatttctgaaatgccctgcagacatttcccccactatcttagcaattaacattcacctcctctttacttatgcaaatttcttcagccagaagcttgaatggcttccccccaaaatgggtttttcttttctacaacatggttagcctataaattttccaaacttttaggctctgcttcccttttaaacacaaatttcaatttcagatcacctctttgtgaattcatatgactgtatgcttccagaaacagccaggtcaaatcttgaatgctttgctgcttagaaatttcttctgccagatatcctaaatcatckttcccaagttcaaagttccacagatccctagggcaggggtaaaatgccacccatgtctttgctaaagcatagcaagagtgacctttgctccagttaccagtaagttcctcatctccattcaagatcacctcagcctggacttcattgtccatatcactatcagcattttggtcaaaaccatt

SEQ ID NO: 926305 - DNA, 579 bp, Homo sapiens
tggtctctaacctttattgctttcccttttctgtttgctttttgttttgttttattctttttgtagtttctaatggtggaatcgtaggttattgacttctgattgttctacttttctaagatagggttttaaagccatagacttctcactgagcattgctttgtggtgtcctgcaaatttttatctgttgttttcatttttatttaattaacaattgtgttacttgtaatttcttcttcagcctatgtgttatttagaattgtattatttaatttgcaaatatttggaactttcctcattttgtcctattgtttaattataatttaattctgttgtgattggagaatttacattgtaaatcattttgcattgggacttgtattatggactagcatgtagtttatcctggagaaaattttatattcacttgraaagactgtgtttttgctcttatttgtgaagtgttctatagatttcagtcaggtcaagtgggctgatggtgttaattaagccttctttattcttgttgattttctgttttgttgttacatcaattattgaaactaaggtattaatgtc

SEQ ID NO: 926306 - DNA, 584 bp, Homo sapiens
actgcccaattgcctcggaagccctctggaccatcagggatgctgagctttgggtaactcttacagtggggcgtaagtccatcccctgtttaactgatacaggggctaaccactccacattaccttcttttcaagggcctgtttcccttgcctccataactgttgtgggtattgatggccaggctcctggaccccttaaaacttcccaatttggtgccaacttgaacaatattctgttatgcactcctttttagttatccccacctgcccagttcccttattaggctgagacattttaaccaaattacctgcttccctgactattcctggactacagccacatctcattgccrcccttcttcccaacccaaagcctccttcacgtcttcctcttgtatccccccaccttaacccacaggtatgggacacctctgctccctccctggcaactgatcacacacccatacctaatcacccttaccctgctcaacaccagtatcccatcccacaacaggctttaaggggattaaagcctgttatcactcgcctgctacagcatgagcttctaaagtctaaaaactcct

SEQ ID NO: 926307 - DNA, 541 bp, Homo sapiens
cccttgaacctgggaggcagaaattgcaatgagctgagatcataccagtactctggcctgagcaaaagagcaaaactcagtctcaactaaataaataaataaatattgggtactgggcttaatgtcaaggtgatgaactactctgtacaacaaaccccgatgacacgagtttacctgtgtaacaaaccttcacatgtagccccaaacctaaagtaaaaaaatgaatattgtcaggcctctgagcccaagctaagccatcatatcccgtgacctgcacgtacacatccagatggccagttccttccttaactgatgacattccaccacaaaagaagtgaaaatggcctgttcctgccttaactgatgacaytgtcttttgaaattccttctcctggctcatcctggctcaaaagctcccccactgagtacgttgtgacacccactcctgcccgccagagaacaacccccctttttcctttacctacccaaatcctataaaatggcccaacccctatctatctccctttactctctttttgga

SEQ ID NO: 926308 - DNA, 619 bp, Homo sapiens
tctctgtgtctgagtctacctctatttcttccattcttctgcttttgtttttcatttttagggcactgcatcccattgaaaattctaatcacaactgggcactcctcaaaaaaaaaaaagccacacccagacacgcactccattttgccaatcatttcaacggtcagggacactcgggttgaccttttctggtctagyccctcgtcgccaagttgcagggaggctcactggggctcagatcggaagacattttcaccaagttaccctgagaaggtctgagatgagtgagaaggtgtctaaagtcttacatggggtcctggaagggctaatggcaaaggttgctcttatcacccccatccttgaaaattagagaaacctctttcacaaacctgggctaaagaaacttcttttgcaaggttctgatgacattgattcctgacagttaattcttccttacaaaaaactcacaggaacatttataaaatgcagaagtgtgaacacacagctattgaccttggaaacagtgaaagagggtcagctgtagaactaagaaataagcaaattatttcaatcaagaatacatgagtggtcaggcacaatggctcacgcttgtaatcct

SEQ ID NO: 926309 - DNA, 481 bp, Homo sapiens
ccacctgatcatgcctctgtactacagcctgggcaacagggcaagactctgttctaaaaaaaaaaaaaaaaaaaaaaaatcggaggagagtcaatcctaaaaagaaataaagaaaacaatcccatttactatagcatgaaaaaagataaagaacttaggaatgaatttaaccaaaggagtatataaattacacactgaaaactataaaacactgctaaaataaattttaaaagatacaagtaaatctcatgctcatggattgcaagatttaatattattaaaatgtctatactacccacagctacctaaaatttcaatgtaatccctataaaaatcccaatgacawtttttgtaaaaatagaaaaaaaattcctaatattcatatggattgttaagggaccccaaataactaaaacaatctggaaaagaaggaaaatgtggaggcctcacccttcctgatttcaaaacatacaacaaagca

SEQ ID NO: 926310 - DNA, 637 bp, Homo sapiens
tctccctatgttgcccagactggtctagaactcctaggctcaagtgatcctcccgcctcagcctcccaaagtgctgggattacaggcgtgagtccccacgcccagccatgagggcagagattttcatctagtttttttcagtgctgagttctcagtatctggagcaagggtccccagccgggctgcagaccagtctgtggcctgttaggaactgggccatacagcaggaggtgagcagcaagtcagatcagtggcggcattagattctcataggagcaagaatgctactgtgaactatgcatgcaagggatctagatgtacattctttatgagaatctgatgcctaatgatctgagttggaacagtttcatcccaaaaccattcctcctctccatcagtggaaaaactgtcttccacaaaaccagtccctggtgtcaaaaaggttggggattgctgatctagagcactrcctagcacacagcagatgttcaataaacattagttgaattcactgaatgaatacacaataactgaaaaaagatgttgaacatactacaccatttgacttgaggtggtaagcttgtgggcaatactgtttttatttgaaatactatccacattatccaaagttttgttt

SEQ ID NO: 926311 - DNA, 612 bp, Homo sapiens
ttatttcttcttcatgtttgaaggatattttcaccacgtatactattctagggtaaaatgatttttttttttttttttaccttcggtactttaaatatgtcatgcctctctctctcctggcctttaagatttccactgagaagtctgctgccagacatattggagctagattgtatgttatttgtttattttctcctgctgcttttcggatactttcttcattctggacatttggaagtttgatgattaaatgttttgagatagtgttagytgggttaaatctacttggtgttctataattttcttgtacttggatattgatatctttctctcagttcaggaaattctctgttattatctattgaataagctttctacccctatctctctctctacttcctctttaaggttagtaactcttaaagttgcccatttgaggttactttctagatcttctaagtgttcttcattcttttttgttcttttttcttttgtatcctctgactgtatttttaaatggcttgtcttcatgcttactaattatttcttctgcttgatcaattctgctcttaagagactctgctgcatttctcagcatgtcaattgcattat

SEQ ID NO: 926312 - DNA, 809 bp, Homo sapiens
atacttcaagattgaccacatgctcagccataaagcaagtcacaataaattttcttagagtggaaatcataccaaccatactctcagaccacagtagaataaaaatagaaatcaatactaagaaaatctctcaaaaccacgcaatcagaaagaaagcaaacaacttgctcctggatggcttttgagtaaatgatgaaatcaaggcagaaatcaaaaaaattctctgaagtaaatgaaaacagagacataacatcaacatctctgggatacagcaaaagcagtgttaagaggaaagtttatagcactaaatgcctaccttaaaagatagaaagatgtcaaattaatgttctaacatcacacccagaggaaatagaaaaacaagaccaagttaactccaaagttagcagaagagaagaaataactaaaatcagagagraactgataaggcccaaaaattcacataaagaatcaacaaaaacaaaagttggttatctgaagtataaataagatcaatagaccactagctggattaacaaagaaaaaaagagagaagatccaaataagcacaatcagaaatgacacatgtgacattacaaccagtcccacagaaatacaaaaatcctcaaacactattatgaacacctctgcaaacacaaactagaaaatatagaggaaatgaataaatttctggaaacacacaatctcccaagattgaatcaggaagaaaatgaaacataaaacagaccaatatcaagttccacaattgaatcagtaataaaaagcctaccaaccaaaaaaagcccccagac

SEQ ID NO: 926313 - DNA, 809 bp, Homo sapiens
atacttcaagattgaccacatgctcagccataaagcaagtcacaataaattttcttagagtggaaatcataccaaccatactctcagaccacagtagaataaaaatagaaatcaatactaagaaaatctctcaaaaccacgcaatcagaaagaaagcaaacaacttgctcctggatggcttttgagtaaatgatgaaatcaaggcagaaatcaaaaaaattctctgaagtaaatgaaaacagagacataacatcaacatctctgggatacagcaaaagcagtgttaagaggaaagtttatagcactaaatgcctaccttaaaagatagaaagatgtcaaattaatgttctaacatcacacccagaggaaatagaaaaacaagaccaagttaactccaaagttagcagaagagaagaaataactaaaatcagagagaaactgataaggcccaaaaattcacataaagaatcaacaaaaacaaaagttggttatctgaagtataaataagatcaatagaccactagctggattaacaaagaaaaaaagagagaagatccaaataagcacaatcagaaatgacacatgtgacattacaaccagtcccacagaaatamaaaaatcctcaaacactattatgaacacctctgcaaacacaaactagaaaatatagaggaaatgaataaatttctggaaacacacaatctcccaagattgaatcaggaagaaaatgaaacataaaacagaccaatatcaagttccacaattgaatcagtaataaaaagcctaccaaccaaaaaaagcccccagac

SEQ ID NO: 926314 - DNA, 769 bp, Homo sapiens
ctgtaatcccagagttttgggaggccaaggcaggcggatcatttaaagtcaagagctcaagaccagcctgaccaacatggtgaaacttcgtcttctactaaaatacaaaaattagctgggcgcagtggcgggcatctgtaatctcggctactcaggaggctgaggcaggagaatcacttgaacccaggaggcagaggttgcagtgagctgagactgcgccactgcacttcagcctgggtgacagagcaagactccctctcaaaaaaaataaaaaataaagtccataaggaaaataagacccttgaatgtaaagagttttggagtaaacataagagtgataaagatgcatttgagaaaaaacaaaccctaggatcaggatcatcaacaccccacccagggccacgcctcctacccaccttgtcaggctgggaggtattgggcggctgctgaaaggtgagcaagtgcaggccaggcaggaagctctgggtgacgcaggcctccagggacgtgacgaagacaggcgcaggcccccaccagcccacagtgcctgagatctgctcccctcggcagcgggcctgctctgagargacagggggtgggggccggtgggtcagtgtggagtgctctggccccctcccgccggcccactgctgcggacactcaccaggcctagggaggcagctctcattgtgcacgcaccagcccagggtgccaggtccccgtggaggggctgtggggctgctgaaggccaggcaggcctggcagtcac

SEQ ID NO: 926315 - DNA, 697 bp, Homo sapiens
aagcacaaggggtcagggaattccctttcctagtcaaagaaaggggtgacagatggcacctggaaaattggggcactcccaccctaatactgcacttttccaacaggcttaacaaacagcacaccaggagattatatcgcacacctggcttagagggtcctacacccacagagcctcgctcattgctagcacagcagtctgagatcaaactgcaaggtggcagcgaggctgggggaggggcgcccaccagtgccgaggcttcagtaggtaaacaaaatggccgggaagctcgaactgkgtggaatccaccacagctcaatgaggcctgcctgcctctgtaggctccacctctgggggcagggcacagacaaacaaaaggcagcagtaacatctgaagacttaaatgtctgtgtctgacagctctgaagagagtagtggttctcccagcacgcagcttgagatctgagaacgggcagactgcctcctcaagtgggtccctgacccccgagtagcctaactgggaggcactcctgagtaggggcacactgacacctcacatggccaggtactcctctgagacaaaacttccagaggaacgatcagacagcagcatttgcaattcaccaatatccgctgttctgcagccaccgctgctgatacccaggcaaacagggtctggagtggacctccaacaaac

SEQ ID NO: 926316 - DNA, 697 bp, Homo sapiens
aagcacaaggggtcagggaattccctttcctagtcaaagaaaggggtgacagatggcacctggaaaattggggcactcccaccctaatactgcacttttccaacaggcttaacaaacagcacaccaggagattatatcgcacacctggcttagagggtcctacacccacagagcctcgctcattgctagcacagcagtctgagatcaaactgcaaggtggcagcgaggctgggggaggggcgcccaccagtgccgaggcttcagtaggtaaacaaaatggccgggaagctcgaactgtgtggaatccaccacagctcaatgaggcctgcctgcctctgtaggctccacctctgggggcagggcacagacaaacaaaaggcagcagtaacatctgaagacttaaatgtctgtgtctgacagctctgaagagagtagtggttctcccagcacgcagcttgagatctgagaaygggcagactgcctcctcaagtgggtccctgacccccgagtagcctaactgggaggcactcctgagtaggggcacactgacacctcacatggccaggtactcctctgagacaaaacttccagaggaacgatcagacagcagcatttgcaattcaccaatatccgctgttctgcagccaccgctgctgatacccaggcaaacagggtctggagtggacctccaacaaac

SEQ ID NO: 926317 - DNA, 572 bp, Homo sapiens
aggccattatcctaagcaaattaatgcagcaacagaaaaccaaatactgcatgttgtcacttataagtgggagctaaacactaggtactcattggcataaagatgggaacattagacactggggactactaccgaggggagagaggggaaggaggtggaagggctgaaaaactatccattgagtactaagctcactacctggctaargtgacaatttgtaccccaaacctcaatgccatccaatatacccatgtaactaacctgcacatgtacctcctgaaactaaaataaaatttttaatttatttaaaatttttgtttaatgaaagttgtgatttttgtctaaagtccacactaccaaatgggtatcataccttaccttacccttagtatgtgccatggccccagtaggagcattaatctaaaagtttccactacttctgccttaagacaagaaactatatgttctctttggattgccgtaactttgcatgtgccatgatcatggttaaagaaaaataaatgttaacacattaaagtgtcttaagtatcttaaccgaatcaaaatatgaa

SEQ ID NO: 926318 - DNA, 572 bp, Homo sapiens
aggccattatcctaagcaaattaatgcagcaacagaaaaccaaatactgcatgttgtcacttataagtgggagctaaacactaggtactcattggcataaagatgggaacattagacactggggactactaccgaggggagagaggggaaggaggtggaagggctgaaaaactatccattgagtactaagctcactacctggctaaggtgacaatttgtaccccaaacctcaatgccatccaatatacccatgtaactaacctgcacatgtacctcctgaaactaaaataaaatttttaatttatttaaaatttttgtttaatgaaagttgtgatttttgtctaaagtccacactaccaaatgggtatcataccttaccttacccttaktatgtgccatggccccagtaggagcattaatctaaaagtttccactacttctgccttaagacaagaaactatatgttctctttggattgccgtaactttgcatgtgccatgatcatggttaaagaaaaataaatgttaacacattaaagtgtcttaagtatcttaaccgaatcaaaatatgaa

SEQ ID NO: 926319 - DNA, 682 bp, Homo sapiens
actgctaaccttagaaatctatctggttctctttttcattgctgccaagctggcactcaaaccacagctcaaagtctttcaccctttccttttcacaggcagaggagtctctcctcagtgccactactagcataggctcacagggtgtactggtgggctactgctgatgttcacttaaggtccaaggttcttcagtcagcttgtggtgaatggtcatccttcagggcagtgggctcccttctggcccaggcaggtccagaaatgctgtccaaggaccacatcctggaatcaggtaatcttctctctgcttttctcaagcagaaggagacttttcttgtagctatcacaactaggaatgtggtggatcacacctgaagccagcacagctctgagtctcctcagaggcccacagggagtactgccttggtactgctgctaattatttagggcccaagggccctttagagrgcaggcgatgaatcctttcataactgagtccttgccttcaaggcagcagttttccttctggcccagcatctgtctgtaaatgtcacgcaggagctaagacctggaatgggtgcctcacacttctgcccattcctactgtagctgagctgctatccaagttgaaagacaaaatcctctttactctcccttatccttttctcaagcagagggaagg

SEQ ID NO: 926320 - DNA, 561 bp, Homo sapiens
ggccacagaaactggagagaagatgacgccccaggaagggtcttgtcttagtccattttctgttgcttagaatacctgaaagtgagtaatttatttgaaaaataatttgtttcttacagttatggagaatgagcagtccaaggctgagggtctgcmtttggtgagggccttcttgctggtgggggctgtttgcctgagcagacacagggcatcgcatggtgagggagaaaagtgttctagctcaggtctctcttcctcttcttataaagccagcattcccactcccaaaataacctgttaatccattaatccatgaatggattaatttactcatgagggcagagcctccatgacctaatcatctcttaaaagcccagctctcaataccaccacattggagatttaatttcaccatgagttttggaagagacaaatgtttaaaccatagtggagctcatgtatcatgtcccggtgaggtggctccccagggctggcaccatttggaattcctgcagagcagccagtcccccattcccatgtgatcccagagttgccctgtgg

SEQ ID NO: 926321 - DNA, 645 bp, Homo sapiens
tggagttgcgtacctaagaggattatcactacctctgttgagtcatgcaggttgtcagggaagtggggaaagctggcaatcacaggcctcacccagctcccacgcaatctgaagggcggtctcacttccaccatgaacccccacaaacagccccgagtctgtgtccaggcagtgggcaagcagggcttgagaacttgccccaggctacctgcctcccagcttggaaagaaaaggactttggttcttcccctgcttgtggagtctgcatgccggattcttgttctgccccgagttctggccaggaggcttcttgcctggttcaaattgttacaaagtttagctaaagatttccttctgtttgtggcatttccccccacacctctggctgccctcttgaaggatccctgtggtgccaggcaagagtggcctacytggggacccgggaagctcccagggcctttcccgctgcttgctctacccctgtattttgcttggctctctaaattgactcagcttcaggcaaggtcagaaacttctcctgcaaactagacccttattttccccagtgggggtatgtgttcgggagcagtgaatcttcttttcccacttccgcagttggggcactcacagcatttgggggtctcc

SEQ ID NO: 926322 - DNA, 664 bp, Homo sapiens
agatgcaggggtgcctacctccctgtgggtgttcaccacaatgacagaggcagcatagctgggtggagtggggggcccctgctggagattatgtgtgtggttgtactggatatggtattggcttggggcagggtgctggctggggcaggtttgggtgccttctctgtgccctgcaagcaggagtgatccctgagggtgtgggggtgtccgctgttctctgtgcagtattagtataagggcagggtgctggcaggggcagggcttgctggctttatgcccaccaaagctccatctgcagtggtggctgggggctgggtgggtgcagactacactccagtgtgctggcagggcaaggaaagcaaaacctatctgtgcagacatgtgccagcaaagtgatgtagggcattgccatgggccccggggaagctgcagtatggggagggagcaygtgcatggctgtataggccacacctcactggacttctccaccagtcaggcaaggttcactggcacagaagctatgctgtgggcccccaaggtacccaagactgccctctaagcaggtgtggccaggctggggccccagaagaggccaacagactaaggggtgcacaggtcagaccagccccatctgatgtgcaagaccacccttcagcgatcaggt

SEQ ID NO: 926323 - DNA, 589 bp, Homo sapiens
cagtaataaaaatgctcaccatactcagcaatcatgctcctgggaattcaaccaaatgaactgaaaacttaggtccacaggaaaacttgcaccaccattgccaaaacttggaagcaaccaagatgtcctttaataggtaaatagaaacacacgctatggtgcatgcagaccatggaatattatgataaaaagaaatgaattctcaagccacaaaaagacacgaagaaacctcgaatgcatattactggccgggtkcagtggttcatgtctgtaatcccagcactttgggaggccaaagctggtggatcgcctgagcccaggagtttgagaacacccaggggcaacatggtaaaatcccatctctactaaaatacaaaaaaattagctgcgtgtggtggcaggcgcctgtagtccccactactcaggaggctgagtcacgagaatcacttgagccccagaagcagaggttacagggagctgagattgcaccactgcactccagcttgggctacagagtgagactctgtatcaaaaaaaaaaaaatggctgggcaccatggctcacacctgtaatcccagcactttgggag

SEQ ID NO: 926324 - DNA, 582 bp, Homo sapiens
agtgaacttcagagacagggaagtagaaggggaatgacaggaaaggagagaggaagagagctatagaggaaaagagggcaatcaattgaggagaaaggagaggaggaaagaaaaagagagctgtagtgaggcgtctgcttccagtatggcagaagtaactcttaacaaatggctcctcagttgctscaagtgtcagccgtaaactctggacaaactacaactacctgagcactctggaaactgaagaaaagcaggtagattctggaaagaaatggaaagttaattgagcaagcaacccatatggactaagtttcctgtttcttggtagctttctctgaaggcagcctcactggggcagctctggatagctaaacccctagagaaaatatggccatctttctggctacaggactcagcaatcaggaaaaggggtcttggggcaaccaggatctccaaagtgtggtggagaacctgagaaagaggagaggtagagaagcacccctcaatttgtgcgcatccactcatctcaagtcttcaactaaccctggaaccatctatgcttatgaccgaggcttcgagaac

SEQ ID NO: 926325 - DNA, 582 bp, Homo sapiens
agtgaacttcagagacagggaagtagaaggggaatgacaggaaaggagagaggaagagagctatagaggaaaagagggcaatcaattgaggagaaaggagaggaggaaagaaaaagagagctgtagtgaggcgtctgcttccagtatggcagaagtaactcttaacaaatggctcctcagttgctccaagtgtcagccgtaaactctggacaaactacaactacctgagcactctggaaactgaagaaaagcaggtagattctggaaagaaatggaaagttaattgagcaagcaacccatatggactaagtttcctgtttcttggtagctttctctgaaggcagcctcackggggcagctctggatagctaaacccctagagaaaatatggccatctttctggctacaggactcagcaatcaggaaaaggggtcttggggcaaccaggatctccaaagtgtggtggagaacctgagaaagaggagaggtagagaagcacccctcaatttgtgcgcatccactcatctcaagtcttcaactaaccctggaaccatctatgcttatgaccgaggcttcgagaac

SEQ ID NO: 926326 - DNA, 577 bp, Homo sapiens
caagtgaggctgttcctattcttgacagtaactgcgccttcccatgttctgcagggagcatttttatttcttttctttcttttttttttttttgagatggagtctcattcctctgcccaggctggagtgcagtgttgctatcttggctcactgcaacctccacctcccaggttcaagtgatcctcctgcctcagcctcctcttagtagctaggactacaggcacatgacatcatgcctggctgataattgtatttttagtagagatggggttacaccatgttggacaggctgttctcaaactcctaacctcaagtgatccgcccacctcggcctcccaaagtastgggattacaggcatgagccaccatgcctggcccctatttttatttctttaaattattcatttattttttatttttattttatttgtttattttatcttgagatggagtcttgctcagccacccaggctggagtgcagtggcacaatctcggctccccacaaccaccatctcccaggttgaagcgattctcatgtctcagcctcccaagtagctggggttacaggcacccgcc

SEQ ID NO: 926327 - DNA, 791 bp, Homo sapiens
tttgcgctttgaatttatctggcactcctcatggaaccccaatagcatctttataaacttgagaatcaaaggacttataaggaatttcttttggcttatgacattttgtttttactttaccagactgttgagatgccagggtgaaagggatagcagaactggagcacaagttctgctccagttacttggcagagtgtccagtaaaagtctaccacaataccaccatacatctgcttggcaatggctaagcgtggactgatgggcaagctcctggaaaggcttgagctccttgcatccttttatgcctccaaggaacatcaaattttccccttgctgtgagaggcacaaagtaaacttggcatttagaggtggaagttggattgccctcgggggctgacctacagggtgttgaacttcaggaaacagcagagagagctcagcatgatggattatcccaagyagtgggattctgaaagacagtcaccatacagtctgtacctggtcaatgaggagaccatccgagtggaaaggtgacaatctgagcctctggcctatcgtgagcacaagcgtaacaatcactcttatttaaagtgtgaatgggatatttattccattccagccgggcatttgcattttgatattctgtctcaatggctaaggtttgtcttagatcttttaccttcctaatagacaccctggttttattattaggtgtagaagcaaccagtgtgggatctaaaactgaagctactgaagaaggggaagatgggggaatattgcatatcttaaaa

SEQ ID NO: 926328 - DNA, 649 bp, Homo sapiens
taagtccagtgaattccataagcatgagcccactgccacacttctttagccataaagtgagtgccttggtcagaggcaatgctatgtggaataccatgacagtggataaggcattccacgagtccaaggatggtagtcttggcagaagcattgcatgctggacaggcaaacctatatcctgagtaagtgtctatgcyggtgaggacaaacctctgccctttccatgatggaagaggtccaatatagtcaacctgccaccaggtagctggctgatcaccccgaggaatggtgccatatcaagggctcagtgttggtctctgttgctggcaaattgggcactcagcaatggctgtagccaggtcagccttggtgagtggaagtccctgttgctgagcccatgaataacctccatccctgccaccaagaccactttgttcatgggcccattgggcgatgacaggggtggctggggaaagacgctgagtggtgtccacagaatgggtcatcctatccacttgattattaaaatcctcctctactgaggtcacccactggtgagcactcacatgggatacaaatatcttcatggtttttcaccactcacagaggtccatccacatacctcgtccccaaatttctttgtcaccaa

SEQ ID NO: 926329 - DNA, 649 bp, Homo sapiens
taagtccagtgaattccataagcatgagcccactgccacacttctttagccataaagtgagtgccttggtcagaggcaatgctatgtggaataccatgacagtggataaggcattccacgagtccaaggatggtagtcttggcagaagcattgcatgctggacaggcaaacctatatcctgagtaagtgtctatgccggtgaggacaaacctctgccctttccatgatggaagaggtccaatatagtcaacctgccaccaggtagctggctgatcaccccgaggaatggtgccatatcragggctcagtgttggtctctgttgctggcaaattgggcactcagcaatggctgtagccaggtcagccttggtgagtggaagtccctgttgctgagcccatgaataacctccatccctgccaccaagaccactttgttcatgggcccattgggcgatgacaggggtggctggggaaagacgctgagtggtgtccacagaatgggtcatcctatccacttgattattaaaatcctcctctactgaggtcacccactggtgagcactcacatgggatacaaatatcttcatggtttttcaccactcacagaggtccatccacatacctcgtccccaaatttctttgtcaccaa

SEQ ID NO: 926330 - DNA, 584 bp, Homo sapiens
aggatcttttttagacaagcaaaaactaagaaaattcatcaccacgagaccagccccacgtgaattgcataagagagcctgacacgtggatgtgaaaggatgatatctgccattatgaaaaaacacaaaagtataaaactcactggtacagcagatgcacaagtaagaaagagaaagaagtaaaatgatctcactacagaatacctccatactgcaatgttaaacaataagaggmagagaagaaaacaaagggtttacaacacaaccagtaaacaattaacaaaagaacaggagtaaattctcaacattcaataaaatctttggtaaatggtttaaattatcaaattaaaagttttgctgactgggctatatagatttaaaaaattgacctaactatatgctgcatacaagaagctcactttacctggaaatacacatgcagactgaaagtcaaagaatggaaaaagttattccttgtgaatggaaaccaaaaatgagcagaagtagctatacttatatcagataaaatactttaagtcaaaaaacattaaaagagacaaagttattatataatgataaataaa

SEQ ID NO: 926331 - DNA, 620 bp, Homo sapiens
ccagatgacttcactgctaaattctaccaaatttttaaagaactaaaatcagttctcacaattttgcaaaaaagtaaaaaggagtacaaactttcttactcattttataagggaagcattaccctgataccaaaaccagacaaggacacaacaataaaagaaatctacagaccamtattttgaatgaacatagacgcaaatatcctcaacaaaaaactaacaaatgaaatccaacagcatatcagaaggattatacattgcaattacgtgggattatttttctaggaatgcaaggatagtttaacatatgcaagtcaataaatgtgatacatcacagcaacaattgaatgatcacctcaatagtggcagaaaaagcatttgataaaattcaacattacctcatgaaaaaaaaaaaaacacctcttaacaaattaagtatagaagtgtacctcaacacagtaaaggccacatatgacaaaaccacagctaatatactgaatggagaaaactgaaagcttttccttgaaaaactgggataggacaatgatgcccactttcaccactcttatttaacatagcactggaagtcctagccagaataattaggcaagagaaaggaa

SEQ ID NO: 926332 - DNA, 789 bp, Homo sapiens
gagcacgatggaatgaattttgtttgttgtaagggcaaagaagcaggctaaagaggatgtggtgaaagattctacttcctgtctattcaaaggatgtgaatagacagtttacataacagaaaattcagtaggctcacatatggtaaatcatacagctttgtttgcaaataacaaaatacacattaaaaaagttatagcgtctttgaaaacctattaaactcacaaaaataaacagaaccccaaaattcaattatttcttgtgagcaatgtgtccagrttgtatgctatggtgaaaagaatgctgcatttggaatgcgaagacttaaatgtaacacaaactgtgagcaagttatttacttttctgaagctcaattattttctcatctataaagggtggataataatatctatcaaccttatgaagtttataacagattcatataggtgaatggaagaaattttcaaatggcaaagcactgtataaatatgtttttgtgtttttaatcaacaaattaataagagaagtgacaaattttagttacttatccttttcagaagcatgtggaatacaatttatgaatgcactaattgtgtttagcaatttcccttttagacactgatgatgaactagctaaataaaccgtctcaaaatgtgggaattactttttaaaaattacaatgttgtgggctctatcagtacactgacattaaactcagatttcactgagtttattttgttgggtgatttcatcaatgttaacataatttaatccacaaaataatcataag

SEQ ID NO: 926333 - DNA, 586 bp, Homo sapiens
atttgactgaggactggcaacccctaggtagctttaggatggagactggtcaccaaaagatgaccaaggcagaattagaaggttgggattttcagtcccacccccaacctccagggatgggagacaggctgaaagttaagttgctcaccaatagccaatggttttgtcagtcatgctttcgtaatgaagcctctgtaaacacaaaaaagactaggttcagacaactgctggagagccaaatgtgtggaggttcctggagggtggtgtgcccaggagggaagctccacatcctttgccccatgtctttccttacrtatcttttcatctgtactctgtaatatcctttacaacaaactgagtcacgtctttttctgagttctcttagctactctagcaaattcattgaacacaaggaaggggtcatgggaaccctgatttatagacaattggtcagaagcgcatgtaaaacaacccagggcctgtgactgccatgtgaagcgaacggtggtcttgtgggactgagcctttaagctgtgggatctgatgatatctccatccaggctgtgttggaattaaactggatgac

SEQ ID NO: 926334 - DNA, 747 bp, Homo sapiens
cgcgcctgtaatcccagctactcgggaggctaaggcaggggaatcgcttgaacccaggaggtggaggttgcaatgagccgagatcgtaccactgaactccagcctggtgacagagtgagatgaaaggaaggaaggaaaggaggaagggaggaggagagaaagagagagagaaaaagaaagaaagaaaagagagaaagaaaagaaataaggaaagaaaggaaagaaagaaagaaaagaaaagaaaagaaaagaaaaagcagaataaccacaggtagatcactatctggtgaccacctttcttccagagatcagacactgaacaaaggatgatggggccacaggggaagaaaactctatgtcttcagatctgtccacagtcttgacctccaatgttagatatgaagaaaacagattaaaggcaaaattattttgctatttggccttggccctaagtgtcaggatgtagttttacgttttctcctgtgcgtgcrgggactaaggaccaatcacatgcatacatatctacatgtattgcagcgttactcaacattatcttacaacacatctaactttaaatcaggggaaaatattagtacctttatggagcccactgttagaaggtaactagtaatcaacctgtcattaaatcatggcacctatctgcactgggtgcatgtattagttagctattgcagcataaccaaccatccaaaacttattaggtaataattgagatggtcagccatt

SEQ ID NO: 926335 - DNA, 767 bp, Homo sapiens
tagaatgtttcgtaaatgtttacagattcacttggttgatgatgccaagttctatattttttctctttttctgtctagttccagcaattgctgagagaggggcgaagtctccaactgtaattgcggatttgtctgtttctcctttcagttttatcagtttcgcttcacatattttacagctctattgcttgtgcattggtgcatacaaatttaagattaccatgccttcttggtggattgaccctttctatcattatgtaatgccctactttgtctctactaattttctttgcttctgaaggctgctttatttgacattaacatagccattcctattttattttgattaatgtttggatgaatatattttttcatgcaaagctactttagttaattttgaagtgaatttctgcagacatatataattggtttatttttttgttattttattttatttatttactttttctcaacttttaggttcagggtacatgtgcaggtttgttacatggataaattgtgtgttgctgaggttttgtgtatgaataatcccatcacccrggtagtgagcattgtacgtgataggtagttttcaaccctcaccctcctcacagtctccctgctctagtagtcctcagtgctcagtgtctattgttcccatctttatgtccatgtgcatgcaatgtttagctcccacttatgaagtgagaacatgtggtatttgtatttggttttctgttcctgcattaattcacttaggataatgg

SEQ ID NO: 926336 - DNA, 767 bp, Homo sapiens
tagaatgtttcgtaaatgtttacagattcacttggttgatgatgccaagttctatattttttctctttttctgtctagttccagcaattgctgagagaggggcgaagtctccaactgtaattgcggatttgtctgtttctcctttcagttttatcagtttcgcttcacatattttacagctctattgcttgtgcattggtgcatacaaatttaagattaccatgccttcttggtggattgaccctttctatcattatgtaatgccctactttgtctctactaattttctttgcttctgaaggctgctttatttgacattaacatagccattcctattttattttgattaatgtttggatgaatatattttttcatgcaaagctactttagttaattttgaagtgaatttctgcagacatatataattggtttatttttttgttattttattttatttatttactttttctcaacttttaggttcagggtacatgtgcaggtttgttacatggataaattgtgtgttgctgaggttttgtgtatgaataatcccatcacccgggtagtgagcattgtacgtgataggtagttttcaaccctcaccctcctcacagyctccctgctctagtagtcctcagtgctcagtgtctattgttcccatctttatgtccatgtgcatgcaatgtttagctcccacttatgaagtgagaacatgtggtatttgtatttggttttctgttcctgcattaattcacttaggataatgg

SEQ ID NO: 926337 - DNA, 565 bp, Homo sapiens
tcatcttaagccttttacaaggttatgacaattgtcaagaaagttatctgggattttgaagaaaatgtaataatatatctctattgatttaaatataatccatcggttgttaatatctgctagaggtccatccttgagctaggcacttaaatctgcattattatttyttgctcactcacaatatttgtaaaatggatttgattttggacttttgaatagatgaagaagttgatgctcagagagaccaaccaatatatcctattttacacagtaaaatacaaatatttacgttgaaagtccagctcctctttccagcataatactacttaaactgggggaatacaactgtgttttaagaattgccaggaatatttcttacgatgatgatgatcagtattctccatagtttcttcagagattaatctttcaaattatgagatataagaacatatttgtgaaatatttatcttccatttttaagttaaagccttctttgtatcttagaatttaaagtaaacttaaagtaaaacctagcaatgtcctagcaatataatgtcttcctctg

SEQ ID NO: 926338 - DNA, 740 bp, Homo sapiens
gaactgaaggagatagagacatgaaaaacccttcaaaaaatcaatgaactgtttttttttgaaaagattaacaaaacacaccattagctagactagtaaagaaaaagagaggggtggagccaagatggctgaataggaacagctccagtctacagctcccagcgtgagcaacgcagaagacgggtgatttctgcatttccaactgaggtaccgggttcatctcactggggagtgtcggaaagtgggtgcaggacagtggttgcagtgcaccgagcatgagccaaagcagggcacgccattgcctctcctgggaagtgcaaggggtcagggaattccctttcctagtcaaagaaaggggtgacagatggcacctggaaaatcaggtcactcccaccctaatactgcgcttttccaatggccttagcaaacrgcacaccaggagattatatcccgcacgtggctcagagggtcctacacccacgtagcctcactcattgctagcacagcagtctgagatcaaactgcaaggtggcagcgaggctgggggaggggcggccaccattgccgaggctagagtaggtaaacaaagcagccgggaagctcgaactgggtggagcctaccacagctcaaggaggcctgcctgcctctgtagactccacctctgggggcagggcatagacaaacaaaaggcagcagaatcctctgcagacttaaatgtccctgtctgacaactttgaag

SEQ ID NO: 926339 - DNA, 620 bp, Homo sapiens
ttttgaacaaattgacaagcttatatcataattcatataaaaatttaaggaatatagaatagccaaaaaataataaaaaatgaggatcaaacttgtttgacttatattcccagatttcaaaacttggcataaagatagacatacagattaatgaaatagacttgagagttcaaacacaaactcatacattcattaatgaggtaactaattttccacaagggtgccaagacwattgagtggagaaagaatagtctttttcaacaaatggtcctgtgacaaccagatatccacatgaaaagaatgaatttggacccctaactaacaccacatacaaaaattaactcaaaagagatcaaaggcctaaatatccagctaggattataaaactcttagaacataacatcggtataaatcttcatgaccttggattagacaatggtttcttagatttaacacctaaagcataagaaagaaaagtgtatatacatttgacttcatcaaaattaaaaacatttttaccttaaaggatacttttcagaaaatgaaaagacagctcacagatacaaaaagatatttgcaaatcatgtattcagtaaagctctagtatccagaatatatac

SEQ ID NO: 926340 - DNA, 724 bp, Homo sapiens
aaaaactacacacctcactcactattcccaagtgtgctttttctcttcaaaatgtgtttacccttatgtacatgagtgtgtgcgtgtgtgtctgtgtgtggacatatgtgtgtgtggacacgtgtgaatgtgtgttcggaaatgggtgggatgatgtcacatggtcttgggaaggagacttacatttccaatgttcagggtctcgagggtgaactcatccacccggccacgttcaaagtagtctttgaggttrttgtcagagacaagaagaacttgcttgatggtgtcagatttatccccatagagcttgatgtagactctagaatccgtgctggccccagagacatccccagtcttcaagctgatgtgatagcgaaagtctgaacagcccaaggcagagggaggaagggaaggggttagtgcagggggtgacaggaagcagggtgcgtgtataggagggcagcctggagctggaggtttgtggggaacacacgctgggaattgaaaatccaggctcctgttctaagcagccctgcaacttggggcaggggttccttccatctctgtgaggtctcctcaactgtaatggcagaattctagtaggttctctgtctgctccagaaggtgtgaatgggcttagagcaggaaagcgtgtaaatcacaagcaagaacatcaaaacataagagcctgaaaggatttcccacaatcatctggtctagcttc

SEQ ID NO: 926341 - DNA, 585 bp, Homo sapiens
ccaatcagacgtagatttggtcttttcacatagtcccatatttcttggaggctttgctcgtttctttttattcttttttctctaaacttcccttctcacttcatttcattcatttcatcttccatcactgatatgctttcttccagttgatcgcatcggctcctgaggcttctgcattcttcacgtagttctcgagtcttggttttcagctccatcagctcctttaagcacttctctatrttggttattctagttatacattcttctaaatttttttcaaagttttcaacttctttgcctttggtttgaatgtcctcccgtagctcggagtaatttgatcgtctgaagccttcttctctcagctcatcaaagtcattctccatccagctttgttccgttgctggtgaggaactgcattcctttggaggaggacaggtgctctgctttttagagtttccagtttttctgttctgttttttccccatctttgtggttttatctacttttggtctttgatgatggtgatgtacaggtgggtttttggtgtggatgtcctttctgtttgttagttttccttctaacaga

SEQ ID NO: 926342 - DNA, 576 bp, Homo sapiens
agtttgctggaggtccactccagaccctgtttgcctgggtatcagcagcagaggctgcagaacagtgaatattgctgaacagcaaatgttgctgtctgatcgtttctctggaggtttcgtctcagaggggtacccggctgtgtgaggtgtcagtcttcccctactcggggggtgcctcccatataggctactcaggggtcagggacccacttaaggaggcagtctgtccgttctcagatctcaaactccrtgctgggagaaccactactctcttcaaagctgtcagacagggacatttaagtctgcagaggtttctgctgccttttgtttgtctatgccctgcccccagaggtggagtctacagaggcaggcaggcctccttgagctgtggtgggctccacccagttcgagcttcctggcagctttgtttacctactcaagcctcagcaatggcgggcgcccctcccccagcctcgctgccaccttgcagtttgatctcagactgctgtgctagcaataagcaaggctccatgggtgtgggaccctctgagccaggcgcaggatatgatctcctgg

SEQ ID NO: 926343 - DNA, 773 bp, Homo sapiens
tttctaatgctagtactgcctggatcctgagcaattgtccatgggcagttcattttatagatataagaagcaggaggatgcaagaggaaagtgatttagcaaaagtcatttagcccaaaatttaaaactgccaggcacggtggcttgtgcctgtaatcccagcactttgggaggccgaggtgggtggatcacttgaggtcaggagttcgagaccagcctcgccaacatggtgaaaccccgtctttactaaaaatacaaaaattagctgggcgtggtggtgggtccctgtaatccccaggtagctggctgaggcagggaatcacttgaacctgggaggtggaggttgcagtgagctgagattgtaccactgcactccagcctgggcaacagagactctgtttcaaaaacacaaaaagaaggaaggaaaaaggacagtgagcagggggatgtgggtggctcgaggagactggrggaagaaaagggctttgaattctcagcatgtttacttgacttaaagaagcggctgggcacggtggctcacacctgtaatcccagcaatttgggaggccaaggcgggcagatcacgaggtcaggagatcgagaccatcctggctaacacggtgaaaccccatctctactaaaaaaaaaaaaaatacaaaaaattagccaggcatggtggcggttgcctgtagtcccagctactcgggaggctgaggcaggagaatggtgtgaacccgggaggtggagctggcagtaagccgagatcgtgccac

SEQ ID NO: 926344 - DNA, 773 bp, Homo sapiens
tttctaatgctagtactgcctggatcctgagcaattgtccatgggcagttcattttatagatataagaagcaggaggatgcaagaggaaagtgatttagcaaaagtcatttagcccaaaatttaaaactgccaggcacggtggcttgtgcctgtaatcccagcactttgggaggccgaggtgggtggatcacttgaggtcaggagttcgagaccagcctcgccaacatggtgaaaccccgtctttactaaaaatacaaaaattagctgggcgtggtggtgggtccctgtaatccccaggtagctggctgaggcagggaatcacttgaacctgggaggtggaggttgcagtgagctgagattgtaccactgcactccagcctgggcaacagagactctgtttcaaaaacacaaaaagaaggaaggaaaaaggacagtgagcagggggatgtgggtggctcgaggagactggaggaagaaaagggctttgaattctcagcatgtttacttgacttaaagaagcggctgggcacggtggctcacacctgtaatcccagcaatttgggaggccaaggcgggcagatcacgaggtcaggagatcgagaccatcctggctaacacrgtgaaaccccatctctactaaaaaaaaaaaaaatacaaaaaattagccaggcatggtggcggttgcctgtagtcccagctactcgggaggctgaggcaggagaatggtgtgaacccgggaggtggagctggcagtaagccgagatcgtgccac

SEQ ID NO: 926345 - DNA, 603 bp, Homo sapiens
gccccattaccaactgtttttgtcttagaagtccctctttgattatataaaccaacattatttcttgttctgttatgaatgaacattgctttagtccttcagtaagcccatcacaaattttcaccatgtcatttataggcactttctctgtagtgttaacatcatcttcattgtcactgattatcacgatcaacttgattcaaaaccatttcagctacttcatcattggtcagcgaatgaacaactggagcctcattatccatgataaacattgtttgatattcacttcttccagcttacagacagacagacattgggggtatattttttgcatgtgtgagtagatcagccgttattttttttctcacttgacatacacaatccttcaaagtcactaccttgtttatcatcactgaacatagttgcaggccagagattgtgccaggcatgcacaactttgtctatagycactatgttccaagcataggcaacagcatatatggcatcctgcagactaaaatttttttcttttttttgagatggagtttcgctcttgtcacccaggccagagtgcaatggcgtgatctcagctcactgcaacct

SEQ ID NO: 926346 - DNA, 636 bp, Homo sapiens
gagcccactgggcagtgatgagtgactgaggaaagaagctgattggtttccacagaatggatcattctatccatgtgattattaaaatcctcctctgctgagacatccttttgtgaacaatcaaacgggacacaaatatcttcatgttttttcccccattccgagacatcyatccatataccttttcactcaatttctttgtcaccaattttcttttaatgttactttcaagtccctgatcatccagccaaactttgactacagcccatgaatcagtacacaatcccatgtctggtcatttctcctcccaagcaaagtatacaaccaggttccctgcccaaagttatgcctatacctaacccacaaattcataaagtggggagtgcatagcacactccattatcaaatggaagtggtatgtgtgtgatagggcctgaacagcccctgaaggcacaagtaagtttcattaggaagaggcccaaatgcccatggtacccactcttgctacactgcctcatttctccaaacgctcacctatggcatcatgaggagtttcctacgatcagttgacagagaaagagaagacctggtcatggtttacatacagttttgcagaatatgcaggtaacacccaaa

SEQ ID NO: 926347 - DNA, 720 bp, Homo sapiens
agcactgaccaaagccagattagcctaggtgagtagaaattcatgttgctgagtcaatgctgccaccatggccactttacttatgagcccactgggcagtgatgagtgactgaggaaagaagctgattggtttccacagaatggatcattctatccatgtgattattaaaatcctcctctgctgagacatccttttgtgaacaatcaaacgggacacaaatatcttcatgttttttcccccattccgagacatctatccatataccttttcactcaatttctttgtcaccaattttcttttaatgttactttcaagtccctgatcatccagccaaactttgactacagcccatgaatcagtacacaatcccatgtctggtcatttctcctcccaagcaaagtatacaaccaggttccctgcccaaagttatgcctatacctaacccacaaattcataaagtgggragtgcatagcacactccattatcaaatggaagtggtatgtgtgtgatagggcctgaacagcccctgaaggcacaagtaagtttcattaggaagaggcccaaatgcccatggtacccactcttgctacactgcctcatttctccaaacgctcacctatggcatcatgaggagtttcctacgatcagttgacagagaaagagaagacctggtcatggtttacatacagttttgcagaatatgcaggtaacacccaaa

SEQ ID NO: 926348 - DNA, 632 bp, Homo sapiens
caactttaagacctttttgatgaggccattttaatccttctcttgctctgtcctaattttccacatcaaaactgcctgtctgtggaaaccatgggttatgcataataacctcctgcagaagcttagttagtgtctgcaaattaacctgagttccagactgtctcaacagaacttgaagcaactgcacataatgattttcttcaacagactaattatgccccatgttaccctgattcagaaaacttctcactcccagtacttctttccagcactgaccttatatcattcccagtacctctttagggcactgaacagtacttctttagggcactgtccttatatctgctgttggcagactcctcccgaggtccccgttcatcttgtcagtttcacttcctctgctccaacggaccttcttcattcgcgtccttgaagtccctgttcaggcrccactttgacgcagccccaatccctgttggactgaacaaagggggacgagtgcaggaataaacataaagacaaaagagtatgtttggaagaaggggtcagggggctccttgtttctagtgaacatgggccctgagattttagctccctttgtatttattgagtaaaggagatagggagaaggg

SEQ ID NO: 926349 - DNA, 590 bp, Homo sapiens
acagctcataaaggcggtgcagaccgaaagagtgagcagcagcagatttactgtgaacagtgaaagaacaaagcttccacatagtggaagagtacctgagcaggtctctgttgctggctcgggcagcctgcttttattcccttatctggccccacccacatcctgctgatcggtccattttacagagagctgattggtccattttgacagggtgctgactggtgtgtttacaatccctgagctagacacagagtgctgattggtgtatttacaatcctccagctagacgtaaatttctccaagtccccactagattagctagacacagagcactgattggtgggtatacaaacctttagctagacacagagtgytgattggtgcatttacaatccctgagctagacacagagcactgattggtgtggttacaaacctctagctagacataaaagttctccaagtcaccaccccactcaggagcccagctggcttcacctagtagatcctgtgtgctgagctgcccgccagtcccgcaccgcgcgtccgcactcctcagccttgggcggtccatgggaccaggcggtcgag

SEQ ID NO: 926350 - DNA, 620 bp, Homo sapiens
tgtaatcccagcactttgggaggctaagctggaagaattgcttgagcccaggagttcaagaccaacctgggcaacaaagacggaccccatctttatagaaaatttaaaaaattagccaggcatggtggctcacacctgtagccccagctacttgggaggctgaggtgggaggattgcttgagcccaggaggtcagggctgcagtgagacatgatcatgccattgtactccagcctgggtgacagagcaaaaccttatcatttttggttcgatatgaattttttaaaaagtttttttctggttatgtgaagaatgtcattggtagttttataggaayaacactgaatctgtaaattgctttgggcagtatggccattttaatgatattgattcttccaatccgtgagcatgaaatgtttttccatttgtttgtgtcatctctgatttctttgagcaatgctttgtaattctcattgtagagatctttcacttccctgattagctgtattcctaggtattttattctttttgtggcaattgtgaatggtatcgcattcttgatttggctttggcttggttgttgttggtgtataggaatactagtgatttttgtacattgat

SEQ ID NO: 926351 - DNA, 552 bp, Homo sapiens
accttgagaacctggtgaggttactgaaaataaaaccatgaaagtgtggagacccccctatgcctgagcccccaggaaagtatctcactctcaaactaatacacattcagcctccaacatttcatcaaaactaccgtgtaagtgtacctaccattgctccaggagcttctgctcaggtaagctgattctgcttgttcctctctatgcaccagtctctccagggtggtggtttgcactgtgacctcgattctctgatggatctaagaaaagccactgatttttcagtttagcttttttcttgttttaagtatagaacattgacttccaagtcccttgcatgttaatgctgaaattggaagtckcatctgtaagtaaataagctatttttttttaaagtaagtcactgattactttggaagttgctaggggtatcttctagagtcatcagagagggataaccaccaggagatatttaaaataaaggatttatcatagggttttgaccttactcaaatgtgagagctggttataccatctgtgtgaagctgttgc

SEQ ID NO: 926352 - DNA, 718 bp, Homo sapiens
tgtgatctgagctgtcttcccagcctggtcctcactgggttctcaccacatgatgttcacacctccattaggccacaggcaatcccctctggcagaggacatttgtgatttgattttaggggcactccttccccattatgagtccatgaagttcaggtgaaatggacccctcattttctaccaccacccccaccctcatacaaagtattttagggacagagcatcagacccaggctgagccttcaaagcatctcattcctctgccctagagattgattcagagatggtcacacaaccccagtcagacaaatcagagctaacaagactcacttataagactaatctgagctataaagaaagcagatgcatctagcaagacttctcctggagtggaagagaatgtttctctactaggacataggcttgtcctaacaggcccaaagcacttccttgactcaattacgatcattaggctatttttcctggaactcacccccaaawaggagagaacatctagggcctgtgcagaacaaatctacagggcatagacttatctttccggggactctgctcctgcttcttcaatgccagtcctgggaaaagcttgagacatcaactaactgatggctctaatgttaatcttgcccatgggacaggtaattgcacttttgttcctcagctccttctatactctgctctgctgggactggccgtgcaa

SEQ ID NO: 926353 - DNA, 714 bp, Homo sapiens
caaatacattcaaaagctagcagaaagtaagaaataacaaagatcagagcagaactgaaggagttagagacacaaaaaacccttcaaaaaattaatgaatccaggagcttgttttttgagatgatcaacaaaattgatagacttctagcaagacaaataaagaagaaaagagagaagaatcaaatagacacaataaaaaatgataaaggggatatcgccactgatcccacagaaatacgaactaccatcagagaatgctataaacacctctatacaaataaactagaaaatctagaagaaatggataaattactagacacatacaccctcccaagactaaaccaggaagaagttgaatctctgaatagaacaataacaggctctgaaattgaggcaataagtaataatctaccaaccaaaaaaagaccaggaccagatgattcgcagccaaattctaccacaggtacaaagaggaactggtaccattccttctgaaactattrtaaccaatagaaaaagaaggaatcctccgtaactcattttatgaggccaggattatcctgataccaaagcctggcagagacacaacaaaaaaagagaattttaaaccaatattcctgatgaacatggatgtgaaaatcctcaataaaatactggaaaactgtatccagcagcacatcaaaaagcttatccaccaagatcaggtcggcttca

SEQ ID NO: 926354 - DNA, 604 bp, Homo sapiens
tgactgattgctctagccaggactttcattactacgtgaaatattagtgctaagagcaggcatccttatatggtttcggttgtcaagggaaatgcttccagctttttcccatttagtatgatactggctgtgagtctgtcacagatgattcttattactttgaggcatactccttcagtgcctagtttgttgagggttttaacctgaaggggttttgaattttatttaaagtccttcttgcatctattgaggtgctcatgtgtttttcgtttttagttctgtttatgtgataaatcacatttgttgatttgcatatgttgaaccaaacttgcatcccaaggataacttctacttgatyatggtggattagctttttgatgtgctgctggattccgtttgctagtattttgttgaggattttcacatctatgtgcatcagggatactggcctgaaattttctttttttgttatatctttgccaggttttagtatcaggatgatgctggactaatagaatgagttagggaggagtatctccatctcaatgttttggaatagtttcaggaggaataatactagctcttctttgcttgtctagtataa

SEQ ID NO: 926355 - DNA, 606 bp, Homo sapiens
cctgagaaaatggtttgttttttttctttctcattgtcaggctgcaaattttctgaacttttatgctctgcttcccttataaacctgaatgcctttaacagcacccacgtcacctcttaaatgctttgttgcttagaaatttcttccaccagatacactaaatcatctctgtcaagttcaaagttccacaaatctctagggcagggacaaaatactaccagtctttttgctgacacatagcaggagtcaccttttactccagttcccaacaatttcctcatctccatctgaggccacctcaccctggttttcattgkccatatcattattaggattttggtcaaagccattcaacaagtctctaggaagttccaaactgtccaacatttttctctcttcttctgagccctccaaacttttccaacctctgactgataccctgttccaaagtttcttccacatttttcaggtattttttacagcagcaccccactctaccagtaccaatcttactgtatttatttattttcatgctaccgataaagatacacccaagactgggtaatttataaagaaaaagaggtttaatggatcatagattcactg

SEQ ID NO: 926356 - DNA, 641 bp, Homo sapiens
ctgagaaaatggtttgttttttttctttctcattgtcaggctgcaaattttctgaacttttatgctctgcttcccttataaacctgaatgcctttaacagcacccacgtcacctcttaaatgctttgttgcttagaaatttcttccaccagatacactaaatcatctctgtcaagttcaaagttccacaaatctctagggcagggacaaaatactaccagtctttttgctgacacatagcaggagtcaccttttactccagttcccaacaatttcctcatctccatctgaggccacctcaccctggttttcattgtccatatcattattaggattttggtcaaagccattcaacaagtctctaggaagttccaaactgtccaacatttttctctcttcttctgagccctccaaacttttccaacctctgactgataccctgttccaaagttkcttccacatttttcaggtattttttacagcagcaccccactctaccagtaccaatcttactgtatttatttattttcatgctaccgataaagatacacccaagactgggtaatttataaagaaaaagaggtttaatggatcatagattcactgaaaccatctcagcaaaattctgaccaagacagtgaa

SEQ ID NO: 926357 - DNA, 547 bp, Homo sapiens
aaaaagcaaaaagtgggccaggcacggtggctcacgcctgtaatctcggcactttgggaggctgaggcaggtggatcacaaggtcaagagttcaaaaccagcctggccaacatggtgacactctgtctctactaaaaatacaaaaattagccgggcatggtggcaagggcctgtaatcccagctactcaggaggttgaggcggagaactgcttgaacccgggaggcggaggttgcactgcattgagctatcgcaccactgtactccagcctgggtgacagagtaagactctgtttcgggraaaaaaaaaaaaaaaagcaaaaagtgagaaatttctagaagatgtggaatataaagtctcatactgataatgcaaaagctgatcaatgtcaaacaatgaaaaattcaatgtggacaaaaggagattccaaataatctaactttggtaaaagacagattgccccagcagtgccatagaaaacattcaagcttggagcggcaggagtagtaatgtacaggtcaaaagcagcagagagaagtataacaaa

SEQ ID NO: 926358 - DNA, 780 bp, Homo sapiens
gacctaatggttatcgcccttgttccctgaacatcgctgttatcctgttcttttttcaaggtgcccagatttcatattgtttaaacaatttgtgcagttaacgcaatcatcacagggtcctgaagtgacatacatcctcagcttacaaagatgacgggattaagagattaaagacaggcataggaaatcacaagagtattgactggggaagtgataaatgtccataaactcttcacaatttatgttygggagattgcagtaaagacaggcataagaaattataaaagtattaatttgggggaactaataaatgtccatgaaatcttcacaatttatgttcttctgccatggcttcagccagtccctccattcggggtcactgacttcccgcaacactaaaccaggaagaagtcaataacaagaattattattttacacccagctttacaatttctctcttttgtgctctttgcctttatttctcagactggcagacacttagggaaatagaaaagaacctacgtgaaataatgttgaattatcgggggtgggttcccccgatagtttagttttgggaggttgtatgtgtccaggaatttatccatttcttctagattttctagttcatttgcatagaggtgtttatagtatagaataaatcttgttattgaatagatcaataacaagttctgaaattgaggcagtaattaatagcctaccaaccataaaaagcacaggaccagatggattcacagctgaattctaccagtggtataaaga

SEQ ID NO: 926359 - DNA, 621 bp, Homo sapiens
aaagagtgtggtgggtacaatttgtttctttgaatttgctgagtattttatgtccaattgtatagttgattttagagtatgtgccatgtgcagatgagaagaatgtatgtgctgttgttttggggtggagagttctgtagatgtccattaggtccattcagttaagtgtcaagttcaggtgctgaatatctttgttagttttctgtcttgattatctgtctaatactgtctgtaggacgttgaagtctcccactattattgtgtggtttgccaaatctctttataggtctctaagaacttgctttatgaatctgggtgctcctgtgttgggtgcatatttatttaagatacttaagtctttttgttgagttatttaccattatgtaatgcctttgtttgtttaaagcctgttttgtctgaaattggactaggaactcctgctttttttctgttttctgtttgcttggtagatttttctctacscctttactttgaacctctgggtgtcattgcatgtgaaatgagtctcttgaaaacagtataccagtgggtcttgcttctttttccaagttgccactctgtgccttttaattggggcattcgtccattttcattcaaggt

SEQ ID NO: 926360 - DNA, 590 bp, Homo sapiens
tcagtcggcaggaattgttcctgcctatttacattgtgcctgtcacctggctttagatccctcagatctggttttcctttctagggcctcagcctgaagcttggaatcaagtttgggactcaaggggctgcatgtatctgtttagagtgtctcaaatgagtcctgctaaatttgcagttatcagccagcaggggtcattcctctgctaacttccctagcagaaggagcgtgctggagaggcgaaccctctcactcagaaaagcaacaaataaaaaaatttaaaaaaccagtttaaggggccaaagggggagctcctgsgggaagaatcccttgctcagtgcaggtgggtccctttaatccttgtatccttttcccacttcaggctaggttgaattctttggccaggggagaaaaagttctgttggtatggtgggtggggagtaccagccaattggccctgcagggtccctgtggtagccacagttttctcccaccccttgtggccaccgggcatgggctttgcatgctgtgaacgtgcccaggtgcctgagctagtaggggagagggtaggaagaggaggtgctgtgagc

SEQ ID NO: 926361 - DNA, 737 bp, Homo sapiens
aggctgagaagtgagagagatcagagccctgcctctatggcctctctggccacgtgtctggcactggcttccttcctctaggctacagctcctcccaaaggcccctccttcactgcctcagtttcacttagcatctgcaaaaattatttcatcttcttggcccttcaggctaagctttccttatgacttcscacggtggttagtcttgggtgtctcatcctcccttgctagttttcttaacctacccatgcctttagaaatagtaactaaaaaaaatctctggttctcctcaaggatctagaaccagaaataccatttgacccagcaatcccattactgggtatgtacccaaaggattataaatccttctagtataaagacatatgcacatgtatgttcattgcagcactattcacaataggaaagacttggaaacaacccaaatgcccatcaatgatagactggacaaaggaaatgtgtcacatatacttcacggaatactatgcagccataaaaaaggatgagttcatgtcctttgcagggacatggatgaaactagaaaccatcattctcagcaaatgaaaacaggaacagaaaaccaaacacctcatattctcactcataagtgggggttgaacagtgagaacacgtggacacagggaggggaacatcacacaccggggcctgtccgggggttggggggttaggggagggatagcattaggagaaatacctaa

SEQ ID NO: 926362 - DNA, 552 bp, Homo sapiens
ataccacagtggaggtctcattaccactggctgacgctaactccactgggtctcttctcacaccaccccagtggggagagggaggagcatctcattgctcctgggtggggttggaagtccaggctccccatgtggtccccgcggacaccatggtggggagggcttattaccaaccggtgaggatgagaatcccagctccctacttagccccacagatgccatcttgcaggggtattgggataacctattacggtcttgtgaaagtggaagtctaggctccccacttggctttctctggcatgggagatggtgagaccacagaatgtcctgtggtatttggctggagtagtatggtcattgtctaaaagttttctgtcttgccagattgccctttcctggtcctttagtcagagasagtaggctttcggaaaggatttgtgagtatgtcagagcctataggtgtttccaggttgctaatttcttcaactccaagtctggggtacttgaggcaaaaagaaaacccaaggaattcaccatcgtgtttttcctcgg

SEQ ID NO: 926363 - DNA, 592 bp, Homo sapiens
tctgtggccagtggtgccttggcccgagttttgctcgggctgctggtcttattattccacccattcagcctggcagcctgtgctccgctcacactactggcccagatccatgactgccaagggcaagccaggcacagagtggacagggttaagtgagtgagtccagggtcyggccatggtgcacaaccaggcatgccggctgtggtggggcgggaagctccaggcgccagtacagatgccatcttcgtgcgaagctttggctggaccaggtgtaccataagcagattccaccacaggcaccaggaacatggtggcactcagaagcttggagattccaggaaccacagagcaccaaagaaagtgacagccctgggtcagggtcgccctaggtctgggctctccaaaaggccgcagctcttctctcctcttgttgcctgcaaggtggtgagtcagggagcagtgggggtggggaagggtatgtgtttcagccttgtttgtgttacagttctttcagccccaccatcgggcagatcctgagttcttgtccagcatccagaaagaatgaggtatgcagacaactgaagggtgagca

SEQ ID NO: 926364 - DNA, 622 bp, Homo sapiens
cccctcaagcatttatcctttaaatgtggacattttattgtatgtctattctacctcaataagcctattaaacacgaattccaaatgtatcaaaaacctactaaatgtaaactaaagaagaaaatttaaagcaaaaaaattaaaaggagaattacatattatggaagtaagtttagagtatgatgtgactacataaaggtggcatgcatccatgcttgtaaggtcatggaaacctttttttgccagactgaagatgggcattcctggctgagaaagcaaaatactctcatatagcagagmctgcagttgaattaatacagcaaagctagccaaaatataacaaacaaatgtcagcaatcaaactgtaagtatcattctccccatcatgctcctctgaccttatgaaccccgatttctaggacacatagtggtcattgagacaaaagtataaccttggatgatttgatgaaacacagctatgctcagtagaaaagactgtgtgtacatggggtgtttagacaaaaatgctactggaaaaacctatttcaccccactatcacctttgctttcacactatttttatatcagaactttttgaaggggaggaatataaaataacctg

SEQ ID NO: 926365 - DNA, 649 bp, Homo sapiens
tcaggcccacagaaggcaagtgttggtaccagccatgacaggcagggcaggttgatcctgaggttcccaaatgatgtgtggcaggcactggtgctggcaacacggggggcgggcctgtcctcaaactcctcaatgatgcacacaagtccccagtgctattgatggtgtcagtggcagggtggacctgtcctcaggccctcagatggcatgaatgactgccaataatggcaggcagagtgagttgattaccaggctcctggatagcatgctcaggcagcagtaggggtgggttgaacaggactgttgtcaggccccttgatagtgtatgtgggtgtcagtggctatgggtggagcaagtcagtccccaggcccctaggcagtgcagcaatagaataccaccagtggtgctgataagtgggatgggcctgtcatcaggtcccctgatggtgtgcatgggctggcagaggcaggcctggttggctgatatctgggcccctggatagtgtgcycgggtgccaacagtgatggcagtgggtggggtaggctgctcctcaggcccctgggtggtatgcacaggtgccagtagtggctagtgggtggacttatcatctggccccaggatggtgctcaggtgggccagtccccaggc

SEQ ID NO: 926366 - DNA, 649 bp, Homo sapiens
tcaggcccacagaaggcaagtgttggtaccagccatgacaggcagggcaggttgatcctgaggttcccaaatgatgtgtggcaggcactggtgctggcaacacggggggcgggcctgtcctcaaactcctcaatgatgcacacaagtccccagtgctattgatggtgtcagtggcagggtggacctgtcctcaggccctcagatggcatgaatgactgccaataatggcaggcagagtgagttgattaccaggctcctggatagcatgctcaggcagcagtaggggtgggttgaacaggactgttgtcaggccccttgatagtgtatgtgggtgtcagtggctatgggtggagcaagtcagtccccaggcccctaggcagtgcagcaatagaataccaccagtggtgctgataagtgggatgggcctgtcatcaggtcccctgatggtgtgcatgggctggcagaggcaggcctggttggctgatatctgggcccctggatagtgtgctckggtgccaacagtgatggcagtgggtggggtaggctgctcctcaggcccctgggtggtatgcacaggtgccagtagtggctagtgggtggacttatcatctggccccaggatggtgctcaggtgggccagtccccaggc

SEQ ID NO: 926367 - DNA, 564 bp, Homo sapiens
gccgggctggtctcgaactcctgacctcaggcaatcggcccacctcagcctcccaaagtgctgggattacaggtgtgagccacggcactcagccttttataagcatatagactgttgcttcctgcttctttgcatgcctagtaattctttactaaatgccagacattgtcaattttacctcatttggttttgagtattctggagacatttgtgtgtacatttaaattttgagctttgttctgraacacagttaaattacttagaagtggtctgacccttttgaggattgcttttaattattgtagggcaggaccaaagcagcctttagtctaggactaatacggctccactattgaaacaataccttctgagtattctacctgatgacttgagtattacaagagttttccactctggcaattattctcagcactgcttgatctttagagattgttctgcccacttcaatctgctatgatttccctcccatttcaagtagttttatcacacctgtgtgctaatcagtgcctcagctgaaggcccaagtggggctttctcaagtgg

SEQ ID NO: 926368 - DNA, 564 bp, Homo sapiens
gccgggctggtctcgaactcctgacctcaggcaatcggcccacctcagcctcccaaagtgctgggattacaggtgtgagccacggcactcagccttttataagcatatagactgttgcttcctgcttctttgcatgcctagtaattctttactaaatgccagacattgtcaattttacctcatttggttttgagtattctggagacatttgtgtgtacatttaaattttgagctttgttctgaaacacagttaaattacttagaagtggtctgacccttttgaggattgcttttaattattgtagggcaggaccaaagcagcctttagtctaggactaatacggctccactattgaaacaataccttctgagtattctacctgatgacttgagtattayaagagttttccactctggcaattattctcagcactgcttgatctttagagattgttctgcccacttcaatctgctatgatttccctcccatttcaagtagttttatcacacctgtgtgctaatcagtgcctcagctgaaggcccaagtggggctttctcaagtgg

SEQ ID NO: 926369 - DNA, 587 bp, Homo sapiens
cttttctgtgagaccatctttatctgtaaaatggagacaatgatagcaaccacatgagactattttgagaattaaatgagttaatatatgcaaggtgtttaggacagttattggtacttaataaataagagttgacccttgcacaatgccggggttaggggcaccaaccccacacacagtcaaaaatccaggtataactttcgactccccaaaacttaactactaatagccacctgtagaccagaagccttatcaattacataatcagtaaattaacacagattttgtacrttatttgtattatataccatatttttacagtaaagtaagctagtgaaaagaaaatgtcataaagaaaatcataaggaagagaaaacatatttactatgttggaagtgaatcataaaggtgagtcataaaggtcttcatccttgtgatcgtcaggttgagtagactgaggaggagaagccgggggttggtcttgctgtctcaggggtggcagaggcagaagaggtggaggacgtggaagggaaggcaggagaggcaggcacactcggggtaacttttattttcaaaaaccctcatat

SEQ ID NO: 926370 - DNA, 568 bp, Homo sapiens
gctctggcctgggtgcagtggctcatgcctgtaatcccagcactttggtaggctgagaagggtagatcatttgaggtcaggagttcgagaccagcaaggccactatggtgaaaccctgtctctacttaaaaaaaatacaaaaattagccaggtgtggtggtacacacctgtagcctcagctactgtggaggctgaggcaggataatcgcttgaacatgggaggctaggtgacagagtgagactccatctcaaaatttaaaaaaagataaattattagctctggatggytcatacatcgtccctggcagatgtaagttccctttactaaatgaattagagtggtgtggcaggtgggcaggaagaaactaccttaaagacagtcgcatctgaataagggaccctccaatcatgaaagttcactgagggtctcatcttgttgaaaaagataatttgtggaccagaagcttttcagtaagttgctgagatagggggatcatctgctatggtaattgcctttttttctctcatagtaaaggtaactgcactctgaggaggtgaggacatgcat

SEQ ID NO: 926371 - DNA, 644 bp, Homo sapiens
gaggctggggaactccctcccctagccaagggaagctgtgagggactgtgccaagaactaggcactcggcccagatactgctcttttcccatggtctttgcaacctgcagaccaggacattcccttgggtgcctataccaccagggaccggggtttcaagcasaaagctgggcagacgtttgggcagacaccgagcaagctgcaggaattttttttcataccccagtggtgcctggaaaaccagcaagacaaaactgttcactctcctggaaagggggctgaagcagggagccaagtggtctagctcagcagatcccacccccatggagcccagcaagctaagatccctggcttgaaattcttgctgccagcacagcagtctgaagtcgacctgggaggactcagcttggtagggggaagggcatcaccattacaagggctgagtaacgcattttcccctcacagtgtaaacaaagccacccggaagttcaaacagggcagagcagccacaccttggcaaagcgctgtagccagactgcctgtctagattcatcctccctgggcagggcatctctgaaagaaaggcagcagcccagacagggcgttatacctaaaactcccgtttccctgggacagagcacctg

SEQ ID NO: 926372 - DNA, 594 bp, Homo sapiens
ccaggctgctctcaaactcctggactcaagtgatcctcttgcctccgcctcacaaagatttgggattacaggcatgagccactgcacctggcctaacctggacactttatttatttatttttattatttttatttttttgtcacagycttgcttctttttctttctttcttttttgagacagagtctcactctgttgcccaggctggagtgcagcggcctgatctcagctcactgcaacctctgcctcccaggttcaagcgattctcatgcctcagcctcctgagtagctggaattacaggcgtatgccaccacgccaggctaacttttttttgtatgtgtatttttagtagagatggagtttcaccatgttgaccaagctggcctcgaactcctggcttcaagtgatctccctgctttggcctcccaatgtgctgagattacaggcgtgagccactgtgctcagccctgatatagtctttgattataaaaaagaacaaagtactgacacatgctacaatatgagtgaatcctgcaaacactacccggaggggaagaagccacacacagaatatcacataggattctattgata

SEQ ID NO: 926373 - DNA, 778 bp, Homo sapiens
gatcaactcttcccctgacagcagtgagaacctgtcggagatccccttgtcccacaaaggtatgtgtgccctctgctgcccggccacctcacctggccttgtctaaactgttcagatcacccagctcaaagccctttcctgccctctgcactgccaagtgcaacacaagcattgggtgctacacattctgtagaggcaccattgcccctgaggattagtcagtcaaggacacttaagagtcttctctaagtcaaggacatttagagagatgggggcagaatcggaaattagaaaagagacatgtggcatggagacttatgtcccccctcccccgccgcctccgctcagtaatcactgtaatagcaaatatcgattcaatgtctgccccctggataatgtaggttgagcccatttcctcaattaatcctggaaataaccgatggcattagttttaccatcccccatttgcagatgaaagtgaggctcggaaatgggcccaagtttcttacatagcaaacccctggaagtgctaggattgaaacccaggaggtctggctcctacccacgtctgccatgtcagaggagggtgttgagaggtggccttgatctcgggttgkatgttccccgtgtcccgctgcagagaggaaggagatcctgactggcaccaagtgcatctgggtgaaggccgcccgcgctacgcgggccctgggaaccgaggggcgacacctgctggcacccgcgacagagcgcagcagcctgtccctgcactcactgagcg

SEQ ID NO: 926374 - DNA, 553 bp, Homo sapiens
ccaccatgccaggctaatttttgtatttttagtagagatggggatttgccatgttggccaggctggtctcagactcctgacctcaagtgatctgcctgccttggcctcccaaagtgctgggattacaggctgagccaccgcacccagcccttttgcctcttcccaaccataacttctagctgcttcagtgttccgaacttatgaaaggcaggaacacgtagtcagcaaatagttactgagctccttctttgtgccaggcactggactaggcccttgggatacagcaatgaatcagacaggaggagtcccataccttgtgatgctgacattctaggctctctcctccataggcttaaagtytagtcgtagaacagaggcaaatacacaacaatgtctgaagaagtcctgaaatgggacaatataatagggaattctgaacctcccctctagtggttcaaggctccaaggtgaaagatttgacgctgttggctgtgagatttggagattctgtgggcttgcatgaccccagctcctggttgccaggggtaaccca

SEQ ID NO: 926375 - DNA, 762 bp, Homo sapiens
tgagtttcattgtacaggacgaattgcttctcttttgctgctttcaagagtctgtgttggtctttatcttttaacagtttgattatgatgtgtctaggtgtggatctctttgtgattatcctacttggaatttgttgagcttcttggatgtgtaaattaatgttttgcattaaatttgggaagttttcagctattatttctctctatattttttctgcctttcctctactctccttttgggactcccattatgtgtgtattgacatgcttcatggcgtattatggctttctgaggctctgtcatttttcttcattcttttccattccgactagataatttcacttgagctatcttcaggtttactgattctttcttctggctgctcaaagctgctgctgagctcttctagtgagttttaaattttttgaattttttaatttttaagtctctctctgttgcccaagctggagtgcagtgacacgatctcagctcactgcaacctccacttccyggattcaagcgattctcctgcctcagcctcctgagtagctgggactacaggcgtgcgctaccatgcctggctaatttttttttgtacttttagtagagacggggtttcactatgttgcccaggcttgtctcgaactcctgacctcgtgatccacccaccttggcctccaaagtgctgggattacaggtgtgagccaccacgcctggcctctagtgagttttttattctggttattgtactttttgaactc

SEQ ID NO: 926376 - DNA, 872 bp, Homo sapiens
tttcttcattcttttccattccgactagataatttcacttgagctatcttcaggtttactgattctttcttctggctgctcaaagctgctgctgagctcttctagtgagttttaaattttttgaattttttaatttttaagtctctctctgttgcccaagctggagtgcagtgacacgatctcagctcactgcaacctccacttcccggattcaagcgattctcctgcctcagcctcctgagtagctgggactacaggcgtgcrctaccatgcctggctaatttttttttgtacttttagtagagacggggtttcactatgttgcccaggcttgtctcgaactcctgacctcgtgatccacccaccttggcctccaaagtgctgggattacaggtgtgagccaccacgcctggcctctagtgagttttttattctggttattgtactttttgaactccagaatatctgtttagttctttttaaaaaaataacttctggctgctttcaattgtttttcttcatctttaattttcagaagtgtaataatcatgcatcttagaatggatttccttgagtttatcttgttaggggtttgcttctgaatctgtaggtgagtgtctcttgccaaattgatggagttttctctcattatttctttaagcactctttcagccctgctttctttttcttcttctttttcctcttgctcttctccttctgatgacacagatgttatatattttgttatagtcccataagcccccgaagctgcatttttttcaagtctgttttctccctgttattcagaatgggcaatttctgttgttttgttttccagttcactgctgcttttctctgcccctctattcagc

SEQ ID NO: 926377 - DNA, 830 bp, Homo sapiens
ctagataatttcacttgagctatcttcaggtttactgattctttcttctggctgctcaaagctgctgctgagctcttctagtgagttttaaattttttgaattttttaatttttaagtctctctctgttgcccaagctggagtgcagtgacacgatctcagctcactgcaacctccacttcccggattcaagcgattctcctgcctcagcctcctgagtagctgggactacaggcgtgcgctaccatgcctggctaatttttttttgtacttttagtagagacggggtttcactatgttgcccaggcttgtctcgaactcctgacctcgtgatccacccaccttggcctccaaagtgctgggattacaggtgtgagccaccacgcctggcctctagtgagttttttattctggttattgtactttttgaactccagaatatctgtttagttctttttaaaaaaataacttctggctgctttcaattktttttcttcatctttaattttcagaagtgtaataatcatgcatcttagaatggatttccttgagtttatcttgttaggggtttgcttctgaatctgtaggtgagtgtctcttgccaaattgatggagttttctctcattatttctttaagcactctttcagccctgctttctttttcttcttctttttcctcttgctcttctccttctgatgacacagatgttatatattttgttatagtcccataagcccccgaagctgcatttttttcaagtctgttttctccctgttattcagaatgggcaatttctgttgttttgttttccagttcactgctgcttttc

SEQ ID NO: 926378 - DNA, 500 bp, Homo sapiens
actctcatgtttgagttccttatgtatgttagatattaactccttatcagatatagtttgaaaatactttctaccttttgttgtctgtgttggcaattttcaagaatacaatacattgttattaactatagtcaycacattgtacaatcgggtctcttgaatttattccttctgtctaactgaaattttgtatcctttgaccaacatctctctaatcccattctactctctacatctatgagttcagctttgtctattatacacacaagtgagatcgtgtagtgtttgcctttctcttcctggcttatttcaatcctgcagttccatccatgttgtcacaaatgataagattttcttctttataaaggctgtatagttcttcatcatgtagatgcaccacattttaaaaaatcctttcatccattggtggacactgagattatttccatatcttggtttggaacaggaattaaaggaaattaaagaatgtgtaagcagaa

SEQ ID NO: 926379 - DNA, 557 bp, Homo sapiens
gatgttctttcccttctacttccagtttgctgctgacagtttttaccattgggtggatgttgaaattgtcaatgcctgttctgtgtcaactaatatgatcaagtggttttgcttctttgatctgttaatatgatggcttttactgatcgatttctagatatcaaattggccttgtgttcctgaaattaaccccagttggtcataatgtattaatttttttaatacattgctgtacttgatatgctattttcttgtgtatttttgtgcctgtgtttatgggggatagtcgagtatagttctctttaatcatctttctttaagtttgatatcagacataaaawgaattgggaagtgtttccttttccacttactggaaaataaatatagattttctgttctttttgattttttattttgtgtgtgtgtgtgtgtgtgtttggttgtttgtttgttgagacagggactcactctgtcatcaaggctggagtgtagtgtcatgatcttggctcaccgcaacctccacctcctgggctcaagtgagcctttcacctcagctt

SEQ ID NO: 926380 - DNA, 619 bp, Homo sapiens
attcagcaaagtcgcaggatacaaatcaacatgccaaaattagttgtatttcatatactagcaatgaacaatatgaaaaagaaatcaagaaaacaatttcatttacaatagcatcaaacaagaataaaataggaataaatttaaccaaggaagtgaaacccaagaaatgcagttttgtacaccaaaaactacaaaacattgctggaagaaattaaagacaatctaaataaatagaaacacattccttgttcayggactggaagacttaacattatcaaaatgaccatattgccaaaagatatttacatactaagtgcattccttagcaaaatcccagtggtatgttttgcagaaataggaaaatccatcctaaaattcatatggaatctcaaggggcccagaattgccaaaacaatcttgaaaaagaacaacaaagttcagactcacacttcctgatttcaaaatttactacaaagctagagtaatcaaaatggtgtgattattgacattaggacagatacatacagtagcaacagaataaaatagagagctcagaagtaaaccttcacatttgatttttggcaaggccacaagaacatttaacagggaaaggacagtc

SEQ ID NO: 926381 - DNA, 728 bp, Homo sapiens
ggggcccatgagcaatgaatggcttcaaatcattcataaaaacaaataaaaaacaaagagaaatgcatgcagagaccgcacgtgtctacaaagcctacatttacccaccaaccctttacagacaatgtcgcctcccttgacacagagaacagaaatgaggaaagcaaaccaatgaagtgtaaatgaacagattaaaaagattagaacaaataataaatatgacacttagggactaaatatgttcatcaataaagtcatgctaaaaaaatacatgaaactaaacaaatactaaaagaaataattcaagagaaataaaatgcgtgtctacaaattaaaggatacaccttgtccaggaaaaataataacctagaaaagtccatcttaagatagataaaatcaatgctatgcaaattcaaagataagaagcctctaaacagagaagttaaagcaaagaaaaacaaagcaaaacctcagacttccatagcaacagtggggcagagtgaagaaatacctgcagaatttctaaaaaatataacccagacagtttctgtccagcaaactgtccatagcaacagyggggcagagtgaagaaacacctgcagaatttctaaaaaatacaactcagacagtttctgtccagcaaactgtccatagcaacagcgaggcagagtgaagaaacacctgcagaatttctaaaaaatataacccagacagtttctatccagcaa

SEQ ID NO: 926382 - DNA, 728 bp, Homo sapiens
ggggcccatgagcaatgaatggcttcaaatcattcataaaaacaaataaaaaacaaagagaaatgcatgcagagaccgcacgtgtctacaaagcctacatttacccaccaaccctttacagacaatgtcgcctcccttgacacagagaacagaaatgaggaaagcaaaccaatgaagtgtaaatgaacagattaaaaagattagaacaaataataaatatgacacttagggactaaatatgttcatcaataaagtcatgctaaaaaaatacatgaaactaaacaaatactaaaagaaataattcaagagaaataaaatgcgtgtctacaaattaaaggatacaccttgtccaggaaaaataataacctagaaaagtccatcttaagatagataaaatcaatgctatgcaaattcaaagataagaagcctctaaacagagaagttaaagcaaagaaaaacaaagcaaaacctcagacttccatagcaacagtggggcagagtgaagaaatacctgcagaatttctaaaaaatataacccagacagtttctgtccagcaaactgtccatagcaacagtgrggcagagtgaagaaacacctgcagaatttctaaaaaatacaactcagacagtttctgtccagcaaactgtccatagcaacagcgaggcagagtgaagaaacacctgcagaatttctaaaaaatataacccagacagtttctatccagcaa

SEQ ID NO: 926383 - DNA, 595 bp, Homo sapiens
gacaccaatgagaacaaagagacaatgtactagaatctctgggacatagctaaagcagagctaagaaggaaatttatagcactaaatgcccacatcaaaaagctagaaagatctcaaattgacacccaacattacaactaaatgttgtagagraccaagagcaaacaaaccccaaagctagcagaagacaagcaataaccaagatcagagtggaactgaaggagacacagacacaaaaaaccctttaaaaaaatcaataaatccaagagctgctttttttgaaaacattaatcaaatacatagactgctaactagaccaataaagaagaaaagagagaagaatcaaacaggcacaataaaaaatgataaagggatatcaccactgaccctacagaaatacaaacaaccatcagagagtactataaacacctctatgcaaataaactagaaaatctataagaaataaatacattcctggacacatacttcctcccaagactgaaccaggaagaagttgaatccctgaatagaccaatatcaagttctgaaattgaggcagtaataaatagcctaccaaccaaaagaagcccaggac

SEQ ID NO: 926384 - DNA, 601 bp, Homo sapiens
gacaccaatgagaacaaagagacaatgtactagaatctctgggacatagctaaagcagagctaagaaggaaatttatagcactaaatgcccacatcaaaaagctagaaagatctcaaattgacacccaacattacaactaaatgttgtagagaaccaagagcaaacaaaccccaaagctagcagaagacaagcaataaccaagatcagagtggaactgaaggagacacagacacaaaaaaccctttaaaaaaatcaataaatccaagagctgctttttttgaaaacattaatcaaatacatagactgctaactagaccaataaagaagaaaagagagaagaatcaaacaggcacaataaaaaatgataaagggatatcaccactgaccctacagaaatacaaacaaccatcagrgagtactataaacacctctatgcaaataaactagaaaatctataagaaataaatacattcctggacacatacttcctcccaagactgaaccaggaagaagttgaatccctgaatagaccaatatcaagttctgaaattgaggcagtaataaatagcctaccaaccaaaagaagcccaggaccagatg

SEQ ID NO: 926385 - DNA, 611 bp, Homo sapiens
agaaattggccaaaacaaaggggctacaggctccatgcaagtctgaaatccagtggacaatcaaatcgaaaagctccaaaatcatctcctttgacttcatgtctcacatccaggtcaagctcatgcaaaacataggttcccataatcttgggcaggtctgcccctgtgactttgcagggtatatagcccctctcctggctgttttcatgggctggcattgagtatctgctgcttttccaggtgcatggtgcaagctgtcagtagatctaccattctggggtctggaggatggtggccctcttctcacagctccactaggtggtgtcccagtagggactctgtgtggaggctcccacccacattttccttctgcactattctagcagaggttcccctggagggccccactcytacagcaaacttctgcctgggcatccaggcatttctatacattttttttttttggagacagagtctcactccgtcacccaggctgcagtgcagtggtttgatcttggctcactgcaacctctgctttcaaggtttaagcaattcttgtgcctcagcctcccaagtagctgggattacaggcgtgtgccaccacgcttggc

SEQ ID NO: 926386 - DNA, 611 bp, Homo sapiens
agaaattggccaaaacaaaggggctacaggctccatgcaagtctgaaatccagtggacaatcaaatcgaaaagctccaaaatcatctcctttgacttcatgtctcacatccaggtcaagctcatgcaaaacataggttcccataatcttgggcaggtctgcccctgtgactttgcagggtatatagcccctctcctggctgttttcatgggctggcattgagtatctgctgcttttccaggtgcatggtgcaagctgtcagtagatctaccattctggggtctggaggatggtggccctcttctcacagctccactaggtggtgtcccagtagggactctgtgtggaggctcccacccacattttccttctgcactattctagcagaggttcccctggagggccccactcttacagcaaacttctgcctgggcatccaggcatttctatacattttttttttttggagacagagtctcactcygtcacccaggctgcagtgcagtggtttgatcttggctcactgcaacctctgctttcaaggtttaagcaattcttgtgcctcagcctcccaagtagctgggattacaggcgtgtgccaccacgcttggc

SEQ ID NO: 926387 - DNA, 773 bp, Homo sapiens
aggctcccacccacattttccttctgcactattctagcagaggttcccctggagggccccactcttacagcaaacttctgcctgggcatccaggcatttctatacattttttttttttggagacagagtctcactccgtcacccaggctgcagtgcagtggtttgatcttggctcactgcaacctctgctttcaaggtttaagcaattcttgtgcctcagcctcccaagtagctgggattacaggcgtgtgccaccacgcttggctaatttgtgtgtatttttagcagagacagggtttcaccatgttggccagggtggtctcaaactcctgacctcaggtgatctgcccgcctcagcctcccatagtgctgagattacaggcgtgagccaccatgcccagacagactgtttctatacatcttctgtattctaggcggaggttcccaagcctcaattcttgacttctgtgcacttgcaggctgaacactatgtagaagctgccaaggcttggggcttccaccctctgaaacaacagcctgagctctaccttgctcccttttagccatggctggagtggttggaatgcagggtaccaagtccytaggctgcacagagcacgggagccctgggtttggcccatgaaaccatcttttcctcctaggcctccaggcctatgatgggaggggctgccgagaagacatctgacgtgccctggagacattttccccattgtcttggggattaacattcagctccttgttaattatgcaaa

SEQ ID NO: 926388 - DNA, 660 bp, Homo sapiens
tattcatgtttttacattaaaggcaataaacttttgttgcaggaagtcagggaccccgaatggagggacctgctgaagccatggcagaagaacataaattgtgaagttttcatggacatttgttagttccccaattaatatttttataatttcttacactagtctttactgcaatttctgaacataaattgtgaagatttcatggacatttatcacttccccaatcaakactcttataatttcctatgcctgtctttacttaaatctcttaatcccatcatctttgtaaactgaggatgtatgtcacctcaggaccctatgatgattgcattatctgtacaaattctttgtaaaacatgtgtgtttgaacaatatgaaatctgggcaccctgaaaaagaacaggataacagtgatgttcacggaacaagggagataaccataaggtctgactgcctgcagggccaggcagaacagagtcatatttctcttcttgcagaaagcgaataggagaaatatcactgaattcttttctcagcaaggaataatcctgggaaaggaatgcattcccagggggaggtctctaaaatggccgctctgggaatgtctgtcttatgagttgaagatagggatgaaatacaccctggtctcctgcagcaccc

SEQ ID NO: 926389 - DNA, 635 bp, Homo sapiens
gagtatggcttttaatggaaattttaagcaagtgaggtaaaaatgctgaaggattacttcaaataattgtaacaggagatgaaacatgtctttaccagtatgatcctatggacaaaacacaatcgtctttaccagtatgatcctacggacaaaacaaaatcaaagcaatggctaccagaggtgaaagtagtctagtcaaagtaaaagcagactggtcgaaagcaaaggtcatggcaacaatttgggrgatgctcaaagttgttttccttgctgactttctggagaaccaagaaacaataacatttcctatggatgagaatattttaagaaagttaaccaaagcattagcaaaagacactttggaaagcttcaccagagtccttcttcaccgtgacaatgcccctgctcattcctctcatcaaataagggaaattttgtaaaagtatctttgagaaatcattagacatccactatgtagccttgatttggctccttttgacttcttttagttttccgaccttgaaaaagtattcaaatggcattgattttttttttattagtaatgtaacaaaaactgcattgacatagttaaatttccaggaacctcagttctttagggatagactaaatggctg

SEQ ID NO: 926390 - DNA, 589 bp, Homo sapiens
tcaaataagggaaattttgtaaaagtatctttgagaaatcattagacatccactatgtagccttgatttggctccttttgacttcttttagttttccgaccttgaaaaagtattcaaatggcattgattttttttttattagtaatgtaacaaaaactgcattgacatagttaaatttccaggaacctcagttctttagggatagactaaatggctggtatgattgcttacaaaagtgactagaagctgatgaaaattattttaagaaatccaggaactgtttcttttaataagattaacaaaatagatggaccactagctagatgaaaaaagaataagagaaaaaagaataagagatagaagaatcaaatagacacaataaaaatgataaagaggatatcaccactgaccccacagaaatacaaattactatcagaaaatactatgaacacgtctccgcarataaactagaaaatctagaagaaattaataaatttctggatacatacaccctcccataactaaaccagaaggaagtcaagtccctgaatacaccaataacaagttctgaaactgaggcagtaattaa

SEQ ID NO: 926391 - DNA, 770 bp, Homo sapiens
cgtcgacttccccacttttgaggtttggggactcagactggcttccttgctcctcagcttgcagatggtctattgtgggacttcaccttgtgatcatgtgagtcaatactccttaatgaactcatatatatatatatatatatatatatatatatatattcttatctaatatgtatatatcttattagttctgttcctttagagagccatgactaatacaaatagtaacatggaaacacttactttcctaactggataaattatctatttttaagcaatrataactaaaatagcatggatttggttcagagaaaaacaaaaataacaaaatagattaaaatataagatacaaaccaacgcatatatgtgcacaatatatgataatggtgacactgcaacccagtgagggaattacatttgtaaataaataataatgataaaaatttgttctccttataaaataacatgaaattcgactattgctttacatcataaacagcagcataaaagatacggtttgcctgcttccccacccaaatctcaccttgaattgtagctcccacagttcagttcccacatatcgtgggagggatccagtgggagataatcgaatcatgggggtgggtcattccatgctattcttgtgatagtgaataagtttcacgagatctgatggttttataaatgggagattgcctgcacaagttctcttgcctgcgccaggtaagacatgattttgctcctcattcacattccaccatgattaggag

SEQ ID NO: 926392 - DNA, 726 bp, Homo sapiens
tctatgttgctgcaaaggacataatttcattcctttttatgacgacatagtattccatatcatttctaccaacttctatgaacaaagcacattgtcaggcttgcctagattcaaggagtggagaagtagaccccaccacttaatgggagctctgtggtagctgtcatctaaaatggacccaaattatgtttattttctggaatgtgtacttctctgyagtcacctcccacactgaaccagggctagcctgactgaccaaagaatatagtagacgtgatgatgtgtgacttccaagggtagaatgtaacaggcattgcaccttccaccttgttctcttggatcactctttatggggagtcaggcaccattccatgaggacattcaagcaggctatgtaaacccacatgaagataaactgaagcttctactagaagccagcaccaacatgccagccataggagtgagccatcttgcaagagggtcctccagccccagtcatgtcttcaaatgactgcatcctcagccagcatctggctacaacctcatgagagtccccaagccagaaccacttagtaaagccactccctaactcctgatccacagaacactgtgagagatagtaaacgattagtgttattttaagccactgagttttagagtgatttgttatgcaaccttagataataaatacaagctgcaaataatctgtggcatagacagataaag

SEQ ID NO: 926393 - DNA, 618 bp, Homo sapiens
ttcagtaaaaatgcatggttgagatttgcctccgtccctgggcaaggtatgaggagggctttgaggacacaaggagcactgactaagctcccaggtgtggcagaactagtgcctgactttttgtcaaaatttgctgaggtagggggatcttctccctccccgggcaaagccctagcatagggtctgaagctggtcatctgcrgattaaaccaagtagcacttcctaattcttctaggagctactaactatgcttggtagatgtgctatgctgttagctgatgccactgatcaagcacctctgctggcaggtacattgagctatcacaaaaatctgtgctctcatctctgtgggctctgccttcttgctttgtttctacctgatctcaggtgtcactgagaggtgtgcagtttacccctacatttcccattctctgtgaggtgacaataaatgggtttcctgggaagtgttttgcaacgctagggaagctggatgtctgcttccccagactggggggtgtcttttcccactgtagaaatcatgggccctagggaatcctctctgttggtgctgtgcctacttgggggaagacgaggggcaatgcagtcaaagcaataat

SEQ ID NO: 926394 - DNA, 611 bp, Homo sapiens
gttgcccagactggagtgcggtggcacgatcttgccccactgcaacctctgcctcccaggttcaagcgattctcctgcctcaacctcccaggtagctgggattacagatgctgaccaccacgcatgggtaattttagatcaaactgtttaaaaaggggccacggcaggccgggcgctgtggctcatgcctctaataccaatactttgggaggccgaggcgggcggatcacctgaggtcaggagttcaataccagtctgggcaacatggtgaaaccctgtctctactaaaaatacaaaaattagccaggtgtggtggtgcatgcctgtaatcccagctactcgggaggctgaggcacaagaatcccctgaacttgggaggcggaggttgcagtgagcygagatcacgccaatgcactccagcctgggcgacagagcaaaacaaaactctgtctcaaaaaacaaaaacaaaaacaaacaaacaaaggcgaggggaccatggcagcaggcaaatccataccaacccatcacacagacggggaaaactgaggcctgctttctcactcttggaataggaaagctgggaggccgtggcagaactcctgatgcacata

SEQ ID NO: 926395 - DNA, 619 bp, Homo sapiens
catcaaatctcatcagactcagtcattatcatgagaacagcattggggaaaccacccccatgatccaattacctctaccttgtcctgcccttgactcatggggattatggggattacatcaaggtgagatttgggtggggacacagccaaaccatataattctgcccctctcaaatctcttgtcttcacatttcaaaacacaatcatgcccttccaacagtcccccaaagtcttaacttgttctagcattaacccaaaagtccaagtccaaagtcttatctgagacaaggcaagtcccttccgcctgtgagcctgcaaagtcaaaaacaagttagttacttcctagatacaatgggagtacaggcattgggtaaatatacccattccaaatgggagaaattggccaaaacaaaggggttacaggccccatgcaartctgaaatccaaaagcatagtcattataccttaaagttccaaaatgatctcctttgattccgtgtctcacatccaggtcatactgatggaagaggcaggctcccacagcttttgccagctccacccctgtggctttgcagggtacagcccccatccaagctgctttcatgggctgtggcttttc

SEQ ID NO: 926396 - DNA, 619 bp, Homo sapiens
catcctctgcaatggtaatttttaaatccacattttctttatatattcttcaaaaacattatttttttaagggtgctggaagtacagctatgaatagcacagaaaaaggccttgccttcaggaagatcacattcagctgggagagacagataataacctggcaactaacaaatgaataaaaacaatcttaaaaaatcttatttaaaacagtggtgttcctttctcccttggaatgccacactattatgtttcaatatatacattctttcctttttcagcactgttaacactcacttcaacagaataatatcttacttgctagtgttttttttgtaatttcaaggagcatgtattatctcttattactcagaggttgtttgcttgtttgttgtatttgttttcttcattctgaaaggatacgagttgtacaaaactgaaacttttrcaaattattgcaacttggagaatcagctgctttctctacccctttgaagagcattatctatctcttttcttcatacatctgccctcattcagaaaagcaattttctttgtttacatctgaattaatccagcatatatttattgggtagttattatgtgcaaaagtacactatat

SEQ ID NO: 926397 - DNA, 517 bp, Homo sapiens
tttttgtatttttagtagtgacggggtttcaccatgttggtcaggctggtctcgaactcctgatctcctgatctgcccaccttggcctcccaaactgctgggattacaggcgtgcagctgcccccggcctcattgttttttgtttgcttgtttgtttttgctttgagatggagtctggctctgttgcccaggctggagtgcagtggagtgatctcggctcactgcaacctcygcctcctgggttccagtgatcctcctgcctcagcctcctgggtagctgggactacaggcgcccaccaccatgcccggctaattttgtatttttagtagagacggagtttcgtcatgttggccaggttggtcttgaactcctgacctcaggtgatccacccgcctccacttcccaaagtgctgggattacaggcgtgagccaacatgtccgaccagactttcattgttttagtcatactcttttgtccagtatatttttaatttaaaaaatatgcaaaatcccatt

SEQ ID NO: 926398 - DNA, 723 bp, Homo sapiens
cagaatacacatccttttcctcagcacatgcatcattctctaggatagaccatatattaggttaccaaacaagtcttaaaatttaaaaaaaattgaaataatatcaagcatcttttctgaccacaatggagtaaaactaaaaattaataatgaggaattttggaaatcagagatacatggaaaataagcaatatgctcctgaatgacaatgtcaatgaataaattaagaaagaaattgaaaattttcttaaaacaaattattatggaagtacaatatactaaaactattacctgacttcaaattatactacagagctatagtaaccaaagagcaactgtcataaaaacagacacagactgtattagtcattctcacactactataaagacrttcctgagactgggtaatttataaagaaaagaggtttaattgactcacagttccacaggatgtacaggaggcatggctggggaggtatcatgaaaatcacagttatggtagaaggcaaaggggaagcaggcacaatcttcacatggaagagcaggagagagagagaacaaatggggaagtgctacaaacttttaaacaaccagatcttgtgaaaactcactcactattatgaatacagaaagggagaaatccacctccatgatccaatcacctcccactaggtccctcccccaacattgggagttacaatttggcatgagacttgggtagga

SEQ ID NO: 926399 - DNA, 475 bp, Homo sapiens
tctcggagagaatttgtttctagcttcttccattttctggtggttggtggtactactcggtttgtgaccacaccactccaattttctttctttctttttttctaaattttattatactttaagttctaggatacatgttcacaatgtgcaggtttgatacataggtatacatgtgccagtttggtttgctgcacccatcaattcatcatttacattaggtatttctaatgctatccctccccyagcccccaccctccagcaggccctggtgtgtgatgttccccgccctgtgtccaggtgttctcactgttcgattcccacctatgagtgagaacgtgtggtgtttggttttctatccttgcgatagtttgctgagagtgatggcttccagcttcatccatgtccctacaaaggacatgaactcatccttttttatggctgcatagtattccatggtgtatatgtgccacatttt

SEQ ID NO: 926400 - DNA, 670 bp, Homo sapiens
tgtataaacattcccttcgctccacaatcttgccagcatctgtaattttttgtttttttaataaaaattattttaactggtgtgagatgtatgtcttcgtggttttgatttgcacttctgtaatgattagtgctgttgagyattttgtcatatgtttgttgggcacatgtatgtcttcttttgaaaagtgtctattcatgtcttttgtctgttttttacaatgaggttgtttgtttgttgcttgtaactctttttaattccttgtagattctgacctttgttggatttttgtctgtttttttttaacgaggttgtttgttttttgcttgtaactctttttaagttccttatagatactagacatttgttggatgcatagtttgcaaatattttctcccattctgtaggttttctgtttactacgttgaaaaagagtttcttaattaggtcctatttgtcaatttttggttttgttacaattgcttttggcatcttcatcatgaaatctttgctaggtcctatgtccagaatggtatttgctaggttatctttcagaatttttatagatttgggtttcacatttaagtatttaattcatcttgagttgatttctgaatatggtgtaaggaaggggtccagtttcaatcttctgcatacggagaatcagtta

SEQ ID NO: 926401 - DNA, 670 bp, Homo sapiens
tgtataaacattcccttcgctccacaatcttgccagcatctgtaattttttgtttttttaataaaaattattttaactggtgtgagatgtatgtcttcgtggttttgatttgcacttctgtaatgattagtgctgttgagtattttgtcatatgtttgttgggcacatgtatgtcttcttttgaaaagtgtctattcatgtcttttgtctgttttttacaatgaggttgtttgtttkttgcttgtaactctttttaattccttgtagattctgacctttgttggatttttgtctgtttttttttaacgaggttgtttgttttttgcttgtaactctttttaagttccttatagatactagacatttgttggatgcatagtttgcaaatattttctcccattctgtaggttttctgtttactacgttgaaaaagagtttcttaattaggtcctatttgtcaatttttggttttgttacaattgcttttggcatcttcatcatgaaatctttgctaggtcctatgtccagaatggtatttgctaggttatctttcagaatttttatagatttgggtttcacatttaagtatttaattcatcttgagttgatttctgaatatggtgtaaggaaggggtccagtttcaatcttctgcatacggagaatcagtta

SEQ ID NO: 926402 - DNA, 670 bp, Homo sapiens
tgtataaacattcccttcgctccacaatcttgccagcatctgtaattttttgtttttttaataaaaattattttaactggtgtgagatgtatgtcttcgtggttttgatttgcacttctgtaatgattagtgctgttgagtattttgtcatatgtttgttgggcacatgtatgtcttcttttgaaaagtgtctattcatgtcttttgtctgttttttacaatgaggttgtttgtttgttgcttgtaactctttttaattccttgtagattctgacctttgttggatttttgtctgtttttttttaacgaggttgtttgttttttgcttgtaactctttttaagttccttatagatactagacatttgttggatgcatagtttgcaaatattttctcccattctgtaggttttctgtttactacgttgaaaaagagtttcttaattaggtcctatttgtcaatttttggttttgttacaattgcttttggcatmttcatcatgaaatctttgctaggtcctatgtccagaatggtatttgctaggttatctttcagaatttttatagatttgggtttcacatttaagtatttaattcatcttgagttgatttctgaatatggtgtaaggaaggggtccagtttcaatcttctgcatacggagaatcagtta

SEQ ID NO: 926403 - DNA, 670 bp, Homo sapiens
tgtataaacattcccttcgctccacaatcttgccagcatctgtaattttttgtttttttaataaaaattattttaactggtgtgagatgtatgtcttcgtggttttgatttgcacttctgtaatgattagtgctgttgagtattttgtcatatgtttgttgggcacatgtatgtcttcttttgaaaagtgtctattcatgtcttttgtctgttttttacaatgaggttgtttgtttgttgcttgtaactctttttaattccttgtagattctgacctttgttggatttttgtctgtttttttttaacgaggttgtttgttttttgcttgtaactctttttaagttccttatagatactagacatttgttggatgcatagtttgcaaatattttctcccattctgtaggttttctgtttactacgttgaaaaagagtttcttaattaggtcctatttgtcaatttttggttttgttacaattgcttttggcatcttcatcatgaaatctttgctaggtcctatgtccrgaatggtatttgctaggttatctttcagaatttttatagatttgggtttcacatttaagtatttaattcatcttgagttgatttctgaatatggtgtaaggaaggggtccagtttcaatcttctgcatacggagaatcagtta

SEQ ID NO: 926404 - DNA, 586 bp, Homo sapiens
aaaatttttttcacataccaaaattctacatttctacttcctctcccctaacactttgttattgatgttactatttgcagcttttgtactgtgctttcattaacatattttatagttacatttatttatctttatgttatgtttatgtagtcatgcctttgtatcttttatactaraattaaaaatgattttctcatcaacattacagtattacactattgtgtatgtgctttggtatttacctataccagtcatttcatattactgtttagcatcagtttctttcaacttgaagaactctttagcttttctcataagccaggactactgctgttgaacaccctcaaaatttgtttcacaaggagtttttattacttacttttttttgaagaaaattttgccagatatagtatttttgtttgacagttatttatttatatctcattagagttttgaaaatatcatcgcacttccttctggcatgcattgtttctactgagacatctactgatagtcttacagatttcccttatatgtgaaaatcacttttcacttactgctttcaaaattctccttttgtctttga

SEQ ID NO: 926405 - DNA, 666 bp, Homo sapiens
gtcagctcatggagagagcactggacttcaggtcagcagacacaggttctgtgagtttgagcaagctccttcatctccacaaatgactgtaccctccctcatctgtgaaggcaggctaagaaacctacctcgtatgggtcttgtgaggactaaatgatgtcaagcaagatamcaataaaataaagagttgagttagatttcaattaataaaaatatctctcaccaccgtaattattggggacctgtgagttactgcttgctggcaaattattaatatttaccaccatggttgatttcttcacagttttatttcatcagtaggctcatagtatagggctcatggaatgtttgtgggataaataaatgggataataatgaacactggcactttcattctgttaccatttgaagtagagtatcaaattgaaaaaaaaagtgacaggaaattattacacagtctaaaatctcattcctgtatcatgagctctttagaaaaataagaacggttcagtctaatggtaacatttgtaagatgcaattctgtgcagaatcatatcctaaggactttcatttgtctggaatgagctagatggcctctttagctagacagtgtgaccaagggaaagatcagacactgactagcaggcaggctctggggttagacca

SEQ ID NO: 926406 - DNA, 593 bp, Homo sapiens
aaaacttcccctggctcacgtggtggctcacgcttgtaatcccagcactttgggaggctgaggcgggtggatcatttgaggtcgggttttgagactagcctggccaacatggtaaaaccccgactctactaaaaatacaaaaatttgctgggcatgtggtgggcacctgtaatcccagctacttgagaggctgaggcaggggaatcgcttgaagccaggaggtggaggttgcagtgagccgagatcacaccattatactccagcctgggcaacagagggagacttgtctcgggggtgagaaaaggaaggaaaaaaaaaaaaagcttcctccaatttataccgaaaattctctgttcaggactaagtggcatagagaatgttaaatktgcctagatatcttcataactcatatattttctgttttctacatatcttgaaaggcagtgccaaatgacgtgtaattatctaggtggtaaaactgaaacacactttatattcccttgaatataaaaaagcattgtggtattagtacttttatcttggatcattgttcagaaggaggttcagccctcagacaaccacatttttactgt

SEQ ID NO: 926407 - DNA, 647 bp, Homo sapiens
taaatggtatgtttactagatggcttgatgtagacctacagttaactggtactttgttcttttttttttttttttttaagacacggtctcactctggcgcccaggctggagtgcagtggcgcaaactctgctcactgcaaggctccgcctcccgggttcacaccattctcctgcctcagcctccggagtagctgggactacaggcgcccaccaccacaccygcctaattttttgtatttttagtagagacagggtttcaccatgtcagcaaggatgggggtctcaatctcctgatctcatgatctgcccgcctcggcctcccaaagtgctgggattacaggtgtgagccaccacgcccggccctagatttatatgttattgttagagataatacagatcatttgtatgctttgcccagttttcatcaatggtaacattttgctaagttgtactatagggacatccctcagtatccaagcaggattagttccaggaccctcgcagataccaaaatccatggatgctcaagtccctgatataaaatggcatagtatttgcatataacctacccacatcctcctgtatactttaaatcatctctagattacttttaatacctaatgtaatgtcaaggctatgtatggcag

SEQ ID NO: 926408 - DNA, 647 bp, Homo sapiens
taaatggtatgtttactagatggcttgatgtagacctacagttaactggtactttgttcttttttttttttttttttaagacacggtctcactctggcgcccaggctggagtgcagtggcgcaaactctgctcactgcaaggctccgcctcccgggttcacaccattctcctgcctcagcctccggagtagctgggactacaggcgcccaccaccacacctgsctaattttttgtatttttagtagagacagggtttcaccatgtcagcaaggatgggggtctcaatctcctgatctcatgatctgcccgcctcggcctcccaaagtgctgggattacaggtgtgagccaccacgcccggccctagatttatatgttattgttagagataatacagatcatttgtatgctttgcccagttttcatcaatggtaacattttgctaagttgtactatagggacatccctcagtatccaagcaggattagttccaggaccctcgcagataccaaaatccatggatgctcaagtccctgatataaaatggcatagtatttgcatataacctacccacatcctcctgtatactttaaatcatctctagattacttttaatacctaatgtaatgtcaaggctatgtatggcag

SEQ ID NO: 926409 - DNA, 647 bp, Homo sapiens
taaatggtatgtttactagatggcttgatgtagacctacagttaactggtactttgttcttttttttttttttttttaagacacggtctcactctggcgcccaggctggagtgcagtggcgcaaactctgctcactgcaaggctccgcctcccgggttcacaccattctcctgcctcagcctccggagtagctgggactacaggcgcccaccaccacacctgcctaattttttgtatttttagtagagacagggtttcaccatgtcagcaaggatgggggtctcaatctcctgatctcatgatctgcccgcctcggcctcccaaagtgctgggattacaggtgtgagccaccacgcccggccctagattyatatgttattgttagagataatacagatcatttgtatgctttgcccagttttcatcaatggtaacattttgctaagttgtactatagggacatccctcagtatccaagcaggattagttccaggaccctcgcagataccaaaatccatggatgctcaagtccctgatataaaatggcatagtatttgcatataacctacccacatcctcctgtatactttaaatcatctctagattacttttaatacctaatgtaatgtcaaggctatgtatggcag

SEQ ID NO: 926410 - DNA, 764 bp, Homo sapiens
atgccagggcagtggtcacctgtgccagccccgtgaggtagctggaggatcattgttccttccttctcgggctctgggcagatgccagggctggggtgacccatgccctcaagtttcttgctttggtgggccacattttcccttggcaaagagggtaaaggtcacaggatgccggagagctgtgacttctctgtgccctgggcccaaactatgaagacctgacacactatgctaaaagtccaaggctgggtgctccccagagcttcttgcctcaccgcttctgctgagggaggaatgaatactatgtcctcccagagctttgggagcttgtagcaagcagcctccccagcgcaaaatctcttggaaacctctaactgtgtctgaaacattagtgcaaatgttgcatcctatttctcatatgtccgcatgttttaggaaaaaaccctcaatttcctaaatatgcaagaaaaatcggtattgtaggacaatgtgactttttaaaraatgttatttaaaaatcttccctacctccttttctgccctccaagactgccaaatacttgttgaacatatattattaaatgcctactacatgccagccatgattcatggtcttggggacacagcagggaatgaactgacaggattcctctcttatgtaactcacattcttatatgataatgataagggttaacattaattaagctgtcactacgtgttagtcacggtgcagtcattcccacacattattacacttaaacct

SEQ ID NO: 926411 - DNA, 545 bp, Homo sapiens
gggtggccagtctcaatggctcccaactcttttgcctcgaggtgacacgcttcacttccactcacatctcctgggtcaaagcaaatcccatgggtacatccactttcaagtggcccaggagagaaactgaaatacccggtggactccattamggccgtcatatagtgtcagcctgcatgggagactgtggaggggcagaggaggagagtggggaactgatgggaaatgacaggaggactaagtcaccgcagatttgctttatcttcagccaggtggagtttgtcccagagctgcacaaaatcatcaccagcatgattaaacagagtagacttcagaaaaagcagtttggtcggatgtaatcagcagtgaactcagaatcaattgagtgacattgagtcagtaaacctctgactgcctcagttaccccatatgatagttttgaggatgggaacattgagagagttgatttggaaggatatcaagagtaaaaattccaacattttagttcctttaagtgaaatccaggcactgtctttcctacaagt

SEQ ID NO: 926412 - DNA, 582 bp, Homo sapiens
ttcttttttttttttttttttaagacacggtctcactctggcgcccaggctggagtgcagtggcgcaatctctgctcactgcaagctccgcctcccgggttcacaccattctcctgcctcagcctccagagtagctgggactacaggcgcccaccaccacacccggctaattttttgtatttttagtagagacagggtttcaccatgtcagcaaggatgggggtctcaatctcctgatctcatgatctgcccgcctcggcctcccaaagtgctgggattacaggtgtgagccaccacgcccggccctagattyatatgttattgttagagataatacagatcatttgtatgctttgcccagttttcatcaatggtaacattttgctaagttgtactatagggacatccctcagtatccaagcaggattagttccaggaccctcgcagataccaaaatccatggatgctcaagtccctgatataaaatggcatagtatttgcatataacctacccacatcctcctgtatactttaaatcatctctagattacttttaatacctaatgtaatgtcaaggctatg

SEQ ID NO: 926413 - DNA, 668 bp, Homo sapiens
taaattaaataaccctatcacaccaaaaaagtatatgttgaaatttattggcatgacctaacaattaaagtaagagactaagaaatactgattttcatttccatctttcccactaatatatgcatacacacaaacccacacacacacaggcatatacatatatatttcattaagttatttaatccacaattttatactttcccttgaagtgaacacaaagcatttgacttccacatggtagagttagtgagtgagttacacgtcacttcatatctcactagtcttcttctgcttcttataatgtaatctgtgaatgggccatgcacagtggctcamgcctgtaatcctaacagtttgggaggtcaagacaggaggattgcttgagtccaggagttcaagaccagcttaggcaatgtagcaagaccccatctctataaaaaagtacaaaaattagctgggtgtggtggctcatgtctgtagtcccagctactcagggggctgaggtgggaggaatgtttgagcccaggaggcagaggttgcaatgagccaagattgcaccactgcactccaatctgggagacagagtaagaccctgtctcaaaaggaaaaaaaaagaagaattatgctaatgactgcatttgtaggcccacaaggcctcagtatatggg

SEQ ID NO: 926414 - DNA, 837 bp, Homo sapiens
atggccatcagatcaagccacttacgagcagcatgctgaagaaagaggaccacaaggtcagtgccaagcgctaagcacaaggagaaatgctggtgccacatggaagccagtggcattgcattcgcaagcacaggtgaamtctcttgagagtgcaaagttggaaattaatgaagagtccctggaattcctccagtcacactggaggaggatgagctggaaaaacagtgagactcagggaaactggttgtcagcattaagcatatctaaatcagcctggcccccttccatctgagcttctatacacatgactctacttaattcaatttcaattcagtcacttcgcgtctacaacaagtcaaaggaagtatttcttttctagacatctaaaggaccacgattatttcaaagttatttcaaggtattacacagccttaataatcaattgaatggctgattttttttttctttatccaagacctaaaattttctcattagatttcaagttagtaagtcgaatctccattgacatccaggaattgattgcagggcccccaactaaagcatactgtctaaagacgtgagctcgaagtcaaacttaaacatgcagacaagaaattgtatgcactgattgctggtagctggaagtcatctctctcctctgaatttccttagtcactgtcctcttagtcctatctagatggtattagaatcatttacatatagtttttacctcctctcccagccttactaaggaagcacactgacggcaggtttgagaactaaatatccttatatcctcttttaggtgaggagtccaaagtgtttacagtcacgtga

SEQ ID NO: 926415 - DNA, 837 bp, Homo sapiens
atggccatcagatcaagccacttacgagcagcatgctgaagaaagaggaccacaaggtcagtgccaagcgctaagcacaaggagaaatgctggtgccacatggaagccagtggcattgcattcgcaagcacaggtgaactctcttgagagtgcaaagttggaaattaatgaagagtccctggaattcctccagtcacactggaggaggatgagctggaaaaacagtgagactcagggaaactggttgtcagcattaagcatatctaaatcagcctggcccccttccatctgagcttctatacacatgactctacttaattcaatttcaattcagtcacttcgcgtctacaacaagtcaaaggaagtatttcttttctagamatctaaaggaccacgattatttcaaagttatttcaaggtattacacagccttaataatcaattgaatggctgattttttttttctttatccaagacctaaaattttctcattagatttcaagttagtaagtcgaatctccattgacatccaggaattgattgcagggcccccaactaaagcatactgtctaaagacgtgagctcgaagtcaaacttaaacatgcagacaagaaattgtatgcactgattgctggtagctggaagtcatctctctcctctgaatttccttagtcactgtcctcttagtcctatctagatggtattagaatcatttacatatagtttttacctcctctcccagccttactaaggaagcacactgacggcaggtttgagaactaaatatccttatatcctcttttaggtgaggagtccaaagtgtttacagtcacgtga

SEQ ID NO: 926416 - DNA, 837 bp, Homo sapiens
atggccatcagatcaagccacttacgagcagcatgctgaagaaagaggaccacaaggtcagtgccaagcgctaagcacaaggagaaatgctggtgccacatggaagccagtggcattgcattcgcaagcacaggtgaactctcttgagagtgcaaagttggaaattaatgaagagtccctggaattcctccagtcacactggaggaggatgagctggaaaaacagtgagactcagggaaactggttgtcagcattaagcatatctaaatcagcctggcccccttccatctgagcttctatacacatgactctacttaattcaatttcaattcagtcacttcgcgtctacaacaagtcaaaggaagtatttcttttctagacatctaaaggaccacgattatttcaamgttatttcaaggtattacacagccttaataatcaattgaatggctgattttttttttctttatccaagacctaaaattttctcattagatttcaagttagtaagtcgaatctccattgacatccaggaattgattgcagggcccccaactaaagcatactgtctaaagacgtgagctcgaagtcaaacttaaacatgcagacaagaaattgtatgcactgattgctggtagctggaagtcatctctctcctctgaatttccttagtcactgtcctcttagtcctatctagatggtattagaatcatttacatatagtttttacctcctctcccagccttactaaggaagcacactgacggcaggtttgagaactaaatatccttatatcctcttttaggtgaggagtccaaagtgtttacagtcacgtga

SEQ ID NO: 926417 - DNA, 837 bp, Homo sapiens
atggccatcagatcaagccacttacgagcagcatgctgaagaaagaggaccacaaggtcagtgccaagcgctaagcacaaggagaaatgctggtgccacatggaagccagtggcattgcattcgcaagcacaggtgaactctcttgagagtgcaaagttggaaattaatgaagagtccctggaattcctccagtcacactggaggaggatgagctggaaaaacagtgagactcagggaaactggttgtcagcattaagcatatctaaatcagcctggcccccttccatctgagcttctatacacatgactctacttaattcaatttcaattcagtcacttcgcgtctacaacaagtcaaaggaagtatttcttttctagacatctaaaggaccacgattatttcaaagttatttcaaggtattacacagccttaataatcaattgaatggctgattttttttttctttatccaagacctaaaattttctcattagatttcamgttagtaagtcgaatctccattgacatccaggaattgattgcagggcccccaactaaagcatactgtctaaagacgtgagctcgaagtcaaacttaaacatgcagacaagaaattgtatgcactgattgctggtagctggaagtcatctctctcctctgaatttccttagtcactgtcctcttagtcctatctagatggtattagaatcatttacatatagtttttacctcctctcccagccttactaaggaagcacactgacggcaggtttgagaactaaatatccttatatcctcttttaggtgaggagtccaaagtgtttacagtcacgtga

SEQ ID NO: 926418 - DNA, 624 bp, Homo sapiens
aggcatggtggctcaagcctgcaatcctagcactttgggagaccaaagcaggaggatcacctgaatcgcttgagttcaagagttcaaggttacagtgagctatgatagtgccactgcactgcagcccgggtgaaagccagaccctgtaagtaaataagtaagttaagtaaggaaattaattaagccaaagaataaaagaaggggagtgcccagattctcaggaatctggtccagaaattactgttccatcctcttctccagggttcactgactttccagcagagttcttaaaaagggaagatgtgcaaagcctcctgcctgaatagccattaattgatggctatcataaatacatattgacagmttgaaatgcctgatgtaggagatttggttactttaagtattttttgaagggtatactgtttaacttcccattgcaacaggggataacttatatgattatttcagcgatgattttttgaatatttttccattaaaagtacaactgtgtgaaacaaggcaaagacatttctcacacacaaagcagatgtcattagccactctgatacactatgctgctgattcataaaataggtaagagcagatcgttttcttcatcagaaa

SEQ ID NO: 926419 - DNA, 757 bp, Homo sapiens
aactcaaggcaatatggactgtgatcaccaaggagatgacacctgtggtaatctgtactagtagctaggcaatttatcaaggcttaactttgtggttaattacctagaagttacagaattagctagttagtcatcgacccatgtagggccaggccatgtggccagatctatgagaggaagaacaaccttctccaaccaggtacagggttgaacagtaatctgttattgcctgccccagtacccctaaaggcaggggaacagaaaaacctggtgttagccatggaccctccaagcacctcattgcagatggttggctatcatagccccctggggggaggggctgcagtataacttacatgttactcyttgggtatttaatgtgtggcctccacaattaaccatgcataggggaacggccagggaagagactctcctccagagggcatgtgtactgtctgtgtggcttagcataagctcccctgtgtgtttggcatgggtacagcacccaaaaggaccacagggagctgataaggtgtggtatcatcacccagggcaaatgcccttggtggctgcactgttatcgagaggtgaaaagttggcctgtattttgcctgagggacatgatttacccctgttagtacctgtgcttgctttgtcattccagccataggtggcatgctccaacagcatcatgttctgggcccacacctacactgaggtgaccaatgtcttcaactgttgtatctgcaccaccctt

SEQ ID NO: 926420 - DNA, 733 bp, Homo sapiens
atcaccaaggagatgacacctgtggtaatctgtactagtagctaggcaatttatcaaggcttaactttgtggttaattacctagaagttacagaattagctagttagtcatcgacccatgtagggccaggccatgtggccagatctatgagaggaagaacaaccttctccaaccaggtacagggttgaacagtaatctgttattgcctgccccagtacccctaaaggcaggggaacagaaaaacctggtgttagccatggaccctccaagcacctcattgcagatggttggctatcatagccccctggggggaggggctgcagtataacttacatgttactccttgggtatttaatgtgtggcctccacaattaaccatgcataggggaacggccagggaagagactctcctccagagggcatgtgtactgtctgtgtggcttagcataagctcccctgtgtgtttggcatgggtacagcacccaaaaggaccacagggagctgataaggtrtggtatcatcacccagggcaaatgcccttggtggctgcactgttatcgagaggtgaaaagttggcctgtattttgcctgagggacatgatttacccctgttagtacctgtgcttgctttgtcattccagccataggtggcatgctccaacagcatcatgttctgggcccacacctacactgaggtgaccaatgtcttcaactgttgtatctgcaccaccct

SEQ ID NO: 926421 - DNA, 661 bp, Homo sapiens
ctctggctgaacactcccagtagcagtggctccacaattctcagaggtggagctcccaggcacaaccaaaagcccctctcccacttcctcagcagtggtactgcccctgctgccctaagactggcaacggagcaaagaacctaagtgcctcttccacacctccagcaacttggagttgctgtaaggagaggccagtctgtctcccagaagtcccacccaccatctcccccactcatcaacagttgggtcccccagcttgggctcacagcacagctccccaktcccaggctgatcataccaaatgattgcagcttggcatctctctagggtggagccctaggagacaagtgaaagacccctgaccacaaccactgctagggtcctttcttctactgtctccaacttagagaggaaatataagccctgagatcaccccagagctgtggtgtgtaacccaggaatgcaaagctgagatctgtagccagtattcagatgggagaagagcccacactttcagagcattgagagggggcatggctgtaactgtgaagaaattaatacagaggagtcacatggctgagtaagagcctacttactgaccattacacctaagcaccacctactggatcacaccccaaaacttcaacaccaaaaatacttt

SEQ ID NO: 926422 - DNA, 643 bp, Homo sapiens
caccaactcattctatggggccagcatcatcctgataccaaaacctggcagagacgcaataaaaaaggaaaatgtcaggccaatatccttgatgaacataaatacaaaagtcctcgataaaatactagcaaatgaaattcagcagcacatcaaaaagctaattcaccacgatcaagtaggcttaattcctgggatgcaaggttagttcaacaaatgcaaatcaataaatgtgattcatcacataaacaaaactaaagacaaataccacataattacccgaatagatgccaaaaactcttttgataaaattcaacatcctttcatgttaaaaagtctcaataaactaggtattgaaggaacatacctcaaaataataagagccatctatgataaacccacagccaacatcatactgaattggcaaaagctggaagcattccctttgaaagccggtccaagacaaggatgccctctctcaccactcctattcaacgtagtrttagaagttctggccagaacttctaatcaggcaatcaggcaagagaaagaaataaaaggcattcgaataggaagagaggaagtcaaactattcctgtttgcagatcacagaattctatatctagaatactccacagtctctgca

SEQ ID NO: 926423 - DNA, 605 bp, Homo sapiens
ctgcagaaatttgcataagaggagctgaatgttaatagccaagacaatggggaaaatatctccaaggcatttcagagacctttgcagaagcccctcccatcacaggcctggaggcctaagagggaaaaattgtttcatgggccaggatcagggtcccacttctctgtgcagcatccagacatggtgccctgcattgtggccactccaacaccagccatggcyaaaagggcaccagatatgtctcaggcgactgctccagagggtgcaaactgcaagtcttgttgacttccgtgtgacgttaagcccatgagtgtgcagagagcaagagttgaggcttgggagcctccacttagatttcagaggttgtatggaaatgcatggatgtccaggcagaagtctgttgcaggggtggagccttcatggagaacctctattagggtaatgcagaggggaaatgtggggttggagcccccgtatagaatctctccactggagcagtgcttagtggggctgtgagaagagggccaccatcttcaagaccccaggatagtagatccactgacagcttgactgtgtgcctggaaaagccacaagcactcaacacc

SEQ ID NO: 926424 - DNA, 605 bp, Homo sapiens
ctgcagaaatttgcataagaggagctgaatgttaatagccaagacaatggggaaaatatctccaaggcatttcagagacctttgcagaagcccctcccatcacaggcctggaggcctaagagggaaaaattgtttcatgggccaggatcagggtcccacttctctgtgcagcatccagacatggtgccctgcattgtggccactccaacaccagccatggctaaaagggcaccagatatgtctcaggcgactgctccagagggtgcaaactgcaagtcttgttgacttccgtgtgacrttaagcccatgagtgtgcagagagcaagagttgaggcttgggagcctccacttagatttcagaggttgtatggaaatgcatggatgtccaggcagaagtctgttgcaggggtggagccttcatggagaacctctattagggtaatgcagaggggaaatgtggggttggagcccccgtatagaatctctccactggagcagtgcttagtggggctgtgagaagagggccaccatcttcaagaccccaggatagtagatccactgacagcttgactgtgtgcctggaaaagccacaagcactcaacacc

SEQ ID NO: 926425 - DNA, 605 bp, Homo sapiens
ctgcagaaatttgcataagaggagctgaatgttaatagccaagacaatggggaaaatatctccaaggcatttcagagacctttgcagaagcccctcccatcacaggcctggaggcctaagagggaaaaattgtttcatgggccaggatcagggtcccacttctctgtgcagcatccagacatggtgccctgcattgtggccactccaacaccagccatggctaaaagggcaccagatatgtctcaggcgactgctccagagggtgcaaactgcaagtcttgttgacttccgtgtgacgttaagcccatgagtgtgcagagagcaagagttgaggcttgggagcctccacttagatttcagaggttgtatggaaatgcatggatgtccaggcagaagtctgtygcaggggtggagccttcatggagaacctctattagggtaatgcagaggggaaatgtggggttggagcccccgtatagaatctctccactggagcagtgcttagtggggctgtgagaagagggccaccatcttcaagaccccaggatagtagatccactgacagcttgactgtgtgcctggaaaagccacaagcactcaacacc

SEQ ID NO: 926426 - DNA, 581 bp, Homo sapiens
gctgaatgttaatagccaagacaatggggaaaatatctccaaggcatttcagagacctttgcagaagcccctcccatcacaggcctggaggcctaagagggaaaaattgtttcatgggccaggatcagggtcccacttctctgtgcagcatccagacatggtgccctgcattgtggccactccaacaccagccatggctaaaagggcaccagatatgtctcaggcgactgctccagagggtgcaaactgcaagtcttgttgacttccgtgtgacgttaagcccatgagtgtgcagagagcaagagttgaggcttgggagcctccacttagatttcagaggttgtatggaaatgcatggatgtccaggcagaagtctgttgcaggggtggagscttcatggagaacctctattagggtaatgcagaggggaaatgtggggttggagcccccgtatagaatctctccactggagcagtgcttagtggggctgtgagaagagggccaccatcttcaagaccccaggatagtagatccactgacagcttgactgtgtgcctggaaaagccacaagcactcaacac

SEQ ID NO: 926427 - DNA, 643 bp, Homo sapiens
gccaggactgaatctggctgccatggtaaaatgggggaggctaaacgaagcattgtcacctggttacaggtcaggttcccaaggaggtaaaacaagatggaggcccgcagcaaagtttgctgctgaccatgcagaatgccaggcaaagcacactggattggctgcaatttaaggccaacctaacaaatcctttttcatcattaaaactttacagagaatatagacagtgacagttggggtcctggcctagtaaaacatcttctaaaaagcaaaatagcctcacttaaaagttaactcctgacccggcggagaaaaggaaaagacagcttaaatgcagggctgtgttaactgctgacagggtggaggaaaaaaaaaatgatgccagccggtygcggtgggtcacgcctgtagtaacagcactttgggaggctgaggcgggcagatcacctgaggtcaggagttcgagatcagcctggccaacctggtgaaacctcgtctctactaaaaatacaaaaattagcagggcatggtggcgcaatcccagctacttgggaggctgaggcaggagaatcgcttgaacccgggaggtggaggttgcagtgagtctaggtcgcgccactgcactccagcctgggcgacagag

SEQ ID NO: 926428 - DNA, 601 bp, Homo sapiens
cttttgggggaacaaagaataggtcactatcccagagaggactggtagttagacttcactcatatgcctaagtcaaagggatttcaatacttgttggtctgtgttgatacctttacaaattggatagaagctttcccctgcaagacagagaaggctcaggaagtgattaaagtcctaattcatgaattaattcctagatttgggcttccccaaagcttacaggtgacaatggtccggcttttaaagccatgataactcagggaayttccagggcgctagggatacaatataatcttcactgcgcctggaggccacaatcctcagggaaggtcgagaaggcaaatggaacactgaagaggcacttaaggaaactaacacaagaaacaagaaactcatctcccatggcctactcttttgcccatggccatgttgagaatctgaatttctcctcacaatatggggctcagtccatatgaaatgctgtatggacgaccttttctcacaaatgacctcccacttgatcagtaaatggccaacttggtcaaagatataacttctttggcaaaatatcaacaaaaccttaaaaacctacctgaaggat

SEQ ID NO: 926429 - DNA, 601 bp, Homo sapiens
cttttgggggaacaaagaataggtcactatcccagagaggactggtagttagacttcactcatatgcctaagtcaaagggatttcaatacttgttggtctgtgttgatacctttacaaattggatagaagctttcccctgcaagacagagaaggctcaggaagtgattaaagtcctaattcatgaattaattcctagatttgggcttccccaaagcttacaggtgacaatggtccggcttttaaagccatgataactcagggaatttccagggcgctagggatacaatataatcttcactgcgcctggaggccacaatcctcagggaaggtcgagaaggcaaatggaacactgaagaggcacttaaggwaactaacacaagaaacaagaaactcatctcccatggcctactcttttgcccatggccatgttgagaatctgaatttctcctcacaatatggggctcagtccatatgaaatgctgtatggacgaccttttctcacaaatgacctcccacttgatcagtaaatggccaacttggtcaaagatataacttctttggcaaaatatcaacaaaaccttaaaaacctacctgaaggat

SEQ ID NO: 926430 - DNA, 640 bp, Homo sapiens
aatgaaagtgtctttaaaataatttttattttagaaaatgccaaagatatggaatggctgctgggttgggatcaaaatctttttttttttttttatgttgagggtattatagcatgtgcatttgctaatgggaataatctaatctagagagagktacaaactagttaaacaggagaggagtatatttgaggaggccatgtcctggagcggattagaggaaattagatagagcatacaaatgggaagtttggtgttaagaacgtggagtaattctctataaaaacagacagaataacatatgggtatccattagacacatagatatgatggaaccagtggatggcagttgtcttataattacatatcttttgtaagtgaaatagaaaaacccccgcaatctcaacagataaggcagagctgaataagatatgaaaattttgaagatagctaatgtatgggattattcagtagaatgtttgtgatttaatcagggaaaaatattaatttccctatggtagagttggcttggctacattaaagcccatatgaggttcagagtcaagaaactgaagtgagaccagatagcaatgggtgtgttttctcaaagcctgatcaagagtgtaggtgcagacatggagca

SEQ ID NO: 926431 - DNA, 523 bp, Homo sapiens
gggcttcagaagggaggaattgtgtgctgattggtccatggcaggcccagaaaaaacaccgttaagttctcactctggcagcttggccccccttctttaggctgttcctgacttgaaagtggggcttcaccagagaccccttgttttccacccaggagcctctctgcctcatgccatcaactgccattcatggcacctaggctatttgtgctgaagggcacctggaagcctgcaccaagccaccctcaaccccctcttgcctccctcctatgcttgttgtgtccaaagtccagagggggccaaggtggcagagggctggtatgttggtgtcacctcaggcacgcacatacctggatgggtcacaacagagcccayggttggcttcaactttgttccagaattggagtggatgccaggagcagggagagaccaggcagtgggagcaggcacttctaatcctgtgggggcaggagggggcttcctgggccaccaagtgaatagggatgtcctgttccaaagtcaa

SEQ ID NO: 926432 - DNA, 587 bp, Homo sapiens
cacaccattctcctgcctcagcctccggagtaactgggactacaggtgccgccaccacgcccggataattttttgtatttttagtggagacggagtttcaccgtgttagccaggatgttctcgatctcctgacctcgtgatccacccgcctcggcctcccaaagtgctgggccttattttaacagacaccaatgtgatcagaaaaagtataacatgtgctgaaaactgtttattgtgtggacattgtgtgggaaccaataaaagacaaagagctatagaataaatcatttttatttaattttatttacttttaaagttagactcgtattcattctggtctctctgagttgtttgctcccacctgtttggtctcacttttctctctgtatctcaggagccagaactayaagcttcagaagtcagttcagatggttatctgcaatttctctttgtagtgctattcgaggtcaaatccattacagcatatgttcagactgactttgcacacttaactccactgggctttcagtgacatacttggcgcttcacctgagaacctgttatccatagatacatgagatgttaaa

SEQ ID NO: 926433 - DNA, 651 bp, Homo sapiens; identical to SEQ ID NO: 923143

SEQ ID NO: 926434 - DNA, 731 bp, Homo sapiens
attggctgctggacaaccacactccaggggaagatcatcttcccactccatcccccttccagctccccattcatcccactgagagccacctccaccattcaataaagcccccacattcatccttcaagtccatgtgcaacctgattcttcctggacactggacaagggcctgggtaccaagaggacactatgctggttaacacttaagccatccacggatggcaaggttaaaagagcgcactgtaacacaacacatgccacttgggctttgggagtcacagacacccacccctggatgctgccgtgaggccggagcccaggggcacttgccccagcttctgcacctgcccatctttgtgctcccccacccataaggggtttgagcatgcatggcagccgaacagacaagccacacccagtcacacatcccatgaggggagtcagggaactctcataggctattattactamataagcaagttgttagaaatgtgaacaccccagacctctaggagcacttaattacacgcttttaaagtataattatccttatttttgtgaatgttccttatctaccccaggtagcaagttgcatacattatatcatttagccccactgtataagtgaggaaactgtggctcaaagtgccttgcccttggttacctggcttcagccagtcctccaaaaggacatttaccagtgttggtattttaaaataaaaacaaaacct

SEQ ID NO: 926435 - DNA, 742 bp, Homo sapiens
aagtcacctgcttgctttggctgtggggcacttccagcaactgcatcactctaacctctgcaaccatagcacgtctcccttttctgactctcaccctcttctttctttcccttataaggacaattgtagtacaggataatctccccatttcaaaatcctttacttaatcacatctgcaaagtccgtcttggcctataaggtgacatacttgcagattccagaaattagaatttggacgtctttgggtggctgttattatgcctgccacacagaccaatgcatacacaatgtgaccaatccatcatgatttgtctgagactatattggctttaaagctgaaagttctgcatcccaggaatcgcctcagtcccaggcaattcaggacaattcgtcgtcaycctatgtgcacctcctatgtgctccttcaacttagagagttggtgttttctctcctcttcaaaggactaactccttttcacctaaagagtacacagaggctgggtgtagtggtttaggcctgtactctgtgcatttgggacactgaggcaggaggttcacttgagcccaggagtttgagaccattcacggcaacatagtgagatcctttctctacaaattttttaaaaaattagttgggcatggtggcacatgcctgtagtcccagatacttggcaggctaaggaggaaggatcccctgagcccgggattcaaggctgcagtgagctatgatagtgccactgta

SEQ ID NO: 926436 - DNA, 618 bp, Homo sapiens
caagccttacaggttagttcaggatctatgccttatcaaccaaattgttttgcctatccaccccatggtgccaaacccatatactctcctatcctcaatacctccctccacaatccattattctgttctggatctcaaacatgctttctttactattcctttgcacccttcatcacagcgtctcttcgctttcacttggactgaccctgacacccatcaggctcagcaaattacctgggctgtactgccgcaaggcttcacagacagcccccgttacttcagtcaagcccaaatttcttccttatctgttacctatctcagcataattctcataaaaacacacgtgctctccctgccgatcatgtccractaatctctcaaaccccaaccccttctacaaaacaacaactcctttccttcctaggcatggttggatactttcacctttagatacctggttttgccaccctaacgaaaccattatataaactcacagaaggaaacctagctgaccccatagatcctaaatcctttccccactcctctttccattccttgaagacagctttgaagattgcccccactctagctctccctgactcatcccaacccttttca

SEQ ID NO: 926437 - DNA, 668 bp, Homo sapiens
cccctcccttccctacacatcaagctcagggatttgcccccacccaggactggcaaattagctttactcaacatggcccgagtcaaaaaactaaaatacctcttagtctaagtagacactttcactagataagtagaagcctttcctgcagggtctgagaaggccaccgcagtcatttcttcccttctgtcagacacaattactcagtttagccttcctacctctatgcagtccgatagcagaccagcctttattagtcaaattaggcaagcagcttttcaggctcttagtattcagtgaaacctttatatcccttacagtcctcagtcttcaggaaaggtaaaacagactaataatcttttaaaaacacacctcaccaggctcagccaccaacttaaaaaggactggacaatacttttacctctttcttttctcagaatacaggcctgtccttagaatgctacaagrtacagctcatttaagctcctgtatggatgttcctttttattaagccccagtctcattccagacaccagaccaacttagactgtgccccaaaaacttgtcatccctactatcttctgtctagtcatactcctattcaccattctcaactactcatacatgctctgctcttgtttacactgccagtttactctgtttctcca

SEQ ID NO: 926438 - DNA, 668 bp, Homo sapiens
cccctcccttccctacacatcaagctcagggatttgcccccacccaggactggcaaattagctttactcaacatggcccgagtcaaaaaactaaaatacctcttagtctaagtagacactttcactagataagtagaagcctttcctgcagggtctgagaaggccaccgcagtcatttcttcccttctgtcagacacaattactcagtttagccttcctacctctatgcagtccgatagcagaccagcctttattagtcaaattaggcaagcagcttttcaggctcttagtattcagtgaaacctttatatcccttacagtcctcagtcttcaggaaaggtaaaacagactaataatcttttaaaaacacacctcaccaggctcagccaccaacttaaaaaggactggacaatacttttacctctttcttttctcagaatacaggcctgtccttagaatgctacaaggtacagctcatttaagctcctgtatggaygttcctttttattaagccccagtctcattccagacaccagaccaacttagactgtgccccaaaaacttgtcatccctactatcttctgtctagtcatactcctattcaccattctcaactactcatacatgctctgctcttgtttacactgccagtttactctgtttctcca

SEQ ID NO: 926439 - DNA, 610 bp, Homo sapiens
gttagtatattttatgtgtggcccaaaacaattgttcttccaatgtgacctagggaagccaaaagattggatactcctgcagtacaactttcagggtttgaagttttctttgtggtaagatttttacttcataatttatcatactcaatggacatgtgtctacttagattttcaatttcttttcagttttttttaaattatcaattttctctaaggtgctytatttatattaataagcgacttagttgttgttatatatccactaagttactgctatatatccactcttaccattttcatctgtgggatctctaatgatgtttgctctttgtaatttgtgcagagagcttcatcacaaatgctgtgtcctcttttcccctttgtgaatcttgctagaggtttcccaatttgatttatatttttaaagaaataacttctgactttgttgaactttctcattgtttttctggttattctttacatttcactgacttccactcttattcgtaatattgactcttctttatatttggaatttaatttttttctacctctttagatataaatagaagaaatgtattttataccttccatcttttctaatacaggc

SEQ ID NO: 926440 - DNA, 610 bp, Homo sapiens
gttagtatattttatgtgtggcccaaaacaattgttcttccaatgtgacctagggaagccaaaagattggatactcctgcagtacaactttcagggtttgaagttttctttgtggtaagatttttacttcataatttatcatactcaatggacatgtgtctacttagattttcaatttcttttcagttttttttaaattatcaattttctctaaggtgctttatttatattaataagcgacttagttgttgttatatatccactaagttactgctatatatccactcttaccattttcatctgtgggatctctaatgatgtttgctctttgtaatttgtgcagagagcttcatcayaaatgctgtgtcctcttttcccctttgtgaatcttgctagaggtttcccaatttgatttatatttttaaagaaataacttctgactttgttgaactttctcattgtttttctggttattctttacatttcactgacttccactcttattcgtaatattgactcttctttatatttggaatttaatttttttctacctctttagatataaatagaagaaatgtattttataccttccatcttttctaatacaggc

SEQ ID NO: 926441 - DNA, 593 bp, Homo sapiens
aggtctctaagcctttgttcatttttcaatttttaaattctctctgttcttcaaatggcataattttattgatcattatgtttattgagtctttttataatcacaaatcttctgttgaggtcatctagtgaatttttaagttcagttgttgyactcttcagctctagaatttccacttgtttctttcttcaattttattaatactttcaatttctttgttgagatttactcattaatgcaatttttaaaaattccttgaacttatttatattatttcatttagagaactttctgataaatatataataatatctgggccccacttgatatctgtttgtattggtgcctccttttttctctgatatggatcagtcttttctgtttatttgcatctctggtgatttttgcttgaagactgaacatcatacataatatgctatagtgactctggattctgtactgttcttcaaaagatgtctgaggtttctgctctaatatacaactaccttgtctggactccagctacgaaatctgaattctcatgaatgacagtttgttgttgttgtttttcctggcttccagctgcttgaaag

SEQ ID NO: 926442 - DNA, 593 bp, Homo sapiens
aggtctctaagcctttgttcatttttcaatttttaaattctctctgttcttcaaatggcataattttattgatcattatgtttattgagtctttttataatcacaaatcttctgttgaggtcatctagtgaatttttaagttcagttgttgtactcttcagctctagaatttccacttgtttctttcttcaattttattaatactttcaatttctttgttgagatttactcattaatgcaatttttaaaaattccttgaacttatttatattatttcatttagagaactttctgataaatatataataatatctgggccccacttgatatctgtttgtattggtgcctccttttttctctgatatggatcagtcttttctgtttatttgcatctctggtgatttttgcttgaagactgaacatcatamataatatgctatagtgactctggattctgtactgttcttcaaaagatgtctgaggtttctgctctaatatacaactaccttgtctggactccagctacgaaatctgaattctcatgaatgacagtttgttgttgttgtttttcctggcttccagctgcttgaaag

SEQ ID NO: 926443 - DNA, 658 bp, Homo sapiens
cccttctggctctaaccaatagacagatccttgctgttccacagtttcatgggactggaccccctcccttgggtctgctctctgttctggaaaccacgaaagagtcttgtttattccttttttgtgtgttgccatttagcatatcctttgctgtttcctaataatttgcaaatgtgtcttatatccccaaatagataataacttctttagtagtgggtatgcaattgtattcgtttcattagcctcaatgccttctacataggagttgcttgttttaaaaacaagracccaggctggggtggtggctcacccctgtaatcctagcactttgggaggcggaggtgagaggatcacttgaggtcaggagttcaagaccagcctggccaacatgatgaaaccctgtctttactaaaaatacaaaaattagctgggtatggtggcaggcaactgtagtcccagctactagggaggctaaggcaggagaattgcttgcacccaggagacggaggttacagtgaaccgagattgcaccactgcactccagcctgggtgacagagctagctagactccatctcaaacaacaacaacaacaacaacaacaaaacataaaaattaagctgggtgtggtagctcacgcctgtaatgccagcactttgg

SEQ ID NO: 926444 - DNA, 658 bp, Homo sapiens
cccttctggctctaaccaatagacagatccttgctgttccacagtttcatgggactggaccccctcccttgggtctgctctctgttctggaaaccacgaaagagtcttgtttattccttttttgtgtgttgccatttagcatatcctttgctgtttcctaataatttgcaaatgtgtcttatatccccaaatagataataacttctttagtagtgggtatgcaattgtattcgtttcattagcctcaatgccttctacataggagttgcttgttttaaaaacaagaacccaggctggggtggtggctcacccctgtaatcctagcactttgggaggcggasgtgagaggatcacttgaggtcaggagttcaagaccagcctggccaacatgatgaaaccctgtctttactaaaaatacaaaaattagctgggtatggtggcaggcaactgtagtcccagctactagggaggctaaggcaggagaattgcttgcacccaggagacggaggttacagtgaaccgagattgcaccactgcactccagcctgggtgacagagctagctagactccatctcaaacaacaacaacaacaacaacaacaaaacataaaaattaagctgggtgtggtagctcacgcctgtaatgccagcactttgg

SEQ ID NO: 926445 - DNA, 622 bp, Homo sapiens
gtggaactgtgagtccatgaaacctctttttctttataaattacccagtcttgggtatttcttcatagcagtatgaaaatggactaatacatatggctagtaggtcttggggacagtttcaccggatatgaaaagtagaccygttcaaaatgctaaagatctgcttacttggactatattttaaaaaattgtttgtggctcacacctgtaatcccagcattttgggaggctcaggtgggcagatcgcttgagctcaggagttcaagaccagcctgggcaacatggtgagaccccatctctaccaaaaaaatatgaaaattaattggacgttgtggcacgtgcttataatcccagctacttgggagactgaggtgggaggattgcttgagcttgggaggtagaggtagcagtgagctgtgatcatgccacagcactctagcctggacaacagagtgagacactgtttcaaaaaaaaaattgtttgtgaaaacaattgagtttggcactggtaggcttttgacctaatgggtcccagcctgctgtgaagaagtaatcatagggataatcaatgtacaaggatcatctttggcttattaatatcacagttgggtaagacctcaga

SEQ ID NO: 926446 - DNA, 652 bp, Homo sapiens
gctcttcatgaattactctttctctgttgcaatttccctgtcttgataaataggttctgtctaggcagcaggcaaggtgaacccagtgggtggttacaaatttgggggttcctccagggttgcccttgtggctacctgcccatggtttggtagcccccatacagtgacagatccagaggccagcccaagtggccacctagttctcttggactgggggctgacgctggtccagtgtcttctggcaaggcgctgcccacccaatgtgcatggacttaattgcaacagagaaatggacttggggagacatcccacaactgtagttccatggtggggtrtctatctatagccccatgatgaggtgtctatctgtagctctaccacggggtgtctgtctgtagccccattatggaatgtctgtctgtagccccagccaccatggagtggctatacctgtagtcctaatatggtttggttctgtgtccccacccaaatttcatctcaaattgtaatccccatgtgtcaagggtgggacctgtaatcctcatgtgttgagggagggaggtgattggatcataaggtcggtttcccccatgcttttctgttgataatgagtgagttctcacaagatctgatgattttataagtgacagtt

SEQ ID NO: 926447 - DNA, 608 bp, Homo sapiens
atcagcacagaagtatacaaaatagagactaggattaaatattttttaaaattaatgatattgggttattttttaaaatattaacaaaagtggcaaagtcttagactaaacaaaacaagacttaaatcataaatgaagaataaaacattacaactgatcacacagaaataaaatggaatgtaagagactacaatgaacaattgtacaccaacaaattaaataacctaggcaaaatgaagamattccaattttaagaaggattcatgaggccaggtgtgttggcttacgcttgtaatcccagcattttgggaggccaaggtgggcggatcatttgaggtcaggagtttgagaccagcctgaccaacatggtgaaaccctgtctctactaaaatacgaaaattagccgggcatggtggcgggcacctgtaatctcagctactcgggaggccgaggtaggagaattgctttaacccaggaggtggaggttgaggtgagctgagattgtgccactgcgctccagcctgggtgacagagtgaggcttcctctcaaaataaataaacaagtaaattaaataataaaaaaggattcatgaaaaaatagagaatct

SEQ ID NO: 926448 - DNA, 608 bp, Homo sapiens
atcagcacagaagtatacaaaatagagactaggattaaatattttttaaaattaatgatattgggttattttttaaaatattaacaaaagtggcaaagtcttagactaaacaaaacaagacttaaatcataaatgaagaataaaacattacaactgatcacacagaaataaaatggaatgtaagagactacaatgaacaattgtacaccaacaaattaaataacctaggcaaaatgaagacattccaattttaagaaggattcatgaggccaggtgtgttggcttaygcttgtaatcccagcattttgggaggccaaggtgggcggatcatttgaggtcaggagtttgagaccagcctgaccaacatggtgaaaccctgtctctactaaaatacgaaaattagccgggcatggtggcgggcacctgtaatctcagctactcgggaggccgaggtaggagaattgctttaacccaggaggtggaggttgaggtgagctgagattgtgccactgcgctccagcctgggtgacagagtgaggcttcctctcaaaataaataaacaagtaaattaaataataaaaaaggattcatgaaaaaatagagaatct

SEQ ID NO: 926449 - DNA, 436 bp, Homo sapiens
tagtatgtacagtcaaaatagcaaatgcaagtatattactcaacctcctgctgttcatgaaaggatcatcactcaaaactccaggaggatttctcctgggtacctttaaactatatccttaccaacctttatttctattttatttttctctccttggaaatgctactgattcctagatttgcagcctccctaatttccatcctctgctttctgcttgatcayggggtctactgggactctctttgtgatctgcttttcttctccaactgaaatagaacattctgaattactgacctcttcactcctaaatgaagttcgctcatttaaaatgctaccagtggtaaactccaacttattatcccacaaactgctaagcctaaataatcactgaaactatttaagtcttttgaaagcatcatatcagaatttcactgct

SEQ ID NO: 926450 - DNA, 436 bp, Homo sapiens
tagtatgtacagtcaaaatagcaaatgcaagtatattactcaacctcctgctgttcatgaaaggatcatcactcaaaactccaggaggatttctcctgggtacctttaaactatatccttaccaacctttatttctattttatttttctctccttggaaatgctactgattcctagatttgcagcctccctaatttccatcctctgctttctgcttgatcatggggtctactgggactctctttgtgatctrcttttcttctccaactgaaatagaacattctgaattactgacctcttcactcctaaatgaagttcgctcatttaaaatgctaccagtggtaaactccaacttattatcccacaaactgctaagcctaaataatcactgaaactatttaagtcttttgaaagcatcatatcagaatttcactgct

SEQ ID NO: 926451 - DNA, 623 bp, Homo sapiens
gtgttatagggtcatggagaagactttcgatgatcaattataggttttaatttaccctagcttttaaaggaataggatacactgttttttctttactacttccatctctctttctctctgactccttctttgtctgtctcttcctctctccttctctctttgactttctgtctgtctgtcttttcctctctctgtctctctctttctgtctttcccccacactctcttccctctcttttctttctgactccctctttgtctctgtcacttcctctctctctgtctctcactttctgtctctttctctctttcctttctgctggtctttccctgcctctgccagccacttatgctgcggycctcccctctccctccccttttgatggcttcagcgtataagactgccacctccttgggtttttgcactatgtacaataactccgtggtttccttgtgatatttaatgggggttcccccagaagaagttctttccattttgcagcatgggcatgtaggattagataagcatacttactatctgtagaaaagtctcccaattacaactgaggaggtgggagaaatacctggttataggctgtcccaggattccttggatagtaatg

SEQ ID NO: 926452 - DNA, 675 bp, Homo sapiens
cactgagaaagccatgccagtgtccaggaggaagtcaatttcctggccctcaatggttaaacatacccagggctcagtgagggtgatgacatgagctggcgcttgccccaggcaccctcagtcctgttgtttgatcctggttggggacttctggcccagagaacctttgctgtctggggcagtgcaccttccagtgattgcctaggcatagtggtcatgggcgagggggcagcttgtttctcggtggacgatcttttttaaagtgtccttacaaamcgcactgataacaagccctaccaggtgattggcctgctctattttctgtcctccctgaaccaccaaggtttgtttgtctgcgggccatgactaaggctgcagcctttctctgatctcacttttccttttgggcctgttcctcttggtccctattatagaacaccggggttgccaggtttaataatgcctccagattttgttcagggcccagggcttgcttttggagctttctcctgatatttgcggctgattgggtaataaacatatcttttaggatcaattgacccgtgagtgagtcagatgacagggaagtctattttcttaaggcctcccatagctgctcgaggaaggcagaaggattttcttcctttccctgagttatggtggacatcattgaat

SEQ ID NO: 926453 - DNA, 621 bp, Homo sapiens
gctaccttgaacttctagtgtgccccagcaccatacctgctacagggccttcctagacaaaaccagtctgtaaaaattggaataaggacctagtctttcaaatactcagacatcaacactcaaccacagaatcaagaacaatcaggaaaacatagcatcactaaatggacaaaataagaagacagtggctttttattgaaattgagatatatgaactaccagacaaagccattcaaaacattccatccaacagctatagaatacattcctctccactggatatggaacatcctccaggtttgatcatatgttaggctacaaaacyattcttgacaaatttaagaagatgaaatcatatcaagtatcttttctaaccataaccgtataaaactagaaatcaataagaggagcaatttctgaaaactcacaaatatgtggaaattaaacaacatactcctgaacaattttaatgaaaaaatgttaaagaaattttaaaattgtggggacaaatgaaaatggaaacacaacatatcaaaacctgtgggatacggcaaagcagttctaagagaaagtttatagcaacaaataaatacgtaagaagaaaaatctcaaatacactac

SEQ ID NO: 926454 - DNA, 651 bp, Homo sapiens
tacagtgagggctacaaagcagaatcggcaaagcaaagaggcacatgggacaaaatccagaggaaaccaggctcccgagtgtcctctcccggcagagtcacccaggacatgtggaattcccccagcagcaagtgataaaaaacacacacgaggtattggctgctgtggaagatcattacaaactcagtgcttggggtgtgtgtgtgtgtgtgtgtgtgtgtgtgtgtgtgtgtgtgtgwgagagagagagagagctggtcacataggcatcctctccctagcatattccaaaatatgcattaaacagtgccgagaaaattggctcactgcttagatggaaggaaattgcaagcttccaggctcccagaaggacagcaaagcttcagcataagccatgttgtctgtacaagccataaaggcatgtgagccactcttatcagctctgggaatgtgggtggggggtgccttccacatccaggttccagatgctagccaacggccaatgtagcaggcagatcctaaagatggcagtttcggacgtgtcatgttaactctcttctgtacaccctgaaatcctggcttcagccaacacgacacctgtatgtacatatgtcagggtaccagtcccattcactgctttttatctcaata

SEQ ID NO: 926455 - DNA, 589 bp, Homo sapiens
aacatgacaatgaatttattccctgaataagaaataatcttataaaataagaatctttccatttctttttagatagtctatgttagcagtattataaaaatatcatgggtaaaaggcacctgaaacatgttaataatacaytgcttatattggtattttttaaaaatacataaagctctacctgacattggtaagactgatttcccagtctacctgacttgggtaagactgatttccatacatatgcatgcatgtacatgcatacaagtgtgtacatagagaaagaactacattttaagaagaaaaaatctatagcaaattttataagttaaataagtccttatttactaataggttgttttatcaaattacagaataccatgaatagttgctttttttattccaaaacaacatataaccctaaaaagtttctatgtatgtaaaaagaaatgtgatcatagctgggcacagtggctcacacctgtaatcccagcactttgggaggccaaggtgggtggattgaccacttgaggtcaggagtttgagaccagcctggccaacatggtaaaacccagtctctactaaaaat

SEQ ID NO: 926456 - DNA, 690 bp, Homo sapiens
ctactatatgcccaagcagaggtgacaagtacactagacagaggaatgcccagtccaagtcaaggtctgcagatgggaagagctttgagatcagacaggaagaacttttaagggagggaactgtattaggactttttggttcaaagtgctgaattagaaagctaactcaaaatggcctaagcaagaaaggcagtgtgttagctcatgtaactgaaaagacctgaggtaggtattcaggtatggcttgatccaggtggtctctcttcttccctctcaattactctttcttctttttttttttttttttttttttttttttgagacggagtctaactgtgtcrcccatgctggagtgcagtggtgtaatctcagctcactgcaacctctgtctcctgggttcaagcgattatcctgcttcagcctccctactgggacaacaggcgtgtgccaccatgcccagctaattcttgtgtatttttagtagagacggggtttcaccatattggttaggctggtcttgaactcctgacctcgtgaactcccagcctcagccttccaaagtgctgggattacaggcgtgagccaccgcgcctggccataatcactctttcttaatgccttatatcttcttccctcagtgtcgacttaacgctcatgcaggctccccccatgagaggcaaacatggctcc

SEQ ID NO: 926457 - DNA, 566 bp, Homo sapiens; identical to SEQ ID NO: 919592

SEQ ID NO: 926458 - DNA, 639 bp, Homo sapiens
atcatcagtgtctgtgattttttcagtggcttagggtgcatttgttagtgaaggtggtgatgaggttgtgctggagacaagaatatcaagtgggccagtccttggccccagtggtggtggtgggcctagcattcctgtccttgggccccatggctgtgtacattggcactgatggtaatgagtctagttgggttgattctttggccttcaggcagtttgcttgggtgtcagtagtggccatagtagactgggctggtgtgtgggtcctcaggcttctggrcagtgggtgtggtgtgggtgatggctgtagcaactgcaggacaaccctctggctcccaagcagtctgcactggtgttggtggtggctgcaagggctgaatgagccagtcttcagacccacaggtggcacatgcaggaggtgccagttgtgatggcagtggcagattgggtaggcccatcatcaggcttctgggagggttgcttaggtaccagtcatggtggatggcacaaggctgtctctgggttcccagacaacttgcttaggcattgaggaaggcaaagccaggctgggtgttcctgacctcaggccactcagtggtgtgtgtggacaccggctatcataggctggagtggagtgat

SEQ ID NO: 926459 - DNA, 573 bp, Homo sapiens
gggtgcagtggctcacacctgtaatcccagcactttgggaggccgaggtgggtgtattgctttaggtcaggagtttataaccagcctggcaacgtagtgaaacaccatctctactaaaaataaaaaaattagccggatgtggtggcacatgcctgtaatcccagctacttacgaaactgacacaggagaatcacttgaacttgggaggcagagtttgcagtgagccgagattgaaccagtgcactccagccttggcagcggagcaagattctgtctaaaaacaaacaaacaacaaaacaaaaactctttaagaatagttttctccctacagtggccgattgttcagttacagaacagagrtcattacatcgtctttttaaatagggatagcatcagaccataatctttttatttttttgtcaattttacattgaagtgacatcctcactctttcttgagctttctatttcccatctcttatgaaagaaaacaaagtatcattattaatcatataactccaaaagattaaagatgccagagtaaaacacatatatagatatagaaatctccaca

SEQ ID NO: 926460 - DNA, 573 bp, Homo sapiens
gggtgcagtggctcacacctgtaatcccagcactttgggaggccgaggtgggtgtattgctttaggtcaggagtttataaccagcctggcaacgtagtgaaacaccatctctactaaaaataaaaaaattagccggatgtggtggcacatgcctgtaatcccagctacttacgaaactgacacaggagaatcacttgaacttgggaggcagagtttgcagtgagccgagattgaaccagtgcactccagccttggcagcggagcaagattctgtctaaaaacaaacaaacaacaaaacaaaaactctttaagaatagttttctccctacagtggccgattgttcagttacagaacagagatcattacatygtctttttaaatagggatagcatcagaccataatctttttatttttttgtcaattttacattgaagtgacatcctcactctttcttgagctttctatttcccatctcttatgaaagaaaacaaagtatcattattaatcatataactccaaaagattaaagatgccagagtaaaacacatatatagatatagaaatctccaca

SEQ ID NO: 926461 - DNA, 653 bp, Homo sapiens
tttggtttctaatttcatgtattgtctcccacttaattacagaggttctatcaaaagttttaccactttttttttctttttgtttcatctgctagtttctatcactatattttaagttcatggattgcctctaacataatttctaacctgcttctatttcttaaagtatttttaacttgagatattatattttttcatctccagaagtccatttgaatcttttaaaaatatttyccacatttctattcattatttcatgctttcttttaaattcttgaacattaaaaactacctagattatttaaagttttttcctgctaagatcatatctgtcatttctaggtatgtttctgttgaccagttatatattatattgtttctatttttcttctgttaatgtgtcacattttcctgcctctttgtatgtataataaatttttactagattgtcattttcatgctttcaagtgctgtattttattgtatttctttaaatggtattggcttttgttctggcaattagttaaattacttgtgatcagttttatccttttaagccttgttttcaagctttttaagagaaggtttagagtaatgttactctaaagactgtttagcaccactatcgaggcatgacttttctggagtcttta

SEQ ID NO: 926462 - DNA, 653 bp, Homo sapiens
tttggtttctaatttcatgtattgtctcccacttaattacagaggttctatcaaaagttttaccactttttttttctttttgtttcatctgctagtttctatcactatattttaagttcatggattgcctctaacataatttctaacctgcttctatttcttaaagtatttttaacttgagatattatattttttcatctccagaagtccatttgaatcttttaaaaatatttcccacatttctattcattatttcatgctttcttttaaattcttgaacattaaaaactacctagattatttaaagttttttcctgctaagatcatatctgtcatttctaggtatgtttctgttgaccagttatatattatattgtttctatttttcttctgttaatgtgtcacattttcctgcctctttgtatgtataataaatttttactagattgtcattttcatgctttcaagtgctgtattttattgtatttcttyaaatggtattggcttttgttctggcaattagttaaattacttgtgatcagttttatccttttaagccttgttttcaagctttttaagagaaggtttagagtaatgttactctaaagactgtttagcaccactatcgaggcatgacttttctggagtcttta

SEQ ID NO: 926463 - DNA, 422 bp, Homo sapiens
ctattctaggtggttagaacttaaatatttcccagacctgtgtaaaatctaggaactatttatcttacaaattcacaacactttttttggtctagcctcatagggttctatcctcatgaggcagcataatagtcaacagtcatttaaatggaacccctaatgcgtatttttagagctctttatgcatttcccactttctgagtattcttcyctaaacatgtctggcacctcagcctccctgaactcttttctctgtcttcttgattcagccagtctgccatgctttatttggtatatcccccctacactgagctgcataaaagtctctaagcagagaacaaagactgtcgtagaactcacatcattcatttgccttctctcaggaatcagtcctctgatgtctattgaccactgcctaaaaa

SEQ ID NO: 926464 - DNA, 843 bp, Homo sapiens
tcagtaacttgcaaatgatataacttgtactccaagtccatactctttccagagtgtggaactcatgggggaagctccaaggagacagattctagtttggcaaaagtgacctttcctggaggttggagccatttagaagtagagagagtgcgattgacagtgaacctcctagccctgaaggtgggcatggagatatgaggaggggagtcagatgttacatacggcttggggacacgtgacagggactggattggggctccttaggaatctgatttgggtgttgttcccttgtgagtttccacatggggtgtgcaaaggagacacgtgtacatgtgcgggcggccccaacctccccagaggctccatccgctgctgccaccttccccacggcgcataggtctggctcatgccctggcctacccacgagtttcttttgtcacatgagggtctcagctcaggcgaggcccccatgtcagcttgcttggcttttctggttgcctctttacggcaaccctgggaaaagctagtcagaaagagctccctagatggagagcaccggaatagctgcaggtgcagtgggtgacagtttttgagacaccgtgggagcagggctggaacccagccccattgatctgcgctgtgggaccctctcacatcagacgatgggatgagacagggtgctggccttcaggtgckcagagaaggcctggctgcatgagggtgcccggggctgacgcctcttctcttgcccgggtttattgggcatctgtcatagaatgccgtggggccaagacatcatggagtatttttagtttccaaaactgctgtttccaaaactgggag

SEQ ID NO: 926465 - DNA, 626 bp, Homo sapiens
ccaggtgtcaggttccactttgagctggggcccgaggggagtgggtggacgggtggcaggtagctgaaagaacactcgagggaccgtaggcagttgggacatggctttattctctctctctcctacagagtcagcagtgcagttatatgacttatagacaatagtggctcaaagccaggtataagctcacacaaacaggttactttaaatggctacataaatatgatcacataatgcacagagttgtgtgcctgtgctctagacccgctgtgtcatgctgtactggatgtctgcctcggcctgctcctgactgaagcacagccatkctttttacactccatcctctagaccgggagaaaatgtgcccacagggaggaaccctgaacttataggtcacagtagcaatacagggagcaacaactcattactaatactcccatggtgctgcctataattattagggtccagcacaggccagagcccagagacacccaccgtgtctgtaggaggttgtcaataaggctctcaactgccttgatttcctggggaaccccctgcaaagctgctgttacgttttgttgattgtcagggatgaaagtacaacattgagttccccaaagagcaca

SEQ ID NO: 926466 - DNA, 590 bp, Homo sapiens
ctccgacccctgcagtccaggaccctggtctctgctgtccacctcagtgagaaatgaccaattctttacagagttgcatgggacaacattgcctccccatccagcctggcctcgggcagccttctaccccccttgtcctctcaaggtgagggactcttctccacacctctgcaggactgcatgagccaccaccagcacagtgatgcctgtggcatgcgggccttctgccccctctcaatggcaagtctaataaagccaagttcagggaccacaaccaygatgtgtacagagtggtcaccattgctgaactcccttaaccacctggaaggcaggcgtcccggcccaggcttaattgcattctctaatgaatgaagacaggattctgggttttgttgctgttgttgtttttgagacatagtcttgctctgttgcccaggctagagtgcagtggtgtgatctctgctcactgcaacatctgcctcctgggttcaaactattctcctgcctcagcctcccaagtagctgggattataggcgcccaccaccacacccggctaatttttggtatttttagtagagatggggtttca

SEQ ID NO: 926467 - DNA, 604 bp, Homo sapiens
tttgggaggtagaggcaggaggatcacttgtgtccaggagttcaacactggcttgggcaacatagtaagaccccatctctacaaaaaatcaaaaattaactagacatggtggcatgcacctgtagttccagctactcagtaggatgaggtaggaagatcacttgagcctgggaggtcgaggctgcagtgagccatgattgcaccactgcactccaggcaggacaacagagagagaacttgtctcaaaaaaataaagtaaaaaggtggcaagaacaataaaaagttatgcatttatacataatattaaatatataatatatgacatacttaatatgttcaagaagacagaggagagattgagcatgttaaatgaaggcatgatagatgtaaaaacaagagacttgaaaagactcaaattcaaagagcaagataaaactacaacaaaatggaataataaccaattagaygctgcagaggtaatgcacagtgaacttgaagttagacaatagacactatcaaaaatgaaacacagaccaggcacggtggctcatgcctgtaatcccagcactttgggaggccgagttgggtggatcacctgaggcca

SEQ ID NO: 926468 - DNA, 480 bp, Homo sapiens
aaaataaaaatccagcaacattaaaaaaagggctaaatatcatgacaaagtgagatttatgtgatcatgatatctacagggctcctgcctcccttttgttctgccatgacctttcaaaccaatgtacaccactagtcatagttkggctgtgtagtcccttcatttgcacactaataagtggataccttcatatttatcataatagaattaggttaccttgtcatacaccctataccacaccctatctccaaccaattggatataggatgtatgacataaagtaacttaatcctattgagattatgagtatcaaaaaagattaaggatactctaaaaggagcagaaagcaagagaacttccaatttcaaccttaatgttgagagtttaaataactgacatggattttgaaccaagtggaaaaggtaggtgagcaacgagcctagattctaagtttactaaaaacaagggcttaaaacgatc

SEQ ID NO: 926469 - DNA, 765 bp, Homo sapiens
aaccttggaggaagggaactgggtgtccaggaaggagatttaaattccactctacctttttgtactttgtgatttttttaaaccatgtgtgctgctttaaaaattaataaatgatcttaaaaatagagcacagactttgccatcaattcatttattcacttaaatatttattgagcatcaattatgtagcaggtactgatataggaaatgctaaataagataacctctgcccttaggaagcctacattctagataataacaaccaaatgaatacatgaataaatatgtagtataatatcagatagggataaggggcatgaaatacataygacagacttgaatgcgaagcctggctttgccacttagaaattgtttgaccttgagtaggtttcttcaccttttcgatccttaatttttttcctctctcaaatggggttaataataagtctacctcatgggtagttataagaattaaatgaaacgagtaacaggacttgggatgtaatatgtgcttaataagtgttagttattgttgtgtttaagattactaggggagaagtctggaggagaatggacatggccatgagctttatagggacttgaaggaggtggggatgggcagacatgtaggaaacagagcaaggagggtggatctaggaagaggtgaacaaactgggctggttgaagggagcaggtggtgatacataagaagaggaggggtgtgagggacccagcctgggaaagagaggtgggtttggagcctta

SEQ ID NO: 926470 - DNA, 572 bp, Homo sapiens
ggtgtgtgatgttcccctccctctgtccatgtgttctcattgttcagctgccacttatgagaacatgtgatgtgtggttttctgttcctgtgttagtttgctgagaatgatagtttccagcttcatccatgtccctgcaaaggacatgaactcattcttctttatggctgcatagtatttcawggcatatatgtgccacatttttttttaatccagtctatcattgatgggcatttgggttggttccaagtctttgctattgtaaatagtgctgcagtaaacatacatgttcatgtgtctttatagtagaatgatttataatcctttgggtatatacccagtaacgggattgctgggtcaaatgtatttctagttctagatccttgaggaatagccacactctcttccacaatgattgaactaatttacgttcccaccaacagtgtaaaagtgtccctatttttccgcatcctcttcagcatctgttgtttcctgactttttaatgattgacattctaactggagtgagatggtatcttatagcggttttttttttttttgagacagagtct

SEQ ID NO: 926471 - DNA, 579 bp, Homo sapiens
gttgttgttacagtaggtagctagttagatatgagcaggggaggagagggaccccctgcttttaaaataataattggtcccagccagcaccagggaaaggcagtctcccaataaactaaaacacctgaaactggtgatcgccagcttyccaataagatctcagtagctgggccagtaggctcaagcatgtgcattaagagaaaaaatggcagagtttaactggtatatgacctcctagggacatgtgacccgtaagggaataacacctcaagtgagcatgcatacatctccagaaacagactgcacatgcccctcttccaagtgctagcaggtcactgcacatgcagacagcccggccaaagggaagaatcaggaaagaaggaatgcaaaaccccaaaaacatgccagtatataaaacccaagacaaaaggtcaaactgtgcacttgatctctgaagtcgcccgcttggccctcttccaagtatactttacttcctttcattcctgctctaaagctttttaataaactttcactcctgctctaaaacttgctttggtctctccttctgcaccatgcccc

SEQ ID NO: 926472 - DNA, 579 bp, Homo sapiens
gttgttgttacagtaggtagctagttagatatgagcaggggaggagagggaccccctgcttttaaaataataattggtcccagccagcaccagggaaaggcagtctcccaataaactaaaacacctgaaactggtgatcgccagctttccaataagatctcagtagctgggccagtaggctcaagcatgtgcattaagagaaaaaatggcagagtttaactggtatatgacctcctagggacatgtgaccygtaagggaataacacctcaagtgagcatgcatacatctccagaaacagactgcacatgcccctcttccaagtgctagcaggtcactgcacatgcagacagcccggccaaagggaagaatcaggaaagaaggaatgcaaaaccccaaaaacatgccagtatataaaacccaagacaaaaggtcaaactgtgcacttgatctctgaagtcgcccgcttggccctcttccaagtatactttacttcctttcattcctgctctaaagctttttaataaactttcactcctgctctaaaacttgctttggtctctccttctgcaccatgcccc

SEQ ID NO: 926473 - DNA, 655 bp, Homo sapiens
gcctatggactagagatacatggttgatgctcctggttctcaggcctatggacttgggttggagctacaccattagctctgcaggtctccagcttgtcaattcacccttcagagcttaggacttgccagcctccataatcagtgagtcagtttcttatagtaaatctgttgtctgtctaatctatcatctatccatgtatccacaccctatcagttctgtgtttgtaaaggttcctgactaatacctgtaccayttcttctatctagactgcctttttccttttcttggcctgactcactcatttaaatcctttaagtcttagctcaaatattacttcctcaaagaatctgtccctgaacaccttaactaatatttactacttatgctatgaccctccatccctttatcctatatttttcaatagaagttaccactatctgaaaccatataacttaattatcttttaattatattttctttagaaccccttaatacttaagctccattagatgagttctaatcaattagattagggttcttctccatcttgctcatttatgttttcctatccctgagaattgtgcctggcataaatagatgcccccaatacttttatgaatgaataattgaagtactcaagaggcccaaatgaga

SEQ ID NO: 926474 - DNA, 585 bp, Homo sapiens
agtccctccttgttttttgttagtttgtttttgagacagggtctcactttgtcacccaggctggagtgcagcggcacgatcttggctcactgaaacctccacctcctgggctcaagcaattttttttttttttaagatggagtctcactctgtcgcccaggctggagtgcagtggtgcgatctcagctcactgcaagctccgcctcccgggttcacgccattctcctgcctcagcctcccgagtagctgggactacaggcgcccgccaccacgcccrgctaatgttttgtatttttagtagagacggggtttcaccgtgttagccaggatggtctcgatctcctgacctcgtgatccgcccgcctcggtctcccagcaaagtgctgggattacaggcatgagccaccgcacccggcctcaagcaattgtttcacttagctgggaccgcaggcgtgcaccaccatgcctggctaatttttgtattttttgtagagacggggtttccccatgttgcctgggctggactctaactcctggcctgaagccatccgcctgcctaggcctcccaagtactgggattaccag

SEQ ID NO: 926475 - DNA, 542 bp, Homo sapiens
ccatgttggtcaggttggtcttgaactcctgacctcaaatgatccacttgcctcggcctcccagagtgctgcaattacaggcacgagccactgcacccagcctaatttttgtatttttagtagagatgaggtttcaccatgttggccaggctggtcccaaactcctgaccttgtgatctgcctgcctcagcctcccaaagtgctgggattacaggcgggagccgccgcacccggccgagtttaactattttagatatatcayacaagtggaatcacgcagtatttgtcctctttgactgtcttatttcaccggaaaacagtatgagtttactaagaaaattaaaaatagaactaccatatgatccaacaatcctacttctgggtatatgcgaaagaatcgaaatcagaatcttgaagcgatatctgcattctcatgtttattgcagcattactcacgacagccaagatatggaacaacctaagtattccaaatccacagataaagaaaatgcggtgtatacctaaaatggaatagtattcag

SEQ ID NO: 926476 - DNA, 613 bp, Homo sapiens
gatgtactcacccaggctagagtacagtgccatgatcttggcccactgcaacctccgcctgccggattcaagtgattctcgtgcctcccaagtagctgggattacaggcacatgtcaccatgcctggctaaatttggtgtttttagtagagacagggtttcgccatgttgtccaggctggtctcgaactcctgacctcaggtgatccacccacttcggcctcccaaagtgctgggattacaggtgtgagccactgcacctggccacacacacacacacacacacacacacacacacacctagaaataaatacatataawtttttttcttttttttaaatagagacgaggtcttgctatatcatccaaactggtcttgaactcctgggctcaagttatgcacccaccttggtcccccaaagcactgagattataggtgtgaaccaccacgccccagcctgaattctttgaaattaagctgcaccatcttggagtcatgtcacattgctatttgagggtaaaaggatccaaaggcatctagaaaggttgaagctaatgggttgctgctcggtgagggaaggagggacagcctgctctggagaccatgactgtaac

SEQ ID NO: 926477 - DNA, 597 bp, Homo sapiens
ggattgccccacccactcgcgtggccttctgggaaatgtagtcttttgaaagaagcctggaattcgccaataggcggacgagagtttggcgcatgcgcataggcgcacatgaagcaaaaagggaagtggtgcccgtcaacaccggaacccagaaaactgcaagtttagggtaccggggaaattcaacgtccactggaggaagagacttaaggctacgcccactcccatattttgacccggaagttatttattttagcgtagaagactacttttcccgacgcgccccaggaaagtgccctcgatcagtttcctaagggcccgagttagmctttttttttctcttccagcttttgggacttgggggccggacaggtcgtcgtctttcttggggtatccggggtgcggacaaggtgggagagccctacggtatccaagcttaggatctctcagcctctctctaatctcggactggagaggagaccctggctgagagaaatgaactcacctgctcaaagctcctgcgagcaagtggcggaccttggacctgaaccgggtacttgtgatcgcaacccggtacttgtggcccgttgcaaggag

SEQ ID NO: 926478 - DNA, 662 bp, Homo sapiens
gtgtaatacttaaaataatggaaggaggagccaagatggccaaataggaactgctccggtctacagctcccagtgtgagcgacgcagaagacgggtgatttctgcatttccatctgaggtacccggttcatctcactagggagtgccagacagtgggcgcaggacagtgggtgcagcgcaccgtgcgccagccgaagcagggcgaggcattccctcactcargaagtgcaagggatcagggagttccctttcctggtcaaggaaagggatgacagatggcacctggaaaattgggccactcccaccagaatactgtgcttttccgacgggcttaggaaacagcacaccaggagatgatatccctcacctggctcggagggtcctatgcccacggagtctggctgattgctagcacagcagtctgagatcaaactgcaaggcagcagcgaggctgggggaggggcgcccgccattgcccaggctcccttaggtaaacaaagcagcctggaagctctaactgggtggagcccaccacagctcaaggaggcctgcctgcctctgtagcctccacctctgggggcagggcacagacaaacaaaaagacagtagtaacctctgcagacgtaaatgtccctgtctgacagctttgaggaagcagtgga

SEQ ID NO: 926479 - DNA, 662 bp, Homo sapiens
gtgtaatacttaaaataatggaaggaggagccaagatggccaaataggaactgctccggtctacagctcccagtgtgagcgacgcagaagacgggtgatttctgcatttccatctgaggtacccggttcatctcactagggagtgccagacagtgggcgcaggacagtgggtgcagcgcaccgtgcgccagccgaagcagggcgaggcattccctcactcaagaagtgcaagggatcagggagttccctttcctggtcaaggaaagggatgacagatggcacctggaaaattgggccactcccaccrgaatactgtgcttttccgacgggcttaggaaacagcacaccaggagatgatatccctcacctggctcggagggtcctatgcccacggagtctggctgattgctagcacagcagtctgagatcaaactgcaaggcagcagcgaggctgggggaggggcgcccgccattgcccaggctcccttaggtaaacaaagcagcctggaagctctaactgggtggagcccaccacagctcaaggaggcctgcctgcctctgtagcctccacctctgggggcagggcacagacaaacaaaaagacagtagtaacctctgcagacgtaaatgtccctgtctgacagctttgaggaagcagtgga

SEQ ID NO: 926480 - DNA, 662 bp, Homo sapiens
gtgtaatacttaaaataatggaaggaggagccaagatggccaaataggaactgctccggtctacagctcccagtgtgagcgacgcagaagacgggtgatttctgcatttccatctgaggtacccggttcatctcactagggagtgccagacagtgggcgcaggacagtgggtgcagcgcaccgtgcgccagccgaagcagggcgaggcattccctcactcaagaagtgcaagggatcagggagttccctttcctggtcaaggaaagggatgacagatggcacctggaaaattgggccactcccaccagaatactgtgcttttccgacgggcttaggaaacagcacaccaggagatgatatccctcacctggctcggagggtcctatgcccacggagtctggctgattgctagcacagcagtctgagatcaaactgcaaggcrgcagcgaggctgggggaggggcgcccgccattgcccaggctcccttaggtaaacaaagcagcctggaagctctaactgggtggagcccaccacagctcaaggaggcctgcctgcctctgtagcctccacctctgggggcagggcacagacaaacaaaaagacagtagtaacctctgcagacgtaaatgtccctgtctgacagctttgaggaagcagtgga

SEQ ID NO: 926481 - DNA, 747 bp, Homo sapiens
tgagggtccggaagatatactgttgataaatatcttgtgaaatagatttgtgagggcagcacctgcatctttgaagagccctataattgctcttctctgtatgtcagacttaatggtgggaactgcagtcactcaactacacaatttgaatacaatgggaatagttggatcctgagatggcaggggccaagtggcagtagcactcaaccatcaaaggcaaggtgggcatagctactgtaatggacagcagaggcaaagtggcaatcagaatagtctgactcatgtagagctctggcattgactaattaatcacggtgttcctaggagtgaaatgaataggaagcgtacttcattcctacttaatttatacaagctgaaaccttctaggtcaaatggacaaaagactaatttgaattataaaaatggaatcacggcccctcaatcaatttccagacttgakccagtttacagacctagaacccctggaatgaagggtaggccaggtccccttgaggaaggagcccactacattactgacaatttatgcagcaaatctttatcccatccttccccaaggagacttccagtcttttaccagggtaactatgcactggggaaagggaaatgatcagacatttcaggaactgctggacattggctctgagctgacattgattccaggggacctaaaatgtcattgtggtcctccagttaaagtagggggctatggaggtcaggtaatgaata

SEQ ID NO: 926482 - DNA, 680 bp, Homo sapiens
aatttacctttaccattctacctcaggggtatgtcgactctccagctttgtgtcataatcttattcggagagaacttggttgcttttcacttccacaagatatcacactggtccattacattgatgacattatgctgattggatccagtgagcaagaagtagcaaacacactggacttattggtgagacatttgtgtgtcagaagatgggaaataaacctgactaaaattcagggacagtctacctcagtaaaatttctaggggtccagtggtatggggcctgttgagatattccttctaagataaargataagttgctgtatttggcccctcctacaaccaagaaagaagctcaatgcctagtgggcctatttggattttggaggcaacacattcctcatttgggtgtgtttctcctgctcatttaatgagcgactggaaaggctgtcagttttgagtggggtctagaacaggagaaggctctgcaagaggcccaggctgctgtgcaagctattctgccacttgggcaatatgacccagcagatccaatggtgcttgaggtgtcactggcagatagggatgctgtttggagcctttggcaggctcccacaggtgaatcatagaggaggcctataggattttggagcaaggccctgccatcttctgcagataactaacta

SEQ ID NO: 926483 - DNA, 577 bp, Homo sapiens
gagccatgtgctgccagtctgagctttttattttgttttacttagaaagatagagacagggtcttgccatgttgcccaggctggtctcgaactcctgggctcaagtgatcctcctgcctcggccttccaaagggctggggttacaggcatgtgccaccgcactcagccgcagccagtctgttttcaaagatggtcttgggttaatgacaattctctctctgcttactctccaggcagtgtggctttctgaatccaaggaggctgggcatagggagatgggattgtttgctcagttggactcagcatttttgtactcgatttaatagactcataaaatgtcaaaggtttaagtgagcttagagttcgtctggcccaaacctggctgatcagaatctccaggggaagttttttttgaaatgccagatctctgcrttctgatatcctgatttagtaactccagggttggaacctgagttttttttttttttttttttttttttttgtgaaggcagggtcttactctgttgctctggctggagtgcagtggtgtgatcacagctcactgcagccttgaatt

SEQ ID NO: 926484 - DNA, 577 bp, Homo sapiens
gagccatgtgctgccagtctgagctttttattttgttttacttagaaagatagagacagggtcttgccatgttgcccaggctggtctcgaactcctgggctcaagtgatcctcctgcctcggccttccaaagggctggggttacaggcatgtgccaccgcactcagccgcagccagtctgttttcaaagatggtcttgggttaatgacaattctctctctgcttactctccaggcagtgtggctttctgaatccaaggaggctgggcatagggagatgggattgtttgctcagttggactcagcatttttgtactcgatttaatagactcataaaatgtcaaaggtttaagtgagcttagagttcgtctggcccaaacctggctgatcagaatctccaggggaagttttttttgaaatgccagatctctgcattctgakatcctgatttagtaactccagggttggaacctgagttttttttttttttttttttttttttttgtgaaggcagggtcttactctgttgctctggctggagtgcagtggtgtgatcacagctcactgcagccttgaatt

SEQ ID NO: 926485 - DNA, 566 bp, Homo sapiens
tcactgcaagctccacctcccgggttcacgccattctcctgcctaagcctccctagtagctgggactacaggtgcccgccaccacacccggctaatttatttttgtatttttagtagagatggggtttcaccatgttagccaggatggtctcgatttcctgacctcatgatccrcctgtctcggcctcccaaagtgctgggattacaggtgtgagtcactgcgcccgacccaccctgtattcctaaagtagccctagcattcactagctgtgtggtctcagacaagtcacttagcctctaaggaatgaaatttctaggagcacaagagcatagggctgtcacatagcatgtggcagttattaggatgcaattagcatcaccatttctttcctccacacccacaggtgtagaaccagggcacgtgagcattgtttaaaggagagcttcaaagatgatgtatctttagagcttgatgccacctgcctttgcctacctgttgcttggctacagacctggctcccctccaacctcccatttctaacgctacatcaaaggctgtgcttctc

SEQ ID NO: 926486 - DNA, 608 bp, Homo sapiens
actaccagaacctgggaaaagaaatacctgaaagaataagagtatacattgaagtttatttttaaagccagattcatgcctgttcctgccagacagagtggaaaactttacaattcttgaagtactgggaagagtgtgcagaatgatgttgcctcagtagtggggaattattagctctagattaaaatcttgctctcgtgccacctaataaatcagacctgaaaggatcaaagcattcccaagtaacttaacaaaactgcagaacaatggttcaaaaatatatattagaacacaaaattatctagcattcaacaaagtaaaatttactatatctggcatcaaatcaagaattatcaggcatgtgtagacttaatgttttccccgttagrtcaggaacaaggcaagagtattcactctcatcacacatttgacatagtactgggaattctgcccgataaaataacacaagaaaacaaaattacaagcataaacatacagatcagaacgggaagaaataaaagtgtctatatatgtgcatgatatgaatgatttgctatgtagaaatgcaaaggattttataagaaatgcctagaactggagtgatgtca

SEQ ID NO: 926487 - DNA, 591 bp, Homo sapiens
gaacatagtttattctttaactataggggtacatgatttaaccctcatctggcatggccttaggtcttttttataatttagtatcttattgacacaaagagtctatcctattagtctcatgatctctattttaacatcttgattcattgcagtgtgtagggtggccatgtgccttaaagatggccaccccatggtgcctggctggaggccagtgtgcaytggaatatgccaatgctgtgcagtagggcaacagtcccccagttgacctgaagggccaaactatctggtcagaagtagggagggcaatgaaagctaactcctggaaagcttcctgggggagaaggtagggtccctggagccaaactatctggtcagaagtagggagggcaatgaaagctaattcctggaaagcttcctgggggagaaggtagggtccctggaaaatgtttccaggttctagaagcctaactggtgcagagtgggtgacatgtagtggggagggagcataggtgggggaagaggggtgtatcaatgagtaaataaaagcaaggtgaattttaatactctgaatctggtggttgggctgcagga

SEQ ID NO: 926488 - DNA, 591 bp, Homo sapiens
gaacatagtttattctttaactataggggtacatgatttaaccctcatctggcatggccttaggtcttttttataatttagtatcttattgacacaaagagtctatcctattagtctcatgatctctattttaacatcttgattcattgcagtgtgtagggtggccatgtgccttaaagatggccaccccatggtgcctggctggaggccagtgtgcactggaatatgccaatgctgtgcagtarggcaacagtcccccagttgacctgaagggccaaactatctggtcagaagtagggagggcaatgaaagctaactcctggaaagcttcctgggggagaaggtagggtccctggagccaaactatctggtcagaagtagggagggcaatgaaagctaattcctggaaagcttcctgggggagaaggtagggtccctggaaaatgtttccaggttctagaagcctaactggtgcagagtgggtgacatgtagtggggagggagcataggtgggggaagaggggtgtatcaatgagtaaataaaagcaaggtgaattttaatactctgaatctggtggttgggctgcagga

SEQ ID NO: 926489 - DNA, 615 bp, Homo sapiens
gtcttaatttcttcttaccgttagagcactcaataatcatattaagttgtgtgattgttttgcttagcttttttttgttgtttgtttctgtttttgttgttgtttcagtctttttcccattgagtttgaccaactgtatctgacatgatcaaatccaaaggaaagttccaaattatggggtacaaagcctctaaagtggctaaattcccacaaaaaagggctttatttacataacaaggccacttttttgctagccgggagaaaccaaaaaagcaatggctgtctcccaggctacagttccatagctaagattatgccgtgttttttcaccagcctgggtttggttcctaagtcaagctctggtttgatacctggtacttctgaagtagcatcaatttgtcctakctgaaatatggtaatgagatttaagaatattttttaaaggagctcagtggttaaaagtcagcttaattaaaagctaacatccaagatgtgtgtgtatgtgtgagtgtgtgtgtgtgcgtcttcgtatttaaaaggccttcatatttttgtttttgtttttcctctcctaggaccttgtctttgttgagcaaaagttttttcttctcattt

SEQ ID NO: 926490 - DNA, 622 bp, Homo sapiens
ccccctgctgcctcatccccatctggactttgggcacacatgggcacaggagggagtccaagggagtactcagggtggctctgtgtgggcctgcaggcaccctttggcaggaacagcctgggcaccatggacaacatgattggtggtggcaggaggcagacaggctcctgggcagaaaggggcaggtccctggtgaagctccaccttcaagctggggttggcctgaagcctgggaaccagrctgtcagttcctagtggccccaagtgagaacttattgtacattttccaggcccacccatggtcacctgtggaccaatcagcatgcacttcctcccttctgagcccataaaaaccctggacccagccaggctcacacaggcatcaggactatcagctgtgggaaggagtcacccaattcaggtctcctcagctcattaggttgatttgcctgcataaaggagctgtccactcagtccactcagtggagagtgtcttctctccactgagagctggacacttattgggacaacctgcttgcagaaaggaactacccactctgggtctcctctccactgagggctgcgctcatcaggatgacctgcctgcagtaaggagctaacc

SEQ ID NO: 926491 - DNA, 622 bp, Homo sapiens
ccccctgctgcctcatccccatctggactttgggcacacatgggcacaggagggagtccaagggagtactcagggtggctctgtgtgggcctgcaggcaccctttggcaggaacagcctgggcaccatggacaacatgattggtggtggcaggaggcagacaggctcctgggcagaaaggggcaggtccctggtgaagctccaccttcaagctggggttggcctgaagcctgggaaccagactgtcagttcctagtggccccaagtgagaacttattgtacattttccaggcccacccatggtcacctgtggaccaatcagcatgcacttcctcccttctgagcccataaaaaccctggacccagccaggctcacacasgcatcaggactatcagctgtgggaaggagtcacccaattcaggtctcctcagctcattaggttgatttgcctgcataaaggagctgtccactcagtccactcagtggagagtgtcttctctccactgagagctggacacttattgggacaacctgcttgcagaaaggaactacccactctgggtctcctctccactgagggctgcgctcatcaggatgacctgcctgcagtaaggagctaacc

SEQ ID NO: 926492 - DNA, 656 bp, Homo sapiens
atttttttcttttttttaagttttattttaggttcagggatacatgtgcaggtttgttatataggtaaactgcatgtctttgggggtttgggtacagatcattttatcacccaggtaataagcatagtacccaacgggtagtttgttttttattgtctccctactcccaccctccaccctcaagcattcaccagtgtctattttcctccgctttgtgtccatgtgttctcgtttagctcccacttaaaagtgagaacatgtggtatttgtttttctgttcatggattagtttgcttagtttaatggcctctagctccatccatgttgctacaagggagatcacaataaaacttattatgtacagttcaatagttcagaagtttgatgggtctaatgatgctatatcaagatgccaacagggctgcattcttttctggaggccttagggaagagtccaattccttaccttttccagattctacaggtcatctacagtttttgctttatggmtcctttcttccatcttcgaagccaaccacataccttccataatcacgtatctttctttgactcttctcttttgcctcccttttccactcttaagtacctttgtgattacattgaacccacctgaaaaacctaggatactctcccta

SEQ ID NO: 926493 - DNA, 554 bp, Homo sapiens
cctgtcttttgctggttttcaatgggaatgcttccaacttttgcccattcattataatgttggatgtgagtttgtcataggtggctcttattattttgaggtatgttctttcaataatttattgagagtttttaacatggagggttgytgaatgtatcttttcttggagggttattgaatgtatcttttctgcatctgttgagataatcatgtggtttttgtctttagttctgtttatgtgttgaatcacatttattaatttgcatatgttgaacaaaccttgcctcccagggatgaagcctacttgatcatggtgcattcactttttgatgtgctgctggatttggtttgcaagtattttgctgaggatttttgcattgatgttcatcaaggatattggcctgaagttttctttttttggtcatgtctctgccaggtttttgtatcaagatgatagtggcctcatagaatgagttggggaggagtccattcttctgaattttttcaaatagtttttgtagaaatggaaccagctcttctttgtacatcttgtg

SEQ ID NO: 926494 - DNA, 629 bp, Homo sapiens
taccctcaattgtttctttttctttttttttttttttttttttcagacagagtctcgctgttgcctaggctagagtgcagtggtgcaatcttggctcactgcaacctccgcctccctggttcaagcgattctcttgcctcagactcccgaatagttgggtggaatgcgccaccacctctggctaatttttktatttttagtaaaggtggggtttcaccatgctggccaggctggaggctcttgaactcctggtctcaagtgatccacccacctcggcctcacaaagtgctgggattacaggtatgagccagcacacccagcctgtttctttatcacataaaaaaaaatgtatttctctcaataaaatctgtactctataattacagttccaactgcagttgactcaccttaaactttaataatagagaataagcaatagagactgtaaggtgtgtcaggtagggattaggagaaaggttctgacagacgagcagatgtgtggggtgaaataataggtgtcgaggagtgggggtgctctgtggttgccgagagtggagagcgtctcagcttctctctgttgagaagcccctgttctagcagaaggtatgtagtctctgaatggagagctc

SEQ ID NO: 926495 - DNA, 593 bp, Homo sapiens
attttctcttgaattaaaatgttgcataacaggtggctccaaactcagcatagcactgggtcagagactggttggaggttaggataaattgtctcacttaaaagtccaaaaagcattaccacttgatttaaagaagaaattttcatcaatattttccatgtttgtgttttccattataaaatcatatctcaaaactgtactctaattagtgtggaaccaagagacagctccacactccctctcagtgatgttgcactgcaggaggcaacaacaaataaggcaatcaatgctttgctactttaaggatattgakttcctttattttaggaagaatatttctgagtttcgagctacattacaaccagaatgcaaacacgctgcaatttgcaaaaaattttatacaattttggacataagtggttcaaggcagtgcaatctcctactgagaaaagaggattgagagttgcttgaagactcctgggccctttagttgtgacctatgggaggcaaagtggtgcaaggatcctagagatctgcattcttacactggccatggggcaaagttaccctaagcaagtcagctcatgggtccc

SEQ ID NO: 926496 - DNA, 593 bp, Homo sapiens
attttctcttgaattaaaatgttgcataacaggtggctccaaactcagcatagcactgggtcagagactggttggaggttaggataaattgtctcacttaaaagtccaaaaagcattaccacttgatttaaagaagaaattttcatcaatattttccatgtttgtgttttccattataaaatcatatctcaaaactgtactctaattagtgtggaaccaagagacagctccacactccctctcagtgatgttgcactgcaggaggcaacaacaaataaggcaatcaatgctttgctactttaaggatattgatttcctttattttargaagaatatttctgagtttcgagctacattacaaccagaatgcaaacacgctgcaatttgcaaaaaattttatacaattttggacataagtggttcaaggcagtgcaatctcctactgagaaaagaggattgagagttgcttgaagactcctgggccctttagttgtgacctatgggaggcaaagtggtgcaaggatcctagagatctgcattcttacactggccatggggcaaagttaccctaagcaagtcagctcatgggtccc

SEQ ID NO: 926497 - DNA, 601 bp, Homo sapiens
actgcatcctcaacttcctgggcccaggtgatcctctcgcctcagcccctgcaggtagctgggactataggcatgtgccaccatgcccagctaaatttggtttttttgtttgtttgtttttgagacagagtctcactstgtcacccaggctggagtgcagtggcacaatctcagctcactgcaatctctgccgcccgggttcaagtgattctcctgcctcagcctcccaagcagctgggattacaggtgactgccaccacgccagctaagttttgtagttttagtagagatggggtttcaccttgttggccatgctggtctcgaactcctgacctcgtgatctgcctgcttctgcctcccaaagtgctggaattacaggcatgagccaccacgcccggccaaaatttttgtatttttagtagacacaaggttcttaccctgttgcctaggctggtctggaagtcctggactcaagcaattcacctgccttggcctcccaaaatgctgggattacaagccaccatgcccggcctaaatcctgttgttttgttttgttttattttgttttgttttgttttgtttgttttttgagacagagtct

SEQ ID NO: 926498 - DNA, 601 bp, Homo sapiens
actgcatcctcaacttcctgggcccaggtgatcctctcgcctcagcccctgcaggtagctgggactataggcatgtgccaccatgcccagctaaatttggtttttttgtttgtttgtttttgagacagagtctcactctgtcacccaggctggagtgcagtggcacaatctcagctcactgcaatctctgccgcccgggttcaagtgattctcctgcctcagcctcccaagcagctgggattacaggtgactgccaccacgccagctaagttttgtagttttagtagagatggggtttcaccttgttggccatgctggtctcgaactcctgacctcgtgatctgcctgcttctgcctcccaaagtgctggaattacaggcatgagccaccacgcccggccaraatttttgtatttttagtagacacaaggttcttaccctgttgcctaggctggtctggaagtcctggactcaagcaattcacctgccttggcctcccaaaatgctgggattacaagccaccatgcccggcctaaatcctgttgttttgttttgttttattttgttttgttttgttttgtttgttttttgagacagagtct

SEQ ID NO: 926499 - DNA, 575 bp, Homo sapiens
gattaccaaaataccaaaaccaggaaaggacataacaagaacaaacagacaaaaacaaaactactgaacaatatccttgatgaatatacaggcaaaaatcctcaacaaaattctagctaaccgaatccaacagcatatcaaaaagataatccaccatgatcaagtaggtttcatacgagggacacagggatggcttaacatccgcaagtcaataaatgtgatacaccacataaayagaattaaaaacaaaaatcacacgatcatctcaatagatgcagaaaaagcatttgacaaaatccagcatcgctttatgattaaaaccctcagcaaaatcagcatagaagggacataccttaagataataaaatccatctatgacaaacccacagccaacattatactgaaccaggaaaagttaaaagcattccccctgagaactggaacaagacaaggatccccacttacaccacttctatttaacgtagtactggaagtcctagccaaagcaaccagacaagagaaagaaataaagagcatccaaattggtaaagatgaagtcaaactgtcactcttca

SEQ ID NO: 926500 - DNA, 513 bp, Homo sapiens
tggtactgtgccccagccagagcacacagtcccttggtaagcttgcagccctgacctatcctagtgatcaccttctcatagccctcccaacacagacactagaaattctagccctcttgcccctctgcatgcccactcacctgcctcaccagttgtgactcacttgtaccctgccactcagatttgccctcctgacatggacactaggagtgccaagccttctacccaacagtgrtattcccaaagtatctgtgcatacccaatctggctgtggctcatgtacttcctagagagtagctttcttcttactcagtgactgttaaccagctctggcatgagcaagccagcaaacctctcttccatccattgaagtgcaactagaccttctgcaaccagataagaacctgagccttgaggaaagatccccttccatccttccttgagcactctccctcagccctgtggaacattataaagttctcttacatcttatagttactgttttcttatagc

SEQ ID NO: 926501 - DNA, 513 bp, Homo sapiens
tggtactgtgccccagccagagcacacagtcccttggtaagcttgcagccctgacctatcctagtgatcaccttctcatagccctcccaacacagacactagaaattctagccctcttgcccctctgcatgcccactcacctgcctcaccagttgtgactcacttgtaccctgccactcagatttgccctcctgacatggacactaggagtgccaagccttctacccaacagtggtaktcccaaagtatctgtgcatacccaatctggctgtggctcatgtacttcctagagagtagctttcttcttactcagtgactgttaaccagctctggcatgagcaagccagcaaacctctcttccatccattgaagtgcaactagaccttctgcaaccagataagaacctgagccttgaggaaagatccccttccatccttccttgagcactctccctcagccctgtggaacattataaagttctcttacatcttatagttactgttttcttatagc

SEQ ID NO: 926502 - DNA, 579 bp, Homo sapiens
atgcaacatcttctgtaatcatctaatctaagatttctaccccttgctcttgctcagcttcgtctgaaacagcaataattcacagatttgggtttttttgtggtaatttctgttattttccaggtggctttcattcctttttgtttttgtttttgttttctcatctgtgtattttcaaatagccaatagaaaaacccaccaaaaacccagtcttcgagcttaccaattctttccwctgcctggtccattctactgctgagagcctctaatgaattcttcagttcagcaaatgtgtttctcattttcaagatttctgtttgttttttaaaatattatttcagttaaaaattattatgtttattttataacttactgtacagctacagttatcaagtagtatgtgcatttggtataagaataaacatatacagtatatggaaccaaagagacttacataatcaatggccaaataattttgacaaaggtgttaagataactcagaggggaaaaaaatgatctgtttaacaaatgatgctggaaaaatgggatatccttttagaaagaagtgaaccttggctc

SEQ ID NO: 926503 - DNA, 579 bp, Homo sapiens
atgcaacatcttctgtaatcatctaatctaagatttctaccccttgctcttgctcagcttcgtctgaaacagcaataattcacagatttgggtttttttgtggtaatttctgttattttccaggtggctttcattcctttttgtttttgtttttgttttctcatctgtgtattttcaaatagccaatagaaaaacccaccaaaaacccagtcttcgagcttaccaattctttccactgcctggtccattctactgctgagagcctctaatgaattcttcagttcagcaaatgtgtttctcattttcaagatttctgtttgwtttttaaaatattatttcagttaaaaattattatgtttattttataacttactgtacagctacagttatcaagtagtatgtgcatttggtataagaataaacatatacagtatatggaaccaaagagacttacataatcaatggccaaataattttgacaaaggtgttaagataactcagaggggaaaaaaatgatctgtttaacaaatgatgctggaaaaatgggatatccttttagaaagaagtgaaccttggctc

SEQ ID NO: 926504 - DNA, 728 bp, Homo sapiens
gtctaggaagaatgcattccaaacccagcccctgggtgggtattcagatgcacattgctgacttgttaacacattactgcttcttgtcaccttgggttttttgtttttgttttgcccttgagattttttattccagaagtgagttctggctcatctgtcattagagkaggtatcgaggcaaccatggatcaaagtattaatattttctgcttgccattacttgttcagatatcaagttcctgagtaccagttaattgtaggattgatagtaaaaggagataattagaattgagtcaaccatttggttttccaaaactgtagaagagtgtgaaaatatttatttaataccattcccagacaaaatcaatggtttctaaattttcacagagcaaggactaaaaaggagtaatcaggatatcaattatttgaatgataaactcttagccagaaggtaacagataacaccctgttacacacagcaagacccccatctctaaaaaaaaaaaaattaatagccaagcatggtggcatgcacctgtagtcccagctacttgagaggctgaggtggtggggggaatcactagagctcaggagttctaggctgtagtgagctatgatcacaccactgcactccagcctgagcaacagagtgagaccctatctcaaaactttaaaaaaaaaaaaatttaagaagaagaagataattactggtatatagaccagagcta

SEQ ID NO: 926505 - DNA, 749 bp, Homo sapiens
cagctcatgaaagccacagagaccataccctgcagagccacaggggtgaaactgcccaaggccctgggagcccacccctttcatcagtgtgccctggatgtgagacatggagtcaaatgagattttggagctttaagatttagtgactgcctggccaggtttcagacttgcatggggcctgtgacccctttattttggccaatttctcccatttggaatggggacatgtatccaatgcctgtatccccattgtatcttggaagtaaggaacttgcttttgattttacaggctgataggcagaaggaacttgacttatctcagatgggcctttggactcggactttggggttaatgctggaaagagttaagactttgggggactgttgggaaggcatgattcattttgaaatgtgaaagggacatgagatttgagaggggttggagcagaattatatcaatttggctctgtgtccccaaccaaatctcatctcaaaytgtggtccccacatgtcaagggagggacctggtgggagatgattggatcatggaagcagtttcccccatgctgttatcatgatagtgagtttgcacaagatctggctgtttgataagtgtctggcccatcccccttctccctttctttctcctgcctccatgtaagacgtgccttgtttccccttcactttcccccatgattgtaagtttcctgaggtctcctcagctgtgtggaactgagtcagttaaacct

SEQ ID NO: 926506 - DNA, 813 bp, Homo sapiens
aggtctgttggagtttactagaggtccactccagaccctgattgcctgggtatctgcatcggtggctgcagaacagcggatattggtgaactgcaaatgctgctgcctgatcgttcctctggaagttttgtctcagaggagtacccggctgtgtgaggtgtcagtctgcccctcctgtgatagtgccactgcactctagtctgggtgacagagtgagtgcctatctcaaaacaagaaagaaaggaagaaagagagaaagagagagagagaaagacaaagaaagaaagaaagaaacaaagaaagaaagaaagaaggaaagaaaacaagaaggaaagaaaacaagaaggaaacaaagaaagaaagaaggaatctaagctttcaacttaggaaattagaaaaagaagaaattacctccaaagtaaaaggaaaataaatagcaaaagttatagcggaaatcaatgaaattagaaacaaattaacagaatcaataaaaataaaagctggctatttgagragataataaaattaaaaagcctctagtcaggcagattaagaaaaaaagggagagaaacaaattactaatatcaaaaatgaaagaggggacatcactacagatcccatgtcattaaaaaaacataaaggaatactaggagcaactctatgcccctaaatttaataacctagataaagtagactaattccttgaaagataatctgccaaaactcacacaagaaggaatagacaatcttaatagtgctctgacagtgaaaaaaaaatggatcaatagttaaaaccttccaaaccagaagcat

SEQ ID NO: 926507 - DNA, 778 bp, Homo sapiens
caaattatttataaaattgggacctgtttacctgaccaaattttatttgccctgataagtatgaaagacaaggggaagtggagaaagattctgtaggaaaggggggtggtggtgaattatatggctcagtgtgaaaccttgcagtccctgagccaccagagagctcacccagcagcggagacaccaaagaaaaatgttgaagtggccacttgtcagcctgcaggaagccatccaccaggccaagggtctgaggcccccagtacacttacttgagcagaacacctcattggggtcaggagatagagascatccttgctaatatggtgaaaccctgtctctactaaaaatacaaaatattagccaggcgtggtggcgcacacctgtagtcccagctacttggaaggctgaggcaggagaatcgcttgaacccaggagatggaggttgcagcgagccaagattgcaccactgcactccagcctgggtgatggagcgagacaatctcaaaaaacaaaaaacacctcattgggactagcagaaggttaactctagtattgacaggcagcttttatctttctcaccagggagggttaggacattctcattgccaatggcccttttgcttatggtaggcacactgattctgacccaggggccagcaagtcaagagctcttgtctgggcatgtcagatgccaatcttaaaacacactctcaggatgggtaaggctgaggggcaaggcactgacagcaactgttagcaattgtacattttggctatt

SEQ ID NO: 926508 - DNA, 612 bp, Homo sapiens
gctttgtttacctactcaagcctcagcaatggcggatgtccctccaccagcctcattgccaccttgcagttcaatctcagactgctgtgctagcagtgagtgaggctccatgggcgtgggaccctctgagccaggtgygggatatgatctcctggtgtgccatttgctaggactgttggaagagcacagtattagggtgggagtgtcccgattttccaggtaccttctgtcatcacttcccttggctaagaaaggggattccctgaccccttgcacttcctgggtgaggcgatgccctgccctagttcagctcacacttcgtgggctgcacccactgtccaacaagccccagtgcgatgaacgcggtacctcagttggaaatgcagaaatcacctgtcttctgcgttgctcatgctgggagctgtagactggagctgttcctatttggccatctttgaacctcccccctgacttgcgtatgttaaatcttccctctatctctgggacaaagcccatttgatcatgatgtattatgtttttgatttgctattggattctgtttgctggtattttgttgaggacttttgcatctatgttcatcaggaatattga

SEQ ID NO: 926509 - DNA, 612 bp, Homo sapiens
gctttgtttacctactcaagcctcagcaatggcggatgtccctccaccagcctcattgccaccttgcagttcaatctcagactgctgtgctagcagtgagtgaggctccatgggcgtgggaccctctgagccaggtgtgggatatgatctcctggtgtgccatttgctaggactgttggaagagcacagtattagggtgggagtgtcccgattttccaggtaccttctgtcatcacttcccttggctaagaaaggggattccctgaccccttgcacttcctgggtgaggcgatgccctgccctagttcagctcacacttcrtgggctgcacccactgtccaacaagccccagtgcgatgaacgcggtacctcagttggaaatgcagaaatcacctgtcttctgcgttgctcatgctgggagctgtagactggagctgttcctatttggccatctttgaacctcccccctgacttgcgtatgttaaatcttccctctatctctgggacaaagcccatttgatcatgatgtattatgtttttgatttgctattggattctgtttgctggtattttgttgaggacttttgcatctatgttcatcaggaatattga

SEQ ID NO: 926510 - DNA, 606 bp, Homo sapiens
tttacctactcaagcctcagcaatggcggatgtccctccaccagcctcattgccaccttgcagttcaatctcagactgctgtgctagcagtgagtgaggctccatgggcgtgggaccctctgagccaggtgtgggatatgatctcctggtgtgccatttgctaggactgttggaagagcacagtattagggtgggagtgtcccgattttccaggtaccttctgtcatcacttcccttggctaagaaaggggattccctgaccccttgcacttcctgggtgaggcgatgccctgccctagttcagctcacacttcgtgggctgcacccactgtccaacaagccccagtgcgatgaacgcggtacytcagttggaaatgcagaaatcacctgtcttctgcgttgctcatgctgggagctgtagactggagctgttcctatttggccatctttgaacctcccccctgacttgcgtatgttaaatcttccctctatctctgggacaaagcccatttgatcatgatgtattatgtttttgatttgctattggattctgtttgctggtattttgttgaggacttttgcatctatgttcatcaggaatattga

SEQ ID NO: 926511 - DNA, 612 bp, Homo sapiens
caataagatagcatagagtcataagattaaagctggaaagaatcttaaaggtcatttggcccccaacctcaatttatgaaggagacacgagaggctaactgatttgtttaaggtctttctgcttgctgatggcagattagaacacacacagctctctaattgtagcccagtttgytgttgttttttttctttctgagggctctacttctagagaagcttcagagccagtaccatctaatgcccctgaatagtagatttcaatccttttctatttcatgaggatgactgtcctcatccttcctcaggcagcctcttggctgaaaccgtgctaggcttggcaatgactcactgcctggactaataccttaaatgaaatggcttgtgttcccgctttctccacttttgcccatgatgtgctttctttccttcttcttgttttgtccatcccatttgatcttcttacctaactttttccttccaaagctaataacatgcttgaaatattttttacaatttattatacagccatctaaatattttattttacctttaaattcacttatgtatattactcttaaaaattaatttatttgtagctatttgtgaaaatta

SEQ ID NO: 926512 - DNA, 746 bp, Homo sapiens
tcaggcattaaattctcataaggagcgcacaacctagattcctcacatgcgcagttcataataaagtttgcactcctttgagcaattggtgccgctgctgatctgatgaggtgtacttcaggtggtaatgctcacctgcccatggctcaccttctgctgtgcagcccacccagttcctaacaagcctggctcattactggtccatgacccaggtattggggacccttggtatagtgcgttcttttttattctttgctactttgtctttctggttgtgttctktttgtggattttgtggatgtttaatgtaatctaccacatactttttgtttaataacaataaaactttttttttgtttttgccagattttcttcttaatcttgaaaagtacttcttttcctactattctaagatttgcctaacctatttatcttgtttatactgaagataagcattccctctccactatgccatacttgatttgaggagtagtttttttctcatcctaagcactgatgaaatagaactgtctgcttcctcttataattgtcctttaaaaaaaacttttatttacaaagtagctttaagattaaagtttaagtcctattttctccatgaattttgatctgatcacccttttttctcactggagttacttccttactggaactcctgttgtatctttggctataaccacatatatttgcctgtctcacatatgatggttttattagtgacatttgaa

SEQ ID NO: 926513 - DNA, 746 bp, Homo sapiens
tcaggcattaaattctcataaggagcgcacaacctagattcctcacatgcgcagttcataataaagtttgcactcctttgagcaattggtgccgctgctgatctgatgaggtgtacttcaggtggtaatgctcacctgcccatggctcaccttctgctgtgcagcccacccagttcctaacaagcctggctcattactggtccatgacccaggtattggggacccttggtatagtgcgttcttttttattctttgctactttgtctttctggttgtgttctgtttgtggattttgtggatgtttaatgtaatctaccacakactttttgtttaataacaataaaactttttttttgtttttgccagattttcttcttaatcttgaaaagtacttcttttcctactattctaagatttgcctaacctatttatcttgtttatactgaagataagcattccctctccactatgccatacttgatttgaggagtagtttttttctcatcctaagcactgatgaaatagaactgtctgcttcctcttataattgtcctttaaaaaaaacttttatttacaaagtagctttaagattaaagtttaagtcctattttctccatgaattttgatctgatcacccttttttctcactggagttacttccttactggaactcctgttgtatctttggctataaccacatatatttgcctgtctcacatatgatggttttattagtgacatttgaa

SEQ ID NO: 926514 - DNA, 746 bp, Homo sapiens
tcaggcattaaattctcataaggagcgcacaacctagattcctcacatgcgcagttcataataaagtttgcactcctttgagcaattggtgccgctgctgatctgatgaggtgtacttcaggtggtaatgctcacctgcccatggctcaccttctgctgtgcagcccacccagttcctaacaagcctggctcattactggtccatgacccaggtattggggacccttggtatagtgcgttcttttttattctttgctactttgtctttctggttgtgttctgtttgtggattttgtggatgtttaatgtaatctaccacatactttttgkttaataacaataaaactttttttttgtttttgccagattttcttcttaatcttgaaaagtacttcttttcctactattctaagatttgcctaacctatttatcttgtttatactgaagataagcattccctctccactatgccatacttgatttgaggagtagtttttttctcatcctaagcactgatgaaatagaactgtctgcttcctcttataattgtcctttaaaaaaaacttttatttacaaagtagctttaagattaaagtttaagtcctattttctccatgaattttgatctgatcacccttttttctcactggagttacttccttactggaactcctgttgtatctttggctataaccacatatatttgcctgtctcacatatgatggttttattagtgacatttgaa

SEQ ID NO: 926515 - DNA, 621 bp, Homo sapiens
ggtttcaccatgttggccatgctagtttcaaactcttgacctcaagtgatctgtccacctcgacctcccaaagtggtgagattacaggtgtgggccaccacacgtggcaaggaaaactcgtagaagttacgcctgcattccactggactcaagctgaatgagcacatttctctcaaggtgtagcaggacgagccacagacaaaagccctcacacacagggttaaagaaggaagttgctttatttggccgggagcatcggctgactggcatctcaagaaccgagctcccccaagaargagttcctggtccttttaagggcttacaactgtaaggggttccacgtgaaagggtcatgatagattgagagcacatgtggttagagttgggggttaatattttaacctcaggcctggtcatcagtggcaccagctggtcttgccactgacttcattcctgttgtttttcagcttttacttcagagacaggagacagtaagagaaatggcctctctcttcaaaggctcataattatttaaaggtcatagctttaaattggaattatttgatgtatgaattatttaatttcctactgagatacaggtactgtctcccttgtattttg

SEQ ID NO: 926516 - DNA, 501 bp, Homo sapiens
ccaattattcttatatccagctgttcaatcatcttccacccaccctggcaagagatttctgctctttttgagatcatggaaaatgtatgtgggactcgccttacttccttttgaccctccattccttcattcccctgaacaccgccatacctcactgtaaaggcatgtttcagttttttcaaaggagaccatgagtagaccccagggctaatacattcaatacagtataaacagtttagaatatgtagaatgaaaaacgttaccttacttagktatttttgtaaaccacaattaacttttgtgtattttttaaaatatatgaaaaacattacctttcatgcgcgtccgtgtgaagagaccaccaaacaggcttgtgtgagcaataaagcttttaatcacctgggtgcaggcgggctgagtccgaaaagagagtcagcgaagggagataggatggggctgttttataggatttgggtaggtaaaggaaaaaggggggttgtt

SEQ ID NO: 926517 - DNA, 609 bp, Homo sapiens
caagaccatcctagctgcaaaataagcttcagtcatgctatacttgtcctgattacctacacgaagtacaaaaagaatcattgtccatatatgcactcctaaattgactttgctggaacctgtcacaaggaacctcagactcaatctccaaaggcctcttgatcccagccaaagactcatctgcacctccagttacctgcatgaattgggagaatgcttcttttctgttggcccccaaacaacttgaggtccctggttctgtcagaaagtgacaccatcmacataccagaggccaagaaccctgcaaaggaactgtgtagacaaagtaagaggccagaacttttacagggttttcattggctctgtaatcaatatcaatttctcaaagcaatgtgttcatatatgaaaacatgccatttcagtcaaagtcctgagagaataaccagtttcttcaactgtgtcctttatcaaagaaaaaagattcttattgaacttatgcaaacaactacattatcatgaattatcaatattcacaaataatttctgtgctctggagaactcaggcacagagagagaaatatgtcttaaattctgttgacaagagtatac

SEQ ID NO: 926518 - DNA, 493 bp, Homo sapiens
ccctttttcctttacctacccaaatcctataaaacagccccatcctatctcccttcgctgactctcttttcggactcagcccgcctgcacccaggtgattaaaagctttattgctcacacaaagcctgtttggtggtctcttcacacggacgcgcatgaaaggtaatgtttttcatatattttaaaaaatacacaaaagttaattgtggtttacaaaaatamctaagtaaggtaacgtttttcattctacatattctaaactgtttatactgtattgaatgtattagccctggggtctactcatggtctcctttgaaaaaactgaaacatgcctttacagtgaggtatggcggtgttcaggggaatgaaggaatggagggtcaaaaggaagtaaggcgagtcccacatacaattttccatgatctcaaaaagagcagaaatctcttgccagggtgggtggaagatgattgaacagctggatataagaataatt

SEQ ID NO: 926519 - DNA, 567 bp, Homo sapiens
cttgttcatgctggtatataagagatgtattgacttttgaatattaaccttgtatcctacaaccttgccataatcacttattaattctcgctttttaaaattattccttcagttttactacatagatgattatgtcatctaaaaaccaggaaaattttgtttcttcctttccaatatatataccttttatttcytttttgtcttatccccattagctggaacttactttttttagttacgtggtctctaattatgttatctatatttttataaatctgcttgaaaatatcaattttattaggtttaatcatataaaattaccatgtttataaaagatattgagaatttttacagattaatttaataattaacttttatgaatctgttatatgacggttataggcactactgtttttaactatgtgttgtccaagttttcttctctaagtatttatttgggtaaaagtcaatcataaattatctaataaaattataacgttctaaaagtcttgcattttactacagagttaaaatattatgtattcactaattaaatacattttttag

SEQ ID NO: 926520 - DNA, 616 bp, Homo sapiens
ccactatataatgtccctctttgtctctttcaactgctattgctttaaagtttgttttgtctgatacaagaatagctacccttgcttgtttttggtgtccatttgcataaaatgtcttattccacccctttactttaagtttatgtgagtccttatgtgttaggtgagtctcctaaagacagcagatggttggtgagttcttgcctattctgtggttctgtatcttttaaatggagcatttaggccatttacattcccatgttagtaatgaaatgtgaggtactgctgcattcatcatgctttttgttgctggtgtaatttggttttttgtttttgctttttaacttgtatttttgttttgtaggtcctgtgtgattcatgctttaaagaggttcygtttctatgtgtttccaggatttgtttcaagatttagagctccttttagtagttcctgtagtggtggcttggtaatggtgaattctctcagcatttgttcgaaaaagactgtatgtttccttcatatatgatgcttagttttgctggatacaaaattcttggctgaaaatagttttgtttgaggaggctaaagatagggccccaatctcttctagcttgt

SEQ ID NO: 926521 - DNA, 477 bp, Homo sapiens
tgggctggtactgggggttgtctgcacagagtcctgtaatgtgaaccatctatgggcctctcagccgtggatacttgtgcagttttttggggggtctcccaggtcctgcaggagcagttggcttccttcagagtgtctgtgggtcctctcctgtaccacaatttctttatccagtctgtcattgatgggcatttaggttgattccatgtctttggtattgtgaatcatgccacgatgaacattcatgtgcatgtgtccttatggtagaataattagaattctttggggtatataaccagtaatgggattgctgggtcaaatggtaattctgttttaagtyctttgagaaattgccaaagtgctttccacaatagctaaactaatttacattcccacatgaaatgtataagcattccctttttttctgcaactttgacaccatctgttaatttttgactttttagtaatagtcattcg

SEQ ID NO: 926522 - DNA, 614 bp, Homo sapiens
atggcattgctttcttgatttctttttcagctagttcactattggtgtatggaaatgctactgatttttgtatgctgatttagtatcctgaaacttcactaaaattatttttgagttctaaaagtttttggtggttctttagagtttctatatataagattatatcatctgcgaagagggacaatttgrctttctctttttaaatttctttctcttttgtaattgctctggttatgattttcagtcccatgatgaatacgagttgtgaaaggggccatccttgtgacacttcttagaggaaatgctttctgtttttccccactcagtatgttagctacgggttcatcatatatgtcttttattgtgtttaggtatgttccttctatacctaatttgttgagagtatttatcatggagggatattgaattttatcaattgtttttcttctgtagttgttgagattatcctatggcttttgtccattctgttgacatgatgtattacatttactgatttgtgtatgttaagtgatccttgtatttctgtgataaatcccacttgatcacagtgtattattttgttttatttattcatttattgagacaagttttca

SEQ ID NO: 926523 - DNA, 643 bp, Homo sapiens
ttcagtagccaataagtcatctacatactgaagaatagtacaattggggtgactggctcagaatggtataagatcctgttggagggcttccccaaaaaggatgggggaatttttaaagccttgaggtaactgagtccaagttaattgggtggtatctcctgagccaggatctgtccattcaaaagcaaagataggttggcttttgggggccagaggaatagcaaagaaggcatcctttaagtcaaggacagtgtatactgtatgttctggtgggagcaggctgagtaaagtataagcattgtggacagttggatggayggtaactgtccacttgttaacctccctcaagtcctgcacaggctggtaatcatttgttccaggtttctggaccggcaaaaatggagtattccaggtggattgacatggtgtgagtatgccagcttgtagcagtcactgaatatggagatttatcccctctctagcctgctgactcataggatactgttttatctggactggcagggcagtggccagaagttctacaactactggcagatgatgctttgcttatcccagggggtttgactcagcccagactcgaggaaacagtctgtaggtctaataggaggagagaatttgtttt

SEQ ID NO: 926524 - DNA, 602 bp, Homo sapiens
tattgatacttgtgtatacttcatgaaatacttgtgctgtgtttttcagctccatcaggttatttatgttcttctctaaactggttattctagttagcaattcatctaagctttttttcaaggttcttatcttccttgcattgggttagaacatgctcctttagctcagaggagtttgttattacccactttctgaagcctacytctgtcaattcatcaaactaattctctgtccagttttgtttctttgctggtgaggagttgtgatcctttggaggagaagaggtgttctggtgtttggaattttcagcctttttgtgctggtttctccccatcttcgtggatttatctacctttggcctttgatgttgttaacattcagatggggttttggtgtggacttcctttttgttcatgttgatacaattcctttctgtttgttagttttccttctaatgggcacctctgctgcaggtctgctggagtttgctggaggtccacttcagaccctgtttacctgggtatcaccagcagaggctgcagaacagcacagattgctgcctgttcattcctcatgaagcgtcatcccagatgggtaccca

SEQ ID NO: 926525 - DNA, 757 bp, Homo sapiens
gggtgcttgctggcctggccactcaccgagctgtgagcagcaggggaagctccacccagggccctagtgagtatgggtgtggggggaggggcacgtgggtggccctgatcagtgtcagggtgagctccccccatcccaccttcctgttacctgtggagggtgtccagtttcttgccgttttgaagcaagaattggaaaaaaaaaaaaaaaccgcacaaacagagcaaggaaagaatgaagcaacaaaagcagagatttactgaaaatgaaagtatactccacgtgatgagagaaagaatgaagcaacaaaagcaaagatttattgaaaacaaaaatacacactacatggtcgggcacggtggctcacgcctgtaatcccagtacattgggaggttgaggagggcagatcacttgagatcaggagttagagaccagcctggccaacatggtgaaaccccatgtctactaaaagtacaaaaactagccgggcgtggtggcacacgcctgtaatcccagctacttgggagactgaggcacgagaatcgcttgaacccagtctgcactccagcctgggcgacagagtgaggactcygtctcaaaaacaaaacaaaacaaaacaaaacaaaacaaaacaaaacaaaacaaaacaaaacaaaacactccacatgatggaagcaggctgctgggagcaggcccgagtataggggcccccaggttacagaattttctggggtttgaataccctctagaggtttcc

SEQ ID NO: 926526 - DNA, 441 bp, Homo sapiens
caggttttgtattgatgtctggaatctcaagcactaccaccacaatagagatgccattttcttactttcaaatattccttgtgctgtgcttttgtagtgaaatattctccttgtcctcaattctgagcagccactggttcattctttattctgataccattgcgttttctagaactgcttatcatgaagtcaygcaatatgtagctttgttgttgttgttgttgttgttctttgagacggagtttcactcttgttgcccagcctggagtgcaatgacgtgctctcggctcaccgcaatctctgcctcccaggttcaagcgattctcctgtctcagcctcccgagtagctgggattacaggcatgtgctaccatgtctggctaattttttgtatttttagtcgagatggggttctccatgttggtcaggctggtctggaact

SEQ ID NO: 926527 - DNA, 564 bp, Homo sapiens
aggccgaggtgggatgattgctagaggccaggagtttgagaccagcctgggcaacatagtgagaccctgtctctacaaaaaaaaaaaaaaatcaaaaattatccaggtgtggtggtgtatacctgtggtcccagctactagggaggatgaggcagggggattgcttgagactgggagtctgaggttacaatgggttatgatcatgccactgcactccaacctgagtgacagagcaagatcatgtctctaaaaaaatacagtgctatataactgggtttttttttttttttttttttgagatggagtctcagtctgccacccaggctggagtgcagtggcgcgatcttggctcactgcaacctctgcttcctgggttaaagtgattctcctgcctcagcctcccaagtagctgggattacaggcacccrccaccatgcccggctaatttttgtatttttagtagagatggggtttccatgttggccaggctggtcttgaactgacctcaggtgatcccccccacctcagcctcccaaggtgctgggattacaggcgtgagccact

SEQ ID NO: 926528 - DNA, 643 bp, Homo sapiens
acccggctaatttttgtattttcagtagagacaaggtttcaccatgttggccaggctggttttgaactccagacctcaagtgatccacctgccttggcctcccaaaatgctgcgattacaggtgtgagccactgcgcccagcctacgtttattttttaaatatggagatttcaaaaatgaagagcctccagaagagttgtactaaccacccttatttccaactgaagcattgggtttggactctagagcagggctgcctgggtgaagcccagctctctgtcccactagtcatgtaacagcaggcacgtgcctgaccctccctgggcctcagtttcctcacttggaaaggaggataatccgagttcccgtcttgctgggctgctcgttaagyacctgcacagggcctgctatcctattggttcccaggcccctctccatccttctgaatcactctctccagggccagggcacgggaagaggggctttcacaaagctccccaggtgattctaaagcactgaggtgcccaggaaacactgtccctgagcatctctgtaggaacccaagctcgggagcccaggggctggctggcaaggtggctgccggtctgacccttagccttgtggaagcaaacggagaggtcgt

SEQ ID NO: 926529 - DNA, 586 bp, Homo sapiens
ggagccctattatgtactggacacaggaggaagcaaaacagttatcatttacattctggccagccaggcatggtggcacacaccatgtaatcccagcactttaggaggccgaggcgggaggattgctttagcacaggagtttgagatcagcctaggcaacatggcaaaaccccatctctacaaaaactacaaaaattagccaggcgtggtactgagcgcctgtagtcccagctactcgagaggctgaggtgggaagacagcttgtgcctgagaggcagaggttgcagtaagctgagattgtgttagtgcactccagcctsggtgacagagccagaccctgtctcaacccgcccccccgcaaaattacattcagcacgggggtgcggggggcatgacatattaaaggtaattatgctataacggctaattgctagttcttactatttacacattagcaactctttaaaacctccaaccccatgatcacatgcgatattatctccatttgatgaggaaactgaggcagggagaggttcagtgacttgcttaatgtcacacagacacagatgatacatacaaacacggg

SEQ ID NO: 926530 - DNA, 851 bp, Homo sapiens
aaggtcacattcaccagtttcagggtttaggacttgagcataccttttaaggggacacaattctatccactccagttacatggttattttaatgtgtattagaaacaagtgttacataacagagcatcaagcctatgacttcttagaggttgttgatgttgatccaaaattgtcttttaaaacacaatttatgtcagggaaaacagaagtgtgggaaagaaatgtttagtaacagcagctcaccaaggtttaacatggcagagatcataagggtgaggcataattgactctggattggaaatrctggtggacagggaaatcctggcttggaaaaggggcgtgttcatacggacagtcacttttttatttttttatttatttatttttttgagacggagtctcactctgtcgcccaggctagagtgcagtggcacaacctctgctcactgcaagctccgcctctcgggttcacgccattctcctgcctcagcgtcctgagtagctgggactacaggcacctgccaccacgcctggctaattttttttttgtatttttagtagagacagggtttcaccgcattagccaggatggtctcgatctcctgacctcgtgatccacccgcctcggcctcccaaagtgctgggattacaggcgtgagccaccgcacccggctggacagtcactcttaatatctaccccaagtctttcatgctgctatttcaggccatttctgagggctgctgagagtcatgtctgttgggtttcggggttttcctcttgggctctgggtaaagatggaagctccccaggtgaatgggaggaggctttctgggccagctctcccctagag

SEQ ID NO: 926531 - DNA, 851 bp, Homo sapiens
aaggtcacattcaccagtttcagggtttaggacttgagcataccttttaaggggacacaattctatccactccagttacatggttattttaatgtgtattagaaacaagtgttacataacagagcatcaagcctatgacttcttagaggttgttgatgttgatccaaaattgtcttttaaaacacaatttatgtcagggaaaacagaagtgtgggaaagaaatgtttagtaacagcagctcaccaaggtttaacatggcagagatcataagggtgaggcataattgactctggattggaaatgctggtggacagggaaatcctggcttggaaaaggggcgtgttcatacggacagtcacttttttatttttttatttatttatttttttgagacggagtctcactctgtcgcccaggctagagtgcagtggcacracctctgctcactgcaagctccgcctctcgggttcacgccattctcctgcctcagcgtcctgagtagctgggactacaggcacctgccaccacgcctggctaattttttttttgtatttttagtagagacagggtttcaccgcattagccaggatggtctcgatctcctgacctcgtgatccacccgcctcggcctcccaaagtgctgggattacaggcgtgagccaccgcacccggctggacagtcactcttaatatctaccccaagtctttcatgctgctatttcaggccatttctgagggctgctgagagtcatgtctgttgggtttcggggttttcctcttgggctctgggtaaagatggaagctccccaggtgaatgggaggaggctttctgggccagctctcccctagag

SEQ ID NO: 926532 - DNA, 851 bp, Homo sapiens
aaggtcacattcaccagtttcagggtttaggacttgagcataccttttaaggggacacaattctatccactccagttacatggttattttaatgtgtattagaaacaagtgttacataacagagcatcaagcctatgacttcttagaggttgttgatgttgatccaaaattgtcttttaaaacacaatttatgtcagggaaaacagaagtgtgggaaagaaatgtttagtaacagcagctcaccaaggtttaacatggcagagatcataagggtgaggcataattgactctggattggaaatgctggtggacagggaaatcctggcttggaaaaggggcgtgttcatacggacagtcacttttttatttttttatttatttatttttttgagacggagtctcactctgtcgcccaggctagagtgcagtggcacaayctctgctcactgcaagctccgcctctcgggttcacgccattctcctgcctcagcgtcctgagtagctgggactacaggcacctgccaccacgcctggctaattttttttttgtatttttagtagagacagggtttcaccgcattagccaggatggtctcgatctcctgacctcgtgatccacccgcctcggcctcccaaagtgctgggattacaggcgtgagccaccgcacccggctggacagtcactcttaatatctaccccaagtctttcatgctgctatttcaggccatttctgagggctgctgagagtcatgtctgttgggtttcggggttttcctcttgggctctgggtaaagatggaagctccccaggtgaatgggaggaggctttctgggccagctctcccctagag

SEQ ID NO: 926533 - DNA, 678 bp, Homo sapiens
acttcccctgatgccctatcactgatgaatgttttattccccacattccttgtaccacagcacctgaaggtgaggcaggtcacctctttgctcttatttccaaaccatttcctcctccctaaaagacatctagttttaaacctcatgaaattaggatatgtcwatcacaatccctccttgtgatatatatctactaatttctgatagacaccagttctctgtcagtccttaaattcttcagcacctgactcactgttactctcttcaatgccattcctatcattctttggtcacttcgatatccacataaataatactccccacaacctcgcctcttagttctctgacccctctctcctggaatagtctcatcctctacgcttctacagtcattcattcccatggtcataacccagaccttgtcagtaccagtcagtaccaaacccttcataacctcaattatcccactctgacttctacctcctatacctcaactgttgccctatgataccccaaactggatagttatttgactccaccagaaatcaaattctggagaagtacaattcactgatcttaccactttttgccactttttcactgttcctcatccccgagtaccctcacttcccagcacaaccacctgttataatcaccccctgcatatgcccttgtctt

SEQ ID NO: 926534 - DNA, 678 bp, Homo sapiens
acttcccctgatgccctatcactgatgaatgttttattccccacattccttgtaccacagcacctgaaggtgaggcaggtcacctctttgctcttatttccaaaccatttcctcctccctaaaagacatctagttttaaacctcatgaaattaggatatgtcaatcacaatccctccttgtgatatatatctactaatttctgatagacaccagttctctgtcagtccttaaattcttcagcacctgactcactgttactytcttcaatgccattcctatcattctttggtcacttcgatatccacataaataatactccccacaacctcgcctcttagttctctgacccctctctcctggaatagtctcatcctctacgcttctacagtcattcattcccatggtcataacccagaccttgtcagtaccagtcagtaccaaacccttcataacctcaattatcccactctgacttctacctcctatacctcaactgttgccctatgataccccaaactggatagttatttgactccaccagaaatcaaattctggagaagtacaattcactgatcttaccactttttgccactttttcactgttcctcatccccgagtaccctcacttcccagcacaaccacctgttataatcaccccctgcatatgcccttgtctt

SEQ ID NO: 926535 - DNA, 599 bp, Homo sapiens
actgcccaattgcctcggaagccctctggaccatcagggatgctgagctttgggtaactcttacagtggggcgtaagtccatcccctgtttaattgatacaggggctaaccactccacattaccttcttttcaagggcctgtttcccttgcctccataactgttgtgggtattgatggccaggctcctggaccccttaaaacttcccaatttggtgccaacttgaacaatattcttttatgcactcctttttagttatccccacctgcccagttcccttattaggctgagacattttaaccaaattacctgcttccctgactattcctggactacagccacatctcattgccrcccttcttcccaacccaaagcctccttcacgtcttcctcttgtatccccccaccttaacccacaggtatgggacacctctgctccctccctggcaactgatcacacacccatacctaatcacccttaccctgctcaacaccagtatcccatcccacaacaggctttaaggggattaaagcctgttatcactcgcctgctacagcatgagcttctaaagtctaaaaactccttatgattcccccatt

SEQ ID NO: 926536 - DNA, 652 bp, Homo sapiens
ggctgaggcaggagaatcgcttgaacccaggaggcagaggctgcattgagttgagatctcgccactgcactccagcctgggcaacagaaatactgtgtctcaataatagtaataataataataataataataaagtaatagatctcttccacaaatgtgctgggacaactaactggatatccacatggaaaagagtaatgttggatccctatgtcacaccatcaaaaattttatttaaaaaagttttttttttttttttaaaaagggaaaaggcccgggcgcggtggctcacgcctgtaatcccagcactttgggaggccgacgtgggcggatcacctgaggtcgggagttcagcctggctaacatggtgaaaccctgtctctactaaatatacaaaattaactgggcatggtggcgcatgcctgtagtcccagctactcgggaggctgaggccggagwatcgcttgaaaccaggaggcggaagttctagtgagctgggatcactccacggcactccagcctgggcgacggagtgagactctgtctccaaaaaaaaaaaaagggaaagagagagagagagactaggaagggagacctgccgcagtgggtgttactttgtcgcccaggctggcttgggaccccaggctcagca

SEQ ID NO: 926537 - DNA, 652 bp, Homo sapiens
ggctgaggcaggagaatcgcttgaacccaggaggcagaggctgcattgagttgagatctcgccactgcactccagcctgggcaacagaaatactgtgtctcaataatagtaataataataataataataataaagtaatagatctcttccacaaatgtgctgggacaactaactggatatccacatggaaaagagtaatgttggatccctatgtcacaccatcaaaaattttatttaaaaaagttttttttttttttttaaaaagggaaaaggcccgggcgcggtggctcacgcctgtaatcccagcactttgggaggccgacgtgggcggatcacctgaggtcgggagttcagcctggctaacatggtgaaaccctgtctctactaaatatacaaaattaactgggcatggtggcgcatgcctgtagtcccagctactcgggaggctgaggccggagtatcgcttgaaaccaggaggcggaagttstagtgagctgggatcactccacggcactccagcctgggcgacggagtgagactctgtctccaaaaaaaaaaaaagggaaagagagagagagagactaggaagggagacctgccgcagtgggtgttactttgtcgcccaggctggcttgggaccccaggctcagca

SEQ ID NO: 926538 - DNA, 543 bp, Homo sapiens
taatcttttcctagaagcaggaagaaacaactcaccttctttgttgaaagcgagctgaaattccaggaagtagttgcctgcacttttttgtcacagaagcagaaaacttgtcttccctttttggaagcaagtaaaactccagaaaagaagttgtacagcaaaataaacttcagatcttgaccaaattttgggaaatcaaaaattctctggagtggggaratagctcaaactggtaccaagcattgatagatttgtcaaaggtcagggacacctccactcagaatcctctatggttaccaacttgtaaagcaaaaagtatctgagacaggtctcaatcaattgagaaactttattttgccaaagttaaggatgcgcaccacggagcctctctcattgctagcacagcagtctgagatccaactgcaaggcggcagcgagcctgagggaggggaacctgccattgctgaggcttgagtaggtaaacaaagctgcctgggagcttgaactgggtgtatcccaccacaactcaaggaggcctgcctg

SEQ ID NO: 926539 - DNA, 633 bp, Homo sapiens
gtgcaagtgaagagtgagccattagtggtattttcactggggccagcattgtacctcaagtacaacagaaagaaaggagcatgtgagttgagggtgtaagccagaggttaattataataatgcactgtggaacccaagggggttgccaaggggggcagagggcaaagcgccaaggaaatggattacaagccccagtggggttggaggggccactctggcatcggtgaaggagggaatgagctgcaaagacagatgrtggaggtgcagagtgggaagctcagatttctcctctcagaggacagcagtcaggctgcactttagcctgggtgaccctgtctttcagaaaagcctagcaggttaggctctggtaaaatagtttctcctgagggctggccttgttgagaacagaatgctcgggtatttcagaatggagactttcccttccccctgccagaagcacaggggatttttcttcagccttcattgtgaggacctggtagagctctgggaggtaaattcaaaggagtgtgtgggactcttttctgaatggctccccctgaagtttttaactctcaggcttctccacgctgaaccttcagcaatccatccactgcagttcaagttttcctgtcc

SEQ ID NO: 926540 - DNA, 604 bp, Homo sapiens
tggcccccagttaactcaacttagtaagtgaagcatattcctaactgcaaaaaaagttcaaatccctttaaaaatactgactaaagcctattacagatgacacaatcctaagaacctgcacatctctttgctaaatcatggtgaagttccacacgatggaatattattctgcgagaaaagggaacgactactggctacgatgtggatgaaccttgaggatattaagctaagtaaaagcagccaaaaacaagcatggacaacacaacgataaaagcagccaaaaacaagcatggamaacacagcgaaaccccgtctctagaaaaaaaatacaaaacttagccaggcgtggtggcgtgtgcctgcagttccagctactcgggaggctgatgggagaggatggctttggcccaggagcttaaggctgcaatgagctatgatcaaaccacggcactccagcctgggtgacaagatcttgtctcccaaaggggaaaaaaaaaagcttacacagtctatgaaatgtctagaataggcaaatccatagattagtggtgactgctaatgggtacaggatttccttttgtggtgatgaaaatgtgctcgaatt

SEQ ID NO: 926541 - DNA, 541 bp, Homo sapiens
ttttttccttctaacttactgtatgtttgtacactttaacccagttctccttatcctcttcctcccaccactcatgattcccagtctctggtatctgtctttccctctctaccactatgtgatcaaattttttagcttccacatataagtggaaacatgtgacatttgtctkttttgcttggctgttttcacttaaaataatgacctctggttttatccatgttgctgcaaatgacatgacttcattctttttgtggctgaatagtgtttcattgtgtatatgtaccacatttcctttatccattcgtccgctgatgggcacttagtttgattccatatctttgctattgtgaatagtgctgcaataaacatgggggtgatatatatcagtatatcatattgatttcttttcctttgggtagatacccagtagagggattgcaggatccagtggtaattctaattttagttttttgagaaatcttacttttccatagtggctgtttaaattctcaccaacagtgggtaagaattcttttta

SEQ ID NO: 926542 - DNA, 617 bp, Homo sapiens
tatttctttggcacacttcacagcccctgactatcttcttgatagttttgaaaaggcctggtccagtaaataataatttggccatctgatgggtgctatcaatgcctaagtggaaggtttggtgaagggttttaagtaatttctgttggttagctgcaggtgaaagtatttttccttcctcagtggctagccatctggaggggaggaaagtatgtccttgtgaggtttcctattctatttttcctgctgagtactggggcttggtttcccagaggggattaccctatactaggcatccttctataagcatttctaatggaaggtcctgccttgtgctcttttgacttcaatatccacttggcagttcctttctacttccctttcctttctgatgaccctggcagtgtaagactgtcacctctttaggtttctgtacargcagttataatctcctaatagcttcctgatgtttgactggtgttcccttggaagttaggaattccctttctctccatattgctgcatgggcatgaaggactaggcaagcatacttagaggctgtatatatatttacccttttcccttctcctaattctagttcctgagtgagagctatt

SEQ ID NO: 926543 - DNA, 560 bp, Homo sapiens
tggctgtttcatcatacctgggaatccatattcggcagaaacctgttacgccaaggaaccatcatagttgctttagggttttgggataaggataggccagtataggctggatacgttcctcactgagggccttggtgtctttggataattttagccctaagtatttaacgtgctgtgagcagagctgagcctttcrtctggaaacctgtagccacaggtagcgagaaaatttaagagtgcttgggtggcttgatggcacaaggtttcttaacaggtggctaaaattaaatcatctctgtaccaaaggacaagagtgtccaggtatgagagttggctcaagtcttgggctaatgcctggccaaatagatgggggctatacttgaacccttggggtaaaacagtccacgtgagttgagacgttgggttcaaaggatctttaaaggcaaatgagaattgagagtcaggatgtacagggatgcagaaaaaggcatccttaaggtccagaactgtaaaccactctgcttcctctggtatttgggaaagcagagtataagggctag

SEQ ID NO: 926544 - DNA, 560 bp, Homo sapiens
tggctgtttcatcatacctgggaatccatattcggcagaaacctgttacgccaaggaaccatcatagttgctttagggttttgggataaggataggccagtataggctggatacgttcctcactgagggccttggtgtctttggataattttagccctaagtatttaacgtgctgtgagcagagctgagcctttcatctggaaacctgtrgccacaggtagcgagaaaatttaagagtgcttgggtggcttgatggcacaaggtttcttaacaggtggctaaaattaaatcatctctgtaccaaaggacaagagtgtccaggtatgagagttggctcaagtcttgggctaatgcctggccaaatagatgggggctatacttgaacccttggggtaaaacagtccacgtgagttgagacgttgggttcaaaggatctttaaaggcaaatgagaattgagagtcaggatgtacagggatgcagaaaaaggcatccttaaggtccagaactgtaaaccactctgcttcctctggtatttgggaaagcagagtataagggctag

SEQ ID NO: 926545 - DNA, 602 bp, Homo sapiens
gaagaaaagtttgtagtcatttgaaacttgaattgctgttcctctctttttaatgtcttttttgctggctgctctcaagattatcatttatcttttgtttttagctgtttgactatgatgtactcattattattttcttcatattttcattctcattttcttcatatcctgtttgggctttactgagcttcttcttcttggatctgtaatattatatctttcaataaaatgkgaacatgtacatccattatatcttcacacatatgttacaccttttgacatcctgcagctcgctgaggctctattcatgttttaaaatatcttttctctctttaagataggataattggtgcttatctatatttaagtttgtggactctgttctttgtcatttccattctgcttttatgcccatgtggtgaatttttaaatctacgtatcgtattttcgttttttttttaaatttttctatttatttatttttgttgagacggagtttcactcttgttgcccagtctggagtgcaatggtgcgatctcggctcactacaacctctgccttccgggttcaagcgattcttctgcatcagcctgctgagtagt

SEQ ID NO: 926546 - DNA, 647 bp, Homo sapiens
atggtagtcccccccatgcccatgggggatacattccaagacccccagaggccacctgagaccacgggtagtactgagccctacatatactatgattttcctatgcatacatacctatgataaattttaatttataaactaggcactgtactcttgtgttttgggtgttttggggcctttattaagtaaaataagagttacctaaacacgagcactgggaaatgcagcagttatctgataacsagatggctgctaaatgactaactggcaggtagcgtggacagcggatgtgctggaggaaggttctcatcccgggcaggttggagccagacagcatgagcaggacagcatgaggtttcatcacaccactcagagcagcccacgacttaaaacttatgaattgtctatttctggatttttgtcatttaatattttcagaccatggttgaccacaagtaactgaaactgcagataagtggggactactgtaatagcaaccacttattatgtttagtttaccaggcactctgctaagtgctttatgggcctctttcattgaaatcttctaacagcctaatgaggtagatgttaggattattcccatctgaccaatgaggctctgtggcttagagcgacttcctccatgt

SEQ ID NO: 926547 - DNA, 832 bp, Homo sapiens
agtttaattttagagcacttcataacccctaaaagaaatgtgtacccattagcagtcagtgatcattccacaccccacctctcagacttaggcaaccacgaatctactttccgtctctatagatgtccccgttttggacaattcatgtgaatggaaccatatatgtggcttctcatgtctgacttctttcactgactgtgttttcaaggttcacccatgttgtagaatgtatcagtactccattcctttttatggctgaataacattccactgtctgggtagaccacattttgttaattcackcatcagttgatgacatttgggttgttcccacatttgagttattctgaataatgctgctatgaacatttgtgtacaagtttttgtgtggacacattttcatttctctaggagtcatacggtaactatgttgaatagtttgaggaactgccaaaatgttttccagagtggcggtgccattttacattcccaccagcaatgaatgaggggtccaatttctccttatctgagacaacacttgttattgtccatctttttatagctatcctggtgggtgttatctcattgtggttttgatttggatttttctgatggctgatgatgttgaacatcttttccccttccttggacttttacgttagggaccagatcagtctctttcaaagaagccgatgctgcaacaagcaaagctctggagctgttggcagccatgctgtctgccatggggaaaagcgggattgcagtcggggaggaagaaggctggcactagcaggagatgcgtgatggaaaagacagtgatggagctggagtt

SEQ ID NO: 926548 - DNA, 671 bp, Homo sapiens
ggtggtttctgcatccctccccctgtggccgtgtcactccagtctccgcctctgtacccacatggcctcctcctcttctgtgtgtcctctccctctgcctctctcttatgagggtgctttcttgagtctttttgatgggcatttaaggtccatcaaaaggatgatctcatctcaaggtccttaatttaatcacatctgcaaagaccctttctctttttctttttttgagatggggtctcactctgtcacccaggctggagtgcagtggtgcaatcacggctcactgcaacctccacctccmgagttcaagcaatttctcatgcctcagcctccccagtagcagggattacaggcatgtgccaccataccagctaatttttgtatttttagtggaggcgaggtttcaccatgttggccaagctggtctcaaaatcctgacctcaggtgatccgccagccttggccacccaaagtgctgggattacaggtgtgagctatcccacccggcccctttttccaaataaagtaacatttatgtgttccaggaattagaacctgatatctttggggccagcattgaacccactaccgtttctatgcttaattctttattgaccatacaattctagccctgagtcttatgacatagagacataaaatgctttcaaagat

SEQ ID NO: 926549 - DNA, 592 bp, Homo sapiens
ggctgtcaatctttagttacctcatggtggcagacagtactgggttcttgtcaaaaactggacttttgtttgatgttgtggcagagactgctggtggcccactgtataagttaactattgtgacagtactgctgcattagcaaacaaccatgaagatttgtggaaatagctcattactggagkaggtaagagaagatgagtccctatgggaaaggggcaaaaagcgaggatgcaggctttaaaggaatattttcatggaggaagattataagaatagcattttccttgtcttccttttaagaactagaggcatttaattgcatcagaaataagtattactatgatgtccatctcttcataacacagtgactaagactacagagagaaaactctagttcctttacagtgctcacccattgtagcaaatggggaagtcaatcacgtttcaaaatcacgtggatatgagtcagcatgctggttcctgacttactagatcttgcacaatatatcagtaataagcctaaatttcccaatctagctgtaaaatggggataatgttaggatctactcagaaggtttgtgggtatattta

SEQ ID NO: 926550 - DNA, 594 bp, Homo sapiens
aggatctagaaagtagactcaaagagacaaatataatagttattggccttaaagaggaggtagagaaagatagaggtagaaagtttattcaaagaaataaaatggagaattttccaagcctagagaaagatatcaacatccaagttcaagaaggtttaacccaaagcagatttaatccaaacaagactaactcaaggcatttcataatcaaactcccaaaggtcaaggataaagaaaggatcctaaaagtggcaagagaaaagaaacaaatagtatacaatggagctctgatatgtctggcagcagacttcagtggaaaccttacaggccaggagagagtggcatgacatattgaaagwgctgaaggaaaaaaaagttaatcctagaatagtatatctagtgaaaatatccttcaaacatgaaggacaaataaagactttcccagacaaacaaaagttgagggatatcatcaataccagacttgtcctacaagaaatgctaaagggagtacttcagtcagaaagaaaaaaacatgaataagcaaaaaataatcacctgaaggtacgaaactaaccagtaatagtaagtagacag

SEQ ID NO: 926551 - DNA, 715 bp, Homo sapiens
aatgcctgaaaaggaattcaaaataataaacttaaggaaactcagcaagatacaagagaatgcaggcaatgcaacaaaatcagaaaaacactttatagcctgaactagaaattcagcagacgtagacatcatttaaaaaaaaagaaccaaacagaaagagtgtagctgaaaaattcagtgaatgaaatttaaaaatacaattgagagctttgacaataaactagatcaagcagaaaaaagaacttcygaacataaaaacaggtcttttgaaataacccagtcagacaaaagaaaaaagagaatgaaaagaaagccttcaggacatatggaataccattaagtgaacaaatattcacattatgagaattacaaaaggaaaggttattaaaaagcaaaaaaaaaaacctgtttaataaaacaatagctgaaaaattcccaaatcttgggagaaatatggacatccagatgcaagaaactcaaagattcccaagtaggttgggagagatacagacatccagatacaagaaactcaaagactctcttgtggattcaacttagaaaacttgtacattacagtcaaattgtcaaaagacaaacagagaactctaaaaacagcaatagcaaagtgtaaagtcatacataagttatcctatcagactaatagcagttatattagcagaaaccttacagggcagtcgagaatgaaatcatatat

SEQ ID NO: 926552 - DNA, 681 bp, Homo sapiens
ctgaaagaaaaaaaaagctgtcagacaaaaatactatacccaccatagttatccttcagaaataaagaagaaataaagtccttcccagacaagcaaatactaagaaaattcatcaccactagaccagccctagaagaaatgctaaaagagtaacatttagaaatgaagagacgatatctaccaccatgaaacacacaaaactaaaaactcactggtaggtgtaatgcacaaatgacaaagggaaaggaatcaaactatcactacagaaaaccaccaaacctcaaagataagcaataagagaggaataaagaaatgactatacacaaaacaaccagaaaacaacaaaattacaggagtaagtcctcacctatcaataataaccttgaatgtaaatgacttaaattccccaatcaaaagatatagactggctgaatgaataaaaaataacaagacccaamtatatgttgcctacaagaaactcactttacctgtgaagacacagaaatagaaagtaaagaaatacaaacagatattccatgcaaatgaagagcaaaggtgagcagaagtagtgttactcatggtaaacaaaatatatcttatgtcaaataacataaaaataggctaggcatggtaacttatgcctgtaatctagcattttgggtggctgaggtggatagatct

SEQ ID NO: 926553 - DNA, 453 bp, Homo sapiens
gtgtataccccttgtttagctcccacagataagtgagaacatgtartatttgattttctgttcctgcattaattcatttaggataatggcctccagctacattcatgttactgcaaaggacataatttcattactttttacggcttcgtagttttccatggtgcataggtaccacatcttctttatccagtccaccattgatgggtatctaggttgattctataactttgccattgtgaatggtgctgcaataaatacatgagtgcatgtgtctttttggtagaatgattcattttccttcgggtacatacccagtaatgggattgctggatcaaatggcagttctatttttaggtctttgagaatactccaatctattccacagagactgaactcatttacattcccaccaacaatgtgtaaacattctcttttctccttatcctgaccaac

SEQ ID NO: 926554 - DNA, 582 bp, Homo sapiens
aggctcggtctacccacttagcagttctgacaaggaaaaaaggaccacagaacacagaaaagatgggaagagtcaacttggaggtggaaagaggaagacaaacagcaagtccactgtgggagaataaggaggagcccccacagccttctccagctcttctcaggttccatttagagagttccaaatcccagcagcacccaacatctccccacaggaagttacactccccamaattacagagcagagcttcttactgcaaaaatcttttaacatggcaataatacaattgtgatatattgccttgtctaccatgctaaatgatggtggtcttgcctaccattctaaattcactgtatggttttacaacttagaaatttttgaagctatgaaaaaactcagttatgtaaatgacatccataggccccagggtaaatggacaacacctatagagcagccttgccaattttatcatcccacacttgttatgcacagaaagccctttgcttgtttattttctataacacttgatattgtttgtggacctctaccccaccaagagaggaaaaaatacaaatttattct

SEQ ID NO: 926555 - DNA, 604 bp, Homo sapiens
agagtcccttgatatggtgtctgcaaggagagctaaggaagctgtgtgaggacaaaagacctgcgaacctcgtgagctgttcctgctgcaaactccacagtctgaaggctggagaacctgtaggtctgatgtccaacggcacgagatggtggtgtcccagctcctgaagagagagaattcaccttccctctgtcttatagtgcacgctctctacagataggatgatgcccacccacactcgtgagggccatcttcttgactcagactactaattcaaatgtgcatctcttctggaaacatcctcacagaaaataagattgtgtaataggatgctcaaatgctcatctcttctggaaacatcctcacagacacacccagaaataatactttaccagctatctggatatcccttaagccagtcaaggtgacaccaaaattaagcatcacgctgtgtatgakatatgtatttctttatatttttggcacacttcaatgctgaaattactctttaaatgtcatgggtcgagtgtgttgagttcaatgtacccgttcctgaactcatcatcatcctctcctcccacagtaataccgatttagagaatgg

SEQ ID NO: 926556 - DNA, 604 bp, Homo sapiens
agagtcccttgatatggtgtctgcaaggagagctaaggaagctgtgtgaggacaaaagacctgcgaacctcgtgagctgttcctgctgcaaactccacagtctgaaggctggagaacctgtaggtctgatgtccaacggcacgagatggtggtgtcccagctcctgaagagagagaattcaccttccctctgtcttatagtgcacgctctctacagataggatgatgcccacccacactcgtgagggccatcttcttgactcagactactaattcaaatgtgcatctcttctggaaacatcctcacagaaaataagattgtgtaataggatgctcaaatgctcatctcttctggaaacatcctcacagacacacccagaaataatactttaccagctatctggatatcccttaagccagtcaaggtgacaccaaaattaagcatcacgctgtgtatgagwtatgtatttctttatatttttggcacacttcaatgctgaaattactctttaaatgtcatgggtcgagtgtgttgagttcaatgtacccgttcctgaactcatcatcatcctctcctcccacagtaataccgatttagagaatgg

SEQ ID NO: 926557 - DNA, 555 bp, Homo sapiens
aatatttacaattgttatatcctcttgatgaattgatcgcttttctacagttttaaatttaaagtatattttatctaagaatagctatccttgttctcttttgaatcctttgtgtgaaatatctttttccctacttttggttttattacatattctatttttttaaatattctttttgatagatagacacaaaatctsactacatggcacaggcttgtcttgaactcctgaactcaagcgatccccccacctcagcctcccaaagtgctgggattacaagtgtgagccaccacacctgaccccagtctatattattaaaagtaaagttagtctcatgtcggcaacatatagttgggtcttgtcttttttttttttaaaccattcagtcattttatgtctctttattagataacttaatccatttacattcaaagtaattattgataagcaaaaacttactaacaccattacattaattgttttctggttgttttgtaggtattttgcttctttctttcttgggtgctgtcttcctttgtggtttgatggtttttt

SEQ ID NO: 926558 - DNA, 555 bp, Homo sapiens
aatatttacaattgttatatcctcttgatgaattgatcgcttttctacagttttaaatttaaagtatattttatctaagaatagctatccttgttctcttttgaatcctttgtgtgaaatatctttttccctacttttggttttattacatattctatttttttaaatattctttttgatagatagacacaaaatctgactacatggcacaggcttgtcttgaactcctgaactcaagcgatccccccacctcagcctcccaaagtgctgggattacaagtgtgagccaccacacctgaccccagtctatattattaaaagtaaagttagtctcatgtcggcaacatatagttgggtcttgycttttttttttttaaaccattcagtcattttatgtctctttattagataacttaatccatttacattcaaagtaattattgataagcaaaaacttactaacaccattacattaattgttttctggttgttttgtaggtattttgcttctttctttcttgggtgctgtcttcctttgtggtttgatggtttttt

SEQ ID NO: 926559 - DNA, 625 bp, Homo sapiens
gagtctagttggccatcttgcctcaaatccctcctttaatatttctgtagatgtcttcctatttagttttacttaactatgctacttggtaaaacaatttatggagaactaatagtaataataacaatacagttaatagtaataataacaataacaaccagatagtttctactgaggatttttcaggtactatgctttgtgctaagtcctgttcttgaataagcttatttaatatttctaattacccttgacttgggtatcattattattattttttgtttgttggtttttgaagcggagtctcactgtcttgcccaggctggagtacagtggcacaatcttggctcactgcaacccccacctccagggttcaagcagttctcctgtctcagcctccccagtagctgggactacaggcaccagccaccataactggctaatttttgtaygtttagtagagacagggtttcaccatgttggccaggctggtctcgaactccagacctcaagtgatctgcctgcctcagcctctcaaaatgttgggattgtacaggcatgagccaccactcctggccaacttgagtataattattatccctattttacagggaaaacagaggtgact

SEQ ID NO: 926560 - DNA, 661 bp, Homo sapiens
caaatgcctagagacaggtagccaccaccaccaccaggatacagaacatttccttcacccctagaaagctccctcatgattccctcttgtagtcaaaccctcccctcactctcaagccctgccaaccaccagttcgctgtttctacaattttgcctgctctagaatgtcatgtacatggaattatacagtatgaagtttgagtctggctgctttcatgtgacacaaagcagtwgagattcatccaagctgttttgcatatgactagttcatcttttttattgcagagtagtatgctactgtatgaacgtaccacagtttctttatccattctcaagttatagaacatttgggtggttttgcatctgggggtgattataaaaaaagcttctgtagacatttgcatacaagtttaatgtaaatccatttttatttcttttggacaagcacttaagagtgagattgatgggtcatatagttggtgtatatttaattttataagaaaccaccaaactgttttttcacagtggctgcataattttgcatttctaccagcaatacgtgagagttccggatgctccacatcctcaccactttttggtattgtcagaaatttttttctcttttgtcttctagcctttccctgagaagaggcacagtcat

SEQ ID NO: 926561 - DNA, 721 bp, Homo sapiens
aggacctggaaaaggggcttcatgattctgaccagtgccctacccttctgtggctgagctggtatcaaagatgcaaaataaagtcctccccacttttccctctcctcttctcaaacaggagaatgtctcttggagctctgagctgtgcagactggacttaggggaggagtaatgccagcactcctttggctgccccagctagtgtctcagtatgtcacatgtaaccccagtccactgtctctgggccaagtgctctaggacttgcctaagagctgcagtccttatggtctagactgcctttcaggtttacttagagagtgggggcactttggccctcagtggcaaggtttgtgggaactcaagtccagagggatctgtgatgtccctctggctasagctggtttaaatgctctgtctgtgggtagacatcaagtgagtttggtctaacaggacagcactgagttcaatgccttacaattgctatttcaagaaaattttcaatttcctatttaatttctccattgacccactggtaattcaggagcatactgtttaatttccatgtatttgtatagtttccaacattcctcttgttattgatctttagttttattccattgtaatcagagaagatgctagataattcaacttttttaatgctttaagacttgttttgtgacctaacatatgatctatccttgagaatgattcatgcgctgag

SEQ ID NO: 926562 - DNA, 756 bp, Homo sapiens
gtctagaaatgtcatctgggagctaggacctggaaaaggggcttcatgattctgaccagtgccctacccttctgtggctgagctggtatcaaagatgcaaaataaagtcctccccacttttccctctcctcttctcaaacaggagaatgtctcttggagctctgagctgtgcagactggacttaggggaggagtaatgccagcactcctttggctgccccagctagtgtctcagtatgtcacatgtaaccccagtccactgtctctgggccaagtgctctaggacttgcctaagagctgcagtccttatggtctagactgcctttcaggtttacttagagagtgggggcactttggccctcagtggcaaggtttgtgggaactcaagtccagagggatctgtgatgtccctctggctacagctggtttaaatgctctgtctgtgggtagacatcaagtgagtttggtctaacaggacagcactgagttcaatgccttacaattgctatttcaagaaaattttcaatttcctatttaatttctccattgacccactggtaattcaggagcatactgtttaatttccaygtatttgtatagtttccaacattcctcttgttattgatctttagttttattccattgtaatcagagaagatgctagataattcaacttttttaatgctttaagacttgttttgtgacctaacatatgatctatccttgagaatgattcatgcgctgaggaaaagaatgt

SEQ ID NO: 926563 - DNA, 560 bp, Homo sapiens
tctttttctatttttttacattctgccaaataaatggaatctctctctctctgcatgctgagctgcctggagctggagtgggtgtaacactagcacccctgtggccaccatcactaggactacactaagtcagacccaaagccagcacaggactggctctcacataaggcccacagtgaccactacctagctactactgatgttcactcaagacccaagttctcttcagtaggtggtgaatccagccaggctcatgtcctttccttcagggcagtgagctctgggctgkgggtagcaaaatgcctttggtagcaagaacatggagtcagaaaccttaggaatctacttggtgctctattctgttgtggcttagctggcaccgaggccatgagacaacatccttcctactcttttttctcttttatcaagcataagaaaccactccccatggccaccaccacccagagtccgcaacaagtactgctaggctactgctgatatccactgaagacctaagtggtcttcggtcagcttgtggtgaactctgccaggcctgcttc

SEQ ID NO: 926564 - DNA, 579 bp, Homo sapiens
tttttgattcagtattactgggtaatagagctaagaaccacaaatttaaaatactttctaaatattctaaagtttctgttaggaaacagtatattaaaattaattttctagagtcttctataatgttctctcttctctactgagcatagtactagattagtaatcagattatcctagcaagagtcatgtttttttttctamtaaaacaggtcttgctatctttaagccagacttgatgacctgtctggagcaaagaaaagagccttggaaagtgaagagacaggaggcagtagccaaacacccaggtaggtgggagtgaatgaagcagatgacacaaatgacggatcccaatgtcaaggaggaagccaaacctttaaacatgcttccagaagctctgctccagtggaaatggtttctgagaaaccttcatttctttctcttgctttaacatagggacattttttgtcccattcttgtgaattttccaagcactgtacttccccttcagtaatgtgtgtgtgtgtgttgtgtgtgtgttttgttttgtattttgtctttagtgtacagcaataatgagag

SEQ ID NO: 926565 - DNA, 596 bp, Homo sapiens
tttgggtccacgctgcgtttatgagctgtaacactcaccgcgaagatctgcagcttcactcctgagcccagcaagaccacgagcccaccgggaggaatgaacaactccagacgcgctaccttaagagctgtaacactcaccgcggaagtctgcagcttcactcctgagccagcgagaccacgaacccaccagaaggaaaaaactcygaacacatctgaacatcagaagggacagactccagacgcgccaccttaagagctgtaacactcactgcgagggaacgcggcttcattcttgaagtcagtgagaccaagaacccatcaattccggacacactctcacttttgtccttagtagtagtagtagtacttatagtatataagcaccccattcttaccagacttgctatttcactgtatcttgttttgctacacctcatccatctatttgtaagtagtctctgaattaatccttgctaaatactcaatttgagttgccatttttttttctcctgtcaggaccccaattgaaaagccactattaaggctgcgcatgatggcttatgtctgtaatcccagcactttggtttgggaggc

SEQ ID NO: 926566 - DNA, 557 bp, Homo sapiens
tccacgtggctggggaggtgtcacaatcatggcagaatgtggaggaagagcaagggcatgtcttatatggtggaagacaagaaagcatgtgaaagggaactaccctttataaaagcagcagatctcatgagacttattcactatcatgagaacagcatgcgaaaaacctgccaccrtgattcaattacctcccaaaaatgtccctcccacaacacctggtcattatgggcgctacaattaaagatgaaatttgggtggggacacagccaaaccatattactcctcccctggcccctccaaaatctcatgtcctcacatttcaaaaacaattatgacttcccaacagtcccccaaagtcttaactcatttaagaattaactcaaaagtccacagtccaagtctagtctgagacaaagcaagtccctttcacctatgagcctgcaaaatcaaaataaagtgagttatttcctagacacaatggagtacaggcattggttaaacatgcacattccaaatggaagaaattggccaaaaccaaggggctacaggccccatgc

SEQ ID NO: 926567 - DNA, 584 bp, Homo sapiens
caatttcccctctaaacaggacatcccaacattctctgctgttgggaattgagcaatgacaactctagctactccctgctggataggggtaaagaaggggccctgcagtggtagtgtcctccagaggggaacactctaggctasccaaagggccagtgggtcggttcaggggtcctcggcagaagttgttagttgacctcatttggggttccatttctaagaccatctgtagcttgatggccttgatcctggaggaaacaaatttgacaaggaggttaaaaatacagggcctgaaggcgagtaatagcaagatggctgtcatggcaactagaaaggggagaagccatgtcacccaactccaaaggttggtagaagagtttgaaaggtgttgtctgatttcagaaaccttttcctgtacacgccgggtggtgtctcatactaacgctgactggtgagtataaaagcaacaatcttcccctaagaaggtgcaaagttctcctttctcagcagtgaggaggtctaggccttggtggttttggagagtcactcctgccaaagagtctatttgggattgtagagtaagg

SEQ ID NO: 926568 - DNA, 660 bp, Homo sapiens
gaatataaattgcaaggccaggccataatgcaaaaaaaaaatgagccacctctttttcagagtttgcaggtcaaattggtcccaatgacttaggatgcatttcaagggtgatcctgttgatgcctatgtgtttcccatctgaaagaaaaaatgcccgcagttctggtttgtttgtttgcccccccatcccccacccaagaacccgcaatggtccccagaccctgctgattggaatagttgtgttcacaaatgcacagcagcagatccccctcttgcccaagaacttgcaayggttccctggaccctgctgattggcatagttgcactcaccaatgcagcagcaggaacactagttttcctcctagaccacaaagaggactgaggaaggtcagatttagtggcccttactgatgcattcttgaaaacctgcacccttgcctttcctcttagaccacaaggaggatcgagaagggtcagatatagtggcccttaccaacgcattcttgaaaacctgttagagtcctaagcattttctcctgttagtattgggactttacccctgtcttataaaaatgatatgcctcaaaacggagtggagggccatacactgagggagggaagggatctccagggttggaagagtgatgccttttgtcctca

SEQ ID NO: 926569 - DNA, 792 bp, Homo sapiens
ctgtcttactgtttctcagaggatccaatataacacactaaggttttaactgttttaaaattaattttaatgaagcagggcagagcatcgcctcacctgggaagtgcaaggtgtcgggggatttccttttcctagccaagggaagctgtgaaagactggaaaaacgggacaatcccgcccaaatagtgcacttttcatgaggtcttagcgactggcagacaaggcgattctctcccgtgcctggcttggtgggtcccatgcccacggagccttgctcactgctagtgcagcagtctgagatcaaactgcaaggtggcagcctggctgggggaggggcgttaccattgctgaggcttgagtaggtaaacaaagcagccaggaagcttgaactgggcagagcccactgcagttcagcaaggcctactatctctatagactccacctctgtacgcagggcatagcggaacaacaggcagcagacaacttctgcagacttaaatgtccctgtctgacagctctgaaaagagcaatggttctcccagcacagtgtttgagctctgagaatggacagactgcctcctcaagtgggtccctgacccccgtttagcctaactgggagacacctctcaatagggtccgacagatacctcatatagsggggtacccctctgggacaaagattccagaggaaggatcaggcagcaatatttgctgtttggcaatgtttgctattctgcagcctccgctggtgatgcccaggcaaaaagggtctggagtggacctccagcaaac

SEQ ID NO: 926570 - DNA, 574 bp, Homo sapiens
tagtaaatattattaaatattttgcattatttacatggataacttgaataaaatttttaaaaataaaatacataatgtaaaataaaaacaactctctcaaactataagtactcccaatcatgatgttctctgctcactaccaaaggatttttctatcaatttagtgtaatggaatatgcgaggatgtgccaaaatgtatttcatcatattgaaaattgagaggaaaatgtttattttattgtatctttaaatgataaattatcattatccccaccaaagtggaacatttattacartcgatgaaccttcttgacacattgttactacccaaaagtccatagttatactagggttcactcttggtgttgtacattctattggtctggacaagtgtatgacatgcattcacatgacatgtattcaatataatagtattatatggagtagtttcactgctctaaaatcctctgtcttccacccattcatcttcccctccgtgcaccgctctttttattacgtccatagttttgtcttttccagaatgtcatatcactggaatcatataggatgtagc

SEQ ID NO: 926571 - DNA, 609 bp, Homo sapiens
ggaggttgaggtggggagatcacttgaggtcaaaagtttgacatcagcctggacaacataatgagactccatctgtacaaaaattaaaatgaaaaaattagccaagcctagtggcacatgcctgtagttctagctactctagagtcagaagcaggaggatcacttgtgttcaggagttaaaggttacagggagctgtgatctctccactgccctgcaccctgggtgacaaagcaaaatcctgcctcaattaaaaaaaaaaaaaaaaaaaaaaaaaaacactttcaagatcttctgttaaaaagaacttttataaagatgacagatgttattgagaaaaaaaaacaaaacctgtgctctctgatttctataagcagaactagtagttcaggccctttacattcaaggttggrcttttttatttccttccttcttgtcttcctgccttccttctttcctgcatgcatttttatactatctgaacttacaaaagacttgatgtggcttcaaaactggattatcacaacagtctttcaactggtgtcagcttctaatatagtgcccatttaaattattcttatagttgtacagatgagatcatttaatttgta

SEQ ID NO: 926572 - DNA, 847 bp, Homo sapiens
atcgcaccacttcactccagcctgggcaacagagtgagactccatctcaaaaaaaaaaaagaatccatattgtttatcctgatcaagtacctagcataggacccagtacttagcagatgcttaatatattgtggttgaatgaatggagaaagcaatagatcaattaataattttattgcttcttcaatttgtttggccctaactagccattaactcccaccagtccagcctgctgttctctcactttgtgcttctacccacaccacccccagtgttagcttcctgggttttgcttgatgcagcttctatcatactgcgatatcttgtaagttcaccttgcccttcaccgggatcaccataggcaccaactttattatggccttgttttattgtctctccgtacaatatgttggcaataaaactaatttataatactcacttgggaacttgtaaaaaacactttctctctctccaaagcagtattgtgtctctctrcgtactttctgggaaatgcactggttatagaatgcttcagttttcccctctgaaactcaaagcagaaaaatgaagtcacatagataaataaaaatttattttcatctgtcagattacaatttctgtaatttcccatataatccgaagtcttgctaattctccctctgcaatatcttttatatcagccctgctttcctatccctatagtcagtggtgttctggagccaactggcagcagcttgcgaagagccaattgttaaattttcagaaagcaggcaagttggttgttaaacggttggcagcttgaaattagcaatatttacaccgcggaaagtcagccaaagctacaaat

SEQ ID NO: 926573 - DNA, 570 bp, Homo sapiens
tacatgaatattttcccgtagctagtcaaagtctagggttaccagcaggacagaagaagacactgtaggccgggcgcggtggctcacgcctgtaatcccagcactttgggaggccgaggcgggcggatcacgaggtcaggagatcgagaccatcctggctaacacggtgaaaccccgtctctacgaaaaattagccgggcgttgtggcgggtacctgtagtctcagctactcgggaggctgaggcaggagaatcacttgaacccgggaggcagaggttgctgtgagccgagatcgtgccactgcactccagcctgggcgactgagcgagactccgtctcaaaaaaaagaagaagaagaagaagaagaagacactgcattttaggcaagagtccggtgggaagcaggttgagaytgactgagaggaagtaaccatgggagggctgctggtccactgaatgagagagatttttccagaacctcatgctggggctttgatttaggaatccccttcctcctctagtaagtctgccttccctggcctatgcttacgtctaaagcctcgagcctca

SEQ ID NO: 926574 - DNA, 646 bp, Homo sapiens
ttagtcctcagcctctgaggccaagaagagcgtctgtctggtgttggtgtgactttaacaggtcccctctgggacttgccaacctcctcctcaagaacagtgggcctcagactctgcctttggcaaacagctttatttagctagattttaataattcttcagtttgtgttagtttctatttatatggcaaaattataaagtttataaagttaagttttagaaagtgatttgaggtttttagaatgttgggtaagtaaacaaccaataatattgacatctggctggtctagcacgtcaatmtccagttgctaaccactttaattgggaggaaataaactttagaaatgaacttgacctactcagtaagcctcaaccatgtatttttaataaattagaaaggtggtagccaggcatggtggcacacacctgtaccagctactcgggagactgaggcaggagaatcacttgaaggtgaatcacaggaggtggcagttgcagtgagctgagatcacgccattgcactccagcctgggtgacaagagcgaaactcccatctcaaaaaagaggccaggtgcggtggctcacgcctgtaatcccagcactttgggaggctgaggcaggcggatcacgaggtcaggagatcaag

SEQ ID NO: 926575 - DNA, 779 bp, Homo sapiens
cgtgtcgtcacactggaatgctctcctgtgcccacctcattgatgagctcagctcatagcccccaacccaagtttgcactcagtgtttgcttgaaggattgagtgagaaattcctcctatctgccaagctttactgtctttttccagtcacatctgcaggttttcttggtgaaattgtaaagggcaagaacaaggagctgacgtctccccccaaccctgctccaaactcctgcacagacccctccccaccaaggaggaaaagatggagttggctcacgccaacaggaattggcccctaaatttttktttcctcagtgcaggtgtgggccttgtccagcacagcattctgtatcacagagagtggcagtattgataagggtagcagctcaggaggttaaacctttactaacatgcttagtaccatgctaggcacctgccatgcatatgctactcacaatgaccctgtgcagtaagcaacagcatcctcattttacaggggaggatgctgggtctccaagaggggaagttgtgcccagggtcacacacacaggagtaccaggcacgtgatgcacagtccagggttcccaagcagggctgccccatggctttccccaggctcatccccaaaggctcagaaactggtccactccccatgctggtccttcacttgtccattttagacgctctggattgatttcctactttctaaggtgaggacttggacgtcactatctgcatgcatgcagcctcccttccccaggcccccagtgaaggagggg

SEQ ID NO: 926576 - DNA, 544 bp, Homo sapiens
tgtcaataaatatgtgggtcaaacgctgttcgtggctctcagctctgaaggctgtcagcccccgatccactttgcactctatttctgtgtctttgtcttcattcctctagcactgctgggttgaggtctccacgaccgagctggccttggtaagtggcgcccaaatgtggggctcgaacctgggtcgaagkgctgccggagcaacggttggagaatgtggacctacactggaggacacccgagtactcttaagcaatccctgtggtgagtaaggggagctcggaagcatccgggtaacaatgggacaagggtccagcaggcaggaggcttatatgagtctgcttcggcagctgctcagaaaggaggagtgaaggttagcactagccaacttatgcagctttttagtgcagtagagaaatattgcccctggtttctggactgaggaactatgaatgtagaggtctgggagaaggtaggcagctcactgaaaaaggcatataaggatagtgctgaggatattcctataactgtctggtcagtgtgg

SEQ ID NO: 926577 - DNA, 640 bp, Homo sapiens
aggtattcaaagaagaattggtactaatctttccgaaactattccactgctgttgctgctgcctatagactttcagatcatctccctcttctgtgtcagggaaagctcctggctggtgcagacacaacccaatagcagtttaatatgtaatattgaaaaactgggggggtggagccaagatggccgaataggaacagctccagtctacaactcccagcgtgagcgatgcagaagatgggtgatttctgcatttccaactgaggtaccgggttcatctcacaggggagtgcyggacagtgggtacaggacagtgggttcagggcaccatgcatgagccaaagcagggcgaggcgtcgcctcacctgggaagtgcaaggggtcagggaattccttttcctagtcaaagaaaggggtgacaggtggcacctggaaaatcgggtcactcccaccctaatactgcgctcttccaacgccttaaacaaacggcacaccaggagattatatcccgcacctggctcggagggtcctatgcccacagagcctcactcattgctagcacagcagtctgagatcaaactgcaaggcggcagcgaggctgggggaggggtgcccaccattgctcaggcttgagtaggtaaaa

SEQ ID NO: 926578 - DNA, 640 bp, Homo sapiens
aggtattcaaagaagaattggtactaatctttccgaaactattccactgctgttgctgctgcctatagactttcagatcatctccctcttctgtgtcagggaaagctcctggctggtgcagacacaacccaatagcagtttaatatgtaatattgaaaaactgggggggtggagccaagatggccgaataggaacagctccagtctacaactcccagcgtgagcgatgcagaagatgggtgatttctgcatttccaactgaggtaccgggttcatctcacaggggagtgccggacagtgggtacaggacagtgggttcagggcaccatgcatgagccaaagcagggcgaggcgtcgcctcacctgggaagtgcaaggggtcagggaattccytttcctagtcaaagaaaggggtgacaggtggcacctggaaaatcgggtcactcccaccctaatactgcgctcttccaacgccttaaacaaacggcacaccaggagattatatcccgcacctggctcggagggtcctatgcccacagagcctcactcattgctagcacagcagtctgagatcaaactgcaaggcggcagcgaggctgggggaggggtgcccaccattgctcaggcttgagtaggtaaaa

SEQ ID NO: 926579 - DNA, 599 bp, Homo sapiens
actattgaccccctcccagctgtgaggaagaatgactggcttcaggcaggcactggagactcaggtcctactggggtttgtgtcctggaccactgttgggtcttcttgacctcgaagcatacacaccttggagaaacctctgtgtgtttgggttgggcggggagtgaagaggtggaagaaggtcccatcccttgcccagcctttgagagcccgggctggggcatggggggctgtattggaggcgaatcctagctcagtctccaccctagtgtaaggcccaagccagaatctttcactagcctcttaccatcaaaagcagaggcagatccactactaatctatccatggaaggggtcggagtgggctctattttcacagaggaattcaagtcctatcccagccaaggtcctagcraactcagctcgtggacctgtctctgacggtgcttgtgcgaattaaaggaggtaacctacggaaaggattaaagcatggcctggcacatgctcagatgccatcgatatttggtttgctgttgttatttggtctccctgggtctgtggaagaagatcctctggggttgatacaatgggcagatggtg

SEQ ID NO: 926580 - DNA, 649 bp, Homo sapiens
tctccctgcagtgggtacagccacataaatcctgtggctttctattctgttcatctcttcagtggatcttagagatctccaggcactttcctgaattcactgaatacttctactaatgctttctatttttactaactagccgtgatagtatttgctcttgctgactcaagacacacacacacacacacacacacacacacacacactctctctctctctctctctctctctctctctctctctcccccacccacccgcatataaaggtaccattttaaaatttaatatattatgcacaaccttccaagtcaatagagacaggtctatgtgatcatgasgtaatggggtatttactgttgtacacgttggttgccttctcctttgtttcctattacaaatgatgctgcagtaaacatctttaaacagatatctctatcccctcatctaattattgatgagaacttctttaagataaggaactaagaagaaaaaagggaagaagagagaaagggaaggtgggagagagggagagagggagagagacagagagggacagagggagggagggagacagagagggagggagggaggtcattatctagctccaccctgaaagaaaactaggaatgacccacagacataaatgtgt

SEQ ID NO: 926581 - DNA, 633 bp, Homo sapiens
tcaaatccctgctctgccactttggagccgtgggatctgggcaaatcacttcacctctgggactctcagcttctgtggaggtcaatgtggttgttctcaaatattctggctcttgccctctgagcaatgatcagcttatccttccctactcacttgaagttaggtgtggccataagacttgctaaggaaatggcagcagaagtgatgtgtgttacttttgcttggaaactttaggagccagtgtgaattttgctgccttcacttttccattagtcaccattaggggctgttccttctgccctggacccaaagtgaggacacactttgtggaataaagcctcctgctgaacagcaatgagcacacartatgggcaaaaacaaacctttgttgtttgaagtcagtgaggtttggggattgtctgttacagcagcaaaacctgggctatcctgactggtatagtttccttctctataaaacaagttgtgtgaagattgaatgagatggtacatataaagctccaaggcagtatgtggcaatgggtatctgttaattccctctcccattctcagcctctatttccccaactgtaagaagctgttaacttgctctgttttaatgattgaaaatgctag

SEQ ID NO: 926582 - DNA, 724 bp, Homo sapiens
cttcaagctctgatattctttcctccgcttgttgtattctgctattaatacttgtgattgcattatgaagttcctgtactgtgtctttcagctctatcaggtcagttacagtcttctctatactggctactttgttagctcctgcaatattttagcatgattcttagcttccttgcattgagttacaatgtactcctttagttccatgaactttccatattctgaactttccatattctgaattctacttctgtcattttagctatctcagcctcatctgaaattttgctggagaggttatgtggtcatttgggagaaagaggacactttggctttttgagttttcagtggtctggcactgactccttctcatctttctgggcttatttgccttcaatctttgaggttactgacttttggatggattttttttttcttttaacagtctggccacctttctgtcrggctgctacagtatgctgggggtctgctccagtgcatggtcacctcagatttttcagtgtctggaggtatcaccagtgaaggctgcaaaacagcacagatggcagcctgccccttcctttggaagttctgttccaaggtggtatggacctgttgctggctcaaatgcatctgtagatggccagggactccagataggaggtctcattcagtcagaaagaatgggattgggacctccttaaaaaagtagtctggccatatg

SEQ ID NO: 926583 - DNA, 724 bp, Homo sapiens
cttcaagctctgatattctttcctccgcttgttgtattctgctattaatacttgtgattgcattatgaagttcctgtactgtgtctttcagctctatcaggtcagttacagtcttctctatactggctactttgttagctcctgcaatattttagcatgattcttagcttccttgcattgagttacaatgtactcctttagttccatgaactttccatattctgaactttccatattctgaattctacttctgtcattttagctatctcagcctcatctgaaattttgctggagaggttatgtggtcatttgggagaaagaggacactttggctttttgagttttcagtggtctggcactgactccttctcatctttctgggcttatttgccttcaatctttgaggttactgacttttggatggattttttttttcttttaacagtctggccacctttctgtcaggctgctacagtatgctgggggtctgctccagtscatggtcacctcagatttttcagtgtctggaggtatcaccagtgaaggctgcaaaacagcacagatggcagcctgccccttcctttggaagttctgttccaaggtggtatggacctgttgctggctcaaatgcatctgtagatggccagggactccagataggaggtctcattcagtcagaaagaatgggattgggacctccttaaaaaagtagtctggccatatg

SEQ ID NO: 926584 - DNA, 530 bp, Homo sapiens
agcaccaagttctgaggttgcacagagcagcagtggggccgtaggcacagcccaggaaaccatttttttcctcctaggcctccaggtctgtgatgggaggggctgctgtgaaggtccctgacatgccctgaggacattttcccyattgtcttgtggattaacatttggctcttcttatttatgcaaacttatgcagtgggtttgaattcctttccaggaaatgggtttttcttttctactatattgtcaggctgcaaattttccaaacttttatgctccgcttcttgtttaaacataagttctaatttcagatcatctctctcaagttaacagttgcacagatctcaagggcaggggcacaatgacaccagtctctttgctaaagcatagcaagagtgacctttactcctgtttccagtaagttcctcctcttcatctgagaccacctctgcctgcacttcattgtccatatcattatcagcagtttggtaaaaaccatttgacaagtctttaggaagtttcaaactttc

SEQ ID NO: 926585 - DNA, 530 bp, Homo sapiens
agcaccaagttctgaggttgcacagagcagcagtggggccgtaggcacagcccaggaaaccatttttttcctcctaggcctccaggtctgtgatgggaggggctgctgtgaaggtccctgacatgccctgaggacattttccccattgtcttgtggattaacatttggctcttcttatttatgcaaacttatgcagtgggtttgaattcctttccaggaaatgggtttttcttttctactatattgtcaggctgcaaattttccaaacttttatgytccgcttcttgtttaaacataagttctaatttcagatcatctctctcaagttaacagttgcacagatctcaagggcaggggcacaatgacaccagtctctttgctaaagcatagcaagagtgacctttactcctgtttccagtaagttcctcctcttcatctgagaccacctctgcctgcacttcattgtccatatcattatcagcagtttggtaaaaaccatttgacaagtctttaggaagtttcaaactttc

SEQ ID NO: 926586 - DNA, 554 bp, Homo sapiens
gataaaaaaaatccctatacgctgtcggggggaatgtaaattagaacactataaaaaatagtatggagattctcaaaaaactaaaaatagatctatcatacaatccagcaatcctctacagagaaattatcccaatgaaaagaagtaagtatattaaagagawacttggttcaagatggctaactggagacatctgacatccatcctctccagaaagaagaacaaattttatgaatagataatcatacctcaaataggacatccagtagagaacatttgagtccaacagagaactcacaggaaaaaacctgtggcacagaagaagaaagaaagaagtggttagttcccatttagaggttgagatttcctcccattcaagaggttgttccttcaatctattggttgtttcttttgctgtggagaagttttctttagtttaatatagtcctgtttgtctatgtttttgtttcatttcctgtgcttttgaggtcttacccattaaatctttgcttaggctgatgtcctaaagagtttccctgttttcttccagtagt

SEQ ID NO: 926587 - DNA, 633 bp, Homo sapiens
tttgtatttttagtagagaaggggtttcaccatgttggccaggctagtcttgaacacctgacctcaggtggtccgcccacctcagcctcccaaagtgctgggattacaggcatgagccacagtgcccagcctaggtttgatttacccttgagcataggttcctttacctgaaagatccttttcagatatgcatatttatttacwcagaagccatttgttgaatgctaagaaatccaaagaaacaggagatgtcttgttccacgagacttgtacaacaggcccctacttaactgtgataattgatggatgagtgctaacacagttctaatggagtcagaggcaagataggccagttttttgactgaggtgtttggtggaggcatcatgggggtgactacagttgaagagatcttaaagacttttccggttttgcctagactgggaagaacatcatggcagggtcaaggacatggaggcagccaggtgtaaaataatctgagaacagtaagttgacttgtgtgactgaagtagaagaatcttgcaaggaaaggtgagagaaaaggccagagaagtggtcatggtgcaaggcttctttcccaggatcacctctcagagctagatgctctttacccc

SEQ ID NO: 926588 - DNA, 481 bp, Homo sapiens
accgtaagttctaattctggttcgtcagcctggcccccaggcttcaggctgttcctggcttgaaggtggggcttcacccggacctgaccctttctgctcaggagcctgtctgcctcctgccgtcatccatggcacccaggctgtttgtgccatgggrcacctgcaggacagctctgagctgccctcagccctctccttggcctccttcccatgttcatcagtgtccaaagtccagagggggccgaggcagcagggggctggcatgttagcactgccctgagcatgtgcacacccagccaggttgcaacagttcctaggcttggcctcaactttgagatcagagtgggtgctgggagctgggagaggccaggcagtcggagcaggtacttctgagcctgcagagggagggggaattccctttctgggcccttgagattgcagagatgcccgggtccacagccacagcttgggtggctgtggc

SEQ ID NO: 926589 - DNA, 481 bp, Homo sapiens
accgtaagttctaattctggttcgtcagcctggcccccaggcttcaggctgttcctggcttgaaggtggggcttcacccggacctgaccctttctgctcaggagcctgtctgcctcctgccgtcatccatggcacccaggctgtttgtgccatgggacacctgcaggacagctctgagctgccctcagccctctccttggcctccttcccatgttcatcagtgtccaaagtccagagggggccgaggcagcaggggkctggcatgttagcactgccctgagcatgtgcacacccagccaggttgcaacagttcctaggcttggcctcaactttgagatcagagtgggtgctgggagctgggagaggccaggcagtcggagcaggtacttctgagcctgcagagggagggggaattccctttctgggcccttgagattgcagagatgcccgggtccacagccacagcttgggtggctgtggc

SEQ ID NO: 926590 - DNA, 481 bp, Homo sapiens
accgtaagttctaattctggttcgtcagcctggcccccaggcttcaggctgttcctggcttgaaggtggggcttcacccggacctgaccctttctgctcaggagcctgtctgcctcctgccgtcatccatggcacccaggctgtttgtgccatgggacacctgcaggacagctctgagctgccctcagccctctccttggcctccttcccatgttcatcagtgtccaaagtccagagggggccgaggcagcagggggctggcatgttagcactgccctgagcatgtgcacacccagccaggttgcaacagttcctaggcttggcctyaactttgagatcagagtgggtgctgggagctgggagaggccaggcagtcggagcaggtacttctgagcctgcagagggagggggaattccctttctgggcccttgagattgcagagatgcccgggtccacagccacagcttgggtggctgtggc

SEQ ID NO: 926591 - DNA, 579 bp, Homo sapiens
gtctggtttttaatttttatttcttcatttatttttatcctgtttagagctcatttaaagcttctcgagtctgtgggtttataggtcttattaaatgtgggaaacttttttggttgttattgtttcacattttttctgtcttcctgtctcttgtgtctccttctgagagtttattacrgggatgttaactacttgatgttatcggttaagtcattgaggctcttttcatttgttttccaggcttatttctctttgtacttcattgtggatagattctactgctctgttttcaagttcagtggtctttttttctgctatgtctaatctgctgtaaatctcgtttaataaaatgttcgttttccatattgtatgtttcatctccagaagttccattttgttcttttaaaatattttccagttctctatatgaattatatctcagtaaagctaaaaaaaattccttttgctcctttttgctcatgttttcctttacattcttaattatatggagcatatttataaattgtattttcttgttcttatatgctaattgcatcatctctgtcatttctggggctg

SEQ ID NO: 926592 - DNA, 579 bp, Homo sapiens
gtctggtttttaatttttatttcttcatttatttttatcctgtttagagctcatttaaagcttctcgagtctgtgggtttataggtcttattaaatgtgggaaacttttttggttgttattgtttcacattttttctgtcttcctgtctcttgtgtctccttctgagagtttattacagggatgttaactacttgrtgttatcggttaagtcattgaggctcttttcatttgttttccaggcttatttctctttgtacttcattgtggatagattctactgctctgttttcaagttcagtggtctttttttctgctatgtctaatctgctgtaaatctcgtttaataaaatgttcgttttccatattgtatgtttcatctccagaagttccattttgttcttttaaaatattttccagttctctatatgaattatatctcagtaaagctaaaaaaaattccttttgctcctttttgctcatgttttcctttacattcttaattatatggagcatatttataaattgtattttcttgttcttatatgctaattgcatcatctctgtcatttctggggctg

SEQ ID NO: 926593 - DNA, 579 bp, Homo sapiens
gtctggtttttaatttttatttcttcatttatttttatcctgtttagagctcatttaaagcttctcgagtctgtgggtttataggtcttattaaatgtgggaaacttttttggttgttattgtttcacattttttctgtcttcctgtctcttgtgtctccttctgagagtttattacagggatgttaactacttgatgttatckgttaagtcattgaggctcttttcatttgttttccaggcttatttctctttgtacttcattgtggatagattctactgctctgttttcaagttcagtggtctttttttctgctatgtctaatctgctgtaaatctcgtttaataaaatgttcgttttccatattgtatgtttcatctccagaagttccattttgttcttttaaaatattttccagttctctatatgaattatatctcagtaaagctaaaaaaaattccttttgctcctttttgctcatgttttcctttacattcttaattatatggagcatatttataaattgtattttcttgttcttatatgctaattgcatcatctctgtcatttctggggctg

SEQ ID NO: 926594 - DNA, 579 bp, Homo sapiens
gtctggtttttaatttttatttcttcatttatttttatcctgtttagagctcatttaaagcttctcgagtctgtgggtttataggtcttattaaatgtgggaaacttttttggttgttattgtttcacattttttctgtcttcctgtctcttgtgtctccttctgagagtttattacagggatgttaactacttgatgttatcggttaagtcattgaggctctttycatttgttttccaggcttatttctctttgtacttcattgtggatagattctactgctctgttttcaagttcagtggtctttttttctgctatgtctaatctgctgtaaatctcgtttaataaaatgttcgttttccatattgtatgtttcatctccagaagttccattttgttcttttaaaatattttccagttctctatatgaattatatctcagtaaagctaaaaaaaattccttttgctcctttttgctcatgttttcctttacattcttaattatatggagcatatttataaattgtattttcttgttcttatatgctaattgcatcatctctgtcatttctggggctg

SEQ ID NO: 926595 - DNA, 588 bp, Homo sapiens
gcactagaacttgcctaggagttgtagtccttgcaacctagactgcctttcaagtttatttagggagagcacgtttgcccatggtggcgaggcttgctggaactcaagttctaactgtggggctgggtgattactttctggtgatagctagtctaaatgctccctccatgggtaagaatcagctgagtttagcttggttttgctttccactgtgacagggcagcacaggatttaataaagtctcagaatcactgcattctccctctcccaagtgctcagattccttctccatgccatgtggccactgctgggggatgggagggctggtgttggcaattcaagaccatttttcctgctctcttcagtgcctctttctgtgatatgaagttaaaaccaggtattgtgagtgctcacctgatttttcattcttacaaaggttttttttkgtttttttttgtatgtagatagttgttaaatttggtgttccttcaggagggatgattggtggagacttctatttagctccttgctctacccctcccttataaattattgcactattttggacagataggtctgtgtgtgtgt

SEQ ID NO: 926596 - DNA, 588 bp, Homo sapiens
gcactagaacttgcctaggagttgtagtccttgcaacctagactgcctttcaagtttatttagggagagcacgtttgcccatggtggcgaggcttgctggaactcaagttctaactgtggggctgggtgattactttctggtgatagctagtctaaatgctccctccatgggtaagaatcagctgagtttagcttggttttgctttccactgtgacagggcagcacaggatttaataaagtctcagaatcactgcattctccctctcccaagtgctcagattccttctccatgccatgtggccactgctgggggatgggagggctggtgttggcaattcaagaccatttttcctgctctcttcagtgcctctttctgtgatatgaagttaaaaccaggtattgtgagtgctcacctgatttttcattcttacaaaggttttttttgktttttttttgtatgtagatagttgttaaatttggtgttccttcaggagggatgattggtggagacttctatttagctccttgctctacccctcccttataaattattgcactattttggacagataggtctgtgtgtgtgt

SEQ ID NO: 926597 - DNA, 554 bp, Homo sapiens
acggcatttttggatgagagataaacatgtataaaagccacactactagtgtagtatattggtttggctggagaataaggagtgagtggagaagtgatgatagatggatctgaagaaataggcaccgattttttaattttattctgtaggcaagggattgatagtttttatgaattaggaagataacattgctggttatttttctaaagatgtgttaagttgctgagaaaaaaaaactagatatggtgagtgtaattaggaggttgttgcagtcaatcaggccagggatgatggatattgaaaagcaagagtagagttgaagaggaaggaatatacttcagaaatggggactctcagagaaatttttcagtgttagtataaaaagagaataggaagaatattaataaatgaaccamaattggcccagcacagtggctcacacctgtaatcccaacactttgggaggccaaggcaggaggatggcttgagcacaagagttcaagactagtctgggcaacatagcaaaaccctgtctacaaaaataaagttaagaa

SEQ ID NO: 926598 - DNA, 644 bp, Homo sapiens
cccaacttacggagggtaatctgctttaatacaaatttactgatttaaatattaaccacgcctaaaacataccttaacaacagcctctagactggtatttgaccaagcaactgtggacaatacactcaccaagttgatacataaaattaacaatcccatcaggtcattgtcatcagcataataatgaactgaaatttctctcatttaaaaatgtaatttatmttgacctgatcctatttcctttactaagtaccaatctacttctctgtttcccttttcagtaaacctccctgaaagagttgtgtagatacactattcccaaatttcctttacatatactatcatgaagctacactgatcatacagttatccccactctagcaaaagtgttcttggtgtaatcattgacctctaccttgctaaatctaatatttgattttacattgcccatcagaaccatataatgcagcccacctttatctccttcttgatacacttttctcattttgcctccaggatgttactcttcttgtttgctttcctaactcttgtcttctttctttttccttttatatcttacacaataatattgacttccaagagccaatcctcaaatctctcctctacttctccactgcagtggt

SEQ ID NO: 926599 - DNA, 644 bp, Homo sapiens
cccaacttacggagggtaatctgctttaatacaaatttactgatttaaatattaaccacgcctaaaacataccttaacaacagcctctagactggtatttgaccaagcaactgtggacaatacactcaccaagttgatacataaaattaacaatcccatcaggtcattgtcatcagcataataatgaactgaaatttctctcatttaaaaatgtaatttatattgacctgatcctatttcctttactaagtaccaatctacttctctgtttcccttttcagtaaacctccctgaaagagttgtgtagatacactattcccaaatttcctttacatatmctatcatgaagctacactgatcatacagttatccccactctagcaaaagtgttcttggtgtaatcattgacctctaccttgctaaatctaatatttgattttacattgcccatcagaaccatataatgcagcccacctttatctccttcttgatacacttttctcattttgcctccaggatgttactcttcttgtttgctttcctaactcttgtcttctttctttttccttttatatcttacacaataatattgacttccaagagccaatcctcaaatctctcctctacttctccactgcagtggt

SEQ ID NO: 926600 - DNA, 644 bp, Homo sapiens
cccaacttacggagggtaatctgctttaatacaaatttactgatttaaatattaaccacgcctaaaacataccttaacaacagcctctagactggtatttgaccaagcaactgtggacaatacactcaccaagttgatacataaaattaacaatcccatcaggtcattgtcatcagcataataatgaactgaaatttctctcatttaaaaatgtaatttatattgacctgatcctatttcctttactaagtaccaatctacttctctgtttcccttttcagtaaacctccctgaaagagttgtgtagatacactattcccaaatttcctttacatatactatcatgaagctacactgatcatacagttatccccactctagcaaaagtgytcttggtgtaatcattgacctctaccttgctaaatctaatatttgattttacattgcccatcagaaccatataatgcagcccacctttatctccttcttgatacacttttctcattttgcctccaggatgttactcttcttgtttgctttcctaactcttgtcttctttctttttccttttatatcttacacaataatattgacttccaagagccaatcctcaaatctctcctctacttctccactgcagtggt

SEQ ID NO: 926601 - DNA, 625 bp, Homo sapiens
gcagtgtggtgtttgttcttttgctctttgcaataaatcttgttgctgctcactgtttgggtctgcactgcctttatgagctgtaacacttattgtgaaggtctgcaggttgactcctgaggccagggagaccacgaacccaccggtaggaagaaactctggacacatccgaacatcagaaggagcaaactccagacacaccatctttaagaactgyaacactcaccggagggtccgcggcttcattgttgaagtcagcgagaccaagaacccaccaattccagatgcagtctcacctgtatatggaatttaataaagccagactcatggaagcagagagtagagcagaggttgccagaagcttggattggaggtaaatggggagctgttggtcaaagggttaaaaaaaggcaagagtgacaaattgtattaaaaaaattatttaaaatgtgttttgacacatcatttttatgataataatgtttatttatacctttaacctaatataattcaaatttatactgacatcctcccatctgctccttctgaaggacaaagtcatctgtcattgatttagagttcccagggtattatttaattagggctttgtaattaataacaacaa

SEQ ID NO: 926602 - DNA, 625 bp, Homo sapiens
gcagtgtggtgtttgttcttttgctctttgcaataaatcttgttgctgctcactgtttgggtctgcactgcctttatgagctgtaacacttattgtgaaggtctgcaggttgactcctgaggccagggagaccacgaacccaccggtaggaagaaactctggacacatccgaacatcagaaggagcaaactccagacacaccatctttaagaactgcaacactcaccggagggtccgcggcttcattgttgaagtcagcgagaccaagaacccaccaattccagatgcagtctcacctrtatatggaatttaataaagccagactcatggaagcagagagtagagcagaggttgccagaagcttggattggaggtaaatggggagctgttggtcaaagggttaaaaaaaggcaagagtgacaaattgtattaaaaaaattatttaaaatgtgttttgacacatcatttttatgataataatgtttatttatacctttaacctaatataattcaaatttatactgacatcctcccatctgctccttctgaaggacaaagtcatctgtcattgatttagagttcccagggtattatttaattagggctttgtaattaataacaacaa

SEQ ID NO: 926603 - DNA, 625 bp, Homo sapiens
gcagtgtggtgtttgttcttttgctctttgcaataaatcttgttgctgctcactgtttgggtctgcactgcctttatgagctgtaacacttattgtgaaggtctgcaggttgactcctgaggccagggagaccacgaacccaccggtaggaagaaactctggacacatccgaacatcagaaggagcaaactccagacacaccatctttaagaactgcaacactcaccggagggtccgcggcttcattgttgaagtcagcgagaccaagaacccaccaattccagatgcagtctcacctgtatatggaatttaataaagccagactcatggaagcagagagtagagcagaggttgccagaagcttggattggaggtaaatggggagmtgttggtcaaagggttaaaaaaaggcaagagtgacaaattgtattaaaaaaattatttaaaatgtgttttgacacatcatttttatgataataatgtttatttatacctttaacctaatataattcaaatttatactgacatcctcccatctgctccttctgaaggacaaagtcatctgtcattgatttagagttcccagggtattatttaattagggctttgtaattaataacaacaa

SEQ ID NO: 926604 - DNA, 818 bp, Homo sapiens
aataatatctggtctttaactcatataataatagtaaacatatagaaatactagaaattactcattcatttaattaaaacttaactatttattttgcatttttttttagagacagggttttgctctgtcactcaggctggagtgcagtgacatgatcgtagctcactgtaccctcaaatttctggactcgaacaattctcctacctcaagcctctcaagtagctaggactataggtgtatgccaccagactaggctaacccttccctccctctcttccttccttcctccctttctctctctttctctctctctctcttttcttttctttttttttttttttcagatgaattctgcctatgttgcccaggctgatcttgaattactaatctgaagcaacactcctgyctcagccttccgaagtgctgggattctatgtgtaagccgccatgcttggcctgcaaatatttattgaatacataatttttgaagtaatgaaaaactgaagtccaaagatttttcgttgtgatttaaaataagatttagaactattgtcatatccctatggaaatgaagcaagtgaaggagttttgtattattgagaggtgacagcgtgctggcagtcctcagagccctcgctcgctctgggcgcctcctctgcctgggctcccactttggaggcacttgaggagcccttcagcccaccactgcactgtgggagcccctttctcggctggccaaggccggagccggctccctcagcttgcagggaggtgtggagggagaggcgtgagcgggaacccgggctgccccaggcgct

SEQ ID NO: 926605 - DNA, 470 bp, Homo sapiens
ctcccgggaaggcgcctccagaggcctggccctggagtgagaggggaaggggtgactgccaggagaaccagcagcttccgggcttgtgtccctcccaattcaggccctgcccgggagttgacatgggggctgtccacacagtcctccctgtcccggctggaaaccacctgggcacaggaagccgggtggacaggggtggtcccacgccagactggccctgctgcccagtcagcaggaacaccgaggccagtgggggccagggaagggggaaccctgagcccttaaccaccagcctctttggaatcaaggattaggggragctcaaagaatccttcaagatcatctcagccagaggctgcaggtagcatatgttaggaagtggcctgtgccgtgatgtaagagaagagggtggtaattgaggggagcccatgccagtctagacactcatgagttcaaatccactgactgag

SEQ ID NO: 926606 - DNA, 602 bp, Homo sapiens
gaggctgaggcaggaggactgcttgaacctgggaggcagaggttgtggtgacccaagattgtgcccttgcattccagcctgggcaatgaacgaaactctgtctcaaaaaaaaaaaaaaagacacgtgcacacaaatgttcattgcagcacttttcacaatagttaagacacggaatcaacctaaatgcccaccaatgacagactggataaggaaaatgtacatatacaccatggaatrttaggcagccataaaaaaatgagattatgccttttgtgggaacatggatggagctggaggctatcacccttagtaaactaatgcaggaagagaaaaccaaatactgcatgttctcacttacaagttggagctaaatgataagaactcaggaacacagaaggaaacagcagacactggggtctacttgagcaggaagggtcaaaggagggagaggaacagaaaagataactattgggtcctgagcttaataactgggtgatgtaataatatgtatgacaaaccgccgtgacacatgcttatgtaacaaaccttcacatgtacccccaaacttaagttaaaaatttttaaaaagaaataatgattt

SEQ ID NO: 926607 - DNA, 591 bp, Homo sapiens
ggtactggcacctagtgagtaggagccagccagggatgcagttaaacgtccttttgtggataggacaatcctttacaacaaagaattctctgtaatggtgaggttgagaaaggtcatgaagatatgctcctatggttttttctagaggatttataatttcagctctaaggactatgattgatttaagttaattttttatatgatgtgagataagagtctacattgttcttttttcttttttagttttttattttattattattttttgagatggagtctcactctgttgcccaggctggagggcaatgttgcaatctcagctcactgcaaattccacctcctgggttcaagcaattcccctgcctcagcctcctgagtagctgggattacaggcgcacgccaccatgcctggctaatttttgtatttttagtagaggtggagtttcaccrtgttggccaggctagtctcgaactcctgacctcgtgatctgccaaccttggcctcccaaagtgctaggattacaggcgtgagccactttgcccggcctgttctgtgttttaaaaataaatatatgaatattcagttgcccc

SEQ ID NO: 926608 - DNA, 640 bp, Homo sapiens
agtgtctgaggcttttccagacacatggtgcaagctgtacgtggatctaccattctggggtctgaaggatgtttgctctcttctcacagttccactaggcagtaccccagtgggaactctgtgtgggggctccaaccctacacttcccttccgcactgccctagcagaggttctccatgagggctccacctctgcagcagacttctgcctggacatccaggaatttccatacttcctctgaaatctaggcagagatttccaaacctcaattattgtcttctacacatctcaagctcaataccacatggaagctgccaaggcttggggcttgcaccctctgaagcaacagcctgagctgtaccttggccccttttagccattgctgaagctgctgagatgcagggcaccaagtccagaagctgcatacagcagkgggggctggacctggcccaggaaaccatttttctctcataggcctctaggtctatgatgggaggggctgccaagaaggtctctgacacatcctggagacattttccccattgtcttggcaattagcatttggctcctcattacttatgcaaatttgtgcagccagcttgaatttctcctcagaaaatgagtttttcttttctattac

SEQ ID NO: 926609 - DNA, 588 bp, Homo sapiens
tacatcaatagaaattacccaaactaaaacttgaagaggaaaatgagagagaaaaaaatagaatgtagcatccaagagctgtaggaaaatatcaaatagttgattattcatgtaactggaatcctagaaaaagaatcccatttattttccaggaaaagaagaagagcaaggtagaaaaatatccaaaaaaataatgatgaagaatatttcaaaattaatgacaacacctgtggtttggcaggatgataccaagcaaacatacctatgcacatcctaataaaactgctaaaaaggaaagacaaagagaaaatattaraaagcagttagagggggaaagacacattgcatgaagagaaacaaaaatgagaattacagcaaacttcttgtcagaaactatgcaagcctgaagataatggaataacactttttaaagggctaaatgggaggagtggtcaacccagaattcgatacccagtgaaaaaatcttcaaaaaataaaggagaaataaaggttttctcagacaaaaaaaaaaagagaatttcttaccagtataaaaattttaaaggaaacttttcaggcagaaggaat

SEQ ID NO: 926610 - DNA, 667 bp, Homo sapiens
ttgactatacatcaatagaaattacccaaactaaaacttgaagaggaaaatgagagagaaaaaaatagaatgtagcatccaagagctgtaggaaaatatcaaatagttgattattcatgtaactggaatcctagaaaaagaatcccatttattttccaggaaaagaagaagagcaaggtagaaaaatatccaaaaaaataatgatgaagaatatttcaaaattaatgacaacacctgtggtttggcaggatgataccaagcaaacatacctatgcacatcctaataaaactgctaaaaaggaaagacaaagagaaaatattaaaaagcagttagagggggaaagacacattgcatgaagagaaacaaaaatgagaatwacagcaaacttcttgtcagaaactatgcaagcctgaagataatggaataacactttttaaagggctaaatgggaggagtggtcaacccagaattcgatacccagtgaaaaaatcttcaaaaaataaaggagaaataaaggttttctcagacaaaaaaaaaaagagaatttcttaccagtataaaaattttaaaggaaacttttcaggcagaaggaatatgacatcaaaaagaaacttggatctacacaaagaaacagtctctgaaatggaatgaataaaagtaaatata

SEQ ID NO: 926611 - DNA, 603 bp, Homo sapiens
gccataaagatggcaacaatacacgttgtggactactagaggtagaaaagcggggaaggacaagggttgaaaaactattgggtacgatgctcagtacctgggtgacaggatcaatcataccccaaacctcagcatcacacaatattcccaggtaacaaacttaccctataccccctgaatctaaaacagaaattattttttaaatttttaattaaaataaaaattttaaaaggtcaccaaggcaaggagggagtcagaagagacacacttcaacccaactttccctccaaacttcagtgtattgccattgcatcttctcagccaaatccaacaatccaccagccagcaaaggagtctgggygttgcagtctgcaagggtcaagtttgcagagaccacagcagggcagaaagggatgaatacaacttggggtacaaatgaacaaagagaagtgaagtttgcccattcttctagcttcatctcaagccaacctcctcctctctctctgtccctcctttgacctatttgaatacagcataaatagaatttttaaaatacataaataacatcataataatagataaataaataagtagaataaaaag

SEQ ID NO: 926612 - DNA, 474 bp, Homo sapiens
gctgtctttttttagtgagcttggaaatttatgtcttgaaataaaattgtccacttaatctaagttgtagaatttattggtattaatttattcataatattcctcttatcctgttaatatctgtaggatctctagtgatgtcccttctcccactcctgatatggataatttgtcttctctcttattttgtctatcaatccatctcgaggtttatcatttttattgatytcaaaaagcagcttttcatttttatggctcatcaatttttttgttttctatttcattgatttatactgagatatctattatatccttattattactaacttttggtttaatttgttttttgtttgttttttgtttttgttttgagatggagtctcactctgtcgccaggctggagtgcagtggcatgatctcagttcactgcaacctccacctccctggttcaagagattcccctgcctcagcttc

SEQ ID NO: 926613 - DNA, 551 bp, Homo sapiens
tgtgaatttgttaggtgctggctatttttatattcctgtaaatattcttgagctttttcctgggatgctgttaagttacctaggaagagtttgatttgtttggatcttgcctttagaattttctgggtgggaagagcagtgtttactctggggcaagtgattccccactattgagacaagaccctctgaatactctatccagtgtcccatgaattgtagagttttccagtctggctgctggggacaggcgctgttttaggttctgtgtgagggccagttgctgttccctctaatcctttcaggtgattctgttccctgccttgagtagttttctcatgacattctcatcagtgttctgctgaatatttgagggggaccttctgtaggtctccagggttccctcttgtgagccctytcctctctgtgtcctgtgaattctagcaaccttggtctcctggatgctcagcaatatctcttcaactcatggagactgtcaggccacacctgggttcccttcctgctccatggcctggaaattctcctaggcagta

SEQ ID NO: 926614 - DNA, 689 bp, Homo sapiens
agattgaggatgggtcggcctctcccagcccactgactcaaatgttaatctcgtttggcaaccccctcacagacacacccaggaacaatactttgcatccttcaatccaatcaagttgacactcagtatgaaccatcacatccctcaaatgaacacataaataaatgataagaaataacggcttacaatcaacaaaacgctgtgtgtgatagtagtaacattgacatactgtatctagcagctagcctggagaaactgataacttcctcctgttttaaacagaaatgtggggtttgttgtgtatttctatgatgtgttttgttttttgagacagagtcttgctctgtcacccaggctggagtgaagtggcatggtctcagctcactgcaatctctgcctcctgggttcaagccattctcctgcctcagcctcctgagtagctgggattacaggtgcacaccaccacacccagctaatttttgtatttttagtagagacggggtttcaccatgttggcmagcctggtctcgaactcctgaccttgtgatccgcccgccttagcctcccaaagtgctgggattacaggtgtgagccactgcacccagctaatgtgttttttaaaaatatataatatacatatatacttattgcatattcactctagggcaaagactttacatttattctat

SEQ ID NO: 926615 - DNA, 592 bp, Homo sapiens
catgagattagtgcccttataagaaaagacccctttctctgcctctcttgccgaccctgtctgcaatgtgaagatgcagtgagaatgcagctatctgcaagccaggatgaaacctctcaccagaatcaggccattctggcaccctgatcttgcattttagccttcaggacagttagaaaataaatttctactgtttaagccacccagtctacgagtattttctgatggcagcccaaagagaccaaaacagattttggtaccagaagyggggttcccaaaatggtacccttccctggcatgataagccaactaccctggtggcagttagataacactggactgcttccattgtagaaggagaagtgttttgttcttactgaaacagacacttattttggatatggatttgctttccctgtatgcagtgcttctgccaaaactaccatccttggacttacatagtgcctaatccactgtcatggtattccacaatgtgctgcttctgaccaataaactcactttatagccaaagaagtgtggcagtgggctcatgctcatgggattcactggtcctaccatgtgaaccctccaa

SEQ ID NO: 926616 - DNA, 801 bp, Homo sapiens
ctgtttttcctctgctctcactctacgacaatcaacacagaatacttctgtaaccaaatggaggtgggatggggttccccacaaaccaaacaagcaatcatttctgcagtggatgcaggctggatgtcctccagtgcaattcaactctgattatctacctgaagttagcatcaggtcccgtaggttgagggctcagtctcacaagactgcctcccaccgcagatgccaatcacaagaccctggttgttttacctttacttctgaccaactggctgtaaagcaagattcccaggaccccctcccccagatttgattaatttgctaatgtggctcataggactcagggaaatacttacatttactggtttattataaagaatattacaaaggataccaatgaacaccagatgaagagatggagaggccaaggtatggaggaagaggcatggagtttccacatcctctttgagcatatcagtctccaggaacctccrtgtgttctgctatctggaagctccttgagcccagtctttctgagtttttatagaatcttcattacataggcatgattaattaaatcataggccagtggtgatcaactcaaccttcagcccctctctcctccagagtttgcgggttgacactgaaaatcccaactctttaatcatggcttggtcttcccagtaaccaaccccggtcttgaagatatttagggatggcaagccaacagtcaacccattagcattcataagatgtgtatcactttggagattccaaggatttcagcagccgtatgtcagg

SEQ ID NO: 926617 - DNA, 571 bp, Homo sapiens
tgaactcctgggctcaagggatcctcccaccttggcctcccaaagtgctggaattacaggcatgagccactgcacttagcgctcttatttattgtctattgagcatctactttgtgtcctgagctaggcttggggaagttatcaaatactaaatcctatgtatagtttttttaattaaaaaaatattaatttatagagacaaggtctcactatgttgcccagattggtcttgaactccygagctcaagcaatcctcttgccttggcctcctaaagtgctagggttacaagcgtgagccactgtgcctggtcatatgtgtaatgttaccctcaaaacactttagtttggctcctgctgggggataatgcaaagcacagtagtactaactctttatgttgttttctctgtgccaggcactgttctggaccctgggagtagcagggttggaatttgaatgcaggggtctggttctaaccaccctgcctctctgtacaagtaatcccagtgcaaaagacaaagcaagatgtgttctaataaaggggagatgaagaactatgagaattcagaggac

SEQ ID NO: 926618 - DNA, 571 bp, Homo sapiens
tgaactcctgggctcaagggatcctcccaccttggcctcccaaagtgctggaattacaggcatgagccactgcacttagcgctcttatttattgtctattgagcatctactttgtgtcctgagctaggcttggggaagttatcaaatactaaatcctatgtatagtttttttaattaaaaaaatattaatttatagagacaaggtctcactatgttgcccagattggtcttgaactcccgagctcaagcaatcctcttgccttggcctcctaaagtgctagggttacaagcgtgagccactgtgcctggtcatatgtgtaatgttaccctcaaaacactttagtttggctcctgctgggggataatgcaaagcacagtagtactaactctttatgttgttttctctgygccaggcactgttctggaccctgggagtagcagggttggaatttgaatgcaggggtctggttctaaccaccctgcctctctgtacaagtaatcccagtgcaaaagacaaagcaagatgtgttctaataaaggggagatgaagaactatgagaattcagaggac

SEQ ID NO: 926619 - DNA, 568 bp, Homo sapiens
caacccttctccacggccctgggctcgggaccaccgcggaggcgccgctccagacactgagctgcagagcggagcagtcaccttcaaacgccccctgggccccgcccctgcttccgcagcctggcgccaggcgcctctgagcratgccccctaagccatcagcagccctccctgcagaggcttcagacaccccaggagctggggagaccattttcaggtcctctggggtcctggtttgggtgtggggacagaagcccctcacgaaggacttcccaggcagccgctccaggtgggggagggtccagcccacaaggtattgcgggtaaggaatgatggtctctggggaaggccaggcaggggcctgcttagggtgacctgtgaccacttcactctcccccaggaagaacactcgctcccggccatacttgcgtgtgagttctgacccctggaggagccactgtggaagcagagcaatcgccatggagtttgtgatgaagcaggctctaggaggtaggaagcgggaggtggggtggggaggggctgaggggacatggagagaccaccacag

SEQ ID NO: 926620 - DNA, 783 bp, Homo sapiens
tcatgccaggaacaacacaaggccgtgtccgtggaaaaccagggcctctgtgcaccaggcatcccagtcactcatcccgacacctggagacagggcaggtgtcagaaagctgtctcaggaagtcccagccaccggctgatgggcgtgtggctgggtccatgctcctaggtccacccargctgggagtccacggagggtgagggggccggctgtgtgggcagtggctggtggagctgccggaggctgcgcttgcccgggggcgtcaggagcagcgaggccgcagcagcagcctggccacgaggtgcgcatctcccaggtgctgacgcaggtctgcttgtttcagtgatgtcattcccagcagaaggtgtggagtcagcgctcaaaaacaacatcgaagatgtgcggttgttcctggactccaagcacccagggcactatgccgtctacaacctgtccccgaggacctaccggccctccaggttccacaaccgggtgtgtggccacaggctttgtcttggtgccactctggagcttccttccgctccagtgcaggggcatagctgagggctttggccagggtggggctgtgatgggggcggccggaggtctcctgaggggctgcagagcgtgggacaggagggggcgaggtggggtctctgttgctctgaggatgccgcttgccgggaactctggaggccccagctcctcactgcttcccaccagccagagggtgctcgaggccgaggcattccttccagacacgacacttgtcagtatgcaaag

SEQ ID NO: 926621 - DNA, 594 bp, Homo sapiens
ttttcccagcaccatttattaagtagggaatcctttccccatttttttgtttttgtcagatttgtcaaagatcagatggttgtagatgtgtggtgttatttctgagggctctattctgttccattggtctatatctctcttttggtaccagtaccatgctgttttggttactgtagccttatagyacagtttgaagtcaggtagcgtgatgcctccagctttgttctttttgcttaggattgtcttagaaatgcggcctttttttttattccatatgaactttacagtagttttttccaattctgtgaagaaagtcattggtagcttgatggggatggcattgaatctataaattaccttgggtagtatggccatttccacgatattgattcttcctatccatgagcatggaatgttctttcatttgtttgtgtcctcttttattttgttgagcagtggtttgtagttctccttgaagaggcccttcacatcccttgtaagttggattcctaggtattttattctttttgtagtaattgtgaatgggagttcactcatgatttggctctctgtttgtctgttattggtgtatag

SEQ ID NO: 926622 - DNA, 649 bp, Homo sapiens
agggttccaccctaatgaatggattaatgccaattataaagtctagaagctgcaagtgtgatctctcgtgctcttatgctctcttgcccttccactttccaccatgggttgatgcagcaagtaggtcttcaccagatgttggcaccttgacattggacttcccagcccctagaactgtgagaaataaattacttttttaaatataagctacccagtttgtggtattctgttatagcaacataaagcagactgggatactcctcaaactcactactcagataacctgctgtagggaggagaattaagtggaacaaaacatcaaaagtgttgaggaaaatgccctcctcatggaaatcaggggagtggggataaaatgttcccctctaacaataaatcagatatttttaggaataaatagagctatgaagaacatawtataaagcagtatgagaatgtggggtagggggagaatcttccttgcctgggatgttcatggaaggcctctcagaggagaggtattcaagctggagtcagctccccagtgccttgggagaaggccattctagcagaatgaatgcttagggcaaaggttctgaggtgggaataaatctgatgtcactgagaacagaaagaaggccagtgggggtac

SEQ ID NO: 926623 - DNA, 604 bp, Homo sapiens
tttgagttccttgtagattctgggtattagtcctttgttggaagtatacattgcaaagattttcccccactctttgggttttctgtttactctgctgattatttcttttgctgtgcagaagctttttcgtttaattaagtcccacctatttatctttgttacagttaactttttttaataaggagaagtacactctaaaataatgataaaatataatatagtaaatacataaaccagtaacatagttgttattatcattatcaagtattatgtactatasatagttgtatatgctatacttttatattattaatagtgtggtaggtgtgtttacaccagcaccaccacaaatacatgagtaatctgttgtgctatgatgttataccactagttgatagaaatttttcagttccactataatcttttggaaccattgtcattgaccaaacagtcattatgaaatatatgattgcatatagtgtatctgaaggtaatggtgctgtgggtaaaataagcaagaaacaggagggtagggagtatcagttgttggagggaagatgtttgctgtttcaattaaggtgatcagggaagtcttcagtgacaa

SEQ ID NO: 926624 - DNA, 619 bp, Homo sapiens
acacaatttattatttatttattttgagacagagttttcctcttattgcccaggctggagtgcaatggcgtgatcttggctcactgcaacctccacctcccgggattctcctgcctcagcctccagagtaactgggattacaggcgcccgccaccatgcccagctaattttctgtatttttagtagagatgaggtttcaccattttggccaggctggtcttgaattcctgacctcaggtgatctgcccgccttggcctccccaactgctgggattacaggcgtgagccaccgtgcccagcccaagacacaatttagaagagaagtttacttctcttggggggaagcaaacatrtatacaaataattacaatgtaatgttttaaaaagtaatttaaacattacatataattttttagtgagatgcaagtttgtcttaactactgcagggaatccttttagtgattcacggactagttttttttcgagatgggtctcactctttcttccaggatgaaatgcagtgacatgatcatagatcactgcagccttgaactcctgggctcaacttatcctcatcctcagcttcccgagtagctgggactacaggcataagctacta

SEQ ID NO: 926625 - DNA, 617 bp, Homo sapiens
ctctagcatgtcatagtgtgtgtatatatacatatatatatatatgtatatatacacacacacgcatacacccgtgattaatgtattaatgtaatcagtgtagctggactctagcatgtctgtgcatgtgtgtgtgtgtgtgtgtgtgtgtgtgtgtgtgtctatgtactcacatatacccattgatatggtttagctctgtggcccactcaaatttcatcttgaattgcaatccccacatgccgagggagggaggtgattggatcgtggaggtggtttccgccatgctgttcttgtgatgatgagtgagtctcatgagatctggtgatttcatgagcgtcyagcatttcccctgcttgcatttctctctcctgccaccctgtgagtaaggtgccttgcttccctttcaccttctgccatgattgtaagtttcctgaggcctccccagccatgtggaactatgagtcaaataaaccatcttcctttataaattaccgagtctcgggcattttttatagcagtgtggaaacggactaatacacccatgattaatgtaatcagcataagtggattctagcatgtacttatgtgtgcatgtatgtacatgcatgtaccca

SEQ ID NO: 926626 - DNA, 560 bp, Homo sapiens
tcccagcactttcggaggccaaggcaggcggatcatgaggtcaggagatcgagaccatcctggctaacacggtgaaaccccgtctctactaaaaatacaaaaaaatagccgggcgtggtggcgggcacctgtggacccagctactcgggaggctgaggcaggagaatggcgtgaacccgggaggcggagcttgcagwgagccgagatcgcaccactgcactccagcctgggagacagagcaagactccgtctcaaaaataataataattattatgattatgactattattatctatatatacacatatatattttacagaagcacgggcagaagatacatttcaacgagagggagaggaaaatcctcgccaccagacaaaacaaggcattaaagggtgagacttccagacacagtggtgccgagatatggccagtttagtgcgatgtgtttgccgtgtaatgagagagattttgtggaaagaaaaataataataagcaggccgtcttcatcccaacgccactcccaaacgcaccttttggtgtcaatccttctaatcgat

SEQ ID NO: 926627 - DNA, 798 bp, Homo sapiens; identical to SEQ ID NO: 925229

SEQ ID NO: 926628 - DNA, 588 bp, Homo sapiens
ttgcttctgcttcttccttaaaatttgtttgatagaattcaccaattaaaccatttgaaccaggcgttgtccttctgagaagggagtgaattaacaaaaaataaacaaaaaaacatatgcaaaacaagatatcttgaagttttttgtgttattgcttatttttaggtccatattcaatttccagttattttttatacagtgtgcaataaaggttgggattcatttattttcttcataaggatatttaattgatctagcacagtttattaacaagaattttttctctatgaarttactttgacaatgttgtcaaaaatcaattgtccatatatttgtgagtttacttctgctctctattctgttcccttaatcgaagctatccatacaccaatatcatattttcattactgtaactttatgtcatgaattcaagtgaagtaagtcttccaacattgttctttttcaaaattgtttctattattctagatcctttgcaatctttacaaaatagttatctatttaggccatctttaattcctctcatcaatgctgtgtaatttttagtatacagtttataaacatactttg

SEQ ID NO: 926629 - DNA, 692 bp, Homo sapiens
ccttaatatgatgttaaaaccaggcactgtgattgctcacctggtgttttgattcttatgaaggtgcttttttgtgtgcatagctgttcaatttggtgttcttgtgggagggatgattgctggatgatttggtcatcttgctccatctactcattccaaatctctctgtgagctttaattcaagaaggaatatgggaatccaccagaatcattaaggacatcccagatcccagggaggagtatgtgggcagttagccctgtggtggcatctaggtgataaaagtgagtgaagcctcagtatgtgagagaggcagagagcctccctctgtgactcaccattctattggagatccaagcaacccaggcctagggatagcactttgyttctcccaagcccttgaggtaatttggggagagtcttggagatgctgtgagggaaagacaccgggaaaagctgcaggcattttcccagaactgggaccaagaacatcatgccagttttaatctgggtgcatataaagtcagtcattctttgatgacccagaagtgtggctctgcaggcattttattctcaagccaaagactagagggcttgctcttgaggagagtagggacctccaaagccataattgtggaaagcaccttagcagtatggctggaattgcacactctccctaattgcaagcctggga

SEQ ID NO: 926630 - DNA, 571 bp, Homo sapiens
cccttcttctggacacttcttgccctttgggccagcactcttgtgcttctcctccttgatctgtacctgctgcttcctctcaggcttctcttttcctccctttgtctggcatctaccttcaggcaggcccggtgtttcctccatcctactcttcctcargtcatctcccctcagtaaaatcaccactgtctgcccatgagtgcaaactgggaagctagaactcggtctgatttcccctagatgcccctcgaccaccagaccctgcctactctacttctcaaacctccggtcattgccacatgcccatggtaccaccaaggaccttagccattcttgcagccctggccatggggatttttttctcaatcccactcccttctctgctaaaagccttacaaaggccacaggatggcatgcacattcctggcaagggcccatgagaccatgcccaggtgggcactagccactcgcaacttcctactccactcttgaacccgacccacatgtcctctcctgctggcctcccatctaagagggtgagacccccaggaccatggctgtgtcttagttc

SEQ ID NO: 926631 - DNA, 571 bp, Homo sapiens
cccttcttctggacacttcttgccctttgggccagcactcttgtgcttctcctccttgatctgtacctgctgcttcctctcaggcttctcttttcctccctttgtctggcatctaccttcaggcaggcccggtgtttcctccatcctactcttcctcagktcatctcccctcagtaaaatcaccactgtctgcccatgagtgcaaactgggaagctagaactcggtctgatttcccctagatgcccctcgaccaccagaccctgcctactctacttctcaaacctccggtcattgccacatgcccatggtaccaccaaggaccttagccattcttgcagccctggccatggggatttttttctcaatcccactcccttctctgctaaaagccttacaaaggccacaggatggcatgcacattcctggcaagggcccatgagaccatgcccaggtgggcactagccactcgcaacttcctactccactcttgaacccgacccacatgtcctctcctgctggcctcccatctaagagggtgagacccccaggaccatggctgtgtcttagttc

SEQ ID NO: 926632 - DNA, 571 bp, Homo sapiens
ggaaactctttttgtagaatctgtgaagtgatatttcagagcccatggagaagtatatggaaaaagcaaatatcctttgatgaaaaggagaaacaagctatttgtgaaaatggtttgggatgtgtggatccatctcacagggttaacccttgttttgattcagcaggctggaaacactctttttgtagattctatgaaaggatattccaaagttaattgaggcctgtagtgaaaagttgactatctacgatgaaaactagaaacaagctatctgtcaaaaggtcttgtgatgtgtggaataatctctcatagctaaatctttgtttttattcagcaggytggaaacgttctttttgtagaatataccaagaaacattttggagcccatggatgagtatattgaaacattgaatatcttgcaataaaaactacaaagaagctatctgtaaaaattctttttgttgtgtggattcatcttacagacttaaacacttattttgattcagcaggttggaaacactctttttgtagaatctgctaagggccatatcagagcccattgaggcctaca

SEQ ID NO: 926633 - DNA, 507 bp, Homo sapiens
gactacaggtgcccaccaccacgcctggctcatttttttgtatttttaatagagacggggtttcactgtgttagccaggatggtcttgatctcctgaccttgtgatctgcttgcctcggcctcccaaagtcctgggattacaggyttgagccaccacgcccgacccctccttcttaatatatcaacttgatatattacctgatggcttcctgttctgatagctgatgacttggctgacactcacctcttaccccagtgcctgaaccactttccttatatggtgctctcattattttctttttcttttcttttctttttcttttttttttgagacagagtcttgctctgttgcccaggctagaatgcagtggcacaatctcagctcactgcaacctctgcctcccaggttcaagtgattctcctgcctcagcctcatgagtagctgggattacaggcataagccaccatgcctggctaatttttgtattttagtagaagcggcgtttc

SEQ ID NO: 926634 - DNA, 507 bp, Homo sapiens
gactacaggtgcccaccaccacgcctggctcatttttttgtatttttaatagagacggggtttcactgtgttagccaggatggtcttgatctcctgaccttgtgatctgcttgcctcggcctcccaaagtcctgggattacaggtktgagccaccacgcccgacccctccttcttaatatatcaacttgatatattacctgatggcttcctgttctgatagctgatgacttggctgacactcacctcttaccccagtgcctgaaccactttccttatatggtgctctcattattttctttttcttttcttttctttttcttttttttttgagacagagtcttgctctgttgcccaggctagaatgcagtggcacaatctcagctcactgcaacctctgcctcccaggttcaagtgattctcctgcctcagcctcatgagtagctgggattacaggcataagccaccatgcctggctaatttttgtattttagtagaagcggcgtttc

SEQ ID NO: 926635 - DNA, 670 bp, Homo sapiens
ctgattaagataatctataaaccgggcatgatggctcacgcctgtaatcccagcactttgggatgccaaggcaggcagatcatgaggtcaggatattgagaccatcctggctaacacagtgaaaccccatctctactaaaaatacaaaaaattggccgggtgcagtgcctcacacctgtaatcccagcactttgggaggccaaggtagatggatcacctgaggtcaggagttcaagaccagcctgactaacatggtgaaaccctgtctctactaaaaatacaaaaattagctgrgcatagtggcacacacctatggcacacacaattctggtcccagccactcagaaggctgaggcaggagaattgcttgaactgttgagggattcaggaggacgagagagacctcgggttgaaacaggagaatattgagtgcactcaggcccggctgactcacgtgtaaaagactgggcccggaataaagacagcacctgacttttatacacacttcagaaaagggggtgggctagcttgaagcaaggttacagtggcatgaaatcagggatacagaggcaggacaaagacaggattgcacatgactgttgccaagcaacccagatgtctgttatctaggtttgtcagggcacaggcttatcctataaccttcactatg

SEQ ID NO: 926636 - DNA, 626 bp, Homo sapiens
gggctaaagctgtggtgcacaggtagaatttctgccctttctgtgtgagacctaggctctacttttaaggtcttgcaacagattcagtcaggtccatccagattatctaggatattgtcccttatataaagtcaactgattagggcctgtattagcccatgttcacagtgctataaatacctgagactgggtaatttatgaagaaaagaggtttaattgactcacagttctgcaggcttaacaggaagcatcactgggaggcctcaggaaatttagaatcatagtagaaggcaaaggggaagcaagcatcttcttcacatagtggcaggagagagagagarcaagagggaagtgccacatacttttaaaccatcagatctcgtgagaactcacccactatcatgagaacagcatgggagaaattccccccatgatccaatcacctcccactaggcccctcccccaacacatggggattaccattccacatgagatttgggtggggacacagagccaaaccgtatcaggggctttgattatatctgtaaaataccttcatggcaacacctacattagtgaggactacagtctagtcgaatgggcacatcaataaattcatcacactt

SEQ ID NO: 926637 - DNA, 611 bp, Homo sapiens
tttttttttatttcaattttatttatttattttttgctctagtctttattagttcttttattctactaattttgggtttgtttcctcttgcttttctagttttttaagatgcattgttagattgtttacttgaaatttttcctcttttttgatataggcacttaataactataaaattcactctgagtactgtttttgctgctgtatcccagaggttttgatatgttgtgtttccattgtcatttgtttgaagaaatttttcaatttccttttaatttcttcattgattcactggtcattcaggaacatattgtttagcttccatgtatttatatcatttccaaaatcccttgttattaatttgtagttttattccattgttttcagaaaagatgyttgatattatatcaatctttttttaatgttttaggacttgttttttgacctatcatatggtttgtctttttgaatgatctatgtatattctgcagctcttagatgaaatgtcctgtaaatatgtgttagatccatttggtctatagtacagattaagtccaatgtttctttgttgatttttatgtctggaatatctgtacaatgctgaaagtagg

SEQ ID NO: 926638 - DNA, 572 bp, Homo sapiens
aaatgatataatcttatatttaggaaaactaaaaatctaccaaaaattagaactgagaaatccagtaaagttgcaggatacaaaatcaacacaaaaaagtgaatagcgtttctatttacaaacagcatacaacctgaaaaagaaaccaagaaagcaatctcatttgcaataacaactaaaattaattatctgaacataaacttaatcaaaaaagttatatatctaaatgataaaaaataaaacactgatgaaagaaatgtaaaagaagagaagaagtagaaatacattccatgttcacagattgaaataatcaatactttttaaatgtccatactacttaaagcaatccttgcattcaatacaatccctaacaaaataccaaataccttcttcatggaaataaaacaaacaatcytaaaattcataggcgaccaaaaaagatctagaatcgccaaagcaatcctgagaaaagaataagaaacctggaggcatcacattacctgacttcaaattatactatataaaaccatagtaaccaaaacagcatggtactggcataaaagtagacatat

SEQ ID NO: 926639 - DNA, 611 bp, Homo sapiens
ctgcctggtttgtttcaaaattggcccctggaatttctaagcaagcacataattagataagcgagcactgttcatggaagggcctggtgggaaaaagagaaacaaagcgtttcaaagtatgtttcaaggctgaaagcaagaaacgagcaaaaagagttttaaaatgcattttgagactgggatactcggttatatcatcacaatcrgttttagaacattttcatcatctggaaagaaaccctgtacctattagcagtccacttgcattttttttccaacctccttccacacctagccctaggcaaccactgacctacattctgtctgtatggatttgcctgttctggacattttatataaatgggatcatataatatgtgacctttggtgtctggcttctttcacttagcataatgttttcaaggtttatcagtgttgtagcatgagtatttgtatgcaagttttttggtggacatatgttttcatttcttttgagtgtatgtgtaggagtagaattgctgagtcatgtggtagctctatgtttaaccttttgagaaattggcagactgttttccaaagtttgttgcaccattttacagtcccaccagcaa

SEQ ID NO: 926640 - DNA, 653 bp, Homo sapiens
cacctagtcaaaagtcactggcctgttgctacataagtgtctaccactctcagatgtttatagatcaagaacttggactccttggaagaccaatttatttttgtttgtttgtttgtttggttggttggttggttttagctagctctttagcttccataggaagcccaatgggcaaacagtttggtttggcctaatacctaatgtttatgaaataccatgcaaaggtaaaggcactgtacacacgtatgtatgtgtaagttagtgagacatttgttaattgctggttctaattatagtattactgccatcccgtttttatgtccttctactactcttaaacgtctgttgcctctccttgtttytgtcttttcacctgaaaagaggtctaaaagagagcaagaaaggcttagttgaacgtttgcaatgttatctaaaaaataagctattactgtaatcttaaaaatcactagtaatagagggaggacagaaatatcaaatcttgtgtttcaatatgcctctacttttctctcattatttttctttcaaattttcacataatcaatctctccccatttctctcattacttgtttgatgtaactcaaaatctttctcaatagctcctttctttttcttaacattattgtctatgcct

SEQ ID NO: 926641 - DNA, 606 bp, Homo sapiens
ttaagtgaaacttcattctgtgatcatttattttgatatgtaaactatgttagactatagtctaaattattccttcaaatactagtctagttgttgctatgtagatattttaaggatgtaataaaagtctataatcaattgactttcagtaaagtttactttagataatctgggtgatcttgattcaactagttgaaagaaagttcttttgtttgtttgtttactttagacagagtctcgctctgtcacccaggctggatcttggctcacygcaacctctgcctccctggttcaagcaattctctgcctcagcctccagagtagctgggattacacgcacctgtcaccacacctggctgctttttgtatttttcatagagatggggtttcaccatcttggccaggctggtcttgaactcctgaccttgtgatacatccacctcggcctcccaaagtgctgggaatacaggcttgagccatcgtgcctggccgaaagtttggcttttcaaaagcagaactgaggcttccttcagaggagaaattctacctgcgtactgcaatttcaactcatgatgagatttctagcctgcccttccagctgggctg

SEQ ID NO: 926642 - DNA, 615 bp, Homo sapiens
gataaggaaagttcagtgtaactgctatgtaacagatctagaaagcaatcattttacattggaacaaagagaaatgattctagaattgttaacactagggaaataataaatctgatgcactgtgtgagaattggattataaggaaaattgtatacggatggattttacagatctgttggaaactgttaaaaaaaaaaaggtaaatgtagccataaagtcaacataaattatacaataaaaaartgaggcaattattagctctatagaaaaaaaacaacaaactctgtttaagaaagagactttaatcctaggctagtattagtctggtagtgaataatatttacatgggaacaatgaaaacaatatagatttcactgaaaattatagtgtaagtatattgggggtagtgcagagaagaagggggttataaagaagcaaagtccttatataccatcccaaaaagtcaatagtctctaaatttcataaagtaggatattaaagcatattacttggaaatacaaaaataatcaccataagaaattgctaaatgggtagaaattcattctttttgttggagaggagctagggataggactgctcttgtttgtttacctg

SEQ ID NO: 926643 - DNA, 774 bp, Homo sapiens
attgtttttaattatttcaatgtctttgttaaatttgttagatagaattcttaattccttctttgtgttatcttgcatttcactgagtttcctcaaaacagccatttcaaattatgcctgaaaggtcacatatctctgtctctccagtattggcccctggtgccttatttaagtgctttggtgaaattctgttttcctcgatggtcatgatgcttgtggatgttctccagtgtctgggcattgaagagttaggtatttactggtctttacagtctgagcttgtttgtactcacccttcttgggaaggctttccaggtattcatagggatttgggtgttgtaatctaagtttttgatcactgcagccatatttgcattagggagtaccccaagctcaataatgctgtggcttgcgcaaactcatagagatgctgccctgatggtcttagttaagatctagaataattctctagaataccaggcacagactcttatkctcttcccttattttctcctaaacaaagagtctctctctctccaccctgctatctctctttctgtctctctctgcgctgagctgcctggagctgggggaggggtgacaaaagcaccctctggccaccaccactgggactgtgctgggtcagacctgaagccagcacagcactgagtctcacccaaggcctgcctggctaccacttacgttcactcaaggccctagggttctataattagcaggtggcaaaactagccatgccgttttcttcccttcagg

SEQ ID NO: 926644 - DNA, 699 bp, Homo sapiens
taaaaatacacctgaatgtttataggcaaaagaaaagaagccaaaggagagagaatggaatgtaagaaaaatgaattgttgatggaaatctctagagctggagaggcgtggctaaaattaagcatatgtgaggaaggtgtattagtccgtattcgtgctgctgataaagacatacccaagactgggaagaaaaagagggttaactgggcttacagttccacgtggctgaggaggcatcagaatcatggcccaggatgaaaggcacttcttacatggtggcaacaagagagtatgaggaagaagcaaaagcagaaacccctgataaatccatcagatctcatgagacttactcactatcatgaaaacaggggacagacaggcygccatgattcagttacctccttctgggtccctcccacaacacgtgggaattctgggagataaattcaagttgagatttgggtggggacacagacaaaccttatcattccacgcctggcccctccgaatctcatgtcctcactttttaaaaccagtcatgccttcccaacagtcccccaaagtcttaacttatttcagcactaacccaaaagtccacagtccaaagtctcatgtgagacaaggcaaatcccttccacctatgaacctgtaaaatcaaaagcaatgctagttacttcctagatacaatggcggtacggg

SEQ ID NO: 926645 - DNA, 522 bp, Homo sapiens
ataacctgctttctccctggtccaggtaaccttttcctttgaggcaggccgtcgctgcgtctctggagagggcaactttgagttcgaaacccggcaaggcaatgagatcttcttggccctggaagaggccatctctgcccagaagaatgctgcacccgctacaccccaaccgcagccagccacaatccccgcgtcgckgccccggcctgatagcccctactctcggccgcatgactcactgccgccgccttcacccaccacaccggtgcctgctccacggcctcggggccaggagggggagtatgccgtgcccttcgatgcggtggcccgttccttggggaagaacttcaggggcatcttggcagtccctcctcagctcctggccgaccctctgtacgacagcattgaggagaccctgccccctcgacctgaccacatatacgatgagcccgagggagtggctgccctgtccctctatgacagcccgcaggagccccggggtgaggcatggaggaggcaggc

SEQ ID NO: 926646 - DNA, 605 bp, Homo sapiens
ggaaggcgaggaatgaggtttcacagttttctcgagaagtctgggatttctggtgaaacaggaattcagagaaacagcccttcccaggtctgtcttggatgacacaaagacgatgccagatgacttgagtgctttttccttgccctccatgagcccctattgtgggacaaagcagcagagaagcccaggcctgtagtaggtggatgcctgatttctggcctgtgagagargccaagttggaattggaaagcccactggatgagtccttagctctgccacttgctggctatgttgtaaccttggtcatgtcatgagtggtcttcaagagtgagtttgttccctgaggccaggtgcgatggctcatgcctgtactcccagcactttgggaggccgaggtgggtggatcacctgaggctgagagttcgagaccagcctagccaacatggtgaaaccctgtctctactaaaaatacaaaaattagccaggcaaggcagcacacgcctgtaattccacctactcgggatgctgaggcatgagaatcgcttgaacctgggaggtggagcttgcagtgaactgagattgtgccacagcactccggcctaggt

SEQ ID NO: 926647 - DNA, 660 bp, Homo sapiens
gttggaattggaaagcccactggatgagtccttagctctgccacttgctggctatgttgtaaccttggtcatgtcatgagtggtcttcaagagtgagtttgttccctgaggccaggtgcgatggctcatgcctgtactcccagcactttgggaggccgaggtgggtggatcacctgaggctgagagttcgagaccagcctagccaacatggtgaaaccctgtctctactaaaaatacaaaaattagccaggcaaggcagcacacgcctgtaattccacctactcgggatgctgaggcatgagaatcgcttgaacctgggaggtggagcttgcagtgaactgagattgtgccacagcactccggcctaggtgacagactgagactctgtctcaaataaaaaaaataaataaataaaaagaaaaagaaaaaaraaaaaagaaaaaaaaaagacaatgtgtttcagtttgttgtctgagaagggaaattaattctctcacgcccccctcccagggatgttgtaaggacttcaagatcatggatgtggaagatgctttgtacagccgggaagtacaatagtcacataaggtggtcttgatggcttcctgtcagagcaacttcccatctgcttccactgtctacccactctgtccaacccccatg

SEQ ID NO: 926648 - DNA, 660 bp, Homo sapiens
gttggaattggaaagcccactggatgagtccttagctctgccacttgctggctatgttgtaaccttggtcatgtcatgagtggtcttcaagagtgagtttgttccctgaggccaggtgcgatggctcatgcctgtactcccagcactttgggaggccgaggtgggtggatcacctgaggctgagagttcgagaccagcctagccaacatggtgaaaccctgtctctactaaaaatacaaaaattagccaggcaaggcagcacacgcctgtaattccacctactcgggatgctgaggcatgagaatcgcttgaacctgggaggtggagcttgcagtgaactgagattgtgccacagcactccggcctaggtgacagactgagactctgtctcaaataaaaaaaataaataaataaaaagaaaaagaaaaaaaaaaaaagaaaaaaaaaagmcaatgtgtttcagtttgttgtctgagaagggaaattaattctctcacgcccccctcccagggatgttgtaaggacttcaagatcatggatgtggaagatgctttgtacagccgggaagtacaatagtcacataaggtggtcttgatggcttcctgtcagagcaacttcccatctgcttccactgtctacccactctgtccaacccccatg

SEQ ID NO: 926649 - DNA, 610 bp, Homo sapiens
actgatataattaattaactaataagtaattacaaagaaagtctctttcatagagtagaaaaataatgtataaatgataaaaatagagtaagaacttttcagggtagcatcccccataataataattggtacaggcaaacataatcaatggaaaataaaattaatgagtgaaaattgcaagagtacagactattcacatgttctcaaaatgcctctctattagatacttatttgtcaaaggattatactaactttacagtggagaaatctttcaggtatcacctaaattgtgattcacccataacataaaattaaatgaagttattaaaaatgactgtccctttctctttytttctctttgtgtttttttctctatatatatacataaatatatatgcacataaatacatatagatctctttatatatacacatagatacatatgggtgtctatatatatgatatacatattatctctcttctgtgtgtgtgtttgtgtgtttatgatatgatatgggttggctctgtttccccacccaaatctcatgtcaaattgtaatcctcatgtgtcagaggagggtcctggtgggaggtagttacatcataagac

SEQ ID NO: 926650 - DNA, 610 bp, Homo sapiens
actgatataattaattaactaataagtaattacaaagaaagtctctttcatagagtagaaaaataatgtataaatgataaaaatagagtaagaacttttcagggtagcatcccccataataataattggtacaggcaaacataatcaatggaaaataaaattaatgagtgaaaattgcaagagtacagactattcacatgttctcaaaatgcctctctattagatacttatttgtcaaaggattatactaactttacagtggagaaatctttcaggtatcacctaaattgtgattcacccataacataaaattaaatgaagttattaaaaatgactgtccctttctctttctttctctttgtgtttttttctctatatatatacataaatatatatgcacataaatacatatagatctctttatatatacacatagatacatatgggtgtctatatataygatatacatattatctctcttctgtgtgtgtgtttgtgtgtttatgatatgatatgggttggctctgtttccccacccaaatctcatgtcaaattgtaatcctcatgtgtcagaggagggtcctggtgggaggtagttacatcataagac

SEQ ID NO: 926651 - DNA, 657 bp, Homo sapiens
ccagggatcactgtgtgggaattccaggagcagagacccaagatgcttttgactagcaagggcatggagggtgccccaggaccatcctttcaaaccactcacccttctagagcactgggcctgtgatgaaaggggaagcctgaagatctctaaaatacctttggggtctttctttctctcattatcttgacctggattcttttatccatagtaatctcattagccagtggtcccttacaaacactcttaatatggtctgctgaacatattttttgcactctttgcatggccaggctgcaaattttccaagcctttctactctgctttccttttaattatagattccatctttaagtcattttttctgccctcgtgtctcrctgtacacacttaaaactagctaaaaagcagactgagtgctttgctgcttaaatatttcttaggcagttctttgttcatcactcttaagttatgcattccaaaaagccctaggagataccataattttgccaggctctttgctactttataataatattgaccttaactccaggtttttataccttgtttctcatttccatcttagaccttatcataatggccttccactgtccatatttttactaacatactggtcatggccacttaggtaatctc

SEQ ID NO: 926652 - DNA, 607 bp, Homo sapiens
aatagatgaaacagcggaaggaaacaagttagctgatcaggcagccaagtcagcagcaagaaagcctcagggcatcaacacacttaaagcccctctagtctgggaaggctccgtaacagcaatgaagcctcagtactcctctgaagagatagagtgggccacttggaggtacattttccagcctttaggatggctatagccagagaatggcaaactccacttgtcacctcctagacaatggaaagtccttaaaattcttcaccaaacttttcacttgggaaaggataaaacttatcagtgtgcccagagattgttttcaggagataacttactaaaaacagtcaaatagtgtggcttaaaaataattccctcaagaaacgkctccttcctcctcaaacccaaagaatagagagctatccagggcaggactggtaaatagacttcacccacatgccaaaggcaaaggtgggacttctttcactaatgggtagaagcatttccatgctgtacagaaaaagcctctgaggtaataaaagttctagttaatgaaataactccctgctttggcctacctaagcatctcaaaactgacaacagcccctcattt

SEQ ID NO: 926653 - DNA, 617 bp, Homo sapiens
atattctacctacctggagatagcatcgaatcccacaggttaagggctcagaccacaagacagtctccaagccagtcacgagttcaggcctctggaaatttttaccaactttctatttagggtccccacaaccctttctgcaggtttgattcatttgctaaagcagttcccagtgtttatccaattattataaaagatattacaaaggacgtagataaatagccagatggaagatttgtgcagggcaaggcttgaaagaagggatgtggagcttctgtgccttctctggctgcacaacccttcragatctcccatgtgttcagcagtcaggaagctcccagcagcctgtccttttgagattttatgaaggcttcattatataggcatgattgatgacatcattgaccactggtgatcagcttaaccttcagcctatctcttcttcccagaggttggagggtgaagctaaaagttccaactctctaatcctgccttgttctttctggcgaccttccctatccttactctccaggggtcctcagccacctgtcatctgattagcattatcactctggagattccaagggtctttggagctgtatgttgagaaatgggaa

SEQ ID NO: 926654 - DNA, 776 bp, Homo sapiens
caagtgtatgagtaattaaagtttccttgcaaatatctgttaaaaagaagttctaatatttggtggtgaattttgagagggaaggtagaaacaacaaaaaggatttggtgaggtaaagatgggactgagtaaggcgagtagccctcagttacttatcttttatgattttcagcttagtatcttctatttcttcacattgatattcagggtgttctctgggctgtcgggttgctccctcagattttcaggcttttacttgagtgtgatgtattcagaagttgatacctgtaacttttattgccaagtgggagagagcattgaaagaacagtgtagggcccttcccagcttgggcttagggaaggagagcgaggaagagagagtttttactaaaaccaaatctcctgggttaaaaacaggtggtcctatttcttggtattgggcctctgctagttgtgttgattcttgttggaaatgagctagagaggttgcatgcttaactaatttagaagttttctgatctaataggaagtcatttgtaatgaaaggccgtccatacagcatttcgcaaggrctcaggcttaactttcaaggggtattttttttttctgtagtaaggccgtagtagtaagggaagaagagtgacccaaggaggtgagtttcctagaagttttctgaggtgtattttggtaatgtcatttgttttctgtaccttccctgaggactgggacctccaagcacaatggggatgatactataagcctagtgcctttgagac

SEQ ID NO: 926655 - DNA, 568 bp, Homo sapiens
aaaaatagcagacttgaaggcatcatacaactgaactccataatatattacaaaactatagtacccaaacagtatggtattggcacaagaaaaaaagacatctagactaatggaaagaaatggacaacacagaaataaatccacatatttacaggcaactgagttttgacaaatgtgtcaaaaacatacattgggtgaaataatcaacwtacatttggggaaataatccttcttcaataaatggtgctgggaaaattgaatattcatatgcagatgaatcaaactggaaccctatctgccacaatatacaaatttcaactcaagatgggttaaagactcaaatgtaagttccaacactataaaactaaaagaaaaaaacatagaagacacacttcagctcattggtctgggcaaagattttatagctaagacctcaaaaacacaaataacaaaaacaaaaatataaaaatgggactatattaaactaaaaatcgcctgcacagtgaaggaaacactccacacaataaagagacacctgttgaatgggagaaaatatttgcaaactatt

SEQ ID NO: 926656 - DNA, 597 bp, Homo sapiens
aagaggatcctaaaaaagaattaattaatacaaaagaaggcaaacaaagagggcaaaaggaacaaagaacagatagaacaaacaaaataaatagcaagatgatggatgtaaacctaacgcattaaatataaatggtttaaacaaccttaattaaaagacatgggctgtcatattagttgaaagggcaataactaactatatgttgcctacaagagaccctaactatatgctgcctacaaaattgtatattttaaatatacaattatgttaaaggtaaaggagaraaaaaagcacactaacattagtcaaaagaaagctgaagtagctcatattaatattagatgaagtagatttcaaattaacatatttttaccaggtataaagaagttcatttcataatgttaatggaatcaattcatcaacagaacataaatcataaatatgtattgacctaataagagattttcaaagtacatgaaacgaaaactcattgaactgcaaggagaaataggtaaatatacagttagagtagagatttcagtacctctctctcaataatcaatagaacaagtagtcttaaaattattaaggatattg

SEQ ID NO: 926657 - DNA, 597 bp, Homo sapiens
aagaggatcctaaaaaagaattaattaatacaaaagaaggcaaacaaagagggcaaaaggaacaaagaacagatagaacaaacaaaataaatagcaagatgatggatgtaaacctaacgcattaaatataaatggtttaaacaaccttaattaaaagacatgggctgtcatattagttgaaagggcaataactaactatatgttgcctacaagagaccctaactatatgctgcctacaaaattgtatattttaaatatacaattatgttaaaggtaaaggagagaaaaaagcacactaacattagtcaaaagaaagctgaagtagctcatattaatattagatgaagtagatttcaaattaacatatttttaccaggkataaagaagttcatttcataatgttaatggaatcaattcatcaacagaacataaatcataaatatgtattgacctaataagagattttcaaagtacatgaaacgaaaactcattgaactgcaaggagaaataggtaaatatacagttagagtagagatttcagtacctctctctcaataatcaatagaacaagtagtcttaaaattattaaggatattg

SEQ ID NO: 926658 - DNA, 476 bp, Homo sapiens
tgctagcaaggatgccaaacaactggactcctcatacattgttgatagaaatgaaaaataatatagatactttggaaaacagtttggcagtttctaataaagttgaacatatttttactctacaatccaggacacccgctcccaggtatttaccaaaatgaagtgaaaacttacattcaccccaaaacctgtgtgtgawtgtccgtggtggctttattcttaattgccccaaactggaaacaaacccagatgtctttcagttagtgaatagctaaacaaactgtgtctagccacagaatggagtactgcaaaggattataaaggaaagaaactactgatacaggtaatgacatggatgcatctcggattcattatgccaagggaaagaaacaagacttaaaaaggtacatactggctacatactgtatgattccaattatatgacataaaggcaaaattatagacacagaaaacag

SEQ ID NO: 926659 - DNA, 643 bp, Homo sapiens
ccttctcaatattgcctccctgaaccctccctctgctccagcactttcccgggggtagagggtgggcagagacaggcagcaggggagggcaggatgatgaaacctcagtctgtcaacactgttgctgctgcctcagcagtctgatgaaagattagaaactattgggtaaaatcatgttaggaattttctatggattccrggtatctgggctcatcaccaagtagacaattaagagttgtttgtgtggtgaaaacaccttgaacaaggccaggaaagtcacctgctaagtaaccaagtttggatcactgagaatcatagtatgataagataccatcttaaaatgatttaagatatgcaaagtcctctcctattctgaaagctttccaagaaaagaagtatgtggatctttcaggtttttcagtccttcctatcaagaaggccttcctataatttaccttccttccatactgttacagttctggtctgtttctctttttttttttttctctgagacagggtctcactctgtcactgaagctggagtgcagttgcagtggtttgaacacaacgactgcagcctctgcctcctaggctcaagcaatcctccctccttagccttctgagtagctgggaccacaggagc

SEQ ID NO: 926660 - DNA, 612 bp, Homo sapiens
gagccttttgttatgcccaggcagggccaccagagggctccttggtctagcagtaatgccagcgtctgggaagatgcccgtaccaagcggaccatggtctagtggtagcgtcagtgccaaggaaaagcacctgctactgagcagaccaggaaagggagtctccctttccccaggggagtttagagaagactctactccaccatctcttatggagggcctgacataagtcaggcctgcctgcagttatccagaggcctgaccgtctccctgtgatgctgtgcttcagtagtcatgctcctggtctgctttcatgttccatcctgtacacctggctctgccttctagatagcaatagcagaattactgaaagtattaaaagtctctgaaatgcagaaataatggtgtaagctgtctctcctctctctccgcctcggctgccaaacagggaarggctccctttccagtggatgcatgacccacgtgaccttacctatcattggagatggctaacactccttaccctgcccccttgtcttgtatccaataaataacagcgcagcctggaatttggggccactactggtctccacgtcttggtggtagtggtccccc

SEQ ID NO: 926661 - DNA, 741 bp, Homo sapiens
aatattacagctgaccagttattgggaatgggacaatggcctgcaattacaaatcaaactatactaaatgatgaggtcattcaacagcttcgcaaatgctgcctatatactaatagtagtgcatttataccagtccctaacgatgacaggtttcctgctcaaccagaggaagaaggtatgcagtttaatttgtcaattggatataaatacccgccattgtgcataggaatgtcacctggctgcttagctttctctaatcaaaattggatatggactgtaccgtcctttacaaatgattcttatcaagtacataatgagttyagtagcaattcttttcagatcatgactgttaaacttaatcctcatgaggaatggagagttcccgtcactaccaaacataatacaacaaaaggactgctagactgttcaagtgaacctaccagggaaccttttacagttgaaactattgtatggaatgattgtaatgctccaaaagcagtagtgttacagggcctgattacaggtggttattgactgggctccaagaggatattattggctaaatttttccagcctaaatgccaaatattctgagttcaactatttgatagattatgtagaggagggatggcagtcctacaggctgagggaatgggtgtctccttacccattcaaatggatggacaaagtgatcattcctcctagaccaaaagtgattcatcctattgttaccccagaaca

SEQ ID NO: 926662 - DNA, 741 bp, Homo sapiens
aatattacagctgaccagttattgggaatgggacaatggcctgcaattacaaatcaaactatactaaatgatgaggtcattcaacagcttcgcaaatgctgcctatatactaatagtagtgcatttataccagtccctaacgatgacaggtttcctgctcaaccagaggaagaaggtatgcagtttaatttgtcaattggatataaatacccgccattgtgcataggaatgtcacctggctgcttagctttctctaatcaaaattggatatggactgtaccgtcctttacaaatgattcttatcaagtacataatgagttcagtagyaattcttttcagatcatgactgttaaacttaatcctcatgaggaatggagagttcccgtcactaccaaacataatacaacaaaaggactgctagactgttcaagtgaacctaccagggaaccttttacagttgaaactattgtatggaatgattgtaatgctccaaaagcagtagtgttacagggcctgattacaggtggttattgactgggctccaagaggatattattggctaaatttttccagcctaaatgccaaatattctgagttcaactatttgatagattatgtagaggagggatggcagtcctacaggctgagggaatgggtgtctccttacccattcaaatggatggacaaagtgatcattcctcctagaccaaaagtgattcatcctattgttaccccagaaca

SEQ ID NO: 926663 - DNA, 562 bp, Homo sapiens
tgttctccctgagccttcatccgcatgtctcccagcagaattcatcacctcccatattctggtagttttcttttagatcagatactgtcttttaatgtatctatcatcagtgcctagcacagtgcctggcgtgtatgtatgggatgcgtttgcgaaatacttcctagtgatgcaggctgtgtcctcatggttggggctgctctttttttttttttttttttcctgagacggagtctctatcgcgaggctggagtgtggtggcgtgatctcggctcactgcaacctccgcctcctgggttcaagcgattctcctgcctcagcctcccgagtaactgggactacaggcacatgccaccacacccagctaatttttgtatttttagtagaracggggtttcaccatgttggccaggatggtctcaatctcttgacttcatgatctgccctcctcggccttccaaagtgctgggattactgcgccactgtgcccggcatgagccaggcatgagccactgcgcccggccttgagactttagttcttatatcccagttgctccccacc

SEQ ID NO: 926664 - DNA, 608 bp, Homo sapiens
ttccttgcctgctgctaccctctccctctagacttaaattcctaagccaggcacggtggctcacgcctgtaatccctgcactttgggaggctgaggtgggcggatcacttgaggtcaggagctcgagaccagcctggttaacatggtgaaaccctttttctactaaaaatacaaaaaagttagccaggtatggtggtgcatgcctgtaatcccagctactcaggaggctgaagcaggagaatcacttgaaccttggaggcagaggttgcaatgagctgagattgtgccactgcacttcagcctgggagacagagggagactccgtctcaaaaaaaaaaaaaaaagtccttaagaacaaagccaatgtttgcctttttcactgctatgtctccagccatttaacctaagagtrgcaattcttagttgctcagtaaatgaatgaatgaaaaaaaagtcattccacactgttatggactgaattatgttcctccaaaattcatatgttgaagtcttaacccccaatatgactgtatttagagacagaacctttagggaagagattaagtttaaatgaggtcataaaggtggacccctaatccaatatggct

SEQ ID NO: 926665 - DNA, 640 bp, Homo sapiens
ctccatgcctggagggaacactaggcgagcaggaaggtgagcagagcgcctcagcaccacggggttggcgccattaagaaactggtacccaaataaggcatcttccttccaggagtcccgcacgcgctctggggaaggcagttgttgagcaagttgtgggatctgagctcttggtccttccaaccccaccaaccatgccyccttgactccagcccaccagagggacccaagtctctggtctccccaccctgcttctttcaattcccctgggttgggtgggatctgggtgggatctggggggttgggagacatactggggtgggggactgaccagccagcttgctctgaccacaccagaaaatccggttgaagtcatctagatccttccagcaagtcagaacatttagagagtctttgatagcgaggtcggccagccttcagggcaggatggggcaaagggtttgagcatcattctgaggctctaacatgacgaccacaggcaccgatcctgggccagtccaatgcagtgcagcccataagccccttggcttccactagaccaggacacctccctctcacccagcctccccttgctctcaccccttggccagcgaaacctcaaagtcaactctcttgtctt

SEQ ID NO: 926666 - DNA, 618 bp, Homo sapiens
ttattaatacttgactttttttttttttttttgagacggagtctcactctgtcctttgaggcattgtccccataaacttttggtaaagcatcaataattttatctttcatccacacaagcttcaccataaatttgatgtttattcttccattttagcagaattcatgttgctccaataggggctgtcttcaaactgatgttttctccttcttagtgcctcagagtagatcctgttcagatacgttataacaggttaatatgagtttattttggtgtaaaagtactttgaaattcatgcatagttttttcatcatatgcattttccatagctttgaacacccccatgtaactctccycttccacaaaccaaacaatgaaaaagcacctttgtgatggaagtttattttgcaataggaactcacagtgatctaagccctgctattcatgaatataattcattactggagtccaagttgctttttggtttttgaagttctcttcttcccttgcaggtatagaacaagatgcagtgaatacttttaccaaatatatatctccagatgctgctaaaccaataccaattacagaagcaatgagaaatgacatcataggtaagca

SEQ ID NO: 926667 - DNA, 719 bp, Homo sapiens
tgcaaggagacagaacaaatagaacaccagggtctcagtgacaagaaatgcagacacacgttcactgtcaagctcagaaaggggatcctcccagtgacgaccatcagcgctgtgcagagagatgacatggagtccatgtacgcaacaggccctcccagagcctgctcagctttactctacacccagcgtgaagagcgcagccagcagatgccagacgccacaagaagtggagaccagtgatggaaagccggggctcacagaagtaccgcrctgtttcaggaacaacctactacgtggcagcagggcctgtgcataggcggcctctgagttagcaaggagagggaaaactgcatggtgcgtcagttacttgtatttgtgagtattcctgtttaaggttaaatttgagagtattcctgtttaaggttaagttcctcaaagttaaaatggaattagtgggactaaaccctcaggagttctgaacacagtgcaattctttcaaaagccactggaacccggcccagttccccagcatcactgccattcctccctccttgaaagtcagctccgctggcagggcctgacctgtgttggtgacactgtactcttcactcttcttcctggtctggtagatgatgcacacccagaccagtgacgtcaggacgatgctgctcacgacagcaatggtgaagatgcctaccgtggtcccatccttcctgcag

SEQ ID NO: 926668 - DNA, 767 bp, Homo sapiens
cagtgtggggattttcctatgagactgctccatgttgctgggggtatgccctgacacctctgctattgtgggtttcctaaaaaccatttggtcacagacagagaatgtttcttaacttcagagcaagactgccctccctcatgcactcaaaaatgagaaagctaaggaaaggttgtcccatccaaaaccttgagagaaataattcacagagctcctattttacaccgccctaggattcaacaaaaactcctgtctagccaaggagaaaaccagcttcaaaaaaccagaacttccaccacgatgggaggttcattgattttgggaggaactcctctgcaacacccasccagggcatccaagttcaggaacacaatgtgttcattgccagtacctgcacaaaggtcggaggccgcatatgtcgtccagggaggtcactccaaaattctgccaactacaccggaatgttgacgaaaatttagcctgttgagaaataaataatttgataacagtttattgaaagccaaatgtgaggatcaacccaagaaaacacaccaacaaagttgagagtgttccagagtctgttacaagttggaatgattttataggtagggtcaggagaaggaagagggactcttcacaccagaattgtcctttcttattggaggatacaatagagaggttacaatcattggatacagattgcaacatacaggctcaaatgtcttcatgtaaaacaatcagtaaaactttatgattcagaaataagt

SEQ ID NO: 926669 - DNA, 614 bp, Homo sapiens
gatggtagggaacatggaaagaccagtgaattccaggagcatgagcccattgctgtactttggctgtgaagtgtgttccttggtcaaaagcaatgctgtatggaataccatgatggtagataagacattctttaagtctacaggtggtagttacagcagaagaattatgtgcagagaaggtaaaaatccatatccaggctgggtgccatggctcacacctgtaatcccagcactttgggaggctaaggcaggaggatcacrtgaggtcaggagtttgagaccagcctggccaacatggcaaaaccccatctctactaaaaataaaaaattagccaggcatggtggtgtatgtctgtaatcctagctacttgggaggctgaggcatgagaatcatttgaacccaggaggcagaccttgcagtgagccaagatcgtgccactgcactccagcctgggtgacagagtgagatctgtatcaaaaaaaaaaaaaaaacaaaaaaaaaaaccatatttagagcaactgcctgttgaaataagaaaaaaacactgcccttttaatgattggaagctggtaatcaacttgccattgggtagctggttgagcatccctgggaa

SEQ ID NO: 926670 - DNA, 606 bp, Homo sapiens
gagccagtaagtcaagctctggggccctagggcactgctccacaaatgagccacagggcccagctgtggggagtgaatgcacatggaacgtggggacacaaaaaaatagttccaaaaaaaaaaagaggatgggtcagagcagtgacagtacctgctgcagcagccacgcctgggataggaaaggagcacctgtgatctgccgtaagcctcaacaggtcccacgcgaatttctgaggaacttagattcctctgatgttggcaagtgcccaggaaatatcttgtcagaggaaagtcggggataactgtctgtgcagggccaccttcgggtaaacacgcagggcctgttggagagccacctgggtgactgggactgcgtccacatgacctctgcagtcaccccgcccactgttccctaaggccacacttscataccgcctgccctcgctctgacctgccttctccatcaaacttgtcccagccagtctctccctgtgtctgtcagggtcccaagatgtatcagccactgtgctagttttcttttccaagttgattttatttatgcgatcgatctcattctgttcttaattatgaaatatttttaacaca

SEQ ID NO: 926671 - DNA, 639 bp, Homo sapiens
gaaaagcgcagtgttgggttgggagtgatgcgattttccaggtgctgtctgtcacccctttctttgactaggaaagggaactccctgacccgttgcgcttcccgagtgaggcaatgcctcgccctgttttggctcgcgcgcagtgcgctgcatccactatcctgtgcccactgtctggcactccctagggagatgaacccagtacctcagatggaaatgcagaaatcacccgtcttctgcgtcgctcacgctgggagctgtagagcggagctgttcctattcggccatctttgctcctgccccagtagttccatktttttttaactgaatggaacaaaatgtttgaaattgtttgaatgtttgaatattctttgggcttctgtgaagataaaatattccaaaagcgcttgtgagtttttaagattcttgctagcaaggaaaaatagcccactcaagccagcttcattaaaaaaggagtgtttgctttaagtatgtgtcctaaaatgcgaaggagggtatgtcagttagcttttgctgtgtaacaatttttttcgaaatatagtggcttaagactaccaccacttggactgggttcagcttgacagtaattctgtctattttgtctggactcattaagac

SEQ ID NO: 926672 - DNA, 600 bp, Homo sapiens
tccaggtgctgtctgtcacccctttctttgactaggaaagggaactccctgacccgttgcgcttcccgagtgaggcaatgcctcgccctgttttggctcgcgcgcagtgcgctgcatccactatcctgtgcccactgtctggcactccctagggagatgaacccagtacctcagatggaaatgcagaaatcacccgtcttctgcgtcgctcacgctgggagctgtagagcggagctgttcctattcggccatctttgctcctgccccagtagttccatgtttttttaactgaatggaacaaaatgtttgaaattgtttgaatgtttgaatattctttgggcttctgtgaagataaaatattccaaaagcgcytgtgagtttttaagattcttgctagcaaggaaaaatagcccactcaagccagcttcattaaaaaaggagtgtttgctttaagtatgtgtcctaaaatgcgaaggagggtatgtcagttagcttttgctgtgtaacaatttttttcgaaatatagtggcttaagactaccaccacttggactgggttcagcttgacagtaattctgtctattttgtctggactcattaa

SEQ ID NO: 926673 - DNA, 628 bp, Homo sapiens
acacttggggccgtagggtcaggttccacacctcacccactgcggggaatggagtagggcattgaaagatggatgggggacacctgagggggactgaggggagataggctgatagggcacgggggaggggtcccgtcgggctcactggtgtaatggcggaccagttcatgcaggccgggaaaagtgattcgaggggagatgtagaagccaccgttgtccagattacggatcttgtaatgtttcaccacctctccctggttctggtcgaagtcccggaccgacagtgaaaacgatcctgaatgaatgaatggatggacaaagcgacgaaagaacgcagtgagtctggcccgccaccgcscccccaccttgggctcacccagcacccccaactccgggtcatcccgcgcccccacctcgggctcatcccgcgtccccctccgactcaccccgtgtctccacctcgggctcaccctgcgccccccctcgggcacaccccggggcacccccgcgcccggtcgagaccgccgcccgctcacccgcggtgctctcgctctcccggatgaggaaggagccgtgagtgttcccgggcgccaggagctgccgctccgcgtccttgcggctcaggttc

SEQ ID NO: 926674 - DNA, 715 bp, Homo sapiens
gtgtaaaccggcagtgtaaacaagagcagggcatatatgagtagttgagaacggtgaataggagtatgactagatagaagatagtagggatgacaagttttttgggggcacagtctaagttggtctggtgtctggaatgagactggggcctaataaaaaggagcatctatacaggagctcaaatgggctgtaccctgtagtattctgaggacaggtctgacttctgagaagggaaagtggtaaaagtattgtcyagtcctttttaagttggtggctgagcttggtgaggtatgtttttaaaagacctttagtccgttctacctttcctgaagactgaggaccataagggatataaaagtttcactggatactaagagcctgaaaaactgcttagctgatttgattaataaaggctggtctgttatcagactgtatagaggtgggaaggctaaactgaggaattatgtctgacagaagggaagaaatgactggtggccttctcagaccctgtaggaaaggcctctacctatccagtgaaagtgtctacctagactaagaggtattttagttttctgacctggggcatgttgagtaaagccaatttgccagtcctgggtgggggcaaatccctgagcttgatgtgtagggaagggaggggtcctgaataatccctgaggagtagtagaatagcagatggaacactgagaagttattt

SEQ ID NO: 926675 - DNA, 704 bp, Homo sapiens
agctcggggagaagtgacacaagcacccctgtggccatcaccactgggccttctctgggtctgacctgaagccagcaccatattaggtcttgctcatacattgtggtaaccactgcctggctaccacctatgttctctcatggtcctagggctctacactcagcaggtagcaaaaccagccaggcttggtgttctttccctttgagcagccagttaccttttgccctgggtgggtccagagatgctgtctagaagccagggtctagagtcagaaaccttaggaatcaaccaagtgttccattctactgaggctgagctggcacctaagccacaaaacaaagttcttcccactcttccctctcctttccacaggtggaggagtctgtctctgttgccaccattgctccagggccatgaagagtactgcctggctattgtcagtgttcactcaaagytcaagggctcttcagtgaccttgtggtgaatgctggcaggcctgggactctccgttcatggtggtgggctcccctctgtcccagggaaggtccagaaatgctgtgtaagaacaaaggcctaaaatcaggaagcccaagagcccacttggtattccatcccactgtggccaagcttgtacttaagctggaagacaagttcccttactctttcttctccttttctcaagcagaaggtgtctctccccatag

SEQ ID NO: 926676 - DNA, 800 bp, Homo sapiens
aaaacatatagtttgatggttggtaatgggtgttctggagaaaaaatgaggcagggatggggaccaccagaagttgggggattgaaattttaaatacggtggtcctggctgggtgcggtggctcatgcctgtaatcccagcactttgggaggcccaggtgggcggattgccttgagctcaggagttccggaccaggctaggcaacatggcaaaactctgtctctactaaaaatacaaaaattagccggacatggtggtgcatgcctgtaatcccagctactcaggaggctgaggcataagaattgcttgaatccaggaggccgaggttgcagtgagccaagattgtgccactgcrctccagcctgggtgacagagcaagattctgtctcaaacaacaacaacaacaacaaaactgtgtgcagggggagtggcaggggggcctcgctgaccaaatgatatctgggcagaacatgaaggaggcaggagcttccaacctcccatagttcccatccccccaactcccacaagttattatttgaggacttgtgggccaccctgaaccccagctccttcactggcagcttctgtcagtgtccatatggtatgccttctctgagctccaggtggaatggagaacatgacctctcagttataataggaacccaggaggcctaaataaaataattggtgtacaaaacatagctgtgcctaccacgttagatgctcccaatactattactgtggttattgttagggattttattgaagtccctacatagccctgaatgtaagtaagagct

SEQ ID NO: 926677 - DNA, 653 bp, Homo sapiens
cgtgtgggaccctctccctgtggcctccatgttcaaaatgttcattctcacctgcctcagggcctttgcacttgccatgccccaacccaagctagtctttccaggccactgcctctgagccaccttcccacttcccyaaacaggctcctctgtccttggcctgcagggcagttatggttgcctttgcatgtggagtcggtgctcactatggcacagccctgcctgtaagctggggaatccagccattgaggagtgcttgccaaaagaatgaacgagcattatgattcagaaagggcctggacccacatgtgtcccccaacacagtgtgtgacctgagatgacagctccccctctgcactgcatctcctctgtccactgtggtggtaggtccccaagatccccaagggtcctgctggccctcacctttgaagctctgggacacaattatcaagggagaccactgcctacactcccagagctgagagcacaaacaagctcttaaatcaatcagcgacatcaccttccaagtgaagaaaacaggacctctggcctagacacaaggacaggggagaggaggctgcaaacatccctgagtgagctggctaggaagggtcactagttgcctggacctggaagttgaggaacccacagag

SEQ ID NO: 926678 - DNA, 571 bp, Homo sapiens
gtttgctggaggtccactccagcctaagtatcaccagcagaggctgcagaacagcaaataatgcagaacgacagatgttgcttcctgatccttcctctggaagcttcatctcagaggcgcacctggctgtatgagtagtcagtaggcccctactgggaggtttctcccagttaggctacttggggttcagggacccacttgaggaggcagtctgtccattctcagatctcaaactccatgctgggagaascactaatctcttcaaagctgtcagacagggacgtttatgtcttcagaagtttctgctgccttttgttcagctatgccctgcccccagaggtggagtctacagaggcaggcaggcctccttgagctgcggtaggctccacccagttcgagcttcccagctactttatttacctactcaagcctcagcaatggaggacgcccctcccccagcctcactgccaacttgcagttcgatctcggactgctgtgctagaagtgagtgaggctctgtgggtgtaggaccctccaagccaggcatgggatataatctcctggtatgcca

SEQ ID NO: 926679 - DNA, 669 bp, Homo sapiens
tttggaaaaagacttagatggctgaaatgacagaaatagaattcagaatatggatagaaatgaaaatcattgagccacaggagttcattaaaatccaatgcaaggaagctaaaaatcatgatacaacaatgcaggagctgacagacaaaatarccaggatggagactacactgtatctgacctgatagagctgaaaaacacactacaagaatttcacaatgcaatcacaaatgttaatagcagaataaaccaacaagtaaaagaatctcagagcttgaaaactggctttctgaaataagacagacaggcaagaatagagaaaaaagaatgaaaaaggaatgaacaaaacctccaataaatatgagattatgtaacaagaccaaatctacaactcaggggtgtccctgaaggacatgaggggaacaaaaccaacatgaaagacatatttcagaatatcatccatgggaacttctccaacctagctagacaggcaaacattccatttcaggaaatgcagagagccccagtaaaataattcacaagaaaatcatccccaagacacatattcatcagattccccaaggtcgaaataaaagaaaaatgttaaaggcagctagagagaaaggtgaggtcacctataaaggaaagctcatcagactaacagatgac

SEQ ID NO: 926680 - DNA, 669 bp, Homo sapiens
tttggaaaaagacttagatggctgaaatgacagaaatagaattcagaatatggatagaaatgaaaatcattgagccacaggagttcattaaaatccaatgcaaggaagctaaaaatcatgatacaacaatgcaggagctgacagacaaaataaccagkatggagactacactgtatctgacctgatagagctgaaaaacacactacaagaatttcacaatgcaatcacaaatgttaatagcagaataaaccaacaagtaaaagaatctcagagcttgaaaactggctttctgaaataagacagacaggcaagaatagagaaaaaagaatgaaaaaggaatgaacaaaacctccaataaatatgagattatgtaacaagaccaaatctacaactcaggggtgtccctgaaggacatgaggggaacaaaaccaacatgaaagacatatttcagaatatcatccatgggaacttctccaacctagctagacaggcaaacattccatttcaggaaatgcagagagccccagtaaaataattcacaagaaaatcatccccaagacacatattcatcagattccccaaggtcgaaataaaagaaaaatgttaaaggcagctagagagaaaggtgaggtcacctataaaggaaagctcatcagactaacagatgac

SEQ ID NO: 926681 - DNA, 669 bp, Homo sapiens
tttggaaaaagacttagatggctgaaatgacagaaatagaattcagaatatggatagaaatgaaaatcattgagccacaggagttcattaaaatccaatgcaaggaagctaaaaatcatgatacaacaatgcaggagctgacagacaaaataaccaggatggagactacactgtatctgacctgatagagctgaaaaacacactacaagaatttcacaatgcaatcacaaatgttaatagcagaataaaccaacaagtaaaagaatctcagagcttgaaaactggctttctgaaataagacagacaggcaagaatagagaaaaaagaatgaaaaaggaatgaacaaaacctccaataaatatgagattatgtaacaagaccaaatctacaactcaggggtgtccctgaaggacatgaggggaacaaaaccaacatgaaagacatrtttcagaatatcatccatgggaacttctccaacctagctagacaggcaaacattccatttcaggaaatgcagagagccccagtaaaataattcacaagaaaatcatccccaagacacatattcatcagattccccaaggtcgaaataaaagaaaaatgttaaaggcagctagagagaaaggtgaggtcacctataaaggaaagctcatcagactaacagatgac

SEQ ID NO: 926682 - DNA, 657 bp, Homo sapiens
atgactgtcccttgatgcttactccttatacctggttgctaagggcaatgtgtcctaatgtccatcccacctgcacctcttcccagcaggtggcaggtgaatgtctgatgttttgagacatcaacagagcaggcaaattagagrcctatttgacttaatttaagaggtctcttgcaaaaggtcattaatgagacatattgataaagactcagtcatcgccacattgggaagttaaggaagctaagttcagagatgtcaaatgactgacaagcatgcaacgggactttgaatttccatcttctgggtcagattacaggaggagcaagtataagcttgcaaattaaacaggaaggagggaggttggagggagctgtgtcctctttgggatgagcttcctggcattactgattgtgcatttgtccctggccccatgctgctgagcaggacagagggaaagcctaagagtgccctgggcagagttcgaagatcccatcccagagcggtgacactctaggcatcctgtgctcacttgctgattctgctcttcagcctgggcagtggcatttatcctcttccgggttcctgtctgagtagagcatttcatctttctatgccatttgtaaaaaggatgtgtacatggaaactacatacacatct

SEQ ID NO: 926683 - DNA, 606 bp, Homo sapiens
aaaaggaatttaaacaaatttttaaggaaaaaagcaaccccattaaaaagtgggcaaaggacatgaacagacacttttaaaaacaaaacatacatatgggcaacaagcgtatgaaaaaaatctcaacatccctaatcattagagaaatccaagtcaaaaccgcaataatataccatctcgcrccagtcaaaatggcaattattacaatttaaaaagtcaaaaaatagcagatgccagtgaggttgcagaaaaaaagcaatgcttatacactactggtgggagtggaaattagtccaaccattgtggaagagagtgtggtgattcctcatggacctaagaacagaaataccatttgaccctgcaatcccattactgagtttatacccaaaggaataaaaattgttctgtcataaagatacatgcatgtatatgttaattgggtcactattcacaatagcaaagacatggaatcaacttaaatgcccatcaatgtttgaatggataaagaaaatgtggtacataaaccacacttggaatgtggtacattccatgtgtaccacatggaatactatgcagccatataaaggatgagataatgtcttttgc

SEQ ID NO: 926684 - DNA, 674 bp, Homo sapiens
  misc_feature 256: n = A,T,C or G
aggcagacatccatcacttgcaacactcccacagaaactcacagcctggcagcttctgaggctgagcagttctgcttcaccaggaagtccatccagcaagagagcattcccagggaacacagccaagctgtacctagaaatcatagtgggagaactttcaagaagactcactgcacaccaccagagcaagcctgacgcatcctgcagatctttttggacccttagggattttgcggtgtatttctggggctccacnttgagatttcctcaggctgactcaccgctgccaactgctaggattgtgggattatcccatgatccccsagagaagatggcagagtccatggccgacgcacgttcatagagtcttttccactaagcgacagtgtcttgttaccatcgaatggtggcgttcactgtgactgagccttgtctcaccgctcacaccgggtgccctgagactggtgcgtgtgcatttttgaggcagcctcggaagctggtatgtcaaggcagtcagtctacctaagcagagaaaaatggtacaggcagagccagcctggtcttgggaaaaagtctgctgggacaaccactgccgggatcctaaaactctcaataatatggcctcctaggatcatctcagtggttgcgttgcgctggagggggaggagtttcaa

SEQ ID NO: 926685 - DNA, 669 bp, Homo sapiens
  misc_feature 256: n = A,T,C or G
aggcagacatccatcacttgcaacactcccacagaaactcacagcctggcagcttctgaggctgagcagttctgcttcaccaggaagtccatccagcaagagagcattcccagggaacacagccaagctgtacctagaaatcatagtgggagaactttcaagaagactcactgcacaccaccagagcaagcctgacgcatcctgcagatctttttggacccttagggattttgcggtgtatttctggggctccacnttgagatttcctcaggctgactcaccgctgccaactgctaggattgtgggattatcccatgatcccccagagaagatggcagagtccatggccgacgcacgttcatagagtcttttccactaagcgacagtgtcttgttaccatcgaatggtggcgttcactgtgactgagccttgtctcaccgctcacaccgggtgccctgagactggtgcgtgtgcatttttgaggcagcctcggaagctggtatgtcaaggcagtcagyctacctaagcagagaaaaatggtacaggcagagccagcctggtcttgggaaaaagtctgctgggacaaccactgccgggatcctaaaactctcaataatatggcctcctaggatcatctcagtggttgcgttgcgctggagggggaggagt

SEQ ID NO: 926686 - DNA, 665 bp, Homo sapiens
tgataaaaactagaaacaatctatctgtgaaaatgctttgctaagtgtggattcatctcacagatttaaacctttattttaattaagaaggttgaaaacactcttttagtaaaatctacgaaaggcaggttggaagcactctatttttagaatctacaaagggactttttggagcccattgaggcctatagtgaaraaacctatatcccaagataaaaactagaaacaagctatcagtgaaaatgctttgccatgtgttcattcatttcacagagtcaaaccgttgttttgattcagcaggttggtaatgtgggcagcaagccacccaggcaccgaggcaagagacagaggacacaagctgttccagcataataaaatataaaacaagaatagttataccagatatagatcttagatatgattatatatgaatatcattaatcattggtttgtagtaattactttttattccaatattatgataatcctcactctataacatagcctaggaaaaaccaggccatacagagataggagctgaggggacatagtgaggtgtgaccagaagacaagagtgcgagccttctgttatgcccggacaaggccaccagagggctccttggtctagcggtgacaccagcatctgggaagacgcccattaccag

SEQ ID NO: 926687 - DNA, 509 bp, Homo sapiens
tccctaatgcagatatggctggagagagcaaaaacttagattataacacccaaatcccttcgagtatctggaaagtcttcccaagaaggacaggtgcatagaagcccagtccaagaatattataataaatatttaagtcttcaatatccagaagctgacagatatccacaagcctcaggactatccaggaaaacatgacctcaccaaatgaactaaaaaaggcaccagggaccaatcatggaaagaaaagagatatgtcacctttcagacagaaaatttcaaatagctgttctgaggaagttcaacaaaattatagataacagtaaataggaattcagaatcctattagctacatttatcaaatagagggaaayaatcaaaaggaataaaacagaatttctaaagttgaaaaatgtgcaccctcaggcccatcaccatgtggaagccaccaaagcttggggcttgcattctctgaagcaacagcctgagctgtatgttggcccctttta

SEQ ID NO: 926688 - DNA, 600 bp, Homo sapiens
tcaaatgtccaaaagtgcattttccaaagtaggaatgtaccataaataaatgtatcattatatgtatttcaggtagttatcaactatatctgactaagaattactgtatttcaataatggacaagcagtgaggcattgagagaaatgccattaacaacacagagctggccaagatataagtaacagttttctctttttattctctatttaacacaggatctagagtagtgagtaagaaacaacacgaactacaaaagatattacctcttggctgactgacggcagcagcctcttaaccagtgccctctctgttactcctttctctctcgtctctccaatccatctttctcaaacagagttgtaatcaaatgacttccctggtaaagacttcaatggctccctcatttcctastaaataatgtcaaaactaattaggccgaaattgcagcttgctagtctcatccccaactttgctggtacacattccaacctgccattttatgagttaatgattcgggaacaaatgttttgggaatatgaccttgaatggactcttgctagctgaaaactcctagtcttctcagtgactttggtgatgcc

SEQ ID NO: 926689 - DNA, 724 bp, Homo sapiens
gcccctgagactcctgtgggcaccagggaagcccttcctgccctgaccccaggcacctgcctgagacgctgggcgagggagagggtatgggtctggttctaatttgccagccctgagggctcctgtttggggcccagccctctgcccactgcactttgcctgggtgagagtgacttttctccttgtcacaagagaaagaacccagactgtggtgtggcctggtcacctggctgccagggagtgtcatggtgggaccccagggctgccgtctcctaaggacagagatagtccctctgacctcagtgcccctctgtgtgcraaagctttctctgggggctgcagtgcaacgcatagatgaagttggcatgtcatccacaacataaagaaacatggcagaggctgtgctatctgctgggtgtagataaacacaaatgtgtggctacacacccactttttttttttttttttttgagacagagtcctgtgctgttgcccaggctggagtgcagtggcatgatctcggctcactgcaacctctgcctcccgggttcaagcgattctcgtgtctcagcctcccaagtagctggaactacaggcacgcgccaccacaccctggattagttttgcatttttttatacagacagagtttcgccatgttggccaggctgttctcgaactcctgagctcaggtgatccgccagcctcagcctcccaaagtgctgg

SEQ ID NO: 926690 - DNA, 724 bp, Homo sapiens
gcccctgagactcctgtgggcaccagggaagcccttcctgccctgaccccaggcacctgcctgagacgctgggcgagggagagggtatgggtctggttctaatttgccagccctgagggctcctgtttggggcccagccctctgcccactgcactttgcctgggtgagagtgacttttctccttgtcacaagagaaagaacccagactgtggtgtggcctggtcacctggctgccagggagtgtcatggtgggaccccagggctgccgtctcctaaggacagagatagtccctctgacctcagtgcccctctgtgtgcaaaagctttctctgggggctgcagtgcaacgcatagatgaagttggcatgtcatccacaacataaagaaacatggcagaggcygtgctatctgctgggtgtagataaacacaaatgtgtggctacacacccactttttttttttttttttttgagacagagtcctgtgctgttgcccaggctggagtgcagtggcatgatctcggctcactgcaacctctgcctcccgggttcaagcgattctcgtgtctcagcctcccaagtagctggaactacaggcacgcgccaccacaccctggattagttttgcatttttttatacagacagagtttcgccatgttggccaggctgttctcgaactcctgagctcaggtgatccgccagcctcagcctcccaaagtgctgg

SEQ ID NO: 926691 - DNA, 605 bp, Homo sapiens
cctttcaggctgcagttgaaaaacagtattttaagatttgtattgaatgcctcctttcaagggctccttaatgaattcctgagtttaaagggagtcacagaagaaaagtatcctctttgctttttctttgtccccttaagaaattaatgcacgttatgatttatggaggccactccaaggcctggtgtatctgagatcccatttgctaggcacatcttgcagtgatttatgcctagaactatctacagggatgggcagtgtaccaggcattctcccataaagaacagatggcacagccaaacttggataattcaagaagacttctctgcacaaaggctagcaataaaggtgcagattgggtgatagggaggccccaaaggatggtagaagaaccctgggctgccagtggcaactgaagccagctccaggactaaagagatcagggaagagaaaggctaccagaaactacmagggaagagaaaggctaccagaaactggaaagggaaagggtcacattagcaggctgcctagaaaggtggaacaagggacacagctaatttaaggcaacctttaaaaaaggagccagaggaacacatagcgcctcc

SEQ ID NO: 926692 - DNA, 555 bp, Homo sapiens
gttaaactgatacccaaatcaataatgcaattccatttagaataactacaataaattaaatacctaggaatacatttaaaccaaggaagtgaaagatctctactaggataaatacaaaccctgatgaaagaaattataggtgacacaaacaagtggaaaaacattctactctcatggattggtagaaaaattatcattaaactgtctatactgcccaaagcaatctacagattcaatggtattcttatcaaacaaccggcatgatttttcactgaattagaataaaactattgtaaaattcmataggaaaaaagagactgaatagtcaaagcaatcctaagcataaagaacaaagtgagaggcatcccattacctgatatcaaactatactgcaaggccacagtaaccaaacagcatagtactggttcaaaaacagacacctagactaaaggaacagaatagagaacccagaagcaaagccacacacctaaaaccatctgatcttcaatgaagttagcaaaaagaatgcaatggggaaagtactcattattcagt

SEQ ID NO: 926693 - DNA, 572 bp, Homo sapiens
gggaagctgaggtgggaggactgcttccaggagttcaagatcagaccaaccagggcaacatagtgagacctcatctctctatatatatttttaaattaaaaacaaaaataaaaaaatggattgtcgattctcccatgttagtctgcagctctaccctgagctccatgagcctgagggattcccgccctgccactgtgaggtgagctcagcatgcgaacttttcacttcttgcagtgtggtcctgtggctggtggatgctctgctccctcaggcagagaatacggtggcagcgttagcctgggcactgggtaggtggagaataccaytgcctgcctatgcgaggtgtcagaacctaagcacttcccaggccaccagcctgagtctgagccactccttggctcactgagatctgcagatgagagtcaagatggcagaggtgagagggagactcatcaagcaaggatgggtttctccaccctgaccctgagtgaagcaggaagaagataccaaactcaaggggatgggggagcagagccaagaagagcagcacggagaactgcccacctgagccc

SEQ ID NO: 926694 - DNA, 445 bp, Homo sapiens
cctcaacctgcctttccctcagcctgcgtgctcagagattgcctgcatcttctggtcagccccagaccctcctactgccctaggaggaacacatgtcatcaaaaggaccagcgtcatttggccctgtcccaaggatcaataacctatcaatcaccatcatggggattgggaacaacatcctggckgacagtgctcagaggacctaagtcaggactcttcatcaaaacaaagctaacatctaatgctaccttggcaaagtgagttgaatttaatagtgcctgcggaaaaaatattttcattacacatagatagggatactgaaggacatgtgaaatccctgtgcaagctgtgaactgctacacatgcaagttgttattattagtacctttgttacaatgattgatagccaaatggacaggaagttgtaaatgtgtctatttataca

SEQ ID NO: 926695 - DNA, 774 bp, Homo sapiens
tgctaccacccaccaacaatagttttacacagagaggtttttcattaggccaaggttatacagctagcagaggggctttgattcatgactttttataaaagtgctgtatgtagaaagcagaggggtgggaagcttccctcgaccccccagccaatactgacctttggacaggccttgcctcgcaggaatggagcagcaagctggttactgaggagaaaaaatgcagcagtcatttagggcttggggagggagatgtgaaaagtagccttctgctgagtgggcttaaaaccctgggattggaagggtccctgagaagccgtcacacccacctccagcctggttcaccactccaaagmtaggtggccagtccttcttcctccgcatctgcttcacagacctttgcagaggaaaatctcacactcattgccatgcctgcctcgttttcaggaagtttcccttttatttggcttcagtccgtctctctgcagtctggttactctttaaaaatgaaggttgaattgcctctccccacctcaaggaagaacctagaccctatgtctttctcatttttggtcaagcataaacattttcacattcttcattaatggtgtctaacatcttaaatataaataatgaaaacacagcaaagcagcagccttttttgaatgtgcctttttggcctccacctctctgggctctgacatactcctggggtgggctgtgtgcctgtcctgaagaatgccaggctggcccatgtcctgcaggccaagtaac

SEQ ID NO: 926696 - DNA, 435 bp, Homo sapiens
gctgaaatgcctggcatagagtagatgctcaattaaaaaaatgagccccaaagtaggaggtacaacaggatcaaagaaatgagcaagcaaaattcaagatctagcctgtagttgaacccatttcatctagtagcaaaaattatttagaaggctgattatggtckatcgatgacctcaaataccaacataagcaatttgtacataattatgtctttaaatatatgcacaattacctcctatcctaaaaaaaatgaactatctagaatataaaaccccttctgaaaccatcatctattttctctcatctaaattgttaaaaactagtgataatcttaaatccttctcctactctttagttctcaatccatatatttttggggaaatgctttataaatttactaatgacctctgaattgccaaattttaatgaacata

SEQ ID NO: 926697 - DNA, 542 bp, Homo sapiens
cctagcatggtaactcaatgaactaaagaaataagagcagggtaacccccaagctactagaagacaaaaaataaagctgaagtgaagtaaagtgagacgtaaaaaacatcccaaagtcaacaatccaggaggtgggttttttttttttttgaaaaaaaaaaaaagattgatagactgctagctagacaaaaaaaaagaagaaagaaagaaaacaaagaaagagaaagaaagaagagaaagaaagaaaragagaaagaaaaagagaaagaaagaaaggaaaaagatcaaaataaatgcaattggaaatgacaaaggggatgttactaccaaccccacaataatacacaaacatttcagagactattatgaacacctctgtgcacacaggctagaaaacctaaaagaaatggatacattcttgggcacatacagtcttccaagactgaatcaggaagaaattgaatcccttaacagaccagtaacaggttctgaaattgaatcagtaataaaagtctgctcatcaaaaacaaaaacaaacaaac

SEQ ID NO: 926698 - DNA, 619 bp, Homo sapiens
gttataaagattaaaattttacagattgtttataaaattttggaatacaaatctaattgactttatgctgttttcattagggcttattaattggaaaattaattctcctctctaaaaaatgaaggttttcacctttttttgaaatctttgagttatcactttgtttaaataaatgacttgacaatgacctgtgatcctattttatgatgtcaaatgttttaaacctttgatatttgacaaactttccaaaatcatattataaattatgtctttgtctcacctaattaattttgagatatcggctttcctaaagtccaaaaatgacctatttggcttatttggtataaaaattatacaggaagcattgtcaaatatgaaatggtgttttgttttctttgggctgtatttgtataaatatgtaactgccatgtgttccaaaattatgggtaactcytataattctgatatgacttagtgtacattatcagtaataactataatttttatgttaaattattgtgtgccacagaggtaacaaatttcctcattaattgtgtctttgactatggctgcctaaaaactttttgtcatccatgaacaattgttgtcttgttttggt

SEQ ID NO: 926699 - DNA, 750 bp, Homo sapiens
actgtgggagactggttccaggacctcccttgataccaaaatctgcatatgttcccatcttctatataaattggcatagtaactgcatataacctacctacatcctcctgtatactttgaatcatctctagattacttaaaatacctagtacaatgtaaatgctatgtaaatagttgttatattgtrtttttaaattttgttttttttttattgttgtactggttttttttttttttgagatggagtcttgctctgtcacccaggctggggtgcagtggcgcaatctcggctcactgcaacctccacctcccaggttcaagcaattctcctgcctcagcctccatagtagctgggactataagcgctcgccaccacgccttgctaatttttatattttttagtagagacggggtctcaaactcctggcctcaaatgatccacctgcctcagcctcccaaagtgctgggattacaggcatgaatcaccacactgggcctattttttatttttaaaaaatattttccatttgtgattggttgaatccatgggtttggaacccataaatacagagaaccgattgtatacactcctattctgtgaggacagaggcagcttcctataagatgcctcttggagtgacaggtgcacacccaggtccttgagcaacaacatcatctgcattatctccaagatactcaagcttaggggatagattggcatgccagcaaatacagaagccacaaggaaca

SEQ ID NO: 926700 - DNA, 750 bp, Homo sapiens
actgtgggagactggttccaggacctcccttgataccaaaatctgcatatgttcccatcttctatataaattggcatagtaactgcatataacctacctacatcctcctgtatactttgaatcatctctagattacttaaaatacctagtacaatgtaaatgctatgtaaatagttgttatattgtgtttttaaattttgttttttttttattgttgtactggttttttttttttttgagatggagtcttgctctgtcacccaggctggggtgcagtggcgcaatctcggctcactgcaacctccacctcccaggttcaagcaattctcctgcctcagcctccayagtagctgggactataagcgctcgccaccacgccttgctaatttttatattttttagtagagacggggtctcaaactcctggcctcaaatgatccacctgcctcagcctcccaaagtgctgggattacaggcatgaatcaccacactgggcctattttttatttttaaaaaatattttccatttgtgattggttgaatccatgggtttggaacccataaatacagagaaccgattgtatacactcctattctgtgaggacagaggcagcttcctataagatgcctcttggagtgacaggtgcacacccaggtccttgagcaacaacatcatctgcattatctccaagatactcaagcttaggggatagattggcatgccagcaaatacagaagccacaaggaaca

SEQ ID NO: 926701 - DNA, 548 bp, Homo sapiens
caatttctgtcccttttactgtcatgactgcttgttttctattacctcattctcaggctcaaactctccctaggctctgtccaatcattaccctctcaccactcccaagaacactttcccagcgctggcttctccccttctttccaggtgctatgttactataatctctagccactatctgaaatccaaagasctcaccagcctagatacgacccgtaacaagtccttttgtaccgactctctaacccatgtctgtcacttcctcatggcctaactcaaaccagcaggcaccagttttgccttcaccgtcaccctctccttcccacttttctagatcgttgctggtcatgccattcaacctgctgtctgaaggcactcaatgcagtattccttttcaagtttcatcatccttgacatctgagctgtacacatcctgtatcaacatcccctctttagcactgacactacactaaggctcctatcatctttccaaccattcttagcctacagtcactgcctccccgattccctcacattaacctcaaccc

SEQ ID NO: 926702 - DNA, 624 bp, Homo sapiens
cttcctgaatccttaaagcttttgttattaaaggtttttcattccatgactggtcatggaaaagataaaataatccaaattgaatatattaatgtggtgacttataaattaaggaaatagtttaaaaccaatgtttggttccatattcccaggaagacaatcaaagcttcaggtacatttggctacctgatgggccatttaaacatttataaaggaatttcactcaattgtcattttcaatgcatgttttctggtgtataaaagcttttccatgcaagagggctgatcttatagcagtagattattatgctacagtgtattttaaccaggtaaagaaagctttttatggttcactgaggacagtcccytcacaatctagaacctgaagattggatcttctgagaacatcagagaaaggccgtctttgccatccacactacagaaaaactttggagcctcgaaccttgggtttataatctcacaactgagaagggtccctccacactcctgcaactgtacacctgttggaacccttaaggtaaaactaatcaggaaagtttctccccagaagaagatggcatccttgatgtgaacagcttttccacaagatcacggatcaaaact

SEQ ID NO: 926703 - DNA, 680 bp, Homo sapiens
ctgggagaaccactgctctcttcagagctgtcagacagggatgtttaagtctgcagaagtttctgttgcctttttttcagctatgcccagcccccagaggtggagtttacaaaggcaggtgggcctagttgagctgcagtgggccccaccgagttcaagctttctggctactttgtttacctactcaagcctcagcaatggcggacgccccttccccagccaggcttgccaccttgcagttctatcttggactagcagtgagcaaggctctgtgggcatgggacctgctgagccatgcatgggatttaatttcctggtgtgccatttgctaagactgttggaaaagtgcagtgtctaggtggcagagtcccaattttcccagtacagtctgtcatggcttcccttggctaggaaagggaaatttccaggccccttgtgcttcctgggtgaggcaatatcccgtcctrcttcagcttgccctctgtgggctgcacccactttctgaccagtcccaatgagatgaaccaggtacctcagttggaaatggagaaatcacctgtcttctgcatcagtcacactgagagctgcagaccggagctgttcctatttggccatcttggaatggaccccgcaccttcatttagatttaatttattggacaacacaaggctattaatgtt

SEQ ID NO: 926704 - DNA, 464 bp, Homo sapiens
ccaccccgacacacacataacacacacacacacacacacacacacagtgtgagatagtgagaaggcttatgaagtaaatcaataaagcagggtaagagaaagagggtaacatagctgactatttttagacagggtggtaggggaagtctctaagaaaaatatttaattattattattgatgaatcaataataatagtcaatatttatttaggcagacattgtgctaagctttgtatcatttaatccttgcaataacttattttacaacaactcaacaataaaaaagamtgaactattgacacacacaacaacctggatgaatctccaaagaattatgttgagtaaaaaaagccaatccctaaaggttacatactgtatgattacacttacgtaacattcttgaaatgacaaaattatggaaatgaagacaagattcaagtttgtcagaggttaaggagggggca

SEQ ID NO: 926705 - DNA, 542 bp, Homo sapiens
cacacaatacttggttctaacttcatattgccaaaagagccactgaaaaggtaggataaacagtctttagtcactgacaccaaccgtcccccacttcctggcagcagcagtgtggtgaggagagtgtttcagtgtgcgtgggagaaggagatcacagcaattgtgaggcactgaactcactgctgccttattataacagaaaaaaaaggaccatctctattgatgcccaccatggagagagcaattaaagtagcctagccagagaggaatttcccrtctcagcagtccgaacttgagtttcccaaagccttgccactgcaggctaaagtgctctggggcccttaataaacttgaaagacagtctaggccacaaggactgcaactcctaggtgagtcctagtgctggactggtcccagagccagtggactagggggtcatgtgacctactgagaaaccagcgaggtgtctaagggggtgctagcatcaacccttccttagccccaggctgcatagcttgtggcttaaaaacagaccccttgcc

SEQ ID NO: 926706 - DNA, 542 bp, Homo sapiens
cacacaatacttggttctaacttcatattgccaaaagagccactgaaaaggtaggataaacagtctttagtcactgacaccaaccgtcccccacttcctggcagcagcagtgtggtgaggagagtgtttcagtgtgcgtgggagaaggagatcacagcaattgtgaggcactgaactcactgctgccttattataacagaaaaaaaaggaccatctctattgatgcccaccatggagagagcaattaaagtagcctagccagagaggaatttcccatctcagcagtccgaacttgagttycccaaagccttgccactgcaggctaaagtgctctggggcccttaataaacttgaaagacagtctaggccacaaggactgcaactcctaggtgagtcctagtgctggactggtcccagagccagtggactagggggtcatgtgacctactgagaaaccagcgaggtgtctaagggggtgctagcatcaacccttccttagccccaggctgcatagcttgtggcttaaaaacagaccccttgcc

SEQ ID NO: 926707 - DNA, 585 bp, Homo sapiens
tatttctgtgtagaatgtcattggtattttgacagggattacactgaatcagtaaatggctttgggtagtatggacattttaactatatttattctcccaatccatgaacatggaatatgttttcactttttggtgtccacttctatttctttcgtcagcgtttcatagtttttatttattatagcactctcacttctttggttaatgtctaggtatttaatcttgatttctggctattataaatgggattatttttaaatttcattttcrgattgttcactgttggcatatgaaaatgttactgatttttgtatattaattttgtatcctacaactttattgaatttgtttagcagttctaatagttttttggtagagtctttaggtttttccaaatttaagattatatcatctgcaaaccaggataatttgacttcttcctttcaaatttggatacccttcatttctttctcttatctgattgctctagttaggacttccagtactatgttaaataacagtggtgaaatgcttgtcgtgttccagatcttagaggaagggctttttgattttccccattcaga

SEQ ID NO: 926708 - DNA, 585 bp, Homo sapiens
tatttctgtgtagaatgtcattggtattttgacagggattacactgaatcagtaaatggctttgggtagtatggacattttaactatatttattctcccaatccatgaacatggaatatgttttcactttttggtgtccacttctatttctttcgtcagcgtttcatagtttttatttattatagcactctcacttctttggttaatgtctaggtatttaatcttgatttctggctattataaatgggattatttttaaatttcattttcggattgttcactgttggcatatgaaaatgttactgatttttgtatattaattttgtatcctacaactttattgaatttgtttagcagttctaatagttttttggtagagtctttaggtttttccaaatttaagattatatcatctgcaaaccaggataatttgacttcttcctttcaratttggatacccttcatttctttctcttatctgattgctctagttaggacttccagtactatgttaaataacagtggtgaaatgcttgtcgtgttccagatcttagaggaagggctttttgattttccccattcaga

SEQ ID NO: 926709 - DNA, 378 bp, Homo sapiens
tgcagtgagatgtcacaatgtccctgtagccatatccttgagaaaagtgacatcacctgggtgatcagtgcggagatatgtcacaatgtctccagtaggcagagcctagacaagggttacagcacctgggtgatcagggcagggatatgtcacaatgccccctgtaarcagatcccagagaagagctgaatcacctcggtgatcagtgcagagatatgtctcaatgcccctgtcggtgaagcctgtacaagagttacatcatctcggtcatcagtgcagtgatacgttaaaatgcccccataggcagagcctagaaaagagttatatctcctggttgatcagtgcagagatatctcacaataccccctgtaagcagag

SEQ ID NO: 926710 - DNA, 378 bp, Homo sapiens
tgcagtgagatgtcacaatgtccctgtagccatatccttgagaaaagtgacatcacctgggtgatcagtgcggagatatgtcacaatgtctccagtaggcagagcctagacaagggttacagcacctgggtgatcagggcagggatatgtcacaatgccccctgtaagcagatcccagagaagagctgaatcacctcggtgatcagtgcagagatatgtctcaatgcccctgtcrgtgaagcctgtacaagagttacatcatctcggtcatcagtgcagtgatacgttaaaatgcccccataggcagagcctagaaaagagttatatctcctggttgatcagtgcagagatatctcacaataccccctgtaagcagag

SEQ ID NO: 926711 - DNA, 378 bp, Homo sapiens
tgcagtgagatgtcacaatgtccctgtagccatatccttgagaaaagtgacatcacctgggtgatcagtgcggagatatgtcacaatgtctccagtaggcagagcctagacaagggttacagcacctgggtgatcagggcagggatatgtcacaatgccccctgtaagcagatcccagagaagagctgaatcacctcggtgatcagtgcagagatatgtctcaatgcccctgtcggygaagcctgtacaagagttacatcatctcggtcatcagtgcagtgatacgttaaaatgcccccataggcagagcctagaaaagagttatatctcctggttgatcagtgcagagatatctcacaataccccctgtaagcagag

SEQ ID NO: 926712 - DNA, 633 bp, Homo sapiens
taagtgcagtaacatgtcacaatgcccctgtagccatatccttgacaaaagtgacatcacctgggtgatcagtgcggagatatgtcacaatgtctctagtaggcagagcctagacaacagttacctcacttgggagatcagggcagatatacgccacaatrccccctgtaagaagatcccagtcaagagtggcatcacctcggtgatcagtggagagacatgtcacaatgcccactgtcggtgaagcctatacaagagttacatcatctcggtgatcagtgaagtgatatgataaaatgcccctgtacgcagagcctagacaagagttacatgacctaggtggtcagtgcagagatacgtctcaatgtcccagtaggcagagccttcacaagtggtacatcaactgggtgatcattgcagggatatgtcacaaagcatcctgcaggcagatcctagataagagttacatcacctgggtgatcagtgcagagatatgtcacaatgccactgtaggcagagcccagacaagagttacatgacctaggtgatcagtgcagagatacatcacaatgcccctgtaggcagagccttgacaagtggtatatcacctgggtgatcattgcagggatatgt

SEQ ID NO: 926713 - DNA, 633 bp, Homo sapiens
taagtgcagtaacatgtcacaatgcccctgtagccatatccttgacaaaagtgacatcacctgggtgatcagtgcggagatatgtcacaatgtctctagtaggcagagcctagacaacagttacctcacttgggagatcagggcagatatacgccacaatgccccctgtaagaagatcccagtcaagagtggcatcacctcggtgatcagtggagagacatgtcacaatgcccactgtcggtgaagcctatacaagagttacatcatctcggtgatcagtgaagtgatatgataaaatgcccctgtacgcagagcctagacaagagttacatgacctaggtggtcagtgcagagatamgtctcaatgtcccagtaggcagagccttcacaagtggtacatcaactgggtgatcattgcagggatatgtcacaaagcatcctgcaggcagatcctagataagagttacatcacctgggtgatcagtgcagagatatgtcacaatgccactgtaggcagagcccagacaagagttacatgacctaggtgatcagtgcagagatacatcacaatgcccctgtaggcagagccttgacaagtggtatatcacctgggtgatcattgcagggatatgt

SEQ ID NO: 926714 - DNA, 611 bp, Homo sapiens
atgtaacatcacctgggtgatcagtgaagagatacttcaaaatacccccagtatgtggagcctagacaagagttatatcacctggatgatcactgaagaaatatgtcacaaagcccctgcaggcagagcctagacaagagtttcatctcctgggtgatcagtgcaatgatatgtcacaaacccccctgtagacaaatcccagaaaattgttacatcacttgggtgaccagtggagatatctgtcacaacactcctttaggsgcagcttagacaagcgttacatcacatgactgatcagtgcagagatatgtcactatgcccccataggcagatccaagacaagagtccatcacctgggtgatcagtgcagaaatatgccacaatgccgccactaggcatatatagacaagagttatatcacctgcgtgaccactgcagagatgtcacaatgcccctataggaagagcctagacaagagtcccatcacctgggtgatcagtgcagaattatgtcacaatgccgccttttggcagagcctagaaaagggttacatcacctgggtgatcagtgcagtcatgtgtcacaagacccctgtagccagagcctagaca

SEQ ID NO: 926715 - DNA, 611 bp, Homo sapiens
atgtaacatcacctgggtgatcagtgaagagatacttcaaaatacccccagtatgtggagcctagacaagagttatatcacctggatgatcactgaagaaatatgtcacaaagcccctgcaggcagagcctagacaagagtttcatctcctgggtgatcagtgcaatgatatgtcacaaacccccctgtagacaaatcccagaaaattgttacatcacttgggtgaccagtggagatatctgtcacaacactcctttaggggcagcttagacaagcgttacatcacatgactgatcagtgcagagatatgtcactatgcccccataggcagatccaagacaagagtccatcacctgggtgatcagtgcagaaatatgccacaatgccgccactaggcatatatagacaagagttatatcacctgcgtgaccactgcagagatgtcacaatgcccctatasgaagagcctagacaagagtcccatcacctgggtgatcagtgcagaattatgtcacaatgccgccttttggcagagcctagaaaagggttacatcacctgggtgatcagtgcagtcatgtgtcacaagacccctgtagccagagcctagaca

SEQ ID NO: 926716 - DNA, 611 bp, Homo sapiens
atgtaacatcacctgggtgatcagtgaagagatacttcaaaatacccccagtatgtggagcctagacaagagttatatcacctggatgatcactgaagaaatatgtcacaaagcccctgcaggcagagcctagacaagagtttcatctcctgggtgatcagtgcaatgatatgtcacaaacccccctgtagacaaatcccagaaaattgttacatcacttgggtgaccagtggagatatctgtcacaacactcctttaggggcagcttagacaagcgttacatcacatgactgatcagtgcagagatatgtcactatgcccccataggcagatccaagacaagagtccatcacctgggtgatcagtgcagaaatatgccacaatgccgccactaggcatatatagacaagagttatatcacctgcgtgaccactgcagagatgtcacaatgcccctataggaagagcctagayaagagtcccatcacctgggtgatcagtgcagaattatgtcacaatgccgccttttggcagagcctagaaaagggttacatcacctgggtgatcagtgcagtcatgtgtcacaagacccctgtagccagagcctagaca

SEQ ID NO: 926717 - DNA, 595 bp, Homo sapiens
tcagtgcaaaggtatgacacaaagccccctgtaggcaaagcctagacaatagttacgtcacttgggtgatcagtggcaacatctctcacaattcccctgtaggcagagcttatacaacagtttcatcacctgggtgctcagtgcagaaatatgtcacaatgcccccataggcagacccaagacatgagtccgttacctgggtgatcattgcagaaatatatcacaatgyccccttaggcagagcctagacaaaagccacaacacctggatgatcagtgcagatttatgtcacaaagtccctttaggcagatcgtagacaagagttacatcacttggatgatcagtgcagagatacgtcacaatgccactgtaggcaaagcttagacaagagttacatgacctaggtgatcagtgcagagatacatcgcaatctccctgtaggcagagccttggcaagtggtacatcacctgtgtgatcattgcagggatatgtcacaaagcaccatgtaggcagatcctagaaaagagttagatcacctgggtgatcagtgcagagatatgtcaaaatgccactgtaggcagagcctagataagt

SEQ ID NO: 926718 - DNA, 770 bp, Homo sapiens
cctgcaggaggctttatgacttatacctgcactgataacctaggtgatgtaacacttgtctagactctgccttcacgggaattctcacatatctctgcactgatcacacaagtgatgtaactcctatctaggttcagccttcaggagcgttttgacatatctctgcacagatcacccaggtgatgtaacccttgtctaagctctgcctacaggggcattgtgacagatctctccactgctcacccaggtgatgtaacaactgtctgggctttgcctacagggggctttgtgatatacatttccactgatcaaacaggtgatgtaacacttgtcaagcttctgcttacaggggctttgtgacatatctctgctctgatcaacctagggaggaaacacttgactgcactctgcatagaggagactttacgacttatcactgcgytgattacaaggtgatgtaacacttgtctaggctctgtctacacgttaattttcatatatctctacactgatcacctaagtgatgtaacccttgtctaggttcagccttttggggatttctgacatacctatgcacagatcaccgaggtgatgtaaatcatttccaggctttttgtactggcgacattgtgatatatctctgcactgatcaccgaaatgatgcaagtctcccctaggctcctcagggtgggggcattgtgacatacttctgaagtgatcatccaggagatgtaactattctccaggctttgactaaagagcatcgcaag

SEQ ID NO: 926719 - DNA, 611 bp, Homo sapiens
aagcgccaataaatctgatttttctcagtcctccttatggtttaagaggacaggcaagggtgcaggtttttgagaatgtgtcagtaagggccactaaatccaaccttcctcagtcctccttgtggtctaggaggaaaactagtgtttctgctgctgcactagtgagcgtaactattcccatgagcagggtgcagggaccgttgcaggttcttgggcaagaggggtttctgctgctgcattggtgagcacaactattctgatcagcagggtccagggaccgttgcgggttcttgggcaagaggtgtttctactgctgcgtcrgtgagtgtgactattccaattagcagggtccaggggccgctgtgggttcttgggcagtggggggggcgggaacaaaccaaaaccatgggcgtttttttctttcagttgggaagcactcaggcatcaacaggcttacgcttgaaatgcatcctaagccattgggaccaatttgaccctcaaaccctgaaaaagaggtggctcatttttttccacactgcagcctggctccaatattctctctctgatggggaaaaatggccacctgagggatgtataaattacaatactat

SEQ ID NO: 926720 - DNA, 607 bp, Homo sapiens
gtcaaagggaatgttcaactctgtgacttgaatgcaatcatcacaaagtagtttctgagaatgcttctatctagcttttacgggaagataattccttttccaccacaggcctcaaagccctccaaatgtccacttgcagattctggaaaaagagtgtttcaaagcttctctctcgaaaggaaagttcaactctgtgagttgaatgcaagcatcacaaagaagtttctgagaatgcttctgtttagctttcctgtgaagattctcccgtttccaacgaaatcttcaaaataggtccraatatccacttgcagattccacagaaagagtgattggaaactgctctttgaaaaggaaccttcaactctgtgagttgaatgcaatcatcccaaagaagtttctgacaatgcttctctccagtttttatgtgaccataattcgttttccaccacaggcctgaaagcgctccaaatgtccacttgtagacactacgaaaagcatgtttcagaactactctatgaaaagcaatgtgaaactctgggagttgaacacaaacatcacagagaagtttctgagaatgcttctgtttagtttttatgtgaagatattc

SEQ ID NO: 926721 - DNA, 415 bp, Homo sapiens
taagagtccaccatgttaaacaaatgagacaaagctgagagttgaaagctgtgatcatgtcagctctgaaactccaacataggaagtcagttacatatccccaaagtcatagcaattaaagttaagacaattacttgaagctttgtcttmattattctatactcacactagcttatagtggtttaagattgttagattatatgagtaaacacttcacctgttcttctctagacctcactttttatacattctgtctgcatgatggtatccgtgacagaagctatgttttctgagtgctacctaatcaggtataccagacttttagaaatggtgtacattgccatcatcatctataaaataataaggtgtataaccctgatttttgatgtttttgaaaacacttttttcttctcat

SEQ ID NO: 926722 - DNA, 837 bp, Homo sapiens
gttccaaaagcaatggcctaagagcaagtattccaagcaacccaggtggaagttgcggggcttcttatgacctggcccaagaagtcacacagtatcagttccaccacatcctatcagatcaaaagccggtgttaaggtcaaccccaattcaaggagacggttctgcacaagggcacgaacacctggaggtgttcattggaacactgtctttgaagactagctactacacatatggaactactcatcactaaattcaaaacagtggttacctttggggagggcaggaagaggtgcacagagggtgaaatacaattgaggtaacattgtatttcttacatattttatactaggtggtagatacatagctgttggttctattatgcttttcggtatttttgaaatamttcataataaaaatgtatactttttatttctttttagattctgtagcatcattgttttaaagaagagcttatatccaggaaatagtcatcaaaataaatttggtgtttgaagatagaaaccaaacgctgtggttgactgttcattgtggacaatttaaaacatacaaaatccgacagagtagtagaatgaactcccatctacctgtcactaaccataacaattatagacacatgactagtctggtttcattataccttactttcctctctcctgtattattttgaagcaaatgaaagacttcttaacatttcagccccacatatttcacttgtatctctgagagataaaaatttaaaaaaccccaaaaacctaaccttacaatacctaaatcttcagtcatacctaaactttcaataataatttcttcaatat

SEQ ID NO: 926723 - DNA, 837 bp, Homo sapiens
gttccaaaagcaatggcctaagagcaagtattccaagcaacccaggtggaagttgcggggcttcttatgacctggcccaagaagtcacacagtatcagttccaccacatcctatcagatcaaaagccggtgttaaggtcaaccccaattcaaggagacggttctgcacaagggcacgaacacctggaggtgttcattggaacactgtctttgaagactagctactacacatatggaactactcatcactaaattcaaaacagtggttacctttggggagggcaggaagaggtgcacagagggtgaaatacaattgaggtaacattgtatttcttacatattttatactaggtggtagatacatagctgttggttctattatgcttttcggtatttttgaaatacktcataataaaaatgtatactttttatttctttttagattctgtagcatcattgttttaaagaagagcttatatccaggaaatagtcatcaaaataaatttggtgtttgaagatagaaaccaaacgctgtggttgactgttcattgtggacaatttaaaacatacaaaatccgacagagtagtagaatgaactcccatctacctgtcactaaccataacaattatagacacatgactagtctggtttcattataccttactttcctctctcctgtattattttgaagcaaatgaaagacttcttaacatttcagccccacatatttcacttgtatctctgagagataaaaatttaaaaaaccccaaaaacctaaccttacaatacctaaatcttcagtcatacctaaactttcaataataatttcttcaatat

SEQ ID NO: 926724 - DNA, 587 bp, Homo sapiens
catgctaatccccttcctctctcagggtcttcaaactggttgctggaattggggcctgaaaaacatcttaagtgatccttcaacaaaagccttatgattctaatgatagagatcctgtatgtgggaacaatggggatgcaagtcaattctttttttttttgagatggagtcttgctctgttgcccaggctggagggcagtggcttgatcttgtctgactgcaacctcygcctctgggttcaagagattctcctgcctcagcctcctgagtagctgggattacaggtgtgcaccaccacacccagctaatttttgtatttttagtagagacggggtttcaccgtgatggccaggctggtctcgaactcctgatctcaggtgatctgcctgccttggcctcccaaagtgctgggattataggtatgagccaccgcgcctggctgcaagtcaattcttaaacagtcttatgatcctaatgtcagaaatctcgtctacaggaacaaggggatacaattggtcaggatctagtgctgcatgactttcagcaacaaggaagtgagccaaagtgcagcctgattaatgcttaat

SEQ ID NO: 926725 - DNA, 547 bp, Homo sapiens
  misc_feature 522, 523, 524, 525, 526, 527, 528, 529, 530, 531, 532, 533,534, 535, 536, 537, 538, 539, 540, 541, 542, 543, 544, 545,546, 547: n = A,T,C or G
aagaaaatcaccgagatgattaatgaagtaccaggaaggaattaaacatacaactttgagagagaataataggccacctgctttagatgggatgagggggctccaggaattggtgtaggggcggatcacaaaagtccttgctaaaattatttatcctaatggcagaaatcagagatgttccagcagaagaggccacattctggggtgtgtgtgtgtgtgtgtgtgtgtgtgtgtgtgtagttgattttaygtttaaggaaaatcgaggtttcctacaatatgtgaaaaaatatctgagagattgaaattgactcaggtgtaaataagattttccttcttgcttgatttaattgttaactatttgtggaatctaaaagttaggcagatgctggactagtgaagggaaactagagatgtagcaccgaggctgccaatagaataatctaggaaaaagacattaagtatcttaagactttttctagactggcctggaaacttaggtctaaactgaggtgacttctnnnnnnnnnnnnnnnnnnnnnnnnnn

SEQ ID NO: 926726 - DNA, 555 bp, Homo sapiens
aagtaatgtctaagttttttcctccctggaaactccaactcaaattcgcagtcctgatttcactataaaatgtcctccagggactttttatcattatcttaaagatacactctacagactattcattgttttgcacattcatccggtctaaatgataatggcgctgtaaaaaagataaaggaagggaaaaggatatcctcagcagaaaccaaaaagctcagaacaataacaacaagttcaaatgtaaccaagtggcttcctttgattactttcaggtggttttgccaccacgacaccagataatcaacaacttcccagagttagtgggatgtgtaagtatttcttgagtgcctaccatgggataagtactagagtataacaacagtgaacaagctagatatggtcactgccckcacagggcttatagtctggtgacagacaacaggaaacaaaaaacaaacaagcaaatacacaaataagaacttagaaactaattgtacaagttttacctgggtgcggtggctcacacccgtgatcccaggactttgggaggcc

SEQ ID NO: 926727 - DNA, 565 bp, Homo sapiens
ctcctgaacatgctgtctcttacctgcttaaaatcctgctatttagaatgaagcctcaatatctcacaatggtctgtgcagccctgggtcatgtagatcttgccaatccctgacctcactttgtaccactctcctcctcaatcactgtatttcaagccatgctggccttctttctgctcctcaagcacaccaaacgatttcccttctcaggcttttgtgcttactattctctttggctaygatattcttcccttaggtcttggaatagtcggttctttattgtccttcaatctgtaactctaatgttatcccttcagagagccccactttagctcaagtagaatcctccttcctcttagtttctatggcatcacctgttttatccttcatggtactaaccctgctggatagtcatcctatgtatgtctttgcttacttatttttgttcatctacccatcactagcctaagtttcataaagacggggacctagtccaccctgttctctactgtaaccccagtgcttagaacagtgctcagtacacagtaagttcacaataaatatt

SEQ ID NO: 926728 - DNA, 555 bp, Homo sapiens
ccagcctcggcctcccgaggtgccgggattgtagacggagtctcgttcactcagtgctcaatgttgcccaggctggagtgcagtggcgtgatctcggctggctacaacctccacctcccagccgcctgccttggcctcccaaaatgccgagattgcagcctctgcccggccgccaccccgtctgggaagtgaggagcrtctctgcctggctgcccatggtctgggatgtgaggagcccctctgcccggctacccagtctgggaagtgaggagcacctcttcccggcaccatcccatctaggaagtgaggagcgtctcttcccgggcgccgatcgtctgagatgtggggagcgcctctgccccgccgccccgtctgggatgtgaggagcgcctctgcccggccgcgaccccgtctgggaggtgaggagcgtttctgcccggccgccccgtctgagaagtgaggagcccctctgcctggcagccaccccgtctgagaagtgaggagcccctccgcccggcagccgccccatctgggaagtgaggatcgtctccgccc

SEQ ID NO: 926729 - DNA, 554 bp, Homo sapiens
aggagtgatccgccagcctcggcctcccgaggtgccgggattgtagacggagtctcgttcactcagtgctcaatgttgcccaggctggagtgcagtggcgtgatctcggctggctacaacctccacctcccagccgcctgccttggcctcccaaaatgccgagattgcagcctctgcccggccgccaccccgtctgggaagtgaggagcgtctctgcctggctgcccatsgtctgggatgtgaggagcccctctgcccggctacccagtctgggaagtgaggagcacctcttcccggcaccatcccatctaggaagtgaggagcgtctcttcccgggcgccgatcgtctgagatgtggggagcgcctctgccccgccgccccgtctgggatgtgaggagcgcctctgcccggccgcgaccccgtctgggaggtgaggagcgtttctgcccggccgccccgtctgagaagtgaggagcccctctgcctggcagccaccccgtctgagaagtgaggagcccctccgcccggcagccgccccatctgggaagtgagg

SEQ ID NO: 926730 - DNA, 607 bp, Homo sapiens
ttcagctccaccacctactagctgtgtcatctaagatgagaagtctcagctctcccatttgtaaaatttaaagaaatagtagcgcccaggcacagtggctcatgcctgtaatcccagcactttgggaggccgaggcgggtggatcatgaggtcaggagttcgagaccagcctgaccaacatggtgaaaccctgtctctactgaaaatacaaaaattagccaagcctggtggtgcgcacctgtagccccaactactcgggaggctaaggcaggagaaccacttgaacttgggaggcagaggttgcagtgagccragatcaaaccactgtactacagcctggacaacagagcaagactctgtctcaaaataattaataataataataataataataatagcacatcttcagaaggtgttgataggattacatgatagtgtttacataaagagcttagtccaatgcctagcgcctaagtacttaaaaaattttcaccattatgttgatattcatctctgaaaacctgaagaaacaaggttctttgtggctttttaatctcttataataattatctagtaaaaaaaattgtcatcctgcttatttcccttc

SEQ ID NO: 926731 - DNA, 607 bp, Homo sapiens
ttcagctccaccacctactagctgtgtcatctaagatgagaagtctcagctctcccatttgtaaaatttaaagaaatagtagcgcccaggcacagtggctcatgcctgtaatcccagcactttgggaggccgaggcgggtggatcatgaggtcaggagttcgagaccagcctgaccaacatggtgaaaccctgtctctactgaaaatacaaaaattagccaagcctggtggtgcgcacctgtagccccaactactcgggaggctaaggcaggagaaccacttgaacttgggaggcagaggttgcagtgagccgagatcaaaccactgtactacagcctggacaacagagcaagactctgtctcaaaataattaataataataataataataataatagcacatcttcagaaggtgttgataggattacatgatagtgtttacataaagagcttagtccaatgmctagcgcctaagtacttaaaaaattttcaccattatgttgatattcatctctgaaaacctgaagaaacaaggttctttgtggctttttaatctcttataataattatctagtaaaaaaaattgtcatcctgcttatttcccttc

SEQ ID NO: 926732 - DNA, 583 bp, Homo sapiens
gcctaggctaatggccttttagtgcaattacagatgtagacagccagccagtttcactaatgttgtaggggctgcgcgacccaggggcacacgctaacgccacatctcactctgcccacatcacaaggcagggcttcctggctttcacaacgcactggggtttgttgttgtgtttttgtggctaggtgccttacaatgttcaaatgacagtgattttcacaggatcttcccacagtggtttatatgtgcacctggggtcttgaccaaggctcatgcttttgctattaattaaaaatcaaagctccctgaaggaaatctactgayccagaaattaagataagcacagtgagatttttttttttttttttttttgagacagagtctcgctctgttgcccaggctggagtgcagtggcaccatctccactcactgcaagctccgcctcccgggttcacgccattctcctgcctcagcctcctgagtagctgggactacaggcacccgccaccacgctcggctaattttttgtatttttagtagagacggggtttcaccatgttcgccaggatggtctcaaactcct

SEQ ID NO: 926733 - DNA, 583 bp, Homo sapiens
gcctaggctaatggccttttagtgcaattacagatgtagacagccagccagtttcactaatgttgtaggggctgcgcgacccaggggcacacgctaacgccacatctcactctgcccacatcacaaggcagggcttcctggctttcacaacgcactggggtttgttgttgtgtttttgtggctaggtgccttacaatgttcaaatgacagtgattttcacaggatcttcccacagtggtttatatgtgcacctggggtcttgaccaaggctcatgcttttgctattaattaaaaatcaaagctccctgaaggaaatctactgatccagaaattaagataagcacagtgagatttttttttttttttttttttgagacagagtctcgctctgttgccyaggctggagtgcagtggcaccatctccactcactgcaagctccgcctcccgggttcacgccattctcctgcctcagcctcctgagtagctgggactacaggcacccgccaccacgctcggctaattttttgtatttttagtagagacggggtttcaccatgttcgccaggatggtctcaaactcct

SEQ ID NO: 926734 - DNA, 611 bp, Homo sapiens
cccccagccaggcttgccaccttgcagtttgatctcggactagcagtgagcaaggttctgtgggtgtgggacccgctaagccaggtgcgggatataatctcctggtgttccatttgctaagactgttggaaaacagcagtgtttaggtggcagtgtcccgattttcccggtacagcctgccatggcttccttttgctaggaaagggaaatctcccaacctcttgtgcttcctcggtgaggcgatgcygcgccctgcttcagcttgctctctgtggtttgcatccactgtctgaccagtcccaatgagatgaaccaggtacctcagttggaaatgcagaaatcacccatcttctgcatcgatcacactgggagctgcagaccggagctgttcctattcagccatcttggaacggacccccattacaaaacttggcaggttagtcttttgataacaatctttcttactgttctacttggtttgtagtggtatctcattgtggttttaatttgcatttctctaatgtataaggtagttgagcattttttatgcactcactggccatctttgtatgtctttggggaaatgtttattcaaataatttgctccctta

SEQ ID NO: 926735 - DNA, 611 bp, Homo sapiens
cccccagccaggcttgccaccttgcagtttgatctcggactagcagtgagcaaggttctgtgggtgtgggacccgctaagccaggtgcgggatataatctcctggtgttccatttgctaagactgttggaaaacagcagtgtttaggtggcagtgtcccgattttcccggtacagcctgccatggcttccttttgctaggaaagggaaatctcccaacctcttgtgcttcctcggtgaggcgatgccgcgccctgcttcagcttgctctctgtggtttgcatccactgtctgaccagtcccaatgagatgaaccaggtacctcagttggaaatgcagaaatcacccatcttctgcatcgatcacactgggagctgcagaccggagctgttcctattcagccatcttggaacggacccccattacaaaacttggcrggttagtcttttgataacaatctttcttactgttctacttggtttgtagtggtatctcattgtggttttaatttgcatttctctaatgtataaggtagttgagcattttttatgcactcactggccatctttgtatgtctttggggaaatgtttattcaaataatttgctccctta

SEQ ID NO: 926736 - DNA, 629 bp, Homo sapiens
ctggggtgctccacgtagcattggggccgaccccattctcagggtaaacagatctgacagaggcttttatccagtccaccaggctggctgttccctcaggaataacctcccatgtgtctggatcacatatagccatctgtgattgttcagtagtgagctggggatcgtgcatcaacccaaacatgttttaccactctgcagcatttaaaaccaaagacactgctccaaattagctactttcacaattcaacaamaggttttatccagggagctgatgatgcctatctacaaaagggaacaattccttcacacagtaccctctggtttcagcagttacttgggttttgcccttcccccacattgactaccttcttggcaaccacaggtctcagaggtactttctgttgccctgtcattattttcccctttgtagatagctttgaggctaatgatctgagctcagacagacccacatttgagcttggtgcagcctcaaggcccaatctggcactcttattttagcttttatagaaaataaccaaggtactgaatatttcacttttccttattggtttgcatttacttatgtatccagtgaacaactccttaggagttggatttttctctaa

SEQ ID NO: 926737 - DNA, 766 bp, Homo sapiens
gcctcccaagactgacattttcatctgcttatgccatcagcagtcttctcagatagtgacacctttctttcaaaaatcatagtatctcttctgatcatacccccatgtgggttcttcctctctattcctattttattatactggctcaagaacattttttaaagtcagttgaaaatctggcagcatttcagacagtttcctaggatttattgagtgttttagaaaaatctctcaatgactagaatttccagggaatccctggagtttgtgggtagaaataaaacccagtacaattcaaaccagggccctgaataagtgtcaaatcaagtgagagtatagacagaactgagaattacaacatttacaagtattccaacmtttttgaaaacaataattagactttaggaaaaatgatacctatcctgtgcattaatgccttgacaaacatcatgttttatgcaagacgaattaaatttcatgcagattttatgccaatggcagtcgacagattatatatatttttttctaatccaagtacagaactttcagaaaatcctaagaaaaatctattcccatcatatgcaacagaaaacatttttaaacaaccctcacttaaaaatattgactaatggagtttctaaaaaatagttttgttaaaaaccctagtgattgaacgatttattaataaactatacacttcaaaagaaaatttacagtgtttgacattagtcatagcaagaaatcagatgaagtggattataaaact

SEQ ID NO: 926738 - DNA, 664 bp, Homo sapiens
ttaataatatatttgaactgccaggaaaaaatcagtgaacttgaagataaacgaagaagacagagaaaaatgaatgaagaaaaaatgaatggagcctcagagaaatgtgggacatcattaaacatatcaacatatgcataatggataccaaaatatacatactaacatatgcataatgcaatgtgcataatacaccacagtgagataaacagttgacttctcaccagaaacaatggaagtcagaaagcagtaggatgacayattgaaagtgctgaaagtaaaacaacaaaaaactgtcaacctatgcagaacaattctacggatgactatggaccaactgagtcctccccattttcttccttgccgttctcaagaatgactgcaaaatgtgctggaaatgcaacatcatgagatagggaggaaagggcagaaacaacctggactctgttgcagtccctgccttgtggtatgacgtgatgactgaagtgtagaacttgttgtgatgattgaactgcagaacttgtccagcacgtcatgtgcccgggtataaaacccagggtgggctgcttttctgggtgccccagccatgttgcatgcacagacaagacttcatccactcaggctgctgtattgagccttgtgcaccggcccgtgatgattccta

SEQ ID NO: 926739 - DNA, 664 bp, Homo sapiens
ttaataatatatttgaactgccaggaaaaaatcagtgaacttgaagataaacgaagaagacagagaaaaatgaatgaagaaaaaatgaatggagcctcagagaaatgtgggacatcattaaacatatcaacatatgcataatggataccaaaatatacatactaacatatgcataatgcaatgtgcataatacaccacagtgagataaacagttgacttctcaccagaaacaatggaagtcagaaagcagtaggatgacatattgaaagtgctgaaagtaaaacaacaaaaaactgtcaacctatgcagaacaattctacggrtgactatggaccaactgagtcctccccattttcttccttgccgttctcaagaatgactgcaaaatgtgctggaaatgcaacatcatgagatagggaggaaagggcagaaacaacctggactctgttgcagtccctgccttgtggtatgacgtgatgactgaagtgtagaacttgttgtgatgattgaactgcagaacttgtccagcacgtcatgtgcccgggtataaaacccagggtgggctgcttttctgggtgccccagccatgttgcatgcacagacaagacttcatccactcaggctgctgtattgagccttgtgcaccggcccgtgatgattccta

SEQ ID NO: 926740 - DNA, 664 bp, Homo sapiens
ttaataatatatttgaactgccaggaaaaaatcagtgaacttgaagataaacgaagaagacagagaaaaatgaatgaagaaaaaatgaatggagcctcagagaaatgtgggacatcattaaacatatcaacatatgcataatggataccaaaatatacatactaacatatgcataatgcaatgtgcataatacaccacagtgagataaacagttgacttctcaccagaaacaatggaagtcagaaagcagtaggatgacatattgaaagtgctgaaagtaaaacaacaaaaaactgtcaacctatgcagaacaattctacggatgactatggaccaactgagtcctccccattttcttccttgccgttctcaagaatgactgcaaaatgtgctggaaatgcaacatcatgagatagggaggaaagggcagaaacaacctggactctgttgcagtccctgccttgtggtatgacrtgatgactgaagtgtagaacttgttgtgatgattgaactgcagaacttgtccagcacgtcatgtgcccgggtataaaacccagggtgggctgcttttctgggtgccccagccatgttgcatgcacagacaagacttcatccactcaggctgctgtattgagccttgtgcaccggcccgtgatgattccta

SEQ ID NO: 926741 - DNA, 588 bp, Homo sapiens
ctcaccaagccttggcaggttgaaagggccactgaggagtttctgtgtgatcgcaaagagccttgatagaaacagaagtcctctggcggtaaagtctgcacagacttagtgcctgtctttcccaacgtctgcacaataaagccaggagccactaggctgctggaagtcctcagatccatgtggaagtcgtgcctggagcctttcagccgaaggtgaagagactcaacctcggacacggscactgctcttctccgccgctgatggtgcatgatttcatgggacacgtaatcgcccctgtggtcaacctcgtaggcagagaccaggtcatattctgaaatcaaaagagtgagcagaggctgagtcatttcggaattccgagaagaatcaggaagtcttaagatataatattattttaccacatgacctttccacccagtcaaaaatgatgaagaaaaatgcaacacctacccatactgaattcaaagtgtgcaatatggaacatcacagtttaaagaaaaaaattgtaacaagggccccataatgtgctattaccaagccaggaaattctccaacagtgatgcggtgatg

SEQ ID NO: 926742 - DNA, 668 bp, Homo sapiens
tgtctgttagaaggaaaactaacaaacagaaaggaatagcatcagcatcaacaaaaagaacatctacaccaaaatgccatccgtaggtcaccaacatcaaagactaaaggtagatgaaaccaaaatgaatgggagaaaccagagcagaaaggctgaaaattctaaaaaccagaacgcctcttctccaaggaatgcaactcctcaccagcaaggaaacaaaactggatggagaatgagtttgaagagttgacagaagtaggcttcagaaagtcagtaataacaaaattctccaagctaaaggagcatattctaacccatcgcaaggaagctaaaaaccttgaaaaaaggttagacgaatggctaactagaataaccagtgtagagaagagcttaaatgacctgatggagctgaaaaccacactacgagaacttcatgaagcatacacaagcttcaatagccgatttgatcaagtggaagaaagratattagtgattgaacatcaaattaatgaaataaagtgagaagacaagattagagaaaaaggagggaaaagaaacaaacaaagcctctaagaaatatgggactatatgaaaagaccaaatctttgtttgattggtgtccttgaaagtgagggggcgaatagaactaagtaagaaaacactcttca

SEQ ID NO: 926743 - DNA, 594 bp, Homo sapiens
gggcccaactcttccatgacaacctcacttcgtgcgacttcacggcatacaaccaatgcttcaaaagttgaacaaattgagctacgaaattttgcctcacctgtcatattcacctgatatcttgccaactgactgccacttcttcaagcatctcaacaacttttttyagggaaaatgcttccacaatcagcaggatgcagaaaatgctttccaagagttcgtcgaatcctgaagcacggatttttatgctacaggaataaacaaacatatttctcgttgacaaaaatatgttgattgtaatggttcttattttgatgaataaagatgtgtttgagctgagttataatgatttaacatgcatggtctgaagccgcaattacttttgcaccaacctcatagtatatgtgctgctaaagcgagcacttatgtacaaattttggtgtggatatacgctttttcaattctcttggttatatacccagaagtagaattgcttggtcataaagtggttcaatcttaaggccaaggctccagggaagattttaagatttttttaagcagcagttttaaattcacagcaaaatttagacatta

SEQ ID NO: 926744 - DNA, 610 bp, Homo sapiens
agctgcctgtctcaactatgtctgaaagcaacttagtttcccagatgagttcccagcaggctttgactattatttttatgctgatgccttctaaatctatcaagccggtattttcttctcacccaagctcttctatttcatttctattggccattagccctcattaacttatttaacaaatactactgagagtggccagaaatgtaaaattcaaaactataaaacttacagaaggagataacaaaggagaaagtctacgtaacttaggtttagcaatgagtttttagaggaaacaccaaaccacaatccrtggactcaaaaattgataagtttgagttaattaaaaattaaaacatctactcttctaaagatactgttaagataattaaaagacaaaacacaaactaagagaaatttttttcaaaatatatgtctggtaaagaagttgtatccaaaatatacaaagaatacttagagttcaacaataagaaaacaaacaacatactttaaaaatgggcaacagccctaaacagacacctcatcaaagaagatacacataaggcaaatagacatattaaaagatgcttaacatcatatgtcattaggaaac

SEQ ID NO: 926745 - DNA, 610 bp, Homo sapiens
agctgcctgtctcaactatgtctgaaagcaacttagtttcccagatgagttcccagcaggctttgactattatttttatgctgatgccttctaaatctatcaagccggtattttcttctcacccaagctcttctatttcatttctattggccattagccctcattaacttatttaacaaatactactgagagtggccagaaatgtaaaattcaaaactataaaacttacagaaggagataacaaaggagaaagtctacgtaacttaggtttagcaatgagtttttagaggaaacaccaaaccacaatccatggactcaaaaattgataagtttgagttaattaaaaattaaaacatctactcttctaaagatactgttaagataattaaaagacaaaacwcaaactaagagaaatttttttcaaaatatatgtctggtaaagaagttgtatccaaaatatacaaagaatacttagagttcaacaataagaaaacaaacaacatactttaaaaatgggcaacagccctaaacagacacctcatcaaagaagatacacataaggcaaatagacatattaaaagatgcttaacatcatatgtcattaggaaac

SEQ ID NO: 926746 - DNA, 686 bp, Homo sapiens
agcccctaacaagacagtcagcctgttttttgaagatttgaagtcaggcattgacttctctctatctattaaagtcctaggtgacatctttcccaatgtaagactgttctgcctaccctgataatctgttgttggccagccgtggtggttcacgcctgtaatctcagaactttgggaggccaaggccgacagattgctcgagtccagttgtttaagaccagcctgggcaacatggcgaaaccctgtctctacaaaaaaatgcaaaaattagccaagcataatggcacgggcctataatcccggttacttatgaggctgagatgggaggatcacctgagcccaggaagttgaggctgccgtaagccataattgcaccactgtactccagcctgggygagagagggagactctgtctcaaaaaaaaaaaaaaaaaaagaaagaaagaaagaaaagaaaagaaaagaaaaagaaaaaagaaagaaagaagagaaaagaaaatttgggctgggcaccgtgggtcatgccgctaatcccagcactttgggagactgaggtgggcggatcacttgaggcccggagttcaagacctgcctgggcaacatggcgaaaccctgtctctatgaaaaatacaaaaattagctgggtgtggtggctcaagcctgtaattccagctactcaggaggcta

SEQ ID NO: 926747 - DNA, 596 bp, Homo sapiens
atgataaacagaaatgaacatggcctgtgtcctcatagagtttattatctagaagtgaagacagacatcaatcaaataatcacataaatatagttacatctaattatcaatgatgatgagtgggttggactgcagaggcatcagaacttttcttggaagtcagggaagacttctctgaattgagatctgcaggataattagaagtttggtagaggatggggagaggcaagaagcattttgggaagtgggaacagcatgtgcatgagccacgtgacaggagggttwataggcactggaggaactgaaagaagagccctgtggctaaacgcagaacatttgagggacagtggcattagctgagggtggggcagaagacaggtgccactaaaccactgaactgttttaaatgactaaccacatgagctatgataaataactcaaccttccaaagactgttttctagggtgaaaatctctgttccttaagcacacggtgatgctgaacgacctactgagctaccattaaagctacaaacaaacggccaggcgcggtggctcatgcctgtaatcccagcactttgggaggccgagatgggc

SEQ ID NO: 926748 - DNA, 582 bp, Homo sapiens
agttcatgtcctttgtagggacatggatgaaattggaaatcatcattctcagtaaactatcgcaagaacaaaaaaccaaacacctcatattcttactcataggtgggaattgaacaatgagaacacatggacacaggaaggggaacatcacactctggggactgttgtggggtgggggaagcggggagggatagtattaggagatatacctaatgctaaatgatgagttaatgggtgcagcacaccagcatggcacatgtatacatatgtaactaacctgcacattgtgcacatgtaccctaaaacttaaagtttaataataataaaattaaattaaaaaaaaaaagaaaacctgtagctctggtatcatagtggctgtagtgactggttgaatgatttaatctatttcagcctcagttgccycagctgttagaggagttaattatatcagtcctgccttataatcatagcaataattcccatttccaaatgcctgccatgggtcaggttcttgctatgtctttggcacatattatctttaagtctcatcaactctgcaaggaaggaacaattgtcattcac

SEQ ID NO: 926749 - DNA, 582 bp, Homo sapiens
agttcatgtcctttgtagggacatggatgaaattggaaatcatcattctcagtaaactatcgcaagaacaaaaaaccaaacacctcatattcttactcataggtgggaattgaacaatgagaacacatggacacaggaaggggaacatcacactctggggactgttgtggggtgggggaagcggggagggatagtattaggagatatacctaatgctaaatgatgagttaatgggtgcagcacaccagcatggcacatgtatacatatgtaactaacctgcacattgtgcacatgtaccctaaaacttaaagtttaataataataaaattaaattaaaaaaaaaaagaaaacctgtagctctggtatcatagtggctgtagtgactggttgaatgatttaatctatttcagcctcagttgcctyagctgttagaggagttaattatatcagtcctgccttataatcatagcaataattcccatttccaaatgcctgccatgggtcaggttcttgctatgtctttggcacatattatctttaagtctcatcaactctgcaaggaaggaacaattgtcattcac

SEQ ID NO: 926750 - DNA, 608 bp, Homo sapiens
agggagagattcattctttccactatggcttgtccctgagaattgtatgggataccagtaatgtgtttaatattccacatagagaaaaatgtaggtagagcttggctagtatagtctggggcattatctgttttaatagaagctggaatgcccatcaccgcaaaacactgcaaaagatgatgtttaacacaggcagaagactctcctgtttggcatgtagcccagacaaagtgagaaaagatgtccacacatacatgtacataagctagtctcccaaacragggaacatgtgtgacatccatttgccaaagagctataggttccaatcctcaaggattaactcctcctgtaaaagaagaggaatgtaccatttggcaagttgggcatcactggataatagttttagcttctttccaggtaatgctgtatctgcgtttgagaccagaggcattagcatgggttaaattgtgaaaatgtctagcattagatattgcattagcaactaggcaatcagctatctgattccctttagtcaaaggtcctggaagaggtgtatgagcgagccctaatgtgagtgatgtaaaaaggatgcagtctattcctaactg

SEQ ID NO: 926751 - DNA, 608 bp, Homo sapiens
agggagagattcattctttccactatggcttgtccctgagaattgtatgggataccagtaatgtgtttaatattccacatagagaaaaatgtaggtagagcttggctagtatagtctggggcattatctgttttaatagaagctggaatgcccatcaccgcaaaacactgcaaaagatgatgtttaacacaggcagaagactctcctgtttggcatgtagcccagacaaagtgagaaaagatgtccacacatacatgtacataagctagtctcccaaacaagggaacatgtgtgacatccayttgccaaagagctataggttccaatcctcaaggattaactcctcctgtaaaagaagaggaatgtaccatttggcaagttgggcatcactggataatagttttagcttctttccaggtaatgctgtatctgcgtttgagaccagaggcattagcatgggttaaattgtgaaaatgtctagcattagatattgcattagcaactaggcaatcagctatctgattccctttagtcaaaggtcctggaagaggtgtatgagcgagccctaatgtgagtgatgtaaaaaggatgcagtctattcctaactg

SEQ ID NO: 926752 - DNA, 458 bp, Homo sapiens
gggtttgtcatagatgacttttattcccttaaggtatgtctcctctatgctgattttgctgagggttttaatcattaagggatgctgaattttgtcaaaagctttttctgtatctattgagatggtcatacaatttttgtttttaattcagtttatgtggtgtatcacatttattgacttatgtacattaaaccattcatccatctctggtaggagatgcattgtatcattgtgtattatctttttaatatgctattgtattttgttggctagtattttgttaagaatttttacatctatgatcatcaggaatattgktgtgtagttttcttttcttgttatgttttttcctggttttggtattagggtgatattggcttcatggaatgatttagaaataattctttcctactctatttttttgaatagtttaagtagaattggtaccaattcttgtt

SEQ ID NO: 926753 - DNA, 620 bp, Homo sapiens
ctccatttggtcccagagtattttttgttggcaattatttcaatcttgctacttgttattgatctgctcagagtttctatttcttcctggtttactccaggagaattgtatatttccagaaatgtattcacctcttctaggttttctagtttgtgcatttcataatattcatagtagccttaaataatgttctgtgtttccgtgggattgcttgtaatatatcctgttttgtttcaaattgagtttatttgaatcttctctcctttccttggttaatctcgctaatggcctatcaatttcatttatattatcaaagaatgaacttttttcatttatcttttgaaatttttgtttcaatttcatttagttctgcactgatytttgtgatttatttttctgctgggtttgggtttagtttgtttttgtttctctagattctagaggtatgagcttagatttttaaatttgggctctttcagactttttgatataggcattgttatgaacattccctttagcactgcttttgctgtattccagaagttttgataagttttgtcactgttatctttcagctcaaagagcttttatatttccgtcttgattttattgttgagcaa

SEQ ID NO: 926754 - DNA, 625 bp, Homo sapiens
ttctttgttgtttttggtgggtaggctatttatttctaattcaattttggagctcgttattggtatattcagggattcaatttcttatttgttcagtctttggaggatgtatctttgctccaagtttacaatcctcaagcttggcccagatgaagtctctacttatattcatgttgcctcagtttttttcttttaggtagacatattacttagaatgtgctagagcagcctctatgaagggatctcttctttgaytgtactcggcttgctgtaatgcccaaggatgcagagtcaggctaacctcacctagaacctgcacataagttctggcctctgcctgggatttacaagacagggccagactttgggttgagaatgtactgaaaaccaacaaaaggcattttctgtattgtgagatgtcagtgtagaaatcttaaagcccccatttgagaatgtggctctttaagcttttcaatcttgttcagtgacctgctacagtatgtgagaggctcctggtgtaaatagaatctgatgatagaatctgtaagtgtaaacaagaatgagagatcaaggccacaaagtatccagagccataaccacaactatacctaccggtaattgtgat

SEQ ID NO: 926755 - DNA, 625 bp, Homo sapiens
ttctttgttgtttttggtgggtaggctatttatttctaattcaattttggagctcgttattggtatattcagggattcaatttcttatttgttcagtctttggaggatgtatctttgctccaagtttacaatcctcaagcttggcccagatgaagtctctacttatattcatgttgcctcagtttttttcttttaggtagacatattacttagaatgtgctagagcagcctctatgaagggatctcttctttgactgtactcggcttgctgtaatgcccaaggatgcagagtcaggctaacctcacctagaacctgcacataagttctggcctctgcctgggatttacaagacagggccagactttgggttgagaatgtactgaaaaccaacaaaaggcattttctgtattgtgagatgtcagtgtagaaatcttaaagcccccatttgagartgtggctctttaagcttttcaatcttgttcagtgacctgctacagtatgtgagaggctcctggtgtaaatagaatctgatgatagaatctgtaagtgtaaacaagaatgagagatcaaggccacaaagtatccagagccataaccacaactatacctaccggtaattgtgat

SEQ ID NO: 926756 - DNA, 802 bp, Homo sapiens
cttcagctgggcactggatttctgcaaggcctgctggaaactgcagcaggaatccaggtaccagacggtgcgcagcatagcggcttggttcacctgagagccggcatggtgcctgggctgccgggaacctcatctgcctggggcctcacctgctggagtcctttgtggccaaccctctctcttacctgggacctcacacgctgggcttcacggctgccaggagcctctcccctccagaagacttgcctgctrgggacctcgcctgctggggacctcgcctgttggggacctcacctgctggggacctcacctgctggggaccttggctgctggaggctgcacctactgaggatgtcggcggtcggggactttacctgctgggacctgctcccagagaccttgccacactgaatctcacctgctggggacctcaccctggagggccctgggccctggggaactggcttacttggggccccacccgggagtgatggttctggctgatttgtttgtgatgttgttagccgcctgtgaggggtgcagagagatcatcacggcacggtttccagatgtaatactgcaaggaaaaatgatgacgtgtctcctcactctagaggggttggtcccatgggttaagagctcaccccaggttctcacctcaggggttaagagctcagagttcagacaggtccaagttcaagcccaggaccaccacttatagggtacaggtgggatcgactgtaaatgaggacttctggaacattccaaatattctggggttgagggaaattgctgctgtcta

SEQ ID NO: 926757 - DNA, 658 bp, Homo sapiens
aggcacgtgccaccacgcctggctaacttttgaatttttagtagagaccaggtttcaccatgttggccaggcctgtcttgaactcctgacctcaaatgacctgcccaccctggcctctcaaagtgctgggattataggcrtaagccaccacgcccggccttcattattttacattatctttttctctattcatagctcctccccaaaacagttttataattatttattgcagtataacaaaccatcccctcaaataaaacagcaactattttatttgcttcttaggctgtggttcagcaatttggctgcgcttattcctatggtctctcatggggtcactcatatgactgtagtcaaactgcagcttgacttgagctagttggtttgatgtggcctcactcacaggtatgggaattggtgttggctataatctatgccacatgtcttcagcaggatgacccagtctttttcaaatggcatctggcttccaagaggaagagaagatgcagggttcagaagtgatacagtattacttgtgccacattctattggtcaaagtaagcccaagttacccccagattcaatgagtggacaaatagatgccatctcttttcctttctagaattatgcaaagttcaaacctgagagcactttgatt

SEQ ID NO: 926758 - DNA, 643 bp, Homo sapiens
ctccatttctttgatgaaccaacatttatttaaatttccctttcattttattttatttattttcaattttttatttccataggttattggggaacaggtggtgtttggttacatgagtacttttgtggtgatttatgagattttggtgcacccatcacccaagcagtatacaatatccactgcatccaatttgtggtattttatccctcacccccttcctacactttgcccctgagtccccaaagtccattgtgtcattcttatgcctttgcatcctcatagcttagctcccacttatgagtgagaacatgcgacgtttgcttttctattcctgagttacttcayttagaataatagtctccaatctcatccaggttactgttaatttattcctttttatggctgagtagtattccaccatatatatgtatcacagtttcttcaacctctccttgatggatgggcatttgggttggtcccacatttttgtaattgtgaattgtgctgctataaacatgcatgtgcaagtgccttttttcatataatgacttcttctccaccagatagatacccagtagtgggattgctggatcaaatggtggttctacttttagttctttaaggaatcgccacactgttttcc

SEQ ID NO: 926759 - DNA, 718 bp, Homo sapiens
caaaaacttaggccaaaaaacccaagccaattcaaatacctggaaagccttctcaaaaaagactggtaccaacaagcccggagtgcaaagacttaaataaatacctaaatcttcaatgcccagacacagagaaacacctatgaatatcaagaccatctaggaaaacatgaccttaccaaatgaactaaataaggcatctaggaaccaattttggagagacagaaatatgtaawctttcatacaggaaattcaaaatagctgctttgagaaaaatcaacaaaatgcaagattacatagagaaggaattcagaattctatcagataaatttactgaagcttgaataatttaaaagaatcaagcagaaatactggagttgaaaaattgacatgctgaaggatgtatcagtctcttgagagcagaatagatcaaacagaagaaagatttagtgagcttgcagacatggtatttgaaaacatacacacagaggaaacaaaagaaaaaagaataaaaatcaatgaagcacacctagaggatctagaaaatagcctcaaaagggcaaatctaagagttattggccttaaagagaatgtagagagatagggatagacagtttattcaaagggataataacagaaaacttttcaagcttaggcaaagatatcactatttaagtaagtacaagaaagttggccgggcatggtggctcacacctgtaat

SEQ ID NO: 926760 - DNA, 636 bp, Homo sapiens
ccccagatcttcctttagctactgcctcatttttctttctctttacagcaaaccttactgaaataagaagtctatatgttactttcatttattcacctctcaatcactctttaacccaaagtaatctgagttattctcctgctactsttctgagcctactcctataggtcacaaggaataagcttgttgcaaaatttattaaatagatgcttttcaggcataatcatatttaaccccctcacagcatttgacactggaaataacttcctctaacttaagacaatctcctcgttggcttatgtgttgttatatactcctggtttcttccataactctctggccccttcctctcagttttccttgtgttctcatcttcatctgtccaggtcttcagtgttggtattggtcacagtctcctctaaatgtaagagcatatctatttcagtaggtttaattttccatccacattctgacattttcgaaatttttatttccaacacatatgtcttttctgaacttcagacccagttaagctattgcctgctgaacacgttttcttggttttctacaggtatttggaactcagtacagaacaatttatcttttatttcaaacctgttctttctctcatgttac

SEQ ID NO: 926761 - DNA, 489 bp, Homo sapiens
ggaggctgaggtggggaagatggcttgagcccagaacgtagaggctgcagtgagccaagatcatgccactgcatgaagcaaagaaagagagagagagagagagagagagagaaaagaaagaacgaaagaaagaaagaagaaaagagagagggatgaggagaaggagagagggaaggaaggaagaaggaagaaaaagagggaaggagggaggraggaaggaaggaaaaaaaaatacccagcttctctagaaccagcagatctgcaaactggaccctcagtgccacatggcacccatcggctagagcagagagctctgtctgtatctttcagacagagttatctgggtcaccagtgcactcatagccactttactcatttgtgttacctgtctggcccctgaaagtatttgtgattttgatccccaataaaaccataaagctttcttcaaatgtcctttgtaaatctagtatgtcacttttagtagtttcc

SEQ ID NO: 926762 - DNA, 676 bp, Homo sapiens
gaaggagtcagagagccttgggccagaattccaggggctctgggagtgcctgccaggtgagttgaacagtccgatttccagtggggtcccgcacagatggacacggcttaggaggaatcctgggctgcaggcattccttggcctggtggtcagatttctggcacttgtagcaagctcctgtgggaggaggttctggaggaactcctggctgctgtggttcaggcgtttggaagttcttgtgtgctggagatgtggctggggtttgtctcacagtggaggcaaggaattgcaactttttttttattattgtacgccttgaaggtgagatwaatgaagtcctgttgtggggtttgagggccagattccagtttttggagttttatttaatgtcgggagcagattaggtaataaaatgtatattgagaatatgatggccttttgaccttttagggtctagggctgtaaacgtctcagggttgctgtggaacgagccataaactgggctgggtttttatatttgatgaaaaggagcctaaacacttctgatttgggataaagaaaaaggagcattaaccttgactatgcctttggctccagcaacctttttaagagtaaattgctgggcaggtggtggagggctagtcacggaacgaaactgtaagccagaccaggtgtg

SEQ ID NO: 926763 - DNA, 610 bp, Homo sapiens
taatctcctggtgtgctgtttgctaagactgttggaaaagcacagtattagggtgggagtgtcccgattttccaggtaccgtctgtgacggcttcccttggctaggaaagggaattccctgatctcttgcgcttcccaggtgaggggatrccccaccctgcctcagctcacactccgtgggctgcacccactgtccaacaagccccagtgagatgaacctggtacctcagttggaaatgcagaaatcatccgtcttctgcatcgctcacactgggagctgtagactggaactgttcctattcagccatcttggaacccacctagccattttttaaatcttaacgcaaattaagcaggtgaattttttaatccagtttttaaaaaatgttaagtttataatcgtgtattttcccataataaagttactgaatatttttgtcacctaattataaaatacatgattaactgtgaacaaaataaaaataaataaaagatattcaacttaggtatccttgaataaaaattaggcctttatagatatatagtatagatcagaagtctaattctccagggttttaaaaaattgtttctttttccttccaacagctat

SEQ ID NO: 926764 - DNA, 610 bp, Homo sapiens
taatctcctggtgtgctgtttgctaagactgttggaaaagcacagtattagggtgggagtgtcccgattttccaggtaccgtctgtgacggcttcccttggctaggaaagggaattccctgatctcttgcgcttcccaggtgaggggataccccaccctgcctcagctcacactccgtgggctgcacccactgtccaacaagccccagtgagatgaacctggtacctcagttggaaatgcagaaatcatccgtcttctgcatcgctcacactgggagctgtagactggaactgttcctattcrgccatcttggaacccacctagccattttttaaatcttaacgcaaattaagcaggtgaattttttaatccagtttttaaaaaatgttaagtttataatcgtgtattttcccataataaagttactgaatatttttgtcacctaattataaaatacatgattaactgtgaacaaaataaaaataaataaaagatattcaacttaggtatccttgaataaaaattaggcctttatagatatatagtatagatcagaagtctaattctccagggttttaaaaaattgtttctttttccttccaacagctat

SEQ ID NO: 926765 - DNA, 610 bp, Homo sapiens
taatctcctggtgtgctgtttgctaagactgttggaaaagcacagtattagggtgggagtgtcccgattttccaggtaccgtctgtgacggcttcccttggctaggaaagggaattccctgatctcttgcgcttcccaggtgaggggataccccaccctgcctcagctcacactccgtgggctgcacccactgtccaacaagccccagtgagatgaacctggtacctcagttggaaatgcagaaatcatccgtcttctgcatcgctcacactgggagctgtagactggaactgttcctattcagccatcttggaacccacctagccattttttaaatcttaacgcaaattragcaggtgaattttttaatccagtttttaaaaaatgttaagtttataatcgtgtattttcccataataaagttactgaatatttttgtcacctaattataaaatacatgattaactgtgaacaaaataaaaataaataaaagatattcaacttaggtatccttgaataaaaattaggcctttatagatatatagtatagatcagaagtctaattctccagggttttaaaaaattgtttctttttccttccaacagctat

SEQ ID NO: 926766 - DNA, 597 bp, Homo sapiens
aatgcctagagatctgcctgagcatgtagtagagaggtgtgccaggatatctgcacaggaaaagtgggacagcttagcctgctaatccaggtgagctggtgctctgaacacctggagatctgtgagggtggggcacagagaaagccctactgtaccaagatctaggtccaggaagggtgaggcagttcaggctgctgaaccaagtaaatgagtgctttaaatgcctggagacagatacctgcctgggcatggagaagagaaaactccacttcattgcagtctatgtccaggaagggtagggtggctcagtytgctgaacaagtcaaacaggtgctctgaattcttaaatatctgcttgggtgtggagaagacagagcctctctgcaacatgatctatttccaggaagggtggggcagctcaagctgctggtccagggaagtgaatgctccaaatgcctggatttcagcctaggggtggaacagagagggccccccaatgagctacaatctcaggagagcagggtagggaatccagcaatggcacatatcaatcagttccaggttgtcaagctggccctggcagcaaatcttgccact

SEQ ID NO: 926767 - DNA, 757 bp, Homo sapiens
ttacactatttaaaattttattaaaaataaatattatctgaaatatattaccaccccttccacagcattttataacccatttataaatttattcatatattttttatttcctcctattgtactgcatgaattttatctgttagggttatcaccccctctaattatgtactagataatactattccctctcacataattaaatttgtttttttttactgcaattatcccattgatattttaaataatcaatttttmtttccctattgactgttcctgtccccataaaaacatgtttagaattttcctgtaaaaaataataataataaaatctgtacttcatatccctttttcaactactgccctatttctccccaggtttaaaattacacatttaaataatactgctattaataaaaatacctaattttttgagtgtttacagtagactctaggcatggtgataagtgctttgcatggctacctcatttgtctgtattcactttttcacttatttacttcttattttcccttgagcctacaataattaggctttgtttcgaagaagtctattaaactactctttatcaaggtccttaatgacttctatcttgccatatgaaatgtttaattgtggcattctcttcattttatatccaggcaacatttattaatattactattttctctcctttgagactctgtattcacttggtttttgggctatcccagacccctagttttccttcacctggttttc

SEQ ID NO: 926768 - DNA, 688 bp, Homo sapiens
ccccagaaaatggatttttcttttctaccatatggtcaggctgcaattttttccaacttttatgttctgcttcacttttaaatataagttcccatttcagaccatctctttctttatgcaaatgagttaggcttttaggaagggccaggccatatcttcaacactttgcttcttagaaatttgttcctccagacgcccttgatcatctctctcaagttcaaagtttcaaagatttttagagcagggacaaaattcctctagtctctttgctaaaatatagcaagaatgacctttgctctagtttccaataagttccccatctccatctgagaccacctcagcctgggcttcattgtccatatcactatcagcattttggtcacaaccattcaacaagtctctaggaagttccaacctttcycacatcttcctgtcttcttctgaacccttcaaactgttccaacttctgcccattacccagttccaaagttgcttccacattttcaggtgtcattatagcagtgccccactcccaataccaattttctgtattagttcattcttacactgctgtaaacacatacctgagactggatcatttataaagaaagtaagtttaattgactcacaggaagagagagagtgtgtttggggggaagtgccacacactttgaaacaaccagatctc

SEQ ID NO: 926769 - DNA, 590 bp, Homo sapiens
cataggcattctttatttccattatagtgagttagagagaggagacagagagagagacagagacagagagagagagagagacatctaattgtgtaattgtctgtttctctttccagtttcatccatttttgtttcatgaattttgacactccattatcaggtgcataaacattcatgattgttatatcttcttgataaattgagctttttattattatgaagtgacttcgtatatccctttggatatatctttgctctgtaatgcagtttgtcatatattagtatagtcattccagcattatttttattagggttggcatggaatatatttttctatcattttaacctatttgtgtctttgtaattaaagcacgtttcttataaatagcatacagataagtcttgcttattttatccatctcacaacttctgacctataattgaggtatttmgacattttatatgtaaagtaattgttaaaatggtaggcttagcctggcgcagtggctcacgcctgtaatcccagcactttgggaggcagaggcgggtggatcacgaggttaggaaatcaagaccatcctggctaacac

SEQ ID NO: 926770 - DNA, 619 bp, Homo sapiens
taagatctcattttcattcattttagatatcttcaaaatttccatcttaatgatcttatatctagacaaccctaaacactctgccaaaaaatacttagatttcataaatgaattcagcaaagtttcaatatacaaaatcaatgtacaggaatcagtagcatttttatacaccaataacaatctagttgaggactgactcaacaaagcaatcccatttataatagctacaataaaaaatagaatgtattaaccaaggatgcgaaagatctctacaaggagcactcygaaacactgatgaaagaagttgtggatgacacaaactaatggaaaaagatcacatattcataaattagaaaaatccatatcattaagatgaccatactgcccaaagcaatctaaagatttgacataatttctattgaattgccaacataattttcacagaattagaaaaaatttctaaaattcatattagaccaaaacaaagcctgaacagccaaagcaattcaaggaagaaaaaaaagttcaaggtatcacattacctgacttcaaattataccacaaggctatagtagccaaaacagtactggcataaaaacagaaacatgtatcagtggaa

SEQ ID NO: 926771 - DNA, 605 bp, Homo sapiens
catggccccgcctcctcactttattactctctctcccctccaggctgtcctcccttcctaatatgtatctgaaactgcctttgtcaaggtcaccagtaaatgacctgatgctaaatcagataagtgcttcccctccccccccaactttctgctggacytctcccatcactcagcaatgctgactgcccctcccctttgaaacacctttctctcctgcattctgtgattccattgtctcttgaacttccttctcagttgtctttgctgcctccttttcttccaccagacagccaaataatggagtcttttattcattgtttctgccccttcctccaaaattatcctctgggccatccatatgctggcaacttcccccatctccagacgagatctctcatgaactccagtcctgcgtattcccctgtctgcttggcatctccactctaccatctcaagcactttaatccaatgccaaaaggagaactttgccgcctcctcacacctcaaatgattgtccctcagtcatccgtgtctgaaagatgagcttccaaccactccaactcagaatcagccttgattcctctgcccattaacaccacagtaca

SEQ ID NO: 926772 - DNA, 589 bp, Homo sapiens
ctagaataaagcaggcaggagaagatggaagaacagactagctgagtcttctggctctcatctttctcacatgctggatgcttcctgccctcaaacattggactccaagttcttcagcttttggactcttggacttacaccagtggtttgccaggggctctcgggccttcagccacagaatgaagactgtactgctggcttccctacttttgagattttgggatttgtactggcttccttgctcctcagcttgcagatggcctattgtggaacttcaccttgtgattgcgtgagtcagtactccttgataaacttccctttacatatacrtctatcctattaattctgtccctctagaaaaccctgactgatacaattagctacctaaaatagaaaaatcacatgatcatcttcgacagaaaaagctattgacaaaaaccaaatttcatttctgataaaaactctccgcaacataggataagaagaaagtgtcctcaattgataaagggtactaccaaaaaacttagttaatgtcatactcaatggtgaaagattgagtgctttccctctaagatcaggaacaagataa

SEQ ID NO: 926773 - DNA, 780 bp, Homo sapiens
acctactcaggcctcggcaatggcgggcgcccctcccccagccttgctgccgccttgcagtttgatctcagcctgctgtgctagcaatgagcgaggctccgtgggcgtaggacaatccgagccaggcacgggatataatctcctggtgtgccgtttgctgagaccatcagaaaagctcagtattagggtgggagcgacccaattttccaggtgccatctgtcacagcttcccttggctaggaaagggaattccctgaccccttgtgcttcctgggcgaggcgatgccttgccctgcttcggctcatgctcggtgcgctgcaccgactatcctgcacccactgtccaacaatccccagtgagatgaaccaggtaccacagttggaattgcagaaatcatycgtcttctgtgtcgctcaccctgagagctgtagactggagctattcctatttggccatcttggaaccacccccctatttttagttttttgaggaacctccaaactgttctctgtagtagctatactaatttacattcccaccaacagtttatgagggttcccgtttctccttatcctcaccagcatttgttattgcctgacttttggacaaaagccattttaactggggtgagatatgtctcattgcaataaaaaaccacaaaaatatgtggcttaaatcaataaatatttatttcttgctcaagcaaaggccattctgtgtcaggggagctctctggagctcatattttccaatgatggttcagcatttcaccttcatgc

SEQ ID NO: 926774 - DNA, 571 bp, Homo sapiens
tatctttgaaattgctttgtgatgtgcagattcatctaacggagttcagtctttcttttgattcagcatgtgggaaacactcttttgtagaatctcccaagggtcatttgggagtttatagaggcctatggggagaaactgaatatctcgagataaaaactagaaacaagctatctgtgaaattgctttttgatgygtggattcatctcacagagttaaacattttatttgatccagcaggttggaaacacttttgttgaatctgtgaagtgaccttttggagcccttgaggcctacagggaaaaacagattatcaccagataaaagctagaaagaagctatctgtgaatcagctttgtgaagtttggacacttatcacagagttaaacatttcttttgattcagctgcttggaaacgctctttgtggagattctgggaagggacatttgggagtccattgaggcctatggggataaacagaatatccacagagaaaactagaaagaagttatccgtgaaatgctttgtgatatgtggattcatctcacagaggtaaatttttcatttgat

SEQ ID NO: 926775 - DNA, 573 bp, Homo sapiens
tttttcaccatagacttcaattctctctgaaatataactttgttgattcttaaaataacatgtttccaaactgctgaaagaacagaaaggttcagctcagtgtgaggaatgcccacatcacaaggtggtttctcagartgcttctttcaagtttttctgaagatgtttccttttacacatatgcctcaatgctctccgaaatatccctttgtaaattcttaaaaaaatccgtgttactaaacggctgaatgagaagaaaggattaattctgttagatgaatacacacatcacaaagcagtttctcagatagcttccttctagtttttaccttggaatattcgctctttaaccattggccacaatgagctcccaaatgtcaattttcagaatggacaaaaacaatgtttccatactactgaattgaaagaaagttttacctctgtgacatgaatgcacacataacacagcagtttatcagaaagcttctttctggtttttatctgaggatgtttcctttttcaccataggcctcaatgctctctgaaatatccctttgtagattctacaaaaac

SEQ ID NO: 926776 - DNA, 605 bp, Homo sapiens
tagtttttttctgaagatgtttcctttttcaccatagacttcaattctctctgaaatataactttgttgattcttaaaataacatgtttccaaactgctgaaagaacagaaaggttcagctcagtgtgaggaatgcccacatcacaaggtggtttctcagaatgcttctttcaagtttttctgaagatgtttccttttacacatatgcctcaatgctctccgaaatatccctttgtaaattcttaaaaaaatccgtgttactaaacggctgaatgagaagaaaggattaattctgttagatgaatacacacatcacaaagcagtttctcagatagcttcctyctagtttttaccttggaatattcgctctttaaccattggccacaatgagctcccaaatgtcaattttcagaatggacaaaaacaatgtttccatactactgaattgaaagaaagttttacctctgtgacatgaatgcacacataacacagcagtttatcagaaagcttctttctggtttttatctgaggatgtttcctttttcaccataggcctcaatgctctctgaaatatccctttgtagattctacaaaaacagtgtttc

SEQ ID NO: 926777 - DNA, 615 bp, Homo sapiens
tagcagtctatcaattttgttgatcctttcaaaaaaccagctcctggattcattaattttttgaagggtttttgtgtctctatttccttcagttctgctctgattttagttatttcttgccttctgctagcttttgaatgtgtttgctcttgttttctagttcttttaattgtgatgttagggtgtcaatttyggatctttcctgctttctcttgtgggcattcagtgctataaatttccctctgcacactgccttgaatgtgtcccagagatactggtatgttgtgtctttgttctcattggtttcaaagaacgtctttattagtcattcaggagtaggttgtttcttaatcctgagttctagtttgattgcagtgtggtctgatagatagtttgttataatttctgttcttttacatttgctgaggagtgctttacttccaagtatgtggtcaattttggaataggtgtggtgtggtgctgaaaaaaatgtatattccgttgatttggggtggagagttctgtagatgtctgttaggtctgcttagtgcagagctgagttcaattcctgggtatccttgttaactttctgtctcattgatctgtctaatgttg

SEQ ID NO: 926778 - DNA, 624 bp, Homo sapiens
tatcatattttattgcatctatttgagtcttttctcttttcttctttattagtcttgctagcagtctatcaattttgttgatcctttcaaaaaaccagctcctggattcattaattttttgaagggtttttgtgtctctatttccttcagttctgctctgattttagttatttcttgccttctgctagcttttgaatgtgtttgctcttgttttctagttcttttaattgtgatgttagggtgtcaattttggatctttcctgctttctcttgtgggcattcagtgctataaatttccctctgcacactgccttgaatgtgtcccagagatactggtatgttgtgtctttgttctcattggtttcaaagaacgtctttatkagtcattcaggagtaggttgtttcttaatcctgagttctagtttgattgcagtgtggtctgatagatagtttgttataatttctgttcttttacatttgctgaggagtgctttacttccaagtatgtggtcaattttggaataggtgtggtgtggtgctgaaaaaaatgtatattccgttgatttggggtggagagttctgtagatgtctgttaggtctgcttagtgcagagctgagttcaat

SEQ ID NO: 926779 - DNA, 598 bp, Homo sapiens
gaggctgaggcaggagaatggtgtgaacctgggaggcagaacttgcagtgagctgagatcgcaccactgcactccagcctgggtgacagagcgagactccatctcaaaaaaaaaaagaaaaaggagcccattggggcatatgtggaaaaacygaatattcccagataaaaactacaaagaagcttttagttaaactgttttgtggtgcgtggattcatttcatagaattaaacctttcttttaattcagcaggttaaaaactctttccaaaatctgccaacagatatttgggatccccttgggtcctaaaggaaaaactgaatattaccagataaaaactagaaagaacttatctatgaaactgctttgtgatgtgtgggtgaaatacacagagttaaacctttcttttgattcagcagattgaaaataatctttttggagaatctctgaaaaacaaatttgagagctcattgaggcctgtggggaaaaactgaatatcaccagattaaaactggaaataagctatctgtgaaactttgtgatgtgtggattcatctcacagaaagaaactttcttttgattcagcggttttgaaaca

SEQ ID NO: 926780 - DNA, 570 bp, Homo sapiens
gatttggtcttttcacatagtgtcatatttcttggaagctttgttcatttctttttactcttttttctctaaacttctcttctcacttcatttcattcatttgatattcaatcattgataccctttcttccagttgattgaatcggctactgaagcttgcgcatgcatcatgaagttctcgtgccatggttttcagctccatcaggtcatttaaggacttctctatgctggtttttctagttagccattcgtctaatcttttttcaaggttttagcttctttgcgatgggtttgaacatcctcctttagctcggagaagtttgatcatctgaagccttcttctgtcaactcatcaaagtcattctccatccagytttgttctgttgctggtgaggagctgtgttcctttggaggagaagaggcactctgatttttagtattttcagcttttctgctctggtttctccccatctttgcggttttatctacttttggtctttgatgatggtgatggacagatggggtttcggtgtggatgtcctttctgtttgttagttttcctcctaacag

SEQ ID NO: 926781 - DNA, 695 bp, Homo sapiens
tgctggaggtccactccagaccctgtttgcctgggtatcaccagcggaggctgcagaacagcaaatattgcagaacagcaaaggttgctgcctgatcattctccggaagctttttctcagaggggcacccagccgtgtgaggtgtcagttggcccctactgggaggtgcctcccagttaggctacttgggggtcagggacccacttgaggaggcagtctgtccattctcagatctcagactccatgctgggagaaccactactctcttcaaagctgtcagacagggacatttaagtctgcagaagtttctgctgccttttgttcagctatgccctgcccccagaggtggagtctacagaggcagaaaggcctccttgagctccacccagttcgagcttcccagcmgctttgtttacctactcaagcctcagcaatggcaggcacccctcccccagcctcgctgccaccttgcagttcaatctcagactgctgtgctagcaatgagcgaggctccgtgggcgtgggaccttccgagccaggcacgggatataatcttctggtgtgctgtttgctaagacccttggaaaagtgcaatattagggtgggagtgacccaattttccaggtgctatctgtctcagcttccgttggctaggaaagggaattccctgatcccttgtgcttcccgagtgaggc

SEQ ID NO: 926782 - DNA, 695 bp, Homo sapiens
tgctggaggtccactccagaccctgtttgcctgggtatcaccagcggaggctgcagaacagcaaatattgcagaacagcaaaggttgctgcctgatcattctccggaagctttttctcagaggggcacccagccgtgtgaggtgtcagttggcccctactgggaggtgcctcccagttaggctacttgggggtcagggacccacttgaggaggcagtctgtccattctcagatctcagactccatgctgggagaaccactactctcttcaaagctgtcagacagggacatttaagtctgcagaagtttctgctgccttttgttcagctatgccctgcccccagaggtggagtctacagaggcagaaaggcctccttgagctccacccagttcgagcttcccagccgctttgtttacctactcaagcctcagcaatggcaggcacccctcccccagcctcgctgccwccttgcagttcaatctcagactgctgtgctagcaatgagcgaggctccgtgggcgtgggaccttccgagccaggcacgggatataatcttctggtgtgctgtttgctaagacccttggaaaagtgcaatattagggtgggagtgacccaattttccaggtgctatctgtctcagcttccgttggctaggaaagggaattccctgatcccttgtgcttcccgagtgaggc

SEQ ID NO: 926783 - DNA, 692 bp, Homo sapiens
ctgccctgagggctgctggttggctactcttatggttatttcttgatcacatgctaaacaagaggtgacttaatcatgagttttcccaaaaaggggcaggcaatttccggaactgagggttcttcccctttttagactatataggaaaacttctagacgttgccctggtatttgtaaactgtcacggcattggtgggagtgtcttttagcatgctaatgcattataattagcatataatgagcagtggggaccatcagaggtcacttttgtwgccatcttggttttagtgggttttggctggcttctttaccgcattctgttttatcagaagggtccttgtgacctgtatcttgtgacaggagccctgctcacctcccatttcatcctgtgattaagaatgcctaacttcctgggaatgcagcccagtaggtttcatcttcattttacccagcccctattaaagatggagtcactttggttagaatgcctctgacagtgtaagcagcttaggctgctctggggttctgctttgtggctgtatcacagtccacagaagcccttcagtcatcacatctgccttccaaacagcaggatgggcgaaggggagatgacaggccaaagagcatatgcctcctctcatttaaggaaatttcttggaagttatcacacagcattgccacttacattctgt

SEQ ID NO: 926784 - DNA, 668 bp, Homo sapiens
caagaggtgacttaatcatgagttttcccaaaaaggggcaggcaatttccggaactgagggttcttcccctttttagactatataggaaaacttctagacgttgccctggtatttgtaaactgtcacggcattggtgggagtgtcttttagcatgctaatgcattataattagcatataatgagcagtggggaccatcagaggtcacttttgtagccatcttggttttagtgggttttggctggcttctttaccgcattctgttttatcagaagggtccttgtgacctgtatcttgtgacaggagccctgctcacctcccatttcatcctgtgattaagaatgcctaacttcctgggaatgcagcccagtaggtttcatcttcattttacccagcccctattaaagatggagtcactttggttagaatgcctctgacagtgtaagcagcttaggctgctctgggsttctgctttgtggctgtatcacagtccacagaagcccttcagtcatcacatctgccttccaaacagcaggatgggcgaaggggagatgacaggccaaagagcatatgcctcctctcatttaaggaaatttcttggaagttatcacacagcattgccacttacattctgttggccagaacatagtcacatggacacatcttgcc

SEQ ID NO: 926785 - DNA, 622 bp, Homo sapiens
ataatggctgaactaacttacatttgcactaacaatgtacagaagctcccttttctcggaatccttgacaacactttttttctagctttttgatgaaggccattctaacaggtgtgaggtaataccttattgtagtttttattygtgtttagctaatgattagtgatgctgagcattttttaaatatacctattggccattgatgtggtttggctgtgtccccacccaaatcttatcttgaattcccactgttgtgggagggacccagtgggaggtaattgaatcataggggtaggtctttcctttgctgttcttgtgatagtgagtaagtctcatgagagctgctggttttataagggggaattaccctgccaagcactctttttgcctgctgctatccatataagatgtggcttgcttctctttgccttttgccatgattgtgaggcctccctagccacgtggaatggtgagtccattaaacctctttttcttctcaatctcaggtatgtctttatcagcagcataaaaacaaactaaaatagtaaattgttaccagtagagtgaggtgctgctgtaaagatacccaaaaatgtgaaagtgactttggaactgggtaaaa

SEQ ID NO: 926786 - DNA, 648 bp, Homo sapiens
  misc_feature 640, 641, 642, 643, 644, 645, 646, 647, 648: n = A,T,C or G
gagggcacaaagccaaaatacattagtgggtcagttctgatcctgcctgtcaccatccaaggtgtcagagggaagaaggcagcctgttctcccaacctcatgtctccagttgcaacttgcctggcacagtcatggaagaatggagcctacttccagagggatggaaagggcactggggtgtcgtgtggtggcggggattagaggcaactgaggtgtcaaatgctctcggaagagataagccaacattggttggtgtaagttatggaattctgtccagtgtttagaagcaaggaatttgatatagatacaccagcatgtattcaaaaagcatgtggctgggtgcaatgactcacgcctgtaatcctagcactttgagagaccaaggtggaaggatcgcttgaggccaggagtttgagaccagcctggccaacatggtgatacccatctctaatatttatacaaaataattagccaggagtgatgkcgtgtgcctgtagtctcagctactcaggaggctgaggcaggagattcgcttgatcccggcaggtgaagttgcagatcgcgccactgcactccagcctgggtgacagagcgagactctatctcaaaaaacaaaaagaagttctgagcttgctttggnnnnnnnnn

SEQ ID NO: 926787 - DNA, 497 bp, Homo sapiens
atacctgcaccctcatatttattacagcactattcacaatagccaagatacggaatcattctaatcaccaacagatgaatggataaagaaaacttgatatatacacacaatggaaaactattcagtcataaaaaataataaaatcctgtcatttgcagcaacatggatggaactgaagatcattatgttaagtaaaataagccaggtatagaaaggcagatattacatgctctcactcatatgtgggagctaaagaagttaatctcatggaggtagaaagcagagtgagagayaccagaggctggaaagggtgaggaacacggatgaagacagattggttaatgggtacaaacatacagttagatagaaggaataagttctagtgttggatagcacagtaaggtgattatgttaatagtaatttattatatatttcaaaacagctagaagagaagatttgaggccaggtgtggtggctcatgcctgtaatcccagct

SEQ ID NO: 926788 - DNA, 497 bp, Homo sapiens
atacctgcaccctcatatttattacagcactattcacaatagccaagatacggaatcattctaatcaccaacagatgaatggataaagaaaacttgatatatacacacaatggaaaactattcagtcataaaaaataataaaatcctgtcatttgcagcaacatggatggaactgaagatcattatgttaagtaaaataagccaggtatagaaaggcagatattacatgctctcactcatatgtgggagctaaagaagttaatctcatggaggtagaaagcagagtgagagacaccagaggctggaaagggtgaggaacacggatgaagacarattggttaatgggtacaaacatacagttagatagaaggaataagttctagtgttggatagcacagtaaggtgattatgttaatagtaatttattatatatttcaaaacagctagaagagaagatttgaggccaggtgtggtggctcatgcctgtaatcccagct

SEQ ID NO: 926789 - DNA, 637 bp, Homo sapiens
ctttacttcatcctcttcatttacatatggcatatcccaaataaccaatggaatcctccaaagggtatttaaactccaacaaattctgtaactgggcccttgagcacctatgctcagccggccccaacactggagtgtactttcattttcaataaatcgttcattccttccttgctttgtgcattttgtccaattctttttttttttctttttctttgagacagagtcttgctctgtctggagtgcagtggcgcaatctcggctcactgcaagctctgcctcccgggttcacgccactctcctgcctctgcctcccgagtagctgggactacaggcgcctgccaccacgcycagctaattttttgtatttatttttagtagagacagggtttcaccgtgttggccaggatggtctcaatctcctgacctcgtgatccgcccgcctcggcctcccaaagtgctgggattataggcgtgagccaccgcgcccagccgttttgtcccattattttagatgccaagaacctgtacaccctccaccggtgacaccttcacagttttgaggagtattcatggggtattttgtaaaatgtttctcaattgggatttgtctgatgtttttctcatgattagactg

SEQ ID NO: 926790 - DNA, 604 bp, Homo sapiens
tcagcaatgctccctgtacaccaagcacttcccatctggtcaatttgtcacttgaggacatactgcttattctattaacaccatctttaggacagtaaacagtcagataaattttgccttcaacagccacgtggagacagagttcttcattggcttcaaatgcagatatagaatgtggattaagacgtctagagaaagaaaagaaagtttcttcctttaaaaaacaaaggtgacagaacaaaatctacctgyacctaacagctgttctgtaacatgtttaacttcccagtgtacatttaattccagtaacagaaacagatgcaagaaagcaaggtaggagtggagtgcctttattctacaatagtactataaaacagaaatgaaccacatctagagcttccaacagagatatttttcatattatcaccactttatgtcccttaaaacccaaagaaacactaattgttatccctatcatagtttgtgaattagttccttcctctgtatgaaaattttttaaaattacaaaatgaaagaatgaaaaaaaggaaaactatttttctttgtcatcttcaataaaaatgcaaaattatttttctttaag

SEQ ID NO: 926791 - DNA, 583 bp, Homo sapiens
ggctcccgcacagccagctctgcgtgaattacttttcctgtattgcaattcccctgtcttgttaaatcagctctgtcttaggcagtgggcaaggtgaactcgctgggtggttacaagaggagtagggatgagtagaagcaaatggagagaccaagcacataattttaaaaaaatggtttcagtcaactgaaaaaaattccccaaacaaaatccaaaaagagaaaaagcataaaagccttttatatatatttactctctctctctctctctcwcacacacacacacacaatttgtatatatttatataaatatccttttaggtttcttattatcatattttagctggttcagacagctcttatttctggcttttgaagttatttaccaaaggtattctcccaagtgaaaacaataagccttaaccaagattatgacttaagcaaggacgcacaaggcatctctaaagcggttcaaagtggtcctcacaagatctagaaccaccccaaagatagctcaaataaaggaaagtttcactagcaacaaatatagtacaacttacatttctgtccagccatattctcca

SEQ ID NO: 926792 - DNA, 674 bp, Homo sapiens
gcgcgcacctgtaattccagctactcaggaagctgagacacaagaatcacttgaacctggaagacaaaggttgcagtgagctaagactgcgccattgccctccagtatgggtgacagagagactctgtctcaaaacaaaaaacaaaaaacaaacaaacaaaaaagacaagtcccaagacttatccccacagcccaacataccggctgtggcagtctgtggccaaagggcctyttcaggcctaaacctgacccatccttcctcattgggcggggcttccctggaggatctccaataactccagctagaggctcagggacagaatttggatctccctgggcctgagcccctaagtgggaggggtggccatagtctctgcggaccagcagacttagcctttcttcctggtagttctgaggaatctgggcaacgcagaggagtgggtttctccacagcgaagcacaccctctccaacaaaggacaaagtgccttgttaagcgggtcctgctccccgtgccacccaactgggtgagacattccaacaggggttgtcaggcaccttatacaggagtgatcctaccggcatcaggttggtgcccctcaaagtcagaggccccagagggaggagcaggcacccatctttgctgttctccagcctccctgagtgacatctcca

SEQ ID NO: 926793 - DNA, 739 bp, Homo sapiens
tcctgggtggagtggggacttggagaacttttgtgtctagctaaagaattgtaaaaggaccaatcagcactccataaaaacccaccaatagcgctctgtgtctagctaaaggattgtaaacgcaccaatcagcactstgtaaaaacgcaccaatcagtgctctgtgtctagctaaaggattgtaagcgcaccaatcagtactctgtaaaaatgcaccaatcagcactctgtgtctagctaaaggattgtaaatgcaccaatcagcacttaaaaacacgccaatcagcgctctgtgtccaaaggattgtaaatgcaccaattagcactctgtaaaaacgcaccaatcggctgtctgtgtctagctaaaggattgtaaatgcaccaatcagcactctgtaaaatggaccaatcagcgctctgtaaaatggaccaatctgcaggatgtgggcggggacaaataagggaataaaagctggccacccccccagccagcagcagcaacctgctcgggtctccttccatgctgtggaagctttgttctttcactctccagaataaatcttgctgctgctcactctttgggtctgtgccacctttaagagctgtaacactcaccacaaaggtccatggtttcattcttgaagtcagcaagaccaagaacccactggaaggaaccaactccggacacattaccagttggagaatggcctgcctttgaaagaccgttccaactttttgg

SEQ ID NO: 926794 - DNA, 646 bp, Homo sapiens
aggcaccctgtggagaggcccacataagaaggaactgaggcctcctgccaatatccgtgtgagttaactgtcttgaaaatagctccttcagcctcaatcaggactttagataactacatccctggtcaacagcttgattgcagactcctgagagaccctgagcccaagctgtcagaggcatttgagccagatcgactccatcttgaataggggctgggtaaaataaggctgagacctgttgggctgcattcacaggaggttaggcattctaagtcacaggatgagacaggaggtaggcacaagatacaggtcacaaagaccctgctgataaaacaggatgcrgtaaagaagccggccaaaacctgccaaaactaagatggtgatgaaagtgacctctggtcatcctcactgcttatatgttaattataatacattaacatgctaaaagacactcccaccagtgccataacagtttataaatgccatggcaacatctggaaactaccctatacggtctaaaagggggaggaacccttagttgcagtggtgggggaggacagcaggagtgggaactccccactcctttcttggaaaacttatgaataatctaccccttgtttagcatatatcaagaaataaccataag

SEQ ID NO: 926795 - DNA, 636 bp, Homo sapiens
ctgctgataaaacaggatgcagtaaagaagccggccaaaacctgccaaaactaagatggtgatgaaagtgacctctggtcatcctcactgcttatatgttaattataatacattaacatgctaaaagacactcccaccagtgccataacagtttataaatgccatggcaacatctggaaactaccctatacggtctaaaagggggaggaacccttagttgcagtggtgggggaggacagcaggagtgggaactccccactcctttcttggaaaacttatgaataatctaccccttgtttagcatatatcaagaaataaccataagtatactcagtcaagcagcgcatgccactgctctgcctatgaagtagtcattcttttgtctctttacttctctaataaacttgctttcactttacagatttgccccaaatgcttttttgcmcaagatccaagaacccttgcttggggtctggtagggacccctttccagtaacagagccacccagctaagtcactcctgaattcctgaacctcagaaacagataataaatgtttgtcgttcaagctgctgttatgcagcaagaaatgactaatacaattccatatcttaggcaccttgaactcatactgctt

SEQ ID NO: 926796 - DNA, 666 bp, Homo sapiens
taatctttctaatccccctactcccctcctcgcctataacccttatataggtcaacaaagcttaataaagcattgtggaaaaaagaaattagtacttttttgggtcagtttctaaaataaaaaacactttcatggaaatttgaaaaacagtttgtttttatgagatcttactattttgagataatattctagatgtctctcaggcaaatggagtgggcttctgtcccttcaaatcacaatctctgggccttttgcaaggaaaatgctagtataagggagaaatactgcaattaggaaaagaggacttttcatattgaatgataactagagcttaaatattaaaattgttaagtagaggcaatgattattcctattacaayagtattattggacatacttcaagtgcttttaaaaattatgatatatatatataaaaataataaaatttaccattttagcatttcttaggtacacagctcagtggtattaacatccacaatgttgtgtagccatcactactttccatttacagaatttttttttttttttaatggagtcttactctgtcaccgaggctggagtgcagtgggacaatctcagcttaccacaacctctgcctcccaggttcaagagattctcctgccacagcctcctgagtagctagga

SEQ ID NO: 926797 - DNA, 642 bp, Homo sapiens
gtgacatcacatatcagtaggtccgtgatgcccacctaagccttaaagccagcaagttttattaaggatttcaaaaggggagggggtgcaagaacagggagtaggtcacaaagatcacatgcttcagagggcaaaaaggaaaacaaagatcacatgcttctaaggacaaaatcaaaaactcctgataagggtccaacaaagatcacaagacaaagggcaaaagcaaagatcacaaggcaaagggcaaaaacaaagatcataagacaaagggcaaaarcaaagatcacaagacaaagggcaaaaacaaagatcacaaggcaaagggcaaaaacaaagatcacaaggcaaagggcaaaagcagaattactgataaaagtctatgttcagcggtgcacatattgtcttgataaacatcttaaacaacagaaagcagggttcgagagcagagaactggtctgacctcaaatttaccagggcaggggttttccccaccctagtaagcctgagggtactgcaggagaccaaggcgtatttcagtccttatctcaactgcataagacagacactcccagagcggccatttatagacctccccccaggaatgcattccttccccagggtattaattatcaatattccttg

SEQ ID NO: 926798 - DNA, 794 bp, Homo sapiens
aaatgtttagtatttactatatgcaagcctaaatatatatttctatcacatcaccttttacaaagcaccagctaacctgtttgcctttcacccaactgtgtatcaaaaaaatggcccccatttgtatgctggctattgttacagactgtcaaggttcattaatacagtttgccctgtaagtgttactgaaacagtattttacgaaccgggagggatatggtttgaatgtgtttctcaaagttcctgtgttggaaacttaatccccaatgcaacagtattaggaagtgggacctaattagagatgagtaggtcatgagggctctgctctcgtgaatggattaatgttgttatcttgggtgtagaacagttattgtgagagtgggttgttataaaagtgagtttggcaccttcttgctctctcaagcatactctcttgcccttcagccttccaacataggaggatgcagcatgatggccctcaccagatgctcctggacttcacctctggaaacatgaaccaaagaaatttctcttctttataactttcccagtcacagatattctgttatagcagcagaaaatggactaagacaggaagcracttttattttaaggatgtggtaatgtcagcccacggaataagtgattctccaaagtcacacagtcaaaaagtagcaaagtggtagctaaaattcagattatacgagtctagaacccaaatcctttcctccatcccacaaatgggccacatcatttcatagccagtttacctttctctcagactcatggtgaaa

SEQ ID NO: 926799 - DNA, 717 bp, Homo sapiens
gtagctcagagtgttaagctggaactaaaactgatgcaaagtatcaattcgtttgaagagacacagtattactaggtgaaaaaaagaatagaattagcatcacagtgtctagtgatagtacaactgtctgaaagagcatctaagagaacaatgttacaactaataaagaagataaagtaaggcagatgaaccgtaataaatgactaagaccttctcaaagttactgaattttaaattttacttaaattcagttaatttctatttcaatttcaaaagccacaggtaaccagtggctactgtattgatcagagaagtcttagatttttttttttccagtggagtcttgctctttcaccaggctggtgtgcagtggcgtgatctcggctcactgcaacctctgcctcccgggttcaagcaattctcccgcctcagcctcccaagtgytacaggtgtgccaccaagcccagctaatttttgtatttttagtagagacagggtttcaccatgttgggcaggatggtctcgatctcttgacctcatgatccgcccacctcagtttcccaaagtactggaattacaggcgtgagccaccatgcctagccagttatttttgtatttctaaatagttgtagaataattgcttctttcccttatataatttgaagttctgggagaaagatatcctttcccattaaaaagttgatttgtttgtataat

SEQ ID NO: 926800 - DNA, 729 bp, Homo sapiens
tagaagtggtatatacataattgggctcaagcaggtcctgaaggcacaagttacatgagaaagtggctcaaatgcccatggtctccactcctgccttctctaccccagcctgcaacaatggcctcatggggggttctctatgatcagttgacagaggaagagaagactagggcctggttcacagatggttctgcactatatgcaggcactaccaaaagtggagagctgcagcactacagcccctttctaggacatccctgaaggatagcagtgaagtgaaatcttcccagtgggcagaacttcgagcagtgcacctggttgctcactctgcatgtaaggagaaatggtcagatgtacgattatacaccgattcatgggctgtagtcaatggtttggctggatggtcagggacttggaagaagcatgcttggaaaactggtaacaaatttggggaagaggtatgtggatggtcactctaagtggtcaaaaactgtgaagatgcttgtattccatgtgatattaaccaacatgtgacctyagcagaagagaattttaataatcaagtagatagaatgacctgttctgtcaacacaactcagcctctttcaccagccacctctgtcatcgcccagtgggcccatgaaaaaagtggccatggtggcagggatggaggttacgcatgggctcagcaacatgtacttccactcaccaaggctgacctggttatgg

SEQ ID NO: 926801 - DNA, 694 bp, Homo sapiens
tttggctggatggtcagggacttggaagaagcatgcttggaaaactggtaacaaatttggggaagaggtatgtggatggtcactctaagtggtcaaaaactgtgaagatgcttgtattccatgtgatattaaccaacatgtgacctcagcagaagagaattttaataatcaagtagatagaatgacctgttctgtcaacacaactcagcctctttcaccagccacctctgtcatcgcccagtgggcccatgaaaaaagtggccatggtggcagggatggaggttacgcatgggctcagcaacatgtacttccactcaccaaggctgacctggttatggccactgctggatgcccgatttgccagcagcagagaccaacactgagccctcaatatggcaccattcctcrgggtgatcagccagctacctggtggcaggttgattatttcggacctcttccatcacggaaagggtagaggtttgtcctcactggagtggacatttactctggatatgggtttgcctatcctgcacacaatgcttctgccaagactaccatctgtggacttatgggatgccttatccatgatcatggtattccacacagcattgcctcaaaccaaggcattcactttatggctaaagaagtgtggcagtgggctcagattcatggaattcactggtcttcccatgtt

SEQ ID NO: 926802 - DNA, 711 bp, Homo sapiens
ggaatggcctttggaagtcacaaatacaatgtcaactaggggactatactttgcagggctggggcaaagttctctagaagaccatgtgtgctctgaatcagcatacaatatatggtactgtttctcccatagccatgattcatgggtccaggaatcaaggggtggaagtggaagtggcacyactcaccatcatccctagtgatccactagcacagtttttgcttcctgttcccgtgacattacattctgctggcctagaggtcttagttccagagggaggaacgctgccaccaggagacacaacaattccattaaactggaagttatgatcgccacctggacactttgtgctcctcctacctttaagacaacaggctaagaagggagttacagtgttggtttgggtgacttacttgcactatcaagatgaaattaatctattactccagcatggaagtaaggaagagtatgcatggaatataggagatccattagggcttctcatagtatgaccatgccctgtgattaaggtcaacgggaaactacaacagcccaattcaggcaggactacaaatggtccagacccctcaggaatgaaggtttggtttactccagcaggaaaaaacccgcgacctgctgaggtgcttgctgaaggcaaggaaaacacagaataaatagtagataaaaggtaatcatcaataccagctataa

SEQ ID NO: 926803 - DNA, 706 bp, Homo sapiens
ggcctttggaagtcacaaatacaatgtcaactaggggactatactttgcagggctggggcaaagttctctagaagaccatgtgtgctctgaatcagcatacaatatatggtactgtttctcccatagccatgattcatgggtccaggaatcaaggggtggaagtggaagtggcaccactcaccatcatccctagtgatccactagcacagtttttgcttcctgttcccgtgacattacattctgctggcctagaggtcttagttccagagggaggaacgctgccaccaggagacacaacaattccattaaactggaagttatgatcgccacctggacactttgtgctcctcctacctttaagacaacaggctaagaagggagttacagtgttggtttgggtgacttacttgcactatcaagatgaaattaatctattactccagcatggaagtaaggaagagtatgcatggaatataggmgatccattagggcttctcatagtatgaccatgccctgtgattaaggtcaacgggaaactacaacagcccaattcaggcaggactacaaatggtccagacccctcaggaatgaaggtttggtttactccagcaggaaaaaacccgcgacctgctgaggtgcttgctgaaggcaaggaaaacacagaataaatagtagataaaaggtaatcatcaataccagctataa

SEQ ID NO: 926804 - DNA, 876 bp, Homo sapiens
cagctggatttataaaacattggaatggcctttggaagtcacaaatacaatgtcaactaggggactatactttgcagggctggggcaaagttctctagaagaccatgtgtgctctgaatcagcatacaatatatggtactgtttctcccatagccatgattcatgggtccaggaatcaaggggtggaagtggaagtggcaccactcaccatcatccctagtgatccactagcacagtttttgcttcctgttcccgtgacattacattctgctggcctagaggtcttagttccagagggaggaacgctgccaccaggagacacaacaattccattaaactggaagttatgatcgccacctggacactttgtgctcctcctacctttaagacaacaggctaagaagggagttacagtgttggtttgggtgacttacttgcactatcaagatgaaattaatctattactccagcatggaagtaaggaagagtatgcatggaatataggagatccattagggcttctcatagtatgaccatgccctgtgattaaggtcaaygggaaactacaacagcccaattcaggcaggactacaaatggtccagacccctcaggaatgaaggtttggtttactccagcaggaaaaaacccgcgacctgctgaggtgcttgctgaaggcaaggaaaacacagaataaatagtagataaaaggtaatcatcaataccagctataaccacatgaccagctatggaaacgaggactgttatcatgagtatttccttcttcttttgttaaaaacatgtttgtgcatatatacacttgtactaagaaaatgtcttccttttatttcctttttctttatcacgtgacatgagat

SEQ ID NO: 926805 - DNA, 737 bp, Homo sapiens
catagccccagttctcaaccgcatggcagggaccgtccaggagttggtgaggaacagggtgggagggaggaagggagcaggagacctcactctttcctttgaacctaaagctccagataatcctacactagaggtgcatatggggcatggctctggcttcttgagggaaactggagagatggggggctggggaaatggggggctrtgctgccctaggagcaggaccaaccagcgtggaggcgctttgacctctagctttgtttgatttggagcttgatttactggaggggaagtttgtttatttcagttggttgcatctattgaccaataaaatctagttagtcctgatgcttcctgaagcagggccccctggatttggcgttgcttttttgtgcctcagattttttttttttttgaggcagggtctggctctattgcccaggcaggagtgcaggggtggggtctctactcagggcacccttcacctcccagggctcaggcgatccttcccccccgggcctcccggagaagctgggattacaggtgcgtgccaccatgctctgctaatttttctattttttttgtagagacagggttttgccgtgttgcccaggctggtcctgaacttgggagctcaaatgatttgccctcctcagcctccaaagtgctgtgattacaggcatgagtcaccacactcggtctgtgccttagactttagagtcggaaagctggatttg

SEQ ID NO: 926806 - DNA, 492 bp, Homo sapiens
tgtttagtagagatgaggtttcaccatgttgcgcaggctggtcttgaactcctgacctcaggtgatccacctgccttggcctcccaaagtgctgggattacaggcgtgagccaccatgcccggcctcaatccctgctttactgctggcataagtatcaccaaggcagggtttagggctcttgagaaatgcataagatggtggcccaaactgccttagaggaaggggagtgtgggaaaagcccccttaaggaaatgacattgaagttaggacctgagagctaaggaagctgatcttcaaaaccatgttattacataaaactatggaagagcaatgagtaggcaccacaygcttacaagacacacgagccgaacgctttccggccaaggcgtcctgccctacctgtggggtggaactgaacaaactcgaggtcctggcaaggaaggcctgccctggtgatcatggccgtgccgtcgctggtgctggtgtgggca

SEQ ID NO: 926807 - DNA, 619 bp, Homo sapiens
gccatctcaaacttgggtttaccttcctcagcagcctattagaagagggcacgtggcagaaacaacattaaaatccggaggaccaggctgggcacggtggctcacgcctgtaatcctaccactttgggaggccgaggcaggtggatcacgaggtcaggagatcgagaacatcccggctaacacggtgaaacacgtgtgtactaaaaatacaaaaaaatkagccaggcatggtggcgggcacctgtagtcccaactactcgtgaggctgaggcaggagaatggcgtgaacccgggaggtggagcttgcagtgagcggagatcgtgccactgcactccagcctgggggacagagcgagactccatttcaaaaaaaaaaaaaattcctggggaccagcatccagtcacccagagactaccccctttctatctgttttcaaggtgaacagaacctacctgttgcattagacagggccagggattccatggagccccgaggggtctgctctgtgggcgtcatgtcctctgtgtatttcagggaactgatgggatgacgggtccgacactgctgagtggacaagcccccttcctcttcctcttcctcctcatatttggggacttg

SEQ ID NO: 926808 - DNA, 672 bp, Homo sapiens
gtcattattctgcacagatttgtctattcctacctattgaattactcatttatatcagtatggacttagttttttcttctttttgagatagggtctgtgtcacccaggctggagtgagtggtgcgatctcagctcactgcaacctccacccaccgcagcctccacctcccgggttcaagagattcccacctcagtctcctgagtagttggaattacaggcatgcaccaccacatctgactaatttttgtacttttggtagagatggggtttcaccatgttggccaggctggtcttgaactcttgacctcaaatgatccacccacctmggcctcccaaagcgctgggattacaggtgtgagccactgcgcccggcctacttatggattttactttatacttgggttataatccaatgggtctttatcttgttgctcaacttgctccagccttggccactgggaactccttccgctggcccctgtgtccctgtgacaggcgtcacccccacctccggcacttcctcacttttgactacatctcgtatatgccccgcaccagccctggaatcacccatttctccaaggaactctggatcgttttaatggaaaatggtatttagaaaccaagatctgggtgtgcgatgtgcttactgctgccaggaaaccactgct

SEQ ID NO: 926809 - DNA, 672 bp, Homo sapiens
gtcattattctgcacagatttgtctattcctacctattgaattactcatttatatcagtatggacttagttttttcttctttttgagatagggtctgtgtcacccaggctggagtgagtggtgcgatctcagctcactgcaacctccacccaccgcagcctccacctcccgggttcaagagattcccacctcagtctcctgagtagttggaattacaggcatgcaccaccacatctgactaatttttgtacttttggtagagatggggtttcaccatgttggccaggctggtcttgaactcttgacctcaaatgatccacccacctcggcctcccaaagygctgggattacaggtgtgagccactgcgcccggcctacttatggattttactttatacttgggttataatccaatgggtctttatcttgttgctcaacttgctccagccttggccactgggaactccttccgctggcccctgtgtccctgtgacaggcgtcacccccacctccggcacttcctcacttttgactacatctcgtatatgccccgcaccagccctggaatcacccatttctccaaggaactctggatcgttttaatggaaaatggtatttagaaaccaagatctgggtgtgcgatgtgcttactgctgccaggaaaccactgct

SEQ ID NO: 926810 - DNA, 595 bp, Homo sapiens
cgctgggctggcccccagaaccagccggagggcaggtggtgtgggggcactgggccagcccgtcactgccggggctcccgtgctgaccgcccagatgccacccgctgcactgtggcactcgggctttcaccctgcgatgtgcggccagagggcaggcaggctcacttcyctctggctccccagcactgtgagtccctctagctgacctgctctgggggttttagtagggtggcgtcctagaaatggggctgtcaaaaggtgtactttttttttttttgatatggagtctctctctgtcacccaggctggggtgcagtggtgcgatctcagctcagtgcaagctccgcctcctggattcaagtgattcttctgcctcagcctcccaagtagctgggactacaggcgcctgccaccccacccagctaattttttgtatttttagtagagatggggttttaccttgttagcaaggatggtctcgatctcctgacctcgtgatctgcccacctcggcctcccaaagtgctgggattacaggcgtgagccactgtgcctaggtgcacattttaagtttggaggtgcaccttactgaggtg

SEQ ID NO: 926811 - DNA, 663 bp, Homo sapiens
actggtgcctgctggtttgagttaggccatgaggaagtgacagacatgggttagagagtcggtacaaaaggacttgttacgggtcgtatctaggctggtgagctctttggatttcagatagtggctagagattatagtaacatagcacctggaaagaaggggagaagccagcgctgggaaagtgttcttgggagtggtgagagggtaatgattggacagagcctagggagagtttgagcctgagaatgaggtaatagaaaacaagcagtcatgacagtaaaagggacagaaattggtgttgaacaaggctccttcatagcagtacaggagacttcctcactgtggcagtgccctgtatttgcatctctggggatcttagagtgcctcgggaagctgtggtcctgtgggttygtgtgcagaaagacttcaagtgtacatgaacacatgacagtagaacaaatctgtgtccgggtgttctgtgcacttttcgtccctgttgaccctcacatccccccatgcactgttctcttcctctttccttactaggttgcctgtggctggagaaaggaatgtgctcatcaccagtgccctcccttacgtcaacaatgtcccccaccttgggaacatcattggttgtgtgctcagtgccgatgtctttgccag

SEQ ID NO: 926812 - DNA, 544 bp, Homo sapiens
cttggcaactgtgggagactggttccaggacctcccttgataccaaaatctgcatatgttcccatcttctatataaattggcatagtaactgcatataacctacctacaccctcctgtatactttgaatcatctctagattacttaaaatacctagtacaatgtaaatgctatgtaaatagttgttatattgtrtttttaaattttgtttttttttttattgttgtactggtttttttttttttgagatggagtcttgctctgtcacccaggctggggtgcagtggcgcaatctcggctcactgcaacctccacctcccaggttcaagcaattctcctgcctcagcctccacagtagctgggactataagcgctcgccaccacgccttgctaatttttatattttttagtagagacggggtctcaaactcctggcctcaaatgatccacctgcctcagcctcccaaagtgctgggattacaggcatgaatcaccacactgggcctattttttatttttaaaaaatattttccatttgtgattgg

SEQ ID NO: 926813 - DNA, 544 bp, Homo sapiens
cttggcaactgtgggagactggttccaggacctcccttgataccaaaatctgcatatgttcccatcttctatataaattggcatagtaactgcatataacctacctacaccctcctgtatactttgaatcatctctagattacttaaaatacctagtacaatgtaaatgctatgtaaatagttgttatattgtatttttaaattttgtttttttttttattgttgtactggtttttttttttttgagatggagtcttgctctgtcacccaggctggggtgcagtggcgcaatctcggctcactgcaacctccacctcccaggttcaagcaattctcctgcctcagcctccayagtagctgggactataagcgctcgccaccacgccttgctaatttttatattttttagtagagacggggtctcaaactcctggcctcaaatgatccacctgcctcagcctcccaaagtgctgggattacaggcatgaatcaccacactgggcctattttttatttttaaaaaatattttccatttgtgattgg

SEQ ID NO: 926814 - DNA, 591 bp, Homo sapiens
gcccgtgctcatgaaattccctggtcttacccaccatcctgcagcagctatcttgatagaatggtagaatggtctttcgaagattcagctggcatcaagctaggtggcaatactaccagggctggggcaaggatcttcagaatatgctctaaatcagcatccaatatatgctgctgtttttctggtagtcaggattcacaggtctaggaatcaaggggtgaaaatggaagtggcaccacttactgttacccrtagggactaataaaatttttgcttcctgttcccatgactttatgctctgctgacctagagttcatagttctagagagaggaatgcttctaccagaagacacaacaatgatttcgttgaagtggaagttaagacccacccagtctctttggtctcctcattcctctgaatcaacagaccaagaagggagttacagtgctggctgaggtaactgttctgaataccaagagagaagtggactactgctccacaatggacataaagaagagtatgtctggaatacaggctatgccctagagaatcttttattattgccatgacctttgattaaagtcagtggg

SEQ ID NO: 926815 - DNA, 578 bp, Homo sapiens
agcagaagcattccaacagagggacattctacaacacccctgaccagtactcttcaaaactgtcaaagtcataagaaataaggaaagtcttgagacactgtcatagcccagaggacctgaaggagacataacagctaaatgaaatgtggtgtcctggatgggatcctagaccagaaaatagacactaggtaaaaatgaaggaaattagcatgaaggattgaccttaattgatcattatgtatccatattggttaattaatgatgacaactgtgccctaccaacagaaaacattaacaataggggtaactgtggatagggtgcatgggaactcttcgtactatctgaagtttttctttaaattaaagctattttataattaaaaatatatttttaaaaaggcaattgagcctagaggcytgctttattaatttattttcaagactcaaattaaaagctataattatgaatataaaactattgggaaataaagaatttaatatatagcccttgattatattctgttgacagtccaggggaagagatggcagcaagggggatgtgtaaaatgaaagggaag

SEQ ID NO: 926816 - DNA, 610 bp, Homo sapiens
cttctgctagcttcggggttagtttgctcttgctttttaagttcctctaggtgtgatgttagagtgttaatctgagatctaaattcttaatgtaggcatttagaactataaactttcctcttaatacttttgttgtatccagagattttgctatgtcatgtttctgttttcatttatttcaaatacttttttagtttctgccttaattttgttgtttacccagaagtcattcaggagcaagttgcttaatttccttgtaattttgtggttttgagagatcttcttagtctcttcttcctggtattgatttctacttttattccactgtggcccaaagtatggctggtatgattccgatttttttaacatattgaaatgctttatggcttaacatgtggttgatcttacagtaygttttatgtgcaaatgagaagaatgtatattctgtagttgacggatggagtggttggtagatatctattaggtccaattagtcaagtgtcgaatttaaatctagtatttctttgttagttttttgcctcaatgatgtgttgaacactgtcagtggagtgttgaagtttcccactattacggtgtggactatataaga

SEQ ID NO: 926817 - DNA, 610 bp, Homo sapiens
cttctgctagcttcggggttagtttgctcttgctttttaagttcctctaggtgtgatgttagagtgttaatctgagatctaaattcttaatgtaggcatttagaactataaactttcctcttaatacttttgttgtatccagagattttgctatgtcatgtttctgttttcatttatttcaaatacttttttagtttctgccttaattttgttgtttacccagaagtcattcaggagcaagttgcttaatttccttgtaattttgtggttttgagagatcttcttagtctcttcttcctggtattgatttctacttttattccactgtggcccaaagtatggctggtatgattccgatttttttaacatattgaaatgctttatggcttaacatgtggttgatcttacagtacgttttatgtgcaaatgagaagaatgtatattctgtagttgayggatggagtggttggtagatatctattaggtccaattagtcaagtgtcgaatttaaatctagtatttctttgttagttttttgcctcaatgatgtgttgaacactgtcagtggagtgttgaagtttcccactattacggtgtggactatataaga

SEQ ID NO: 926818 - DNA, 620 bp, Homo sapiens
taacaggtatacttttataaccttgtccatgacattgacaattatgatctcaatgggcatttctattttgccttttcagtaagttcataatatactacaaaaagtccacttgattaatgttcaattttaaaatatgagatcaaagaaacacaaaaacctattcaaatgctgtgctaagatgctctgtcttcaataatactgaattagtacgagcttttggctattgacttcattactttgacagctgaaataacatgttcatgccttacgtctgtcttgactgtttggggttagaaaaagaatgccaggttatgcrtggtattttctaaattaacttgagctctgcatttgtctacaggcctacgaggttcaatccgtaggcttggtacctgaggaggtggcaggcacaagtggaagtttccgcttggctaggtgccattgtcataagaagccagtgtcacctcttgtaaaggaattatttaatcttttaaaacagattcagtaataaattctaccctgaaagagataaattagtgcataaagtacaaaaagtaatccctttgataagcatgctatcatgcttatctattttctgtcatgactgtgaaatcagagtgaaa

SEQ ID NO: 926819 - DNA, 653 bp, Homo sapiens
tcattagggagtacccaaagctcagtaatgctgtggttcttgcagacaaggtaccaccttggtggccttggataagattcagaagaattctccagattaccaagcagagattcttgttctcttcccttactttttcccaaacaattgagtcattctctgtgtgctgagctgcctggaactggtggaggggtgacacaagcatgcatgtggccaccatcactggagccatggtgggtcagacctgaagccascactgactgaggcttgtgcaaggtccactgtaatcactacttggctaccgcctatgtttgttcaaggccctagggctgcataatcagcaggtggtgaagccagccaggcttgtgttgttcccttaagagtagtgagttccccctgggccctgggtggttccagagatgccatctgggaaccagtatctatagtcagaaaccttagaaatatacttctttattctactacacctgagctggcactcaaaccacaagacacagtccttctcactcttcccttccctttccacaggcagaggagtctttctccatggccctcaccaccacaagtccatagggagtactgccggggtaccgctgatgttcactaaagcccaagggctctttagttactttgtagta

SEQ ID NO: 926820 - DNA, 609 bp, Homo sapiens
gtgcaactactctggaaaacagtctagcaagttattttaaaactaaatatgcaaataccatagtatccagaaattacacttttaagcatttatcacagagaaatgaaaactttttttcacataaaaacctttacataaaygttcataacagctttatttgtaatggcccaaaactgtaaacaacatagatgtcctttcacaggcaattgtttaaataagctatggtacacccatatcaaggaatactaccagtacagtaataaaaatgaatgattgatatatgctgcaagacaaaagccaatcataaatgtttacatactgtatgagtccatttgtaaaaaattcttgagatgacaacatataacaacagagaacagagtagggattgtcagagatcaagggtggggttgggaaggaaaggaggaaggggatatagttataaaagagcaacagaaggaatccctgtgctgatgaaattgttcagtatgttagctgcaataacgtcaatatcctggttgtaatattgtactatagttcggcaagatatagttattactggggaaaacaaggtaaaagtacacaagctcttcctttataatttcctacagc

SEQ ID NO: 926821 - DNA, 597 bp, Homo sapiens
ctaggtattaggcacagcatctattagctattcttcctgatgttctccttcctctcatcccccaccctccaacaggtcccatgtatgttattctgcccctcgtgaccatgtgttctcatcattcagctcccacttataagtcagaacatgtggtatttggttttcagttcctgcattagtttgctaaggataatgacctccagctccatccatgttcatgcaaagaacatgatctcattcctttttaaggctgcatattattctgtggtatacatttaccacatcttccttatttagtctatccttggtaggcattgtattaatctgttctcatgctgcgaataaagacccaaggctgggtaattkataaaggaaagaggtttaattgactcacagttccacatggctggggaggcctcacaatcatggtcgaaggtgaatgaggagcaaagtcatgtcttacacggtggcaggcaagagagcttgtgcagggtaactcccatatataaaaccataaaatcttgtgagacttattcactaccatgaaaacagtatggcagaaactgcccccgtgattcaattatctccatctgtccc

SEQ ID NO: 926822 - DNA, 586 bp, Homo sapiens
agagacaagagcggaagtcgggagcttattttaaaaaatgaagagagggaacactgggctgggatcagagtggtgcctgttgggttagtgaggggtgttagaattgtgaatttaagatagagcttacaggacttgctgatggaataagtggggcttttgaagggaaagagggagccaaaggtggctacgaagttcttagcatcagaaatagaaaaaattgaattgccattattaagagatggacagtagagagtagagcagtttctgaaaaggaatgggaatatctgttaaattgaagatgcctgttagacatccatgtagatatatcaactatcrtagacgattattggatatatggtactgaagttcgggaggacatgtggacttgagatacaaatgtaggaatactcaggttctagatgatatttaaagcaatgagattaaatggaatacctagggagtaagtgtggatagaaaaggaaagaggtcagtagtttagatcatagttataccgaatgtaaaggctgacacatgattagtaaaatagcaaaggcgtctcaatatgaataaccagaaaggtaggagg

SEQ ID NO: 926823 - DNA, 586 bp, Homo sapiens
agagacaagagcggaagtcgggagcttattttaaaaaatgaagagagggaacactgggctgggatcagagtggtgcctgttgggttagtgaggggtgttagaattgtgaatttaagatagagcttacaggacttgctgatggaataagtggggcttttgaagggaaagagggagccaaaggtggctacgaagttcttagcatcagaaatagaaaaaattgaattgccattattaagagatggacagtagagagtagagcagtttctgaaaaggaatgggaatatctgttaaattgaagatgcctgttagacatccatgtagatatatcaactatcatagacgattattggatatatggtactgaagttcgggaggacatgtggacttgagatacaaatgtaggaatrctcaggttctagatgatatttaaagcaatgagattaaatggaatacctagggagtaagtgtggatagaaaaggaaagaggtcagtagtttagatcatagttataccgaatgtaaaggctgacacatgattagtaaaatagcaaaggcgtctcaatatgaataaccagaaaggtaggagg

SEQ ID NO: 926824 - DNA, 606 bp, Homo sapiens
ttcactgtattgtgtcctgtgatgcatggaagtttttaattttgaagtcatccaatttgtctacttttatttttgtttcctgtgcctggtatcatatccaagaaatcattgccaaattcaatgtcataaagcttctctcctaagcttttacctaaaagtttcatttttwaaaaaatttattattattattattattattattattattattattattatttctgagacacagtcgtgctctgtctcccaggctacagtgaagtggtgcaatctcggctcactgcaacttctgcttcccgggttcaagctattctcctgcgtcagcctcccgggtagctgggactacaggcatgcaccactacgcccaactaatttttgtatttttagtagagatgggttttgccatgttggccaggctggtctcgaactcctggcctcaagtgatccactcacctcggcctcccaaagtgctgggattgcaggcagaagccaccatgcccggccaacagttttatagttttatgttttccatttaggtctttgattcattctgagttaatttttgtatatggtacaaaggtaagggggcaacttgtaattttttcc

SEQ ID NO: 926825 - DNA, 606 bp, Homo sapiens
ttcactgtattgtgtcctgtgatgcatggaagtttttaattttgaagtcatccaatttgtctacttttatttttgtttcctgtgcctggtatcatatccaagaaatcattgccaaattcaatgtcataaagcttctctcctaagcttttacctaaaagtttcattttttaaaaaatttattattattattattattattattattattattattattatttctgakacacagtcgtgctctgtctcccaggctacagtgaagtggtgcaatctcggctcactgcaacttctgcttcccgggttcaagctattctcctgcgtcagcctcccgggtagctgggactacaggcatgcaccactacgcccaactaatttttgtatttttagtagagatgggttttgccatgttggccaggctggtctcgaactcctggcctcaagtgatccactcacctcggcctcccaaagtgctgggattgcaggcagaagccaccatgcccggccaacagttttatagttttatgttttccatttaggtctttgattcattctgagttaatttttgtatatggtacaaaggtaagggggcaacttgtaattttttcc

SEQ ID NO: 926826 - DNA, 593 bp, Homo sapiens
attgccaaattcaatgtcataaagcttctctcctaagcttttacctaaaagtttcattttttaaaaaatttattattattattattattattattattattattattattatttctgagacacagtcgtgctctgtctcccaggctacagtgaagtggtgcaatctcggctcactgcaacttctgcttcccgggttcaagctattctcctgcgtcagcctcccgggtagctgggactacaggcatgcaccactacgcccractaatttttgtatttttagtagagatgggttttgccatgttggccaggctggtctcgaactcctggcctcaagtgatccactcacctcggcctcccaaagtgctgggattgcaggcagaagccaccatgcccggccaacagttttatagttttatgttttccatttaggtctttgattcattctgagttaatttttgtatatggtacaaaggtaagggggcaacttgtaattttttccccagctgattagccaattggcacaacacaatttactgaaaaagaaggtttctttctatcaatttgtaacattattttgttcatatatcaaattc

SEQ ID NO: 926827 - DNA, 759 bp, Homo sapiens
cccaggccaaaataaatgagtctgaagtgagatgaacttggagtgcacaaggaatagtaaggaggtgtatgtatctggagtgaggggagagctgtgggaactgagagagcaggaacagcctaggccagcacatgtggaggtgtgcaggtcatgcagctttggattttattctaagcacgatgagaggacaggagagcaggggagaatcataacctgacttagcttgtaagtttgcctgtgggtgctgtaatgagtgtggactggatggggcaagtgtagcaggaagggagttcaattaggagactcttgattgttatccagcattctaaataagagaagacagcttggactaggttgaaaggggtgaagtaattggtcacatataggatatatttgaaagtcagagttcattctattttctgatgacttggaagtagggtgggaaagagagaagccaggatgggcaactaaatgcatggtggtgccagacaatgacatgggaaaagtgtggtaaagaaggttgggagggatcaagagttgggttttcttagacataagttttagatgccaaatagccatccaagtcaagatgtcaggtttttaggtatgtgagtytgaatttagggacagtttggattggcggcatgtggtaggcagattttagttactccccgaagatgtccacatcctaattcccagagtctgtatgtcatgttacatggcaaggggcgattaaggtagcagacggaactgaagctg

SEQ ID NO: 926828 - DNA, 594 bp, Homo sapiens
acccttctcagggaagggttgcaggagaaaattccctgttggggagatgtttcaatggagtctctaaggacaaggaaggactccttggagggaagatggggagccaggctcagcgagcagcagcagagaccaggaggtaaaccccctaagatctttggtgatgctacgggcaggaggtgagatgagagagaagggcgggactggaaaaaggtgggtgctgagtgtgtactgggagcctggtgtcgttcgttcattctcccacccattccatcctccttcattcgctcgtttgcccatttgtccatgtcctggttcattcaggcacgcatgcgctcattcacccttccctgcctgcgtcccacgtgtcctgaacgccagcgctgaggcgttccgaggactrtaccgaggccctgggacaccaaggtcacccaggcactgtctccacactctggactcacactgggctctgtgacatcaaggacaggggcccagaaatatccaaataacgaggagctgaatagccttatcttcctcttatttcaaatgggtctcaaagatagaaaaacctaccctacccctttgtggcaaatgcag

SEQ ID NO: 926829 - DNA, 619 bp, Homo sapiens
gcatggctaagtcatggtgctcatatatgtgggcaaacattattttgcgtgtttctgtaaaggtgaatgagattaacatttaacttggtggattttgagtcaagcaaattgtccctcattttgtggatggccctcttctaattagctgaaagtccaaatagagaaaaatgcattgacccccaccttgagcaacagggaattttgccagcagtctttgaacttgaagacttcaactatagtgttggctttttccaggtctccagcctgcccaccctgcagattttggacatggcagctccataatcatgtaagtcaatatctaaaaataaaacatatataaagggacttcacaaagttcagggaaaaatgtaattaaaagataaaagtaaaacgtataaactttatttttcaacacaagcttcatcaagttcaaaagatttttataagtgacaatactagccwtttagctcatttctaaagaacagagggtcctaagaatttaaccatgtaaatacaatctctttttacattaataactgaagaaaaattagtgtccgttacagattttttaatattatgatccaaaaaaaaaaaaatgtcagaagaagccaaatcggga

SEQ ID NO: 926830 - DNA, 752 bp, Homo sapiens
gatctttcccaaggccaacacctctatttcctggtagatcccctttctcctagcagaagcttttacctgtaagaatttcacctctcacttctgaatccacagtttttcctctatactagatcactttgattaagtatcaaagtataccagatcactttgattaagatggagctataaaagctcccatcttttaatgaacaaacttcccaatctgctccagtttgaggttcagccagcacccatttctctgtgccataacagggtttagacccaccatctgaatttcctgtgattccattttctcctgaacccacccaaatcaaaccrtctacctccctgtcctctgaaattgcccttgtcaagatctcctcaacctcaactttgtgggaagagggtacaataatcaattatctgtcctcattctcatcagtctcttaataacttttcatatagtggattcctctctcatttttgatacattttccttactgagcttctgtgaagccctggaatcctgatattactgcaacttcccagccaggcactctcagtctactgtaataaaccatttccccttttcctgtattttaagtcatattttctcaaccagagctccccagaacatgagattgtaatgccggaaggattccactcatgttcttctcccccctatgcatctacagtgtttagataacatacttgggatgggacaaagagtcacttaggtcattttctatgattcagatcaagaa

SEQ ID NO: 926831 - DNA, 752 bp, Homo sapiens
gatctttcccaaggccaacacctctatttcctggtagatcccctttctcctagcagaagcttttacctgtaagaatttcacctctcacttctgaatccacagtttttcctctatactagatcactttgattaagtatcaaagtataccagatcactttgattaagatggagctataaaagctcccatcttttaatgaacaaacttcccaatctgctccagtttgaggttcagccagcacccatttctctgtgccataacagggtttagacccaccatctgaatttcctgtgattccattttctcctgaacccacccaaatcaaaccgtctasctccctgtcctctgaaattgcccttgtcaagatctcctcaacctcaactttgtgggaagagggtacaataatcaattatctgtcctcattctcatcagtctcttaataacttttcatatagtggattcctctctcatttttgatacattttccttactgagcttctgtgaagccctggaatcctgatattactgcaacttcccagccaggcactctcagtctactgtaataaaccatttccccttttcctgtattttaagtcatattttctcaaccagagctccccagaacatgagattgtaatgccggaaggattccactcatgttcttctcccccctatgcatctacagtgtttagataacatacttgggatgggacaaagagtcacttaggtcattttctatgattcagatcaagaa

SEQ ID NO: 926832 - DNA, 620 bp, Homo sapiens
tagacaggtcaagcagttcctcaaatggttaaacacagagcacagagttaccatatgacccagtcactcccctcctacgtatatacccaagaggtgtaaaaacatatgtccacgttgccaggtgcagtggctcacgcctgtaatcccagcactttgggaggctgaggcaggtggatcccctgaggtcaggagttcaagatcagcctgaccaacatggcgaaactctgtctctactaaaaatacaaaaattagccrggtgtggtggcgcacacctgtaatcccaactacttgggaggctgatgcaggagaatcgcttgaacccggaaggtggaggttgcagtgagctgcgatcgtgccactgcactccagcctgggtgacagagcaagactatgtctcaaaaaaacaaaacaaacaaacaaacaaaaaccaaaaaaacaaaaccatacatccatgcaaaaacacattacacgtggatgttcatggcagcattattcataacagcctgaaagctggaaagtggaaacaacccaaatgtctatcaactgggaaatggatccacagaatgtggtctccccatgaaagggaatatcatctaggatctaggaatgctctacgtgat

SEQ ID NO: 926833 - DNA, 700 bp, Homo sapiens
cttctggagaacttgctgcagcttctccatcagcacttgctgcttcaccttgcactctcatgttatggagacggcttccttccttaaacctcataaaccaacctctgccagcttccagcttttcttccgcagctccctcacctttctaagccctcacagaattgaagagtcagggccctgctctggattaggctttggctaaagggaatgttgtggctggtttaatcaatgcagaccactcaaasttccttcatatcagcattaggattgtgttcttatcattcgtgtgttcactggagtagcagttttactttccttccagaacttttcctttgcattcagaacctggctgtccagtgcaggatgcccagctttcagcctctctgccttcgacacatcttcctcactaagcttcgtcatttccagctttcaagtgagggacacgcaactcttcatttcaacactgagaggctgctatagggatgttaattggcctaatttcaacagtgttgtgtctcactcatgaagtcagaggcattaggagaaggtgagagacgaaggaacggccagttagtggggcagtcggaacacacacgatttatcgactaagttcactgtcttctatgggcaaggttcccagggcctcaaaaccaattataacagttacagcaaaagtcactgaccaccctcatataatcac

SEQ ID NO: 926834 - DNA, 789 bp, Homo sapiens
attgtgttcttatcattcgtgtgttcactggagtagcagttttactttccttccagaacttttcctttgcattcagaacctggctgtccagtgcaggatgcccagctttcagcctctctgccttcgacacatcttcctcactaagcttcgtcatttccagctttcaagtgagggacacgcaactcttcatttcaacactgagaggctgctatagggatgttaattggcctaatttcaayagtgttgtgtctcactcatgaagtcagaggcattaggagaaggtgagagacgaaggaacggccagttagtggggcagtcggaacacacacgatttatcgactaagttcactgtcttctatgggcaaggttcccagggcctcaaaaccaattataacagttacagcaaaagtcactgaccaccctcatataatcacaatgaaaaagtaagaagtattgtgagaatgaccaaaatgtgagagagaggcaggaagtgagcacgtgctgttggaaaactggcaccaacagacctgctcagccagggctgggctccacagaccttcatttgcaaaaaacatcaatctacggagtgcaatcaaacaaggtgtaagaaatagccaccaaggcacgtgcctgcagtcccagctacttgggaggctgaggcaggggaatcgcttgaacccaggaggtggaggttgcagtgagccgagattgcaccactgcactccagcctgggcaacagagcgagactccgtctcacaaaaaaaaaaaagagagagagagaaatagcca

SEQ ID NO: 926835 - DNA, 666 bp, Homo sapiens
ttaagcaaaatacttaaattctctattaataatactcgcatcattggattgctgtgggaattatgtcacactttacttttatcctgaaatacagaaacactcaataaatattagggtggtattctttgtttcttttttttttttaagaaacatcagagttgccgggtgcggtggttcacgcctgtaatcccagcactttggaaggccgaggcgggaggatcacgaggtcaggagacccagaccattctggctaacacggtgaaaccccgtctatactaaaaatacaaaaaattagccgrgcgtggtcgcaggcgcctgtagtcccagctactcgggaggctgaggcaggagaatggcgtgaacccaggaggcggagcttgcagtgagccgagatggcgccactgcactccagcctgggtgacagagcgagactccgtaccaaaataaataaataaataataaataatcatcagagttaatgtatggagcagttaatgtgtcacagcaataaagtgaacccattcaatcaacatctcacaaatgaaatgtgacttcttttttttaatacctctaaagttgttgccttaagactttaactcaactacctaaataggtcaaaatgtttcccaaagccatataaacgaaataggcttatgactttcaaat

SEQ ID NO: 926836 - DNA, 560 bp, Homo sapiens
atcatacagatgaggaaaatgagtcctggaaaaattatgatgacagaactggtgaactctgacacttcgggttttgaccttggctaaattcttagattttgcccaagaacacactctaaggtttctcgctgtagtttgactgttttgttctgaggattttggaaatagtatctcctgacaggatttctgtgttttttgctgctcaactggctctgaaatttctgaacatgccttatgcagtttcaacattcttctgtaatctctgctgaaacatttttgtacctatattttatatcgatactttcagtgtgtgtgtgtgtgwgtgtgtgtatgtatgttctaggacccacttgagaaagattacccaaagttcatataaatgctgcatattgttaggtattgaataagtatttggtatctctttatgttatgaagaagtaaacagtgtatccgcatttaaatatgaagacagggttacagtggaagcatgatgctatcatctagtgacactcatcttgcagtatcatatttttactagttaagtgttctttattttaagt

SEQ ID NO: 926837 - DNA, 759 bp, Homo sapiens
  misc_feature 172: n = A,T,C or G
tcccattggcagtagctttatgtatctctggggtggagttctcagaggcaactgacgatccctctgacaccactgctacagcggtgcctgctattgctgccaccaggttgggaaagaacaaagaacctgagtgccttattacacctccagcataccacaggcactcaggttntttgctctttcccaaagaggccagactgtcttccctgtaagcccccaccccctgctcaccaccaggcaaggcytccaacttgggtgtgtgacatagccactccaccccgggctgatcattttggttagcagaggctctgcatttctctgggttggagctccaagagataagtgtaaggccctctaacattgtcactgccaaggtccctgcccctgctgcctgcaagctggggagtgaacaaagagcctgagctgagccctcactcattctatgaggccagcattattctgataccaaaacctgccagagaaacaatggaaaaagaaaacttcaggccaatatccctgataaacatagatgcaaaaatcctcaacaaaaatccagcagcacatcgaaaagctaatctactaaatcaagtaggcgttattcctaggatataaggttggttcaacatacataaatccataaatgtgattcattgcataagcagaactaaaaacaaaaaccacatgatcatcatagaaaagtctttcaataacattcaacatcttttcgtgtttaaaaaccctcaacaaactaggtattga

SEQ ID NO: 926838 - DNA, 759 bp, Homo sapiens
  misc_feature 172: n = A,T,C or G
tcccattggcagtagctttatgtatctctggggtggagttctcagaggcaactgacgatccctctgacaccactgctacagcggtgcctgctattgctgccaccaggttgggaaagaacaaagaacctgagtgccttattacacctccagcataccacaggcactcaggttntttgctctttcccaaagaggccagactgtcttccctgtaagcccccaccccctgctcaccaccaggcaaggcctccaacttgggtgtgtgacatagccactccaccccgggctgatcattttggttagcagaggctctgcatttctctgggttggagctccaagagrtaagtgtaaggccctctaacattgtcactgccaaggtccctgcccctgctgcctgcaagctggggagtgaacaaagagcctgagctgagccctcactcattctatgaggccagcattattctgataccaaaacctgccagagaaacaatggaaaaagaaaacttcaggccaatatccctgataaacatagatgcaaaaatcctcaacaaaaatccagcagcacatcgaaaagctaatctactaaatcaagtaggcgttattcctaggatataaggttggttcaacatacataaatccataaatgtgattcattgcataagcagaactaaaaacaaaaaccacatgatcatcatagaaaagtctttcaataacattcaacatcttttcgtgtttaaaaaccctcaacaaactaggtattga

SEQ ID NO: 926839 - DNA, 759 bp, Homo sapiens
  misc_feature 172: n = A,T,C or G
tcccattggcagtagctttatgtatctctggggtggagttctcagaggcaactgacgatccctctgacaccactgctacagcggtgcctgctattgctgccaccaggttgggaaagaacaaagaacctgagtgccttattacacctccagcataccacaggcactcaggttntttgctctttcccaaagaggccagactgtcttccctgtaagcccccaccccctgctcaccaccaggcaaggcctccaacttgggtgtgtgacatagccactccaccccgggctgatcattttggttagcagaggctctgcatttctctgggttggagctccaagagataagtgtaaggccctctaacattgtcactgccaaggtccctgcccctgctgcctgcaagctggggagtgaacaaagagcctgagctgagccctcactcattctatgaggccagcattattctgataccaaaacctgccagagaaacaatrgaaaaagaaaacttcaggccaatatccctgataaacatagatgcaaaaatcctcaacaaaaatccagcagcacatcgaaaagctaatctactaaatcaagtaggcgttattcctaggatataaggttggttcaacatacataaatccataaatgtgattcattgcataagcagaactaaaaacaaaaaccacatgatcatcatagaaaagtctttcaataacattcaacatcttttcgtgtttaaaaaccctcaacaaactaggtattga

SEQ ID NO: 926840 - DNA, 775 bp, Homo sapiens
gatcaggcctgtcggaagtgactccgggggtgaactctggcatgcagatgaagggaacttggtggcgcccaaacaggaaagcactcgactctgaagccccagaggggatgttacagccatgctaacagctcttttagtcccaccgtcagcagcctgacaaacgggcatgttaacaatgaatggggggtgtgttaacaactctgtcagtcctgttgcctgctcctgccrgaggctccctggctggcctggccctgcactgcctctcatggcaaggggctgccactgggcacagatagtcggggaggggtggagggctatggtgttactgccttcttcataccctttgctgacaatggaagggtgaaaagggcagagaagagttttatgaagcaatgaaacagctctcagaggagaggggatgcaagggtggtccctgacctgaagttgggtggtctctctctcagcgtggctgggtccggggcttttatgggctcagaagtggggactgcatgctgattggtttacgagtatacaaaaaaggctaaaacaaaggaaccattcaaaggtggcatgacagtgtagaaaaccacctagggaagggtagatatatgtaaagtaagtgaagggtggggatcagtcagaggaaagtgcaccaacaggaagagatgttctcagctcggtccatggatttatccaagacttgtagcttagctttcgggctttaaactgcctttggtttgaaagttggatttcattggggacatgccactatctg

SEQ ID NO: 926841 - DNA, 808 bp, Homo sapiens
gaattgtaaacttcaaattaggatgcaaactcaatgtcactcaagaaagtggtcatgaggctggacttagtcattggtaattattctggattcatcagcaagggcagagctgattttaccatttcataacacaccacttctgaacagtttcctcccaggtgcttaagaatgaagaagtggctgtcaggactgcactggcaatatttttcaaaatgtggatccctggtcatattaaaataaaagtttttcccccatcaggttagcagaaatgtaaaatrgagattggaatttagatgtagagttttgtgtcagaaccacgtttgatagtcagttacacacatctggcccacagttaagaatgtaaactaacagcattaagagccagacatcctgggttcaaataccagctctgctgtataaggcttggcctttctgtgcctcagttgtctcacttgcaaaatcaggatgatatcatcctccaaggattactgtgaggattaaattgttaatatgcttaaagtgcttggaacagaacacacgctctgtgaagtcattactattatcattacattaacacttctctttttgaaaaaggacactttttctattagttaagacaaagcaagccatatatttgcaaattcctaaaacaatgattgaaattaaaattctataggagaatgacttaaattttctttgtaatcagaatagatatgcctccagttccattcttgaagcaggatacatgccaaggtcagaaggaaggtgacttctgctttcacaagcctgtgagagaatgggatccggg

SEQ ID NO: 926842 - DNA, 614 bp, Homo sapiens
ttctttgtattatcggagctcagagcacagtaccccaaagtatggtgccttggcatgtgtggattgttgcactaaaggagacaggagggttttagaagcaagtagttctctttggccttctcccatccttctgtctcctgaaacaagccataaaatctagaaagsttatcttttacctacctcccctgagagctcataagaccctcattccagaggagtcctgccccttacctggagaaaggaatgctacacatgaaaccgtcattgcaaaattataactgaggcagtgaaagagatctgacctaaccaactccatcttgcttctaacttccaagctgtccttcgtcattccttggcgtaggctgaactaactttggaaggaacttagtttataatttatagattaaaatgaacataatgacagctctttcccaaaacaaatccctttcttgcttagggactagactggctttgtaggactaacaaactagtcacaagattagaaattatggtttaggagtcatgcagctggaggctacgaggttctttccagattgctccaggggataacatcactactgtaaagcctaagaccagctcttgagatattttgc

SEQ ID NO: 926843 - DNA, 614 bp, Homo sapiens
ttctttgtattatcggagctcagagcacagtaccccaaagtatggtgccttggcatgtgtggattgttgcactaaaggagacaggagggttttagaagcaagtagttctctttggccttctcccatccttctgtctcctgaaacaagccataaaatctagaaaggttatcttttacctacctcccctgagagctcataagaccctcattccagaggagtcctgccccttacctggagaaaggaatgctacacatgaaaccgtcattgcaaaattataactgaggcagtgaaagagatctgacctaaccaactccatcttgcttctaacttccaagctgtccttcgtcattccttggcgtaggctgaactaactttggaaggaacttagtttataatttatagattaaaatgaacataatgacagctctttcccaaaacaaatccctttcttgcttagggactagactgsctttgtaggactaacaaactagtcacaagattagaaattatggtttaggagtcatgcagctggaggctacgaggttctttccagattgctccaggggataacatcactactgtaaagcctaagaccagctcttgagatattttgc

SEQ ID NO: 926844 - DNA, 467 bp, Homo sapiens
tcatggtttcattttagaatatccatggtgtaaataacacattacttcgtgcaatggagacaatattgcttgattgattctgtattactcaaaaaaaaaaaaggcgagaaaagaacttttatctgaggaatgtgagtccttttaaataatgaggcccagagagacattaaaatgaggcagcagtcaagtcctactccccgctttgagctaggtattcatctcctgaaactgcttattgccacaagtagctataaattaacctaataatgccagagcaaacgctataacccacaccctgtagcttaacaatgtatagccaatcrctaatcaatgttatttctataaatcaataagaatgcctgacaaacaactttgtatcagccatgccttctccctcttttttgcctttaaaaatctgtttgtaacaaaggccaaactcatatccaaggttacacgggtccgagtcc

SEQ ID NO: 926845 - DNA, 609 bp, Homo sapiens
gacactcctgcccaaatactgcaattttcccaaggtcttaacaaccagcagacgaggagattctctcccgtgcctggctcggcaggtcccatgctcacagagccttgctcactgctagcccagcagtctgagattaaactgtgaggtggcagcctggttgggggaggggcgtccaccattgctgaggcttgagtaggtaaacaaagtggcctggaagctcgcactgagcggagtccaccacagctcagcaaggcctactgcctctataggctagacttctgtgggcagggcatagctgaacaaaaggcagcagacaacttctgcagacttaaatgtccctgtctgacagctcttaagagagcagtggttcttccagcmcggtgtttgagctctgagaatggacagactgccttctcaagtgggtccctgaaccccgtgtatcctaactgggagacatctcccagtaagggcagacagacacctcatataggcacgtgcccctctgggatgaagcttccagaggaaaaggatcaggcagcaatatttgctgttctgcagcctctgctggtgatgcccaggcaaacagggtctggagtggacctccagcaa

SEQ ID NO: 926846 - DNA, 593 bp, Homo sapiens
cactttgggaggccaagatgggtggatcacttgtggccaggagtttgagaccagcctgaaaaatgtggcaaaaccccatctctactaaaacatacaaaaactagctgggtgtggtgaagtgcacctgcagtcccagccacttgagaggttgagatgggaggattgcttgagcccaggaggtcgaggctgcagtgagccatgattgcgccactgtactccagtctggatgacagagacaaaccctatctcaaaaaaaagttatactttattgagcacctactgggtgtctaaaactatcttaagcatttttatgctcattattctcatgcaatcctcacagcaatcctaagagggaggttacattcttatcttcataacatygcaactaagtagtttatgttcaaaaactcatggctgtgcttactgcatcccaaactcaaacttcatcatgtccctgaccacagctagttgcctatgagattgagtcaattcattgattcatactaaggcaagtatgatgacaaatgcttgatttatctgtatagaagagacttggggaaatcaaatttaatggtagatttttctggcagcaa

SEQ ID NO: 926847 - DNA, 648 bp, Homo sapiens
tgcataatccaataaaacttacaaagtatacaaagaagcaggaaaatatgacccataaccaggaggacaattaattaataaaagcagaccccaaaatagtgaaggaccttaaaacatagaaatatcataagcatgcttagagacccaaagaaaaacatgaacagaataaaaacagaaaaaaaactataaaaaaagactaatggaacttctagagatatagaatattttaattaaataattgtaagattaacatcagaatagacatctcagagaaaatatcagtgaacctgaagacacggtaaaaaaaagactcaaaataaagcccaaagggaaaaaaaatgtgcaaaactgaacacagcatctgtgacctgtttccagtggkacaatatgtgtaactggagtcttagaagaaataagagtgtgagtaaaaaaaacaattttgaagaaatcactactacaatatcaaattcaatgaaaactgtaatcctacggactgaagaagctcagtgaagcccaaacagaaaaaatatataaggaaacattataatctaagaatcagtgacaaagataaaaatcttaaaagcagctacaggaggggaaaaatgactgtgtgtgtgtgtgtgtgtgagtgtgtgtgtgtgtatcaat

SEQ ID NO: 926848 - DNA, 617 bp, Homo sapiens
ggcaagcttctgcagctttattaaatgaccaatgctgtccctcctgagtgtgaaattaactcacttttccttttttttttttggggggatggagtcttgctctgtcacccaggctggagtgcatggtgccatctcagttcactgcaagctccgccttccgggttcatgccattctcctgtctcagcctcccgagtagctgggactacagacgcccgccactgcgcccggctaattttttgtatttttagtagagatggggtttcactgtgttagccaggatggtctcaatctcctgaccttgtgatccgcctgcctcarcctcccaaagtgctgggattacaggcgtgagccaccgcgcctggcagattaactcacttttcatggcaggtttgagggagacagagaaaactcttctctcacctgaaaccgtggctttgagaaaaataaagtagaacgaccgtggctcttgggagcactatctgaaggacttggcaaaatgtttcctcttagtggcacctgtgatgccaggtctatgaaaagcccagggagcccggctggcaccacctctgtggcgtcctgtgggcctctggccatgctgtgtcgtgggagaaagagc

SEQ ID NO: 926849 - DNA, 463 bp, Homo sapiens
gggtgaagggaaaagaggagtcaaggatgactccacatttttggcctgagcaactggaaaaaataaagtcattactgagacgtggaagactgggggcatcagaagcttagttgtagatgactgcgttgtgagatgcctgcaggccatccagatgacatgacgaggagggagtggcgtatgcaagtctgcaggacataggagrtctgagctggagatgtaaatttgggacttacaagcctagagaagatacttaaagccacgatatggggtgacaccaccaagtgtggaaaggaaagagaagtgtgccgggaactgtgctctgagacactccagcccttagggtcctgaggaaccaacggaatctgagaagaaggggaaggtagaaaatcagaaagtatggtgtaggccagaggtggtggctcacgcctataatcccagcactttggaaggccgaggtgggtgg

SEQ ID NO: 926850 - DNA, 623 bp, Homo sapiens
gcccaagactaggctgttttgtcaagccatctccaattcctatgcaccagtggtggtggccaggaaatgagaactttcaaactcaaagtggaagaggccgggcgcggtggctcacgcctgtaatcccagcactttgggaggccaaggcgggcggatcacgaggtcaggagatcragaccatcctggctaacacggtgaaaccccgtctctactaaaaatacaaaaaattagctgggcgcggtggcgggcacctgtagtcccagctactcaggaggctgaggcaggagaatggcgtaaacccgggcggcggagcttgcggtgagccaagatcgcgctgctgcactccagcctgggcgacagagcaagactccatctcaaaaaaaaaaaaaaaaaaaaaaaaaaactcaaagtggaagaaatgttactcacaatttgaatggctgaaatgaaaatatcaacaacaggagagcacggcaaggagcaaagggacaattgtaagcagcagaggattgaggtccttaagttgagctgaaatggggtccacttagattcagaaagccttcaggcatgtgacccaggtctcagcttcctcatctacgaagtggagatgatggttgattctc

SEQ ID NO: 926851 - DNA, 707 bp, Homo sapiens
gcacccatggagggcaagcagaaggagggtggggcgtcgcctcaccttggaagtacaaggggttggggaactccctcccctacccaagggaagctgggagagactgccttgaggaacagtgcattccggcccagatactacgcttttcccatggtctttgcaacctgcagaccaggagattccctcaggtgcctacaccaccagggccctgggtttcaaacagaaaactgggccactgtttgggcagacactgagctagctgcaggagtttttctcataccccagtggagcctggaatgtcagcgagacagaaccgttcactcccctggaaagggggctgaagccagggagacaagcggtctagttcagtgaatcccacccccacggagcccagcaagttaagatmcactggcttgaaattctcactgccagcacagcagtctgatgtcgatctgggacactcaagcttggtcaggggaggagcatccaccattacagaggcttgagtaggcagttttcccctcacagtgtaaaaaaaagctgacaggaactttggacaaggcagagcccaccacagtgctgccaagccactgtagccagactgcctctctagattcctcctctgtgggcagggcatctctgaaagaaagacagcaggcccagtcaggggcttctagatccaactcccatctccctgggatagaaca

SEQ ID NO: 926852 - DNA, 638 bp, Homo sapiens
aacaaggaggaagtctgtagtgaaaggaaagttactttgtttccaaagctagcagcagggaagcaggctgcttaccttacgcctccagaaacctcttaaaactttaggctggggagaaaggcttaaaaaggggaaattggaatgggaggcccgtgggagagtgcattgcacaaggtctgctgtcttgtwctggtgcctatttcaagctgtggtccacttgaagggcaggttgctgtcatctcaacaattgacgagttgttgacagccaccttgaggtcatcactgggactttgcagcggagtctccatgcttggtctgtcttttttttttttttttttctgagatggagtctcgctctgtcgcccaggctggagtgcagtggcgcgatctcggctcactgcaagctccgcctcccgggttcacgccattctcctgcctcagcctccccagtagctgggactacaggcgcccgccaccacgcccggctaattttttgtatttttagtagaaacggggtttcaccgtgttagccaggatgatctcgatctcctgacctcgtgatccacccacctcggcctcccaaagtgctgggattacaggcatgagctacggcgccctgccgcttggtctgtcgtaac

SEQ ID NO: 926853 - DNA, 581 bp, Homo sapiens
atatatctttctgattgacctcctgcaccaatattttaaactttttctattcattctgcatgtggcattccaaagtgccactggttcatttatattacaagcacaaagataaacagataactttttttttttaactttatgaagtacaaatgctggctgggcgcggtggctcacacctgtaatcctagcactttgggaggccgtggcgggtggattacccgaggctgggagttcgacaccagcctggtcaacacggagaaactccttctctactaaaaatacaaaattagccgggagtggtggcgcatgcctgtratcccagctactcaggaggctgaggctggagaatcgcttgaacccaggaggcagaagttgcaattagccgagatcacgccattgcactccagcctgggtgacagagtgagactccatctcaaaggaaaaagaaaaaaaaggaaaggggaaaaaaaggcttttccatatatttatattccatatcattttaaatattagacaatttatgtcactttggatgcactctaagtttaaacaaaggaaattaggacaaagataaaatgagg

SEQ ID NO: 926854 - DNA, 581 bp, Homo sapiens
atatatctttctgattgacctcctgcaccaatattttaaactttttctattcattctgcatgtggcattccaaagtgccactggttcatttatattacaagcacaaagataaacagataactttttttttttaactttatgaagtacaaatgctggctgggcgcggtggctcacacctgtaatcctagcactttgggaggccgtggcgggtggattacccgaggctgggagttcgacaccagcctggtcaacacggagaaactccttctctactaaaaatacaaaattagccgggagtggtggcgcatgcctgtaatcccagctactcaggaggctgaggctggagaatcgcttgaacccaggaggcagaagttgcaattagccgagatcacgccattgcactccagcctgggtgacagagtgagactccatctcaaaggaaaaagaaaaaaaaggaaaggggaaaaaaagscttttccatatatttatattccatatcattttaaatattagacaatttatgtcactttggatgcactctaagtttaaacaaaggaaattaggacaaagataaaatgagg

SEQ ID NO: 926855 - DNA, 624 bp, Homo sapiens
tatagtgtcactggtctgtgtacttcagtgtgtttttgtagtggctggtaacagtctttccttttcatatttagtgcttccttcagaagctcttgtaaggtaggtttggtggtaatgaatttgctcagcatttgcccttctgaaaaggatcttatttctccttcaatatgaggcttcatttggccaattatgaaactctgagttggaatttcttttctttatgaatattgaatattggcctccaatctcttctgcttgtagggttttagctgagaggtctgctgttagtctgatggacttccctttgtaggtgacctgatctttctctctagttgtttttattttttattttttaacatttttttctttcattttgaccttggggaagctgayaattgtgtgtcttggggataaaagtcttgtgaagtatcttattggggttctgtacatttcctgaatttgaatgttggcctctctagctaggttggggaagttctcatggatgatatcctgaactatgttttccaagttggttccattctctccatctctttcagggacaccaatcagtcatagatttggtctctttacataaccccatatttctcagaggttttgttcatc

SEQ ID NO: 926856 - DNA, 567 bp, Homo sapiens
tgaatctagatgaggggaacacggtggtgcctggaagcttggagatgccaggaacacaagaaccccaaagagggtgtcacaggtctgggtttcttttcagcttagctacgtaattaaaagggtaccctaggtatgggttccccgaagggctgcagctcttctctccttctcgttgcccacaacatggcgagcagggggcgtgttttagccgtgtttgtgttacagttctcagtactgccattcagcaggtccagagttcttgtcctccctccaggaagaatgaggtatgtcaacaactggaggtgagcaaggcagagaggagttcacggagcgacagcatagctctcaggagacccacagtggatggctcctttccacaggcaggtcgtccagacaagtgtccagctctcrgtggagaggagacctatggtgggtggctcctttccacaggcaggtcgacccgacaagtgtccagccctcagtggagaggagacttctgatgggtagccccttcccacagacagattgcctcgaagagtcgaggagacctaacccaaagtgggtagc

SEQ ID NO: 926857 - DNA, 684 bp, Homo sapiens
agaatcactgctctcttcaaagctgtcagacagggacatttaagtctgcaaagttttctgctgccttttgtttggctatgccctgcccccagaggtggagtctacagaggcaggcaggcctccttgagctgtggtgggctccaccctgttcgagcttcctggctgctttgtttacctactcaagcctcggcaatggcgggtgcccctccccagcctcactgccaccttgcagtttgatctcagactgctgtggtagcaatgagtgaggctccatgggcgtaggaccctccgagccaggtgcaggatataatctcctggtgtgccgtttgctaagactgttggaaaagcrcagtattagggtgggagagacccaattttccaggtgctgtctgtcacccctttctttgactaggaaagggaattccctgagcccttgcgcttcccgggtgaggcgatgcctcatcctgcttcggctcacactcggtgtgctgcacccactgtcgtgcacccactatctgacacttcccagtgagttgaacccggtacctcagttggaaatgcagaaatcacccatcttctgcatcactcatgctgggagctgtagactggagctgttcctatttggccatctaatttaaaattctttagactcttctgaggtcacacctaaccaacaaactatgt

SEQ ID NO: 926858 - DNA, 675 bp, Homo sapiens
tgtgctgctataaagaatgacctgagactggagaatttattttatttttatttatttatttattttgagacggagtctctctctgtcgcccaggctggagtgcagtggcgtgatctcggctcactgcaagctccacctccggggttcacgccattctcctgcctcagcctcctgagtagctgtgactacaggcacccaccaccacacccggctaatttttttgtatttttggtagagatggggtttcactgtgttagtcaggatggtcttgatctcctgacctcgtgatccgcctgcctcggcctcccaaagtgctgggatgacaggcgtgagccactgcacccggccaagactggagaatttatgaagaaaagtggtttaattggctcgtggttctgcagcctgtacaggaagcatggtgctggcatctgcgtggcttcttgggaggcctcagraaacttataatcatggcagaaggcaaagaaggaggcacgtcttccatggctggagcaggagcaagagagattgctgggggaggtgccacacacttttaaacagccagatctcatgagaactcactcaccatgtggtatcaagtggggagggtgctaagccattcatgagaaccccaccctcacgatccaatcacctcccgccaggccctacctccagcac

SEQ ID NO: 926859 - DNA, 675 bp, Homo sapiens
tgtgctgctataaagaatgacctgagactggagaatttattttatttttatttatttatttattttgagacggagtctctctctgtcgcccaggctggagtgcagtggcgtgatctcggctcactgcaagctccacctccggggttcacgccattctcctgcctcagcctcctgagtagctgtgactacaggcacccaccaccacacccggctaatttttttgtatttttggtagagatggggtttcactgtgttagtcaggatggtcttgatctcctgacctcgtgatccgcctgcctcggcctcccaaagtgctgggatgacaggcgtgagccactgcacccggccaagactggagaatttatgaagaaaagtggtttaattggctcgtggttctgcagcctgtacaggaagcatggtgctggcatctgcgtggcttcttgggaggcctcagaaaacttataatcatggcagaaggcaaagaaggaggcaygtcttccatggctggagcaggagcaagagagattgctgggggaggtgccacacacttttaaacagccagatctcatgagaactcactcaccatgtggtatcaagtggggagggtgctaagccattcatgagaaccccaccctcacgatccaatcacctcccgccaggccctacctccagcac

SEQ ID NO: 926860 - DNA, 451 bp, Homo sapiens
agtttgaagccagcctggccaacatggcaaaacccggtgtctactaaaaatataaaaattggccaggcgtagtggcatgcgcctgtaatcccagctacccaagaggctgaggcaggagaatcactggaacgtgggaggcagaggctgcagcgagccaagatcccgccactgaactccagcctgggcaacagagcaagamtctatctcaaaaaatatatatacatatgtatatataatgtaatttataaaatgaaccagatcaccatataaaatatagataaatcccataaacacaatattgagtttttaaagaaactgaaaaagatatgtataatagatttaacagtgaaaatttttattatataaaataacatgttatttgtgggtatatacatgtgtagtaaaaatatagaaacatggttagagcacttttggatgagggaggaaagaa

SEQ ID NO: 926861 - DNA, 783 bp, Homo sapiens
tgggaggtaattgaatcatggggcccagtctttcccttgctattcttgtgatagtgaataagtctcatgagatctgaagggtttatcaggggtttctgcttttgctccttcctcattttctcttgccaccaccatgtgagaagtgcctttcacctcctgctatgattctaaggcctccccaaccatgtggaactgtaagtccaattaaacctcttttttttctcagtcttgggtacgtgtgtatcaacagcatgtaaacagaataatacagtaaactggtaccagaagtggggtgttgctgaaaagatatctgaaaatatggaagcaactttggaactgggtaacaggcagaggttagaacagtttggagggctcggaagaagacagaaaaatgtgggctggtttggaccttcctagagacttktttaatggctttgcccaaaaggctgatagcaatatggacaataaaatccaggctaaggtggtctcagatggagatgaggaacttgttgggaactggagcaaaggtgatttttgttatgttttagcaaagagactgggggcattttgcccccgccctagagagttgtggaactttgaacttgagagcgatgatttagggtatctggaggaagagatttctaagcagcaaagcattcaagaggtgacttgggttccattaaaggcactcagttttataaaggaaacagagcataaaagtttggaaaatttgcagcctgactatgtaatagaaaagaaaaactcaatttctggggaaaaatt

SEQ ID NO: 926862 - DNA, 611 bp, Homo sapiens
acagaacagtccacccaacaacagcagaatacacattattttcaagtggatatggaactttctctaggataggccatatcttcctctgcaaaaatatgtcctaatcatttttaaaagtttgaaatcatacaaaatataatttacaaccacaatggaagaaacaacagataaataaaaaatgaaaatgggaaaattcacaaatatgtggaaattaaacaatgtactcttaaactaccagtgagtgaaaggataaatcacaagtgaaattataaagtattttgagacaaattaaaataaaaataaarcataccaaaacttattgaatgcagtgaaagtagagttcaaaggaaaatgtatggatataaacaatcacattaaaaaaaaaatctcaaatcagtaacctcactgtgtacctaaaagcagtagaaaaaccagagaaaactaaatccaaagctagcagaaggaaagaaataataaagattagagtataaatcaataaaatagaaggttgaaaagcagtagaagaaataaacacagctaaaagttgattctttgaaaagatcaaacctttcactgtattgactgagcaaaagatggaagactttcatcac

SEQ ID NO: 926863 - DNA, 631 bp, Homo sapiens
tcaaccaataatgagatttatcaaaggtcagggccacctttgtaatgtccttctctgtcttgataaatctttattggtataaagtctgttttgtcagaaactagattgcaacacctgcttttttctgttttccatttgtttgaaagatttttctgcattcctttattttgagcctgtgtgtggcactgcaggtgagatgggtctcttgaagacagcatactcaaacgggtcttggttctttatccaccttgccccgctgtgtctttcagttgtagcatttagcccatttacatttaagtttagtaataatatatgtggatttgatcctgtcatcatgctgttagctggttattttgcagatttgtgtatgtggttgctttttagcatcactggtctgtgcacttcagtgggcttttgtagtggctggtaatggtcttttctttccatatttagtgcttccttcaggagctcttgtaaggcagatytggtggtaattaactccctcagcatttgcttgtctgaaaagaatcttatttctccctcacttatgacacttagtttagctggacatgaaattctggattggaatttcttttctttaagaagttgaatatctcttctggcttgtaag

SEQ ID NO: 926864 - DNA, 713 bp, Homo sapiens
agcagggcagggtgttgcctcacccgggaagcacaaggggtggggcgatttccctttcctagctaagggaagccatgacagactgtatgtggagaaacagtgcactcctgacaaaatactgcactattcccatagtcttagcaaccgtcagaccaggagataccctcccatgcctggttcggcaggtcccacacccacggagccttgctcactgctagtgcagcagtctgagatagacctgcracgctgcatcttgatgtggagatgggcgtctgcattgctgaggcttgagtagctcacagtgtaaacaaagaggcctggaagcacgaactgggtggagcacaccacagctcagcaaggcctactgcctctatagattctacctcttggggtagggcatagtagaacaaaaggcagcagtcagcttctgcagatttaaacgtcccgtctgacagctctgaagagagcagttgttctctcagcatggcattcgagctccgagaacagacagactgcctcctcaaatgagtccctgacccccgtgtagcctgactgggaaacacctcccagtaggggccgacagacacctcaaacaggcaggtgcccctctgggacgaagcttccagaggaaggatcaggcagcaatatttgctgttctgcagcctccactggtgatacctaggcaaacagggtctggagtggacctccagcaa

SEQ ID NO: 926865 - DNA, 562 bp, Homo sapiens
tgttagaattgttctatgttattagtagctattgttgttaatctcttaccgtgcctaatttataaactttattataaatatatatgtaaaggaaacacaatatgtatrgtgtcctgtactactgaagatttcaggtgtccactgaggatcttggaaggaatcccctgtggataagggtgcaccactgtaaatatgttcagctttgagggcaacatagtctctgtcacaactgctctacctgcaacagcgccagacaaatctggctaaactttaatccaacaaagttatgagttggtctgagccctcaggctgaaggtcatgtaaactgagcatgcccagatgaaccaagtatgcaaccacaaggggaacagaagtgcccagaccaaggagaagaccaaagagcagggactgaattaagaagcagacgcagtatggaaggatccaggatccaatcaaattgagctctggcatcagcccattgtggaatcgaatcagatcatgcctcctggcatcatctcattgcagaattcaatcagatcacacctcattaccctatgcttat

SEQ ID NO: 926866 - DNA, 656 bp, Homo sapiens
ttgaggtatcacagtgctgtgtttaaggagccctcattttacttaataatggcaccaaagcacaagaatagtgatgctggcttattgttagaattgttctatgttattagtagctattgttgttaatctcttaccgtgcctaatttataaactttattataaatatatatgtaaaggaaacacaatatgtatggtgtcctgtactactgaagatttcaggtrtccactgaggatcttggaaggaatcccctgtggataagggtgcaccactgtaaatatgttcagctttgagggcaacatagtctctgtcacaactgctctacctgcaacagcgccagacaaatctggctaaactttaatccaacaaagttatgagttggtctgagccctcaggctgaaggtcatgtaaactgagcatgcccagatgaaccaagtatgcaaccacaaggggaacagaagtgcccagaccaaggagaagaccaaagagcagggactgaattaagaagcagacgcagtatggaaggatccaggatccaatcaaattgagctctggcatcagcccattgtggaatcgaatcagatcatgcctcctggcatcatctcattgcagaattcaatcagatcacacctcattaccctatgcttataaaacccga

SEQ ID NO: 926867 - DNA, 612 bp, Homo sapiens
tgaggtatcacagtgctgtgtttaaggagccctcattttacttaataatggcaccaaagcacaagaatagtgatgctggcttattgttagaattgttctatgttattagtagctattgttgttaatctcttaccgtgcctaatttataaactttattataaatatatatgtaaaggaaacacaatatgtatggtgtcctgtactactgaagatttcaggtgtccactgaggatcttggaaggaatcccctgtggataagggtgcaccactgtaaatatgttcagctttgagggcaacatagtctctgtcacaactgctctacctgcaacagcgccagacaaatctggctaaactttaatccaacaaagttatgagttggtctgagccctcaggctgaaggtcatgtaaactgagcatgcccagatgaaccaagtatgcaaccacaaggggaasagaagtgcccagaccaaggagaagaccaaagagcagggactgaattaagaagcagacgcagtatggaaggatccaggatccaatcaaattgagctctggcatcagcccattgtggaatcgaatcagatcatgcctcctggcatcatctcattgcagaat

SEQ ID NO: 926868 - DNA, 562 bp, Homo sapiens
tgttagaattgttctatgttattagtagctattgttgttaatctcttaccgtgcctaatttataaactttattataaatatatatgtaaaggaaacacaatatgtatggtgtcctgtactactgaagatttcaggtgtccactgaggatcttggaaggaatcccctgtggataagggtgcaccactgtaaatatgttcagctttgagggcaacatagtctctgtcacaactgctctacctgcaacagcgccagacaaatctggctaaactttaatccaacaaagttatgagttggtctgagccctcaggctgaaggtcatgtaaactgagcatgcccagatgaaccaagtatgcaaccacaaggggaacagaagtgcccagaccaaggagaagaccaaagagcagggactgamttaagaagcagacgcagtatggaaggatccaggatccaatcaaattgagctctggcatcagcccattgtggaatcgaatcagatcatgcctcctggcatcatctcattgcagaattcaatcagatcacacctcattaccctatgcttat

SEQ ID NO: 926869 - DNA, 724 bp, Homo sapiens
aaggcagtttaaagcccgaaagctaagctacaagtcttggataaatccatggaccgagctgagaacatctcttcctgttggtgcactttcctctgactgatccccacccttcacttactttacatatatctacccttccctaggtggttttctacactgtcatgccacctttgaatggttcctttgttttagccttttttgtatactcgtaaaccaatcagcatgcagtccccacttctgagcccataaaagccccggacccagccacgctgagagagagaccacccaacttcaggtcagggaccacccttgcatcccctctccgctgagagctgtttcattgcttcataaaactcttctctgcccttttcacccttccattgtcagcaaagggtatgaagaaggcagtaacaccatagccctccacccctccccgactatctgtgcccagtggcagccccttgccatgagaggcagtgcagggccaggccagccagggagcctccggcaggagcaggcaacaggactgacagagttgttaacacamcccccattcattgttaacatgcccgtttgtcaggctgctgacggtgggactaaaagagctgttagcatggctgtaacatcccctctggggcttcagagtcgagtgctttcctgtttgggcgccaccaagttcccttcatctgcatgccagagttcacccccggagtcacttccgaca

SEQ ID NO: 926870 - DNA, 482 bp, Homo sapiens
tcaccattctttatgatcatagcaatattctggtgttcttttctaggaaaaccctgtgactttcatcatgtcattgcatatatagcacaagatcctcctaagtcttgtgactattcatttacctacaaaccaagagcttcatacaactttatgcattagggatctgtcatttcactgcagtttaatatagacaactgtgttctgctctctgtctttgaaagtattgatgctggaaatgtaactgaatcaagcagggtttttacttgcaagccacaaataccaattctggtgtatttgggcaaagaagakgttggttaaaaggttatcaggtagttcacgtaccctctaaaaggtctaaagaaccaggctgagcagtcatacagtgaggagcaatgtccaaagtcatatctagagctggttcagcaatgatgccaggctgcacacaggcacaacaccattggcatagcactgccacagctact

SEQ ID NO: 926871 - DNA, 551 bp, Homo sapiens
ctgagtgtggggcctgccgagcccatgcccacctggaacccacaccagcctgtgaacgcggcacacagctctggctcctgcccatgcctttccctccacacctccccgcgagcagacagagctggctctggccttggcctgccccagagaggggccctcatggtgcrgcagcaggctgaagggctccttgagtgtggccagagtggactccaaggccaaggagatgatgagagcaagcgagggctgctagcacattgtcacctctcaataagagccagttgtatctgtgtatgtggagtagagtattctctggatccccccttctgtcttttgttttcgtaattgagattttaaggtttagttagcccattcaacaatggcttggccttgagaatcatagggtattccagtactgtgctcagtgtgccattgttggaggaacacttgtaaagatttactacagtagcctgggccattgtctattttaatcttttgtgggatgcctatggcagcgaaacaggaaagtaaatgtttcttaatatgagctgctg

SEQ ID NO: 926872 - DNA, 551 bp, Homo sapiens
ctgagtgtggggcctgccgagcccatgcccacctggaacccacaccagcctgtgaacgcggcacacagctctggctcctgcccatgcctttccctccacacctccccgcgagcagacagagctggctctggccttggcctgccccagagaggggccctcatggtgcggcagcaggctgaagggctccttgagtgtggccasagtggactccaaggccaaggagatgatgagagcaagcgagggctgctagcacattgtcacctctcaataagagccagttgtatctgtgtatgtggagtagagtattctctggatccccccttctgtcttttgttttcgtaattgagattttaaggtttagttagcccattcaacaatggcttggccttgagaatcatagggtattccagtactgtgctcagtgtgccattgttggaggaacacttgtaaagatttactacagtagcctgggccattgtctattttaatcttttgtgggatgcctatggcagcgaaacaggaaagtaaatgtttcttaatatgagctgctg

SEQ ID NO: 926873 - DNA, 570 bp, Homo sapiens
accaccactacaaccgagatactgaaaagttccatcactcctcccaaatccccttgtactctcaagtcaatccatctgccctgtcctgcccttagcaacgactgatctgttctctttacctggttttgctttttccagaatgcaatgaaatggaatctgcagcatggagatgtttgagtctggcttctttcacttaacacaatgcctrtgggattcatccacgttattgagtttatcagtagttcattcttgttattgctgagtaatattccattgtacagatatacaacttatttatttatttgtttttgagacgggagtctcactccgtcacccaggctagagtgcagtggcaccatctcggctcactacaacctccacctctcgggttcaagcgattctcctgcctcagcctcccaagtagctgggattacaggtgcccgccaccacgcccggctaatttttgtatttttagtagagatgggattttgccatgttgcccagactggtctcgaactcttgaccttgtgatccacccgcctcagcctcccaaagggctgtgattacagg

SEQ ID NO: 926874 - DNA, 570 bp, Homo sapiens
accaccactacaaccgagatactgaaaagttccatcactcctcccaaatccccttgtactctcaagtcaatccatctgccctgtcctgcccttagcaacgactgatctgttctctttacctggttttgctttttccagaatgcaatgaaatggaatctgcagcatggagatgtttgagtctggcttctttcacttaacacaatgcctatgggattcatccacrttattgagtttatcagtagttcattcttgttattgctgagtaatattccattgtacagatatacaacttatttatttatttgtttttgagacgggagtctcactccgtcacccaggctagagtgcagtggcaccatctcggctcactacaacctccacctctcgggttcaagcgattctcctgcctcagcctcccaagtagctgggattacaggtgcccgccaccacgcccggctaatttttgtatttttagtagagatgggattttgccatgttgcccagactggtctcgaactcttgaccttgtgatccacccgcctcagcctcccaaagggctgtgattacagg

SEQ ID NO: 926875 - DNA, 601 bp, Homo sapiens
tacaagctggaaaagattgatggtgcgggggctatatttagcatcttcaaagaaaataaattccaatcaagaattatatatccagccaagctaagctttgtaagccaaggagaaataaaatcctttccagagaaacacatgctaagggaatttgttaccaccagacctgccttacaagaggtccttaagggagtgttgaaygtgggaacaaaagactgttaccagccaccacaaaaacacacttaagtacttagaccattgacactataaagcaactacacaatcaagtctatataaaaaccagctaacaacatgataacagggtcaaatccacacataaatattactgtaagtgtaaacaggctaaatatctcacttaaaagccacaaggtgggaatttggataaagaagcaagactcaactctatgtatgctgccttcaagagacccatctcacatgcaatgacacccattggctcaaagtaaaaggaaggagaaatatctatcaaacaaacagaaaacaaaaaaagagcaggggttgctattcttattttagacaaaacaaacattaaaccaagaataaaaaggacaaagaagggcat

SEQ ID NO: 926876 - DNA, 553 bp, Homo sapiens
caatcccagaaatgcatacatacccaaaggaatataaagcattataccatagagacatgtgtgcatatgttcatcacagcactattcacaatagcaaagacatggactcaatcttgatgcccaccaatggtggaccagatacagaaaatacggtacatatacactgttgaatacaaygcagccacaaaaaagacaaaattatatactttgcagcaatatgaatggagctggaggccattatcctaagtgaattaatgcaggaacagaaaaccaaatactacatgttctcacaagtgggagataaacattgagtacacatggacacaaagaagggaacaacagacaccaagggctacttgaggatggaggggtgggaggagggtgaggattgaaaaaactacctgttgggtactatgcttactacctgggtgataaaataatttgtacaccaaaccccaataacacacaatttactcatgtaacaaacctgcacctgtacctgctgaacctaaaataaaacttgaaaaaaacacagttgcctattgatggttta

SEQ ID NO: 926877 - DNA, 578 bp, Homo sapiens
tgaaagtagaactaccatttgactcagcaatcccagaaatgcatacatacccaaaggaatataaagcattataccatagagacatgtgtgcatatgttcatcacagcactattcacaatagcaaagacatggactcaatcttgatgcccaccaatggtggaccagatacagaaaatacggtacatatacactgttgaatacaacgcagccacaaaaaagacaaaattatatactttgcagcaatatgaatggagctggaggccattatcytaagtgaattaatgcaggaacagaaaaccaaatactacatgttctcacaagtgggagataaacattgagtacacatggacacaaagaagggaacaacagacaccaagggctacttgaggatggaggggtgggaggagggtgaggattgaaaaaactacctgttgggtactatgcttactacctgggtgataaaataatttgtacaccaaaccccaataacacacaatttactcatgtaacaaacctgcacctgtacctgctgaacctaaaataaaacttgaaaaaaacacagttgcctattgatggtt

SEQ ID NO: 926878 - DNA, 608 bp, Homo sapiens
atctgagaattgaaatctcctcctaggcctctgggtctgagatggcaggggctgctgcaaagggcagtacagaaggaaaatgtggggtgcacacccccgcacagagtccccactggggcgctgcctagtggagctgtgagaagagggccaacgtccttcagaccctagaaattgaaatttattttttaaatattttgtttcattttaagttccgggttacatgtgcaggacgtgcaggtttgttatataggtaaatgtgtgccatggtggtttcctgcacctgtcaacccatcacgtaggtattaagcccagcatgcattagctatttatcctgatgctctccatcctcccaccccwtgacggacaggccccagtatctgtttttcccctccaatgtgtccacgtgttttcattgtttagctcccacttgtaagtgagaacatgtggtgtttggctttctgttcccgtgttagtttgccgaggataatggcttccagctccatccatgtccctgcaaaggacatgatctcatttatttttatgactatagtattccatggtatatatgtacgacattttctttatccagtctatcattgatgggcatt

SEQ ID NO: 926879 - DNA, 724 bp, Homo sapiens
acaaagaagggctggtaccattcctacagaactatttcaaaaaattaaggggtaggaacttctccccaactcattctgtgaggccagcattatcttcataccaaaaccttgcagagacacacacaaaatagaaaacttcagatcaatatccttgatgaacattgatgcaaacatcctcaacaaaatacttgtaaacaatccagcagcacatgaaaaagctaatctaccacaatcaagtaggcttcatccctgggatgcaaggttgtttcaacatatgaaaatcaataaatgtgatttatcacttaaacagaactaaagacaaaaaccacatgattatctcaatagatgcagaaaaggcttttgataaaattcaacatccttcatgttgaaaactctcaataaactaggtattgaaggaacatacctcaaaacacaagagccatcartaacaacccacagccaacattatactgaatgggcaaaagctgaaagcattccctttgaaaactggtacaagacagggatgccctctctcaccacttctattcaacatagaattagaagtccttgccctggattttacaggttatgtatactggcagaatatttttggtgttgtaatttgggttgtgaagcagcagacagcactaaatagcaatgaccggtagataggctcttgcttagtcatgtggctcttttgtatttctgtgtgttcacagcagtg

SEQ ID NO: 926880 - DNA, 639 bp, Homo sapiens
aattgtaccattgtattaaacaattggtttgaatatagcttttaatcaagtatttgctaccaatttgaaggatgcatccatttatttagtttctctgaatttttaaaaacagctttaaatcagtaatgaatattaaattttatcagtttttttgcatctattgaaataattttgtgacttttttctttctctttaatttaatgctgtgatgtcctatatatatttccccctctatattaagccatccttacaatgttgggataaatgcttttattagtcagggtaagctactttctttgatgaaaactccaaattctcagtggctaaacacaaaaaaggcttatttcctgctcttgtgtcacttcagtgtttctggtgagggtgagaattttctggttttaaatataaagatagagagctcatactttaggcaaagaacaagaagggtctctggcaatgtttctgtracttcccttgactctagacacttccttgtgttgccttcatctcaggctgattctttcattgcaccaagatggcttctgggctcatttataggtatagtcttcctcattcacgtccaggtacatctcttcccacaatcatttaacaagtcctgatacctccattcaggtgaac

SEQ ID NO: 926881 - DNA, 451 bp, Homo sapiens
tagcttctatcctctaggactgtgtaagtgcactctgtgatgtgcacacaacaaagaaatcatctaaggacacatttctcggaatggatccctgttgttgagtagcacatgactgtacttcagatagttgtaggctaacagagatacttgggaagataaaacatgagaaaagaaaaatatttccaaaagaattattgagtcaccacacmatcatttccttcaggcactgttttaacaaatccagattagagatttggccctactactatggatttatcatggcttgatgctatctgtagcaatattttagaacctcagatgcacataagctaattacaatttttatttcttggcaagtatgacaattactgagacattgtctcttggctctgaacccaccctcttttttttttttctcaccctgtcttatggtgcggataaacccacccgt

SEQ ID NO: 926882 - DNA, 729 bp, Homo sapiens
ctggtggggacttggagaacctttatgtctagctaagggattgtaaatacaccaatctgcactctgtatctagctcaaggtttgtaaacacaccaatcagcaccctgtgtctagctcagggtttgtgaatgcaccawtctacactccgtatctagctactctggtggggacgtggagaacctttgtgtctagctctcagggattataaatacaccaatcagtgccctgtcaaaacagaccactcggctctaccaatcagcaggatgtgggtggggccagacaagagactaaaagcaggctgcctgagccagcagtggcaacccgcttgggtccccttccacactatggaagctttgttcttttgctctttgcaataaatcttgctactgctcactctttgggtccacgctgcctttatgagctgtaacactcaccgcgaaggtctgcagcttcactcctgagccagcgagaccacgaacccactgggaggaacaaactccggaaacgctgcctttaagaactgtaacactcaccacgagggtctgtggcttcattcttgaagtcagtgagaccaagaacccaccaactccagacacattttggcgaccacaaagggaccttcgcctatcgccaagcggtgagacaatcgccgagcggtgagaccatcgccaatcgccgagcagtgagaccattgcctatcactgagtaaatcgaggccatcaagctaca

SEQ ID NO: 926883 - DNA, 687 bp, Homo sapiens
accacgaacccactgggaggaacaaactccggaaacgctgcctttaagaactgtaacactcaccacgagggtctgtggcttcattcttgaagtcagtgagaccaagaacccaccaactccagacacattttggcgaccacaaagggaccttcgcctatcgccaagcggtgagacaatcgccgagcggtgagaccatcgccaatcgccgagcagtgagaccattgcctatcactgagyaaatcgaggccatcaagctacagatggtcttacaaatagaatcccaaaggagttcaactaacaacttctactgaggacccctggaccgacccactggcactttccctggcctagagacctcccctctggaggacactacaactccagggccccttcatcgccccatccagcaggaagtagctagagtggtcatcaggcaaattcccaacagcagttgggatgtcctgtttagaggggggattgagaggtgacagcgtgctggcagcccttgcagccctcgctcactctcggcgcctcctctgcctgggctcccactttggtggcacttgaggagcccttcagcccaccgctgcactgtgggagcccctttctgggctggccaaggccggagctggctccctcagcttgcagggaggtgtggagggagaggtgcgagcgggaaccggggct

SEQ ID NO: 926884 - DNA, 433 bp, Homo sapiens
ctattctaggtggttagaacttaaatatttcccagacctgtgtaaaatctaggaactatttatcttacaaattcacaacactttttttggtctagcctcatagggttctatcctcatgaggcagcataatagtcaacagtcatttaaatggaacccctaatgcgtatttttagagctctttatgcatttcccactttctgagtattcttcyctaaacatgtctggcacctcagcctccctgaactcttttctctgtcttcttgattcagccagtctgccatgctttatttggtatatcccccctacactgagctgcattaaagtctctaagcagagaacaaagactgtcgtagaactcacatcattcatttgccttctctcaggaatcagtcctctgatgtctattgaccactgcctaaaaaccactgcccta

SEQ ID NO: 926885 - DNA, 654 bp, Homo sapiens
cagggcagcaagtccttgggctgcacacagcagggaggccctggacctggcccaggaaaccatttttccctcctaggccttcaggcctgtgatgagaagggctgccacaaaggtctctgatattccctggaaacattgtcttcattgtcttagtgattaacatttggctccttgttaattatgcaaaattctgcarcaggtttgaatttctccctagaaaatggatttttcttttctgttgcattgtcaagctgcaaatttttcaaacttttttctctgcttttcttgagtgccttgccgcttagaaatttcttcctccagaaaccctaaatggtctctctcaagttcacattcctgggctctctagggcaggagcaaaatgccaccagtctctttgctaaaccataacaagagtaacctttgctccagttcccaacaagttcctcatctccatctgagaccacctcagcctggactatcactatcagcattttggtcaaagccattcaacaagtctctaggaagttccaaacattcccacatcttcatgtcttctgagccctccaagtatctaggagtttcaaactttcccacattttcctgtcttctagccctctaaactgtttcaacctctgcttgttacccacttccaaa

SEQ ID NO: 926886 - DNA, 841 bp, Homo sapiens
tggatatgtgtttgaaaactttgtgtggaagcttgaagaatttggacaaactctcagtaatttttattatgtactcaccaatgagatccagtgatgatgtttagtccagtcatgtttgttttttttttagtccagtcaatttttttcctgccctttgtaaaggcttccaaaaccaatcttttctccccttctcccttccttgccctttctctctctctctctctctctcttctttctttctttctttttttgagacggagtctctctctgtcgcccaggctggagtgcagtggcgtggttcaggagattcttctgcctcagcctcctcagtagctgggactacaggcacacaccaccacgcccagctaatttttgtatttttagtagagacagggttttatcatattggccaggytggtctcgaactcctgaccttatgatctgcctgcctcggcttcccaacctctccctttctttttcattatttccctctccttttcccttttcctttccctcttcctattttcccctttctctgccttctcctctgtgcctcttttcttcttactttctgcttctccataccttttctacatttatttacttattgttttatgcaatacatttgtcgttctagtaaaaagaccattaattgtgtaaaataaaaacaaacaatgattctacaatattaagcattatttttgtttatccccaaaaagtgaaagctggacttcaaacaatttgtttaaagggcagcactcatgagagtggcttggatccagacttcgctgagttattaccagaaaaaagaaacacaaaaactgaccaaaggcctagctaa

SEQ ID NO: 926887 - DNA, 841 bp, Homo sapiens
tggatatgtgtttgaaaactttgtgtggaagcttgaagaatttggacaaactctcagtaatttttattatgtactcaccaatgagatccagtgatgatgtttagtccagtcatgtttgttttttttttagtccagtcaatttttttcctgccctttgtaaaggcttccaaaaccaatcttttctccccttctcccttccttgccctttctctctctctctctctctctcttctttctttctttctttttttgagacggagtctctctctgtcgcccaggctggagtgcagtggcgtggttcaggagattcttctgcctcagcctcctcagtagctgggactacaggcacacaccaccacgcccagctaatttttgtatttttagtagagacagggttttatcatattggccaggctggtctcgaactcctgaccttatgatctgcctgcctcggcttcccaacctctccctttctttttcattatttccctctccttttcccttttcctttccctcttcctattttcccctttctctgccttctcctctgtgcctcttttcttcttactttctgcttctccataccttttctacmtttatttacttattgttttatgcaatacatttgtcgttctagtaaaaagaccattaattgtgtaaaataaaaacaaacaatgattctacaatattaagcattatttttgtttatccccaaaaagtgaaagctggacttcaaacaatttgtttaaagggcagcactcatgagagtggcttggatccagacttcgctgagttattaccagaaaaaagaaacacaaaaactgaccaaaggcctagctaa

SEQ ID NO: 926888 - DNA, 548 bp, Homo sapiens
agggtctggctctgtcacccaggctggagtgcagtggtacaatcacagctcatggcagcctctaactcctagcctcaagcgatcctctcactgtggcctcgcaaggtgctgggattacaggcctgaactgcgatgctggcctacaagagggtttaagatgtatgagagcagtggttacaagacgctgtagggaagagagcagagaggaaagggtkccctgataatagcagtgctctctccaccctgaggcccgtgatgcaaatgaagagggaaacttattactcacctcaggttagaaagcggagagtttcatcaattgatattccagggacttggcagtctgagatttatggacttaatatagtttattcttttgtggcgtcattggttgggaaagtgcaagattccatgttaatgaaactcaaagcaggaataataaaccacatcccacgaggaacgggggattgcccgttgagactccccctgcatgggccccaacaaaccccctgcttggggcagaacaacagtccttggggtgttataaacag

SEQ ID NO: 926889 - DNA, 660 bp, Homo sapiens
taaaatccatctcgggaggagccaagatggccgaataggaacagctctggtctacagctcccagcgtgagtgacacagaagacaggtgatttctgcatttccatctgaggtaccgggttcatctcactagggagtgccagacagtgggcgcaggtcagtgggtgcgcgcaccgtgcgcgagccgaagcagggcgaggcattgcctcactcgggaagtgcaaggggtcagtgagttccctttcctagtcaaagaaaggggtgacagaaggcacctggaaaatcgggtcactcccaaccaaatactgcgcttttccgacgggcttaaaaaacagcgcaccaggagattatatcccacacctggctcggagggtcctatgcccacggagtctcgctgattgctagcacagtagtctgagatcaaactgcaaggyggcagcgaggctgggggaggggtgcccgccattgcccaggcttgcttaggtaaacaaagcagccaggaagctggaactgggtggagcccaccacagctcaaggaggcctgcctgcctctgtaggctccacctctgggggcagggcacagacaaacaaaaagacagcagtaacctctgcacacttaaatgtccctgtctgacagctttgaagagagcagtggttctccca

SEQ ID NO: 926890 - DNA, 559 bp, Homo sapiens
aacacataagactatattcccgtttttaggaagtcacaatacaccttagttttatacactgttggttggcagaccaatacccattccctcttcctctcttaactaaaagagccttgattttgctttaggacagcaatgcatcaattaaaaatattgcttattccagactcacttacagctagtgatagctgcatgacctattatttcctggcagtgagacataagcacaagttaactaagtggacaactgagaaaaatatatttctttccagaaataaagggacatatttcctgttctccactttccaccctggactctttcaggtgtttcctgcctagaagtgcagcagccaccgtatgagcatgagaaagaaagccccacactatgccagggaggctgcaggagaattcagaaargagactgcgtactggaggcatcctggaactgacattccattctggatgactgtgtctgcatttatttttctacataagaaaaataaactcctacttgtttttatctttgcaatcagatccctgtcacatgcagccaaatgca

SEQ ID NO: 926891 - DNA, 554 bp, Homo sapiens
cccactgaattttttttgcacctttgtcaaaaataagcagtccatatatgtgtgggtctatttgtggcctgtattctttcccattttatctgtttgtctctcatgacattgataccacattgatattgtttagctgtgtcctcacccaaagctcatcttgaattgtactcccataattcccacatgttgtgggagggacccagtgggagataattgaatcacgggggtggtttcccccatactgttctcatggtattgaaaaagtctcacgagatctgatggtttttttaggggtttctgcttttgcrtcttcctcattctctctttgcttgttgccatccatggaagatgggactttctcctccttgccttctgctatgactatgaggcttccccagccatgtggaactgtaagtccagttaaacctctttcttttgtaaattgctgagtctcaggtatgtctttatcagcaatgtgaaaacagactaatatacacattgtcttaattactgcaatttttattcatttacttattcattagagatggggtctc

SEQ ID NO: 926892 - DNA, 619 bp, Homo sapiens
ccctttatttctttctcttgcctgatttccctggccagggcttccaatactatgttgaataggagtggtagaagagggcatccttgtcttgtgccagtcttcaaggagaatgcttccagcttttgccccttcaatataatgttggctgtgggtttgtcatatatagttcttattgttttgaggtatgtttcttcaatacctagtttattgagagtttataacataaattttatataaaacttttttttctgtatctatggaratgatcatgtgatttttattcttagttctgtttatgtgatgaatcacatgtattgattcgtgtaggttgaaccaattttgtatcccaggggtaaagcctacttgattgtggtggataagctttttgatgcactgctggatttggtttgccagtattttgttgaggatttttgcatcgatattcatcaatgatattaacctaaaattttctttttccatttgtctctgccaggttttgatatcaggatggtgctggcctcacagaatgagttgaggaggagtccctcctcctcaattttttggaatattttcataggaatagtgccagctcttctttgtacatctggtagaattcagc

SEQ ID NO: 926893 - DNA, 713 bp, Homo sapiens
gccccagacacagttgcttgacaatgtctcttagcgtgcaacccagtgtctgggatccattgaagtgttccaaaagcattatttatggaaacttgttaccatcgtcatcttcgtagttattatttttttaattgtggtcaaaaacaagtaacacatttgtaaccatttgtaagtgtgtagttcagaagtgttaactacatgtactttgtcgtagagcagatctctagaatttttttatcttgtgaagtggaaactctacacccactgaagaactccccagttccccttccccagcccctgttctactttctgttactgagtctatctactttagacacgtcatcaagtaagtggaatcgtgtggtctttgtcttttcgtgactggcttatctcactcagcataatgttcatctgtgcagtggcatacaacaagctttccctccattttaaggccaaataccatttccattgtgtatattcaccaygtctccagtatccattcctccatggatggacacttacattgccgtcacctcttggccattgtgagccatgctgcaatgaacgtgggtgtgccatcactattattttttaatatcaccatcgtgactgtcacctctgccagtcttcatttgggagactgtgcacctgtcttccaacctgagaaaaagcatggttggtttcaaaatgcccaatcatagggctgtaacaac

SEQ ID NO: 926894 - DNA, 570 bp, Homo sapiens
tggacaggtccatttgctgatctcatgagtacctcacactcagcacatgccagtcaaaacccagtcacgagattcccccagaaatctgatgctcctcccatagtctctatttcaggagaccaggtgcccaatcaccaccctaaaagtcattcttaacacttcatttgcctttsgcccttaatgctcacatccagtgaacagtggaattctgcagatcttatcttccaaatagtccatccacttctctcttcatgaagctagtactctaattcagtgcactgtcacatctcatcttgattaatccacaaccttatcactggttttccagcctccaaacctgtagtttttccactctgttcttctgttctctactaagcagccccagcaatctccctaaaacaaaaagctgaccaggtcattctcctattcaaaatccttcagtggcttccaaaacccttaacatgcattacaaaccctagatgacctgactcctgctttcctcttcatattaaatccctcatattctccatatcactctaggataaggccacactgaacggccttcagtaa

SEQ ID NO: 926895 - DNA, 763 bp, Homo sapiens
cagaccttatggttgtcttcccttgttccctaagaatcgctgttattctcttctttttcaaggtgcactgatttcatattgttgaaacacacgttttacaatcaatttgtacagttaacaaaattttcacaatggtcctgaggtgatgtacatcctcagcttatgaatataacaggattaagagattaaagtaaagacaggcataagaaattacaaaagcattatttgggaactgataaatgtccatgaaatcttcacaatttatgttcctctgccgtggctccagccagtccctccatttggggtccctgacttcccacaacaagaaataataagaggttaaggtggagaagagcaaggaagtccactttataaaggggtcaggaaaaagctctctgtggaagcaccatcttagctgagacctaaaggatggtctaatttggggaggtgcagaggaaaatcattccaggctgaagcagcaagtgcaaaggccctgttgtggagaaaggtttgaaagtccaaggaaacaaaggaggccagagtgtcygaaatagagtaggccaaggggaggagacaggagagggctggagaggcagcaggaacaggcagaagactcggggtctcgattttattatatgtgccatgggcaggaaaggcagagatgagactcaatggacaccttaagatcactgaagctgccaggtgggaaatggattgctgagcatggagagcaggtgcagaggaccagttaagaccagttagg

SEQ ID NO: 926896 - DNA, 604 bp, Homo sapiens
gaaatagctaagcaggtgtttgtaaacagggatgcagtaagccgcgagggaaagcgcaaagagaatgaaggtcaggcctggtgaaacgctgacctgtttgttagctgcagtaatcagagctgtccccccaaagaagcaagggaaggggggccttgggaaagaaactcagcttggctgtccgagtttgcagcgtaaccagtgtgcttattgtaaagaaataggacagtggaagaacaaatgccttcagctcaaaagaaaacaaggtgacttagagcaggaggccccggacaaggaggaaggggcccggctcaacatggcagaagggttattggactgagggagaccgggytaaagtgtccccaaagagcctctggtcagaatgacagtcgagggtggagacattgattttcttgtagataccggtgctgaacattcgctagtaactgccctggtcgcccccttatccagaaagactattaacgtcaccggagccacgggggtttcagcaaagcaagctttctgcttgcctgggacttgcagtgtaggaggacatcaagtgattcatcagtttttgtacatgcctgactgtcccttgcccttgttg

SEQ ID NO: 926897 - DNA, 727 bp, Homo sapiens
actgtggggccctggccgaggccggtggcctgcctctctctacaactagacggggtttctaaaggatggcccccctgttggaaggccttggcagcaactgccctgcgagtacaagaagcaaataagctgactcttgggcagaacctgaagagaaaggccgcccatgctgtggtgactttaatgaatactaaaggacatcattggctaacgaatgccagactcaccaagtaccaaattttgctctgtgaaaatccccgtataaccattgaaatttgtaacagcctacatcccgccaccttgctcccggtatcagagagccctgtcgagtctggttgtgtagaagtgttggacacaattgactctagcagacctgacctccagggccagccttggccatcagtagactgggaactatacrtggatgggagcagcttcttcaacccccaaggagagagaggtgcagggtatgcagtgataaccctggacactgttgttgaaggcagatcattgccccaggccacttcagcccagaaagctgaactcattgctttcattcgggccttagaactcagtgagtatgagactgtcaacatttacgctgactctcggtatgtcttttgaacccttcaagtacatggagcgtgatagaaagaaaagggcctattgaactctgggggaaaaggcataaaatatcaacaggaaatcttgcaatgattagaaacagtat

SEQ ID NO: 926898 - DNA, 733 bp, Homo sapiens
ttttgctctgtgaaaatccccgtataaccattgaaatttgtaacagcctacatcccgccaccttgctcccggtatcagagagccctgtcgagtctggttgtgtagaagtgttggacacaattgactctagcagacctgacctccagggccagccttggccatcagtagactgggaactatacgtggatgggagcagcttcttcaacccccaaggagagagaggtgcagggtatgcagtgataaccctggacactgttgttgaaggcagatcattgccccaggccacttcagcccagaaagctgaactcattgctttcattcgggccttagaactcagtgagtatgagactgtcaacatttacgctgactctcggtatgtcttttgaacccttcaagtrcatggagcgtgatagaaagaaaagggcctattgaactctgggggaaaaggcataaaatatcaacaggaaatcttgcaatgattagaaacagtatggaaaccccacaaggtggcagttatatattgcagaggacaccagcgagcttccaccttgctgggtttggggaattcccgcgctgactcagaggctcgaaaagcagcatctgcccccttctgggcatcagtgctccctcaagcacctgatcttggacctacttcttctaaagaagaaaaggactttctccaagtagagggaaggacaagtgatggaggaaggatggattcggttaccagatg

SEQ ID NO: 926899 - DNA, 488 bp, Homo sapiens
aaaaatgtgcttggatgggcttggcaaactttagccattagctcacgtaccactttggaagggcatacctttagtcacttcaccctttaatccctttgctcaagactaaagttccgagaggaagtctaattgactgagttgtgtccatgtgggcagtgcaggaaagggtgcaaygggaggcggctccagggacgtctttggcttccatcatgggggagcaagcgcctggattatccaccctaacaaatctggacaaaggaaaacgaggttctctgaggaaggagacatagagcccaaggagctaaccaagagactaatagtcatcctgtcttgtcattttcttttacacatgtgtgtgcattatcttacacttatcactttgttttctttctctcctttaattgcaccctgttgccaaaagttaaaataaaatgaaagtattgagatagctcagtaactgacttttggtcaattgccttttcatatag

SEQ ID NO: 926900 - DNA, 531 bp, Homo sapiens
ctaagcaagcctgggcaatggcgggcacccctcccccagccttgctgctgccttgcagtttcatctcagactgctgtgctagcaatcagtgagactccatgagcataggaccctccaagtcatgtgcgggatataaactcctggtgcgccattttttaagcccgtcgtctgtcacccctttctttgagtaggaaagggaactccctgactccttgcacttcccgagtgaggcaatgcctcgccctgcttcagctcacgcacagtgtgctgcacccactgtcctgcgcccactgtctggcactccctagtgagatgaacccagtacctcagatggaaatgcagaaatcacccatcttctgcgtygctcacactgggagctgtagaccagagctgttcctattcggccatcttggctgccaccattgttattgttgttaagatatttatgtttctttcacattctggatattaattccctgtcagatgagtgtttgcaaatatgttctcccattctgtaggttgtcttttcat

SEQ ID NO: 926901 - DNA, 576 bp, Homo sapiens
tgttttttggtctcaatttcatgtagttctgatctgatcttttttatttctttcctcctgctaggttggggttcttagcttggggtcctgccagcttggtttgttcttattttttaaactcctttaggtgtaacatttggttgttaacttgagatctttctatctttttgatgtgggtatttagtgctataaattttcttcttaacactgcttttgctaygtctcagaggctttggtatgttgtgtctttattttaatttgttaatttttgttgatttctgaattaattgtgttgtttacctaaaagtcattcaggagcaagttgtttagtttccctgtacttgtgtggttttgaaagttcctcttggattgatttctaattttattccactgtggtccaagaagatgcttgatatgattttgatttttcttgaatttattgagacttgctttattaccaagcatataatcagttttatttgtgtattttttaatttttaattttttgggtacatagtaggtgtacatatttatagggtacgtgagacattttgatacagacatgcaatgtgtaat

SEQ ID NO: 926902 - DNA, 675 bp, Homo sapiens
cagggaatctagcctccccacctggtctccactgacatcatggggggcaggaaggggtgaatttccagctagcaggaatgaaagtccaggctccttacttggcgttctctgataccatctagctggaatgttggggtgtcccactatagccccatgagagtggaagcccaggctcccaatttaatctttttcggcatcagtggtgtggcagggccatagttttttctgcggtgtttagctggggtgaagtatctattggctaaaggctttctgtctttctaggctgactctttctgatcctttggctacagagagaagattttgttgggattttttttgtgtgtctgtgcctactgtcatttctggattaccagcctttccaactctaagtatggggtwtatgaggcagaaaaaaactcgagaactgaccacagtgtctttgcttgggtcctgagtcccaacaattagcctagcttatctgtccttttctctctgccttgcagattcttctcatgtttgttttacatacaatgtctagagtttttagttgtcactgggagtaatgggaaaaagcttatctactccatcttcctggaagcagaaatcttcacatcttttaaaaacatttttatttcctctctttatgactctaaatcagatgttgggctccctgca

SEQ ID NO: 926903 - DNA, 600 bp, Homo sapiens
tccccagcagggaatgcttcactttatgaaaacaatgcctgtcatgcttctgggccctgtgagagataaatcatctccccatgagacatcaagctgccaaataaccagaactgggtatcacgagccaggtcctaggcgactcactgagttatagcattgggcacacccagttttactctgcagtgagttagaattggtccatctgggaccgagcctgagtagaggcagaaggacaggtaaggaacatgagtgggtcatgcagaaacccacagccctgtcattgtgccatcagcaccccccactcagcccatgyctctggctgtttgggacagtgccctataaccagttgaaggaagaggaaaaagcctgagattggttttggtatcagttgtgactccttagatcacctccttagatgtgactgcaaactggaattgatagcctcactcaggggtggccttgaaagacagtggtgagagaaaattatcccaaagggctgaagttcaggtacagcctctggtcatctacattgcatgggaggagaagaggcctgaggctatgtattagtccgttttcatgctgctgataaaaatataccca

SEQ ID NO: 926904 - DNA, 622 bp, Homo sapiens
ccatccttagcgtaaggtaacactatttcaatagagaaatttgaaaccatttgtgcactgaagataactatagcaacagcttctgactagattgactcaaacccacacaccaatagcttagcggaagaagcatgcctatttctagacgtaaatactatttacccctgtccctgctgttctacacagactgcctggtgttcaatcaaaacttaagagacacgtacacaaaaagcacataaaaacaacctatagtaaggatacagattaacgaacaaaactagactccgaggtgacccagacattgtaactgtcaaacaaaaattttaaattatttgattgctatgtcaaaggctctgataggaagctggacaatatccacgayagatagagaatttcagccgcaagaattaagctataagaaagaatcaaactgaaatgctagaagtaaaaagaaaatacaataacaaatatgaagaatgtcttttataggcttattagcacattcaacatagctaagggaaaaaatcagtgaatgtgaagatagataaagagatatcatgcaaaaagaaaaacaaaggaaaaagaagtacaaactaaaggcatgacagcttatccaagagct

SEQ ID NO: 926905 - DNA, 599 bp, Homo sapiens
atcaatccaggaggttgaacatcttactaataaaaattttcaaagagatcagagaaaataaaggggaggacatttttgcagaaaaaaaatgccagagtatttcctagaatggaggtacacaagttttctctgagtaataagtaaaaaaagaaattttaaaagttcaaagccccaaagcaaagtacacatatcactgtgaaattcagaacaaaagaaaatctgaaatgcttctgtagagggaaaaaaaatatgtatatatttccatgtatatatatatggaaatatgaatggcatttgggcttttcaacaggaacatagggagctatgaaaatggtacaattacttcaaaattctaagggaaaatgactgacactttaaacatctatagccatccagattgtaaawcaagtgtgagcatacagcaaacatttgttttaacatgctaagtttcaaaaatacaatttcgacttactttacttcttctcaggaagctactggaggaagtatttcaacaaaactgaggggtaaaccaaggaacagagaaaccactgcaggggtggggtgaagggaacaccaaggatcatggctcatggatgtct

SEQ ID NO: 926906 - DNA, 563 bp, Homo sapiens
tatgttagccaggatggtctcgatctcctgatctcatgatccgcccacctccgcttcccaaagtgctgggattacaggcgtgagccatcgcgcccggcctttttttttctttttttgagagggagtctcgctctgttactcaggctggagaacagtggtgcgatctcagctcactgcaaccttcgcctcccaggttcaagggattctcttgcctcagcctcctgagtagctgtgattacaggygcacactatcatgcctagctagtttttgtatttttagtagagatgcagtttctccatgtcagctaggctggtctcaaactcctgacagcaggtgatccacctgcctcagcctcccaaagtgctgggatgacaggcatgagccaaagcgcctggcccataaaatatttttagtgtattttagtgcatcagaaaactaccatgccagtgaggatttgcaggactaagaccaaagacacaaaagaaactcagaaatgtgagcaaatttggcatgacatttggctctacctttttgctcaaggcattttccagtctgcaagtgg

SEQ ID NO: 926907 - DNA, 559 bp, Homo sapiens
gcttcagcagacttaaatgttcctgcctgctggctctgaagagagcagcagatctcccagcacagtgctcaagctctgctaagggatagactgtctcctcaagtgggtccctgacccctgcacctcctgatggggagacacctctcagtaggggctgacagacacttcatacaggagagttctggctggcatctggcaggtgcccctctgggaygaagcttccagaggaaggaacaggcagcaatctttgctgttctgcagcatctgctggtgatactcaggcaaaccaggcctggagtggacatccagcaaactccagcagacctgcagcagaggagcctgactattagaaggaaaattaacaaacagagaggaataacatcaacatcaacaaaaaggatgtccacacagaaaccccggaaaccccacttgaaggtcatcaaaagaccatcaaagaccagaggtagataaattcacaaagatgtggaaaaaccagcacaaaaaggctgaaaattccaaaaaccagaacacctcttcacctgcaaagtgtcacaactcc

SEQ ID NO: 926908 - DNA, 550 bp, Homo sapiens
agacagcaacaaatgtggtcgatattaatccaattgtcatcattaatccatcatcatcataaatagcaatagcttaaatgcaccaatgaaaaaccagagattgtcagagtggattagaaaatcacccaactatatgctatctgcaaaaaaagaaaaaagaacttattttaaatataaaaatgcatacagattaaaaagtaaggagataaagatgtaccatgctaacgctaatcaaacaaacgtaagcttgagtagctgtactgatttcaggcaaaacatacttcagagcaaagaaaattctcaggaataaagaatggcattacataatgataaaaagatcaggtccttaagaagacacaaacatttttatagtgyatgcagttaacaagagagcatcaaaatacatgaggcaaaaactgatagaactgcaaagagaaatacatgaacatactattacagttgtagtcttcaacaccactctatcagaagtacacagatccaacaggaagaaaatcagtaaagacgtagctgaactcaacagcagcagcaa

SEQ ID NO: 926909 - DNA, 562 bp, Homo sapiens
ctggagggacaaaacttgtacttcaaagcgttccaaagagaaaggacttcagtaaaaactctgggatatcattaagtaccagtgaagtagtggactatatcgtaggaataaagggtaactaaaaataaaccaatcttcatgaagaccggaaatagctatgaattaattcaaccccagagctgattaagattatttgcgtatatgcaaaatactagtagaagcaaaagtaaaccctctctggagyacaacaatattcacagcctcaaattatatatagaatatttcatacctatattcaacagaacataagcatagcaagagatttgagcagattaaaacaataaatatcaaaattagaaacaaatgcattgaagttatatgatataaactttaattttcaatctagctttgaccaatatgtttgacatattggaagacaagctacatatttcagcagacaactggaatatatagtttatatatctatacccatatttatacatatattaattaaaaagaaaaatctacacataaaatacagtaagagaaataaatatatcaa

SEQ ID NO: 926910 - DNA, 562 bp, Homo sapiens
ctggagggacaaaacttgtacttcaaagcgttccaaagagaaaggacttcagtaaaaactctgggatatcattaagtaccagtgaagtagtggactatatcgtaggaataaagggtaactaaaaataaaccaatcttcatgaagaccggaaatagctatgaattaattcaaccccagagctgattaagattatttgcgtatatgcaaaatactagtagaagcaaaagtaaaccctctctggagcacaacaatattcacagcctcaaattatatayagaatatttcatacctatattcaacagaacataagcatagcaagagatttgagcagattaaaacaataaatatcaaaattagaaacaaatgcattgaagttatatgatataaactttaattttcaatctagctttgaccaatatgtttgacatattggaagacaagctacatatttcagcagacaactggaatatatagtttatatatctatacccatatttatacatatattaattaaaaagaaaaatctacacataaaatacagtaagagaaataaatatatcaa

SEQ ID NO: 926911 - DNA, 418 bp, Homo sapiens
agcccttgtgttctgttacaggaattgtcagtcttaggaagcttttgggtaggacatcttgagcctgattcttatgagttgagagaccaggcatggtgactcacgcctattaccccagcactttggaggctgaggcagsaggatcacttgagcccaggagttcaaacctgagcaacatagtaagaccccgtctctacacaaaaacaaaaaattagccagacatgatgacacgtgcctgtagtcccagctattcggatggctgaggtgggaggatctcttgagcctgggaagtcgaggctgcagtgagttgtgattatgctattgtactccagcctgggtgacagagcaagaccctgtctctaaaaaaaataaaagatagaaaaagagatgtaaaagagagaattttttttgtattttt

SEQ ID NO: 926912 - DNA, 605 bp, Homo sapiens
tagagaaatgcaaatcaaaactacattgaaatatcatctaaccccagttaaaatggtctttatccaaaagacaggcaacaacaaatgctgaagaggatgtagcaaaaagggaacccttgtacagtgttggtgggaatcaaaactagtataaccactgtggataacagtttggaaattccccaaaaattgaaaaatagagctattatgtgatccaacaaccccactcctgggtatatacccaaaagaaagagaacagtttggaagttccccaaaaaatgaaaaatagagacattatatgatccagcaactccactcctgggtatatacccaaaagaaaggaaatcagaatattgaaaagacatttgcactcccatgtttgttatagcactgttcataagasccatgatttggaagcaacctaagcatccatcaatagatgaatggataaagacaatgtgatacatatacacaatggagtgctattcagccattaaaaaagaatgagatcccatcatctgcaacaacatggatgaaactggaggtcattatgttaagtgaaataagccaggcacagaaagacaaatttgatgtgtcctcactgattt

SEQ ID NO: 926913 - DNA, 603 bp, Homo sapiens
attgcagacttgctatttaggcacttaggaatttttcactagaaggcatgtaaataaagaccatgggcatttgtaatgaatttagcattcattctttgactacatgactgtccccagagctgtaactttattgaattttttagaagccatttagctagcaactgagcctaaccagccactcactgtcattattcagtgctcttttattattgtctatttctcctccaacttggctacactcataaagtgataaaaacttgcatttgttttctttccttgtcagagacagcgtcttgctctgttgctcaggctacagtacagtgacatgatcatggttcactgtagcctcaaactcctgggctcaagcggttctctyacttcagtctcccaagtagctgggactacagacatgtgccaccatgtccagctaattttttatcatagagacgggatcttgccacgttgctccgactgggctcaaaactcctgacctcaagtggtcctccttcctcagcctcccaaagtgctgggattacaggcaggcatgaccacctgtgcccagccccctattattattattttaaataatagctttattaaaat

SEQ ID NO: 926914 - DNA, 558 bp, Homo sapiens
agcaaggagctggttattgggctgtccaggcctcccaagcagcacagaaatgaggtgaaggagttttcctgctgctccactctgtaaggagttggagggtgatgtttactcgtttgcagagagagatgccttgtaggcactcaggatgatccctgattccaatgtcctttttttctttagaaacaggaccttgccctgtcactcaggatggagttcaatggtcctatcatggytcattatagccttaaactcccaggctcaagcaatcctaccatgtcagccttcccagtagctgggactacaggtaagcatcgtgacactcagtgaattttgtttttattttgttgtagagatgggacctcagtatgttgccacggctgaccttgaactcctgcactcaagggattttcctgccctggcctcccaaagtattggtattacaggcatgagccattgtgcccaccgtctctggttcttaaccttctgcctccctcttccagttttaaagaatgcttgtaattacatgggctctcctagatactccaggataatcttgtt

SEQ ID NO: 926915 - DNA, 599 bp, Homo sapiens
ggtggtgaggactgattagggaattagttatacagatatatgtacatttttcaaaactcatcaaattgttcattaagatctgataaatggctaactagaataaccaatgcagagaagtccttaaaggaccggatggagctgaaaaccaaggcacgagaactacgtgatgaatgcacaagcctcagtagccgattcratcaactggaagaaagggtatcagtgatggaagatcaaatgaatgaaatgaagtgagaagagacgtttagagaaaaaagaataaaaagaaacgaacaaagcctccaagaaatatgggactatgtgaaaagaccaaatctatgtctgactggtgtacctgaaagtgacagggagaatagaaccaagttggaaaacactctgcaggatattatacaggagaacttccccaatctagcaaggcaggccaacattcaaattcaggaaatacagagaatgccacaaagatactcctcgagaagagcaactccaagacacataattgtcagattcaccgaagttaaaatgaaggaaaaaatgttaaggacagccagagagaaaggttgggttacccacaaagggaagcc

SEQ ID NO: 926916 - DNA, 767 bp, Homo sapiens
aagtgggtgcaggtcagtgggtgcagtgcaccgcgcatgagccaaagcagggtgaggcatcgcttcacctgggaagtgcaaggggtcagggaattccctttcctagtcaaagaaaggggtgacagatggcacctggaaaatcaggtcactcccaccttaatgctgcacttttccaacggtcttagcaaatggcacaccaggagattatatcctgcacatggctccgagggtcctatgcccacggagccttgctcattgctagcacagcagtctgagatcaaactgcaaggcggcagcaaggctgggggatgggcgcccaccattgyccaggcttgaataggtaaacaaagcttccaggaagctcaaactgggtggaacccaccacagctcaaggaggcctgcctgcctcagtagactccacctctgggggcagggcacagccaaacaaaaggagcagaatcttctgcagactaaaatgtccctgtctgacagctttgaagagagcagtggttctcccagcacagagctggagatctgagaatggacagactgcctcctcaagtgggtccctgacccctgagtagcctaactgggaggcaccccccagtaggggcagactgacacctcacacagccaggtactcctctgagacaaaacttccagaggaacgatcaggcagcaacatttgctgttcaccaatatccactgttctgcagcctctgctgctgatacccaggcaaacagggtctggagtggacctccagcaa

SEQ ID NO: 926917 - DNA, 579 bp, Homo sapiens
ctgcctcagcctcccaagtagctggaattacaggcatgcaccaccatgcccagctaattttgtattttttagtagagacggggtttctccatgttggtcaggctggtctcaaactcctgacctcaggtgatctgcccgcctcagcctcccgaaatgctgggattttaggcatgagctaccacgcccggccacgaagccctgtctcttaaaaaaaaaaaaacaagaacacacacacaaaaccaggtgctttgggaatttttagggagagtctracattcttcttcagtgtttctgacagttttgcggcttccttccatattctacgtggaaaacccccatttcacgggaaaccccaattcaagttgaccagcatgtttccatacaagtttgtaaatatccaagagtttgatgtgctcaagtttagccaaaaatgtaccaggttttataatgtgtcaagtcacatgtctggactagagtgaggtctctttgacaggtaggatcagtggtggctgtaccaagcacacctgctaagaaacctgtctccaggtgatagaggaggctgaacggaaacctagcgtc

SEQ ID NO: 926918 - DNA, 611 bp, Homo sapiens
attccaggccgggtacagtggctcacacctgtaatcccagcactttgggaggccaaggcagggggatcacttgaggtcaggagttcgtgaccagcctagccaacacggtggaaccccatctctactaaaaatacaaaaattagctgggtgtggtggcgcatgcctgtaatcacagctactcgggaggctgagacaggagaatcacttgaacctgggaggtggaggttgcastgagctgagatcgagctactgcactgcagcctgggcgacaagagtgaaactccatctccaaaaaaacaaaaattattccaccttgtatatagtataaaaaccgtataatagtatacagttatgtgttgcaggaagtcagggaccccaaatggagggaccggctgaagccatggcagaagaacgtggattgtgaagatttcatggacatttattagttccccaaattaatacttttataatttcttatgcctgtctttactgcaatctctaaacataaattgtgaagatttcatggacacttatcacctccccaatcaatacccttgtgatttcctatgcctgtgtttactttaatctcttaatcctgtcagctgaggaag

SEQ ID NO: 926919 - DNA, 611 bp, Homo sapiens
attccaggccgggtacagtggctcacacctgtaatcccagcactttgggaggccaaggcagggggatcacttgaggtcaggagttcgtgaccagcctagccaacacggtggaaccccatctctactaaaaatacaaaaattagctgggtgtggtggcgcatgcctgtaatcacagctactcgggaggctgagacaggagaatcacttgaacctgggaggtggaggttgcactgagctgagatcgagctactgcactgcagcctgggcgacaagagtgaaactccatctccaaaaaaacaaaaattattccaccttgtatatagtataaaaaccgtataatagtatacagttatgtgttgcaggaagtcagggaccccaaatggagggaccggctgaagccatggcagaagaacgtggattgtgaagatttcatggasatttattagttccccaaattaatacttttataatttcttatgcctgtctttactgcaatctctaaacataaattgtgaagatttcatggacacttatcacctccccaatcaatacccttgtgatttcctatgcctgtgtttactttaatctcttaatcctgtcagctgaggaag

SEQ ID NO: 926920 - DNA, 615 bp, Homo sapiens
ctgccctcctactgtactgacatatacctgcacgtgcgccccaacacacatgctcgaccgtgatgagcaatactgtgcacggagctgtgcttctttgtatattctaccttcataagtttgtttaaaaataagcaaaagagtaaggtagagaggctttggtgagaaaccgaaagcgtggagagaaaggtgagctctaccccaaaatttcccaagcgcctgcagaacaaggaccgtctcctgctgaagtggagtcctcagggccttgatagacacaagcccagagcagagaagcagcaaaggtttgctgagaccaacaggatcatatggcagaacatctgcccctttctttgagagtggatggacaggtagaatcaagagaggctggaagagaaagatgccactttttattttcaggtttgctgtattaaaygaagacagaccagaagataaagtcacaacagcagttcggaccagcttcaccatccagagacacaggacgctcagtacaaacctggcagttctggtccctgccctggcggcccctggctctgtgagctctgagaagagagcagggcaaagccatagggtttcagaagtgctgcgagctgctaacgc

SEQ ID NO: 926921 - DNA, 587 bp, Homo sapiens
agaggtggctcttttaatatcttggatctcaaatattgttaaacattgtaaaaacttttggaattttttatagatacagatttcagaaccccactgtcagagatccctattcagtaggtcttaactagagtaatctgactcctgtaagagcagcatagcaatttgataattaacctgccagagatttaaatgcaggttatttcaaaagtaaacaaaggatacagaaaacaagtctgattaattccaaaaatatctcaagaaaagaagccaatacaagtgttagtaaatgtttcttattgagaacatgtgtastatggaatcttgctactcaaagtggcattgggtcagaaaaccagtaacatctgctgaccagaaagaatgttggaaatgcaaagttttaagccccacagaatcaaaatctgcattttaatcagacccccagggtacacattacattttttaaagaaacactgaaataaaagcaacagaagagttacatttgctctattcattttgcttttgatctggaaaatatgttgtcctataaggttatttctacagagaaataatctctatcattatatatg

SEQ ID NO: 926922 - DNA, 587 bp, Homo sapiens
agaggtggctcttttaatatcttggatctcaaatattgttaaacattgtaaaaacttttggaattttttatagatacagatttcagaaccccactgtcagagatccctattcagtaggtcttaactagagtaatctgactcctgtaagagcagcatagcaatttgataattaacctgccagagatttaaatgcaggttatttcaaaagtaaacaaaggatacagaaaacaagtctgattaattccaaaaatatctcaagaaaagaagccaatacaagtgttagtaaatgtttcttattgagaacatgtgtagtatggaatcttgctactcaaagtggcattgggtcagaaaaccagtaacatctgctgaccagmaagaatgttggaaatgcaaagttttaagccccacagaatcaaaatctgcattttaatcagacccccagggtacacattacattttttaaagaaacactgaaataaaagcaacagaagagttacatttgctctattcattttgcttttgatctggaaaatatgttgtcctataaggttatttctacagagaaataatctctatcattatatatg

SEQ ID NO: 926923 - DNA, 731 bp, Homo sapiens
atagagcgctgttttgtaaaggaaatagtagctctcagcttgctaggcaagtctctccctcacaaaggcaaggggaagttaggcacatacagaaattgatgggttactttgagtcctcctaatgagcaggtccacagtaggcagaaaacctgcttggcagagaccctgttgctccgattatatcaatggttttcttaaataagggggccgctggggtggttactactgagtgttcggcactggtatcgaccaraaattcaatgtccttactccttattgtcatcctgaccatgggctccttgggggcatttgagcccagtccccttcactgtagtagccctttggccagattgaacaaagtcccttcgtctttatctgtggtcttttgctctgcatctccttgcttctcatttagttggggacatttatctttccaatgtcctatttctttacagtaggcacattgattatgctgcagatgggagtgattggactgggcattcatcccggaatccccctttccctgtccctagggggagattcccctaattgctgcagccagcaaatcaatgttccacctggcctggcgttcgccctccttatggctttcttggcagcttgttgatctctatttatgaatacttgattagctatctccagtaactgcgaggtattcattcctgcaaaaccagccgttttttttttataatttcctttggatatcttccgca

SEQ ID NO: 926924 - DNA, 564 bp, Homo sapiens
aaatagtagctctcagcttgctaggcaagtctctccctcacaaaggcaaggggaagttaggcacatacagaaattgatgggttactttgagtcctcctaatgagcaggtccacagtaggcagaaaacctgcttggcagagaccctgttgctccgattatatcaatggttttcttaaataagggggccgctggggtggttactactgagtgttcggcactggtatcgaccaaaaattcaatgtccttactccttattgtcatcctgaccatgggctccttgggggcatttgagcccagtccccttcactgtagtagccctttggccagattgaacaaagtcccttcgtctttatctgtggtcttttgctctgcatmtccttgcttctcatttagttggggacatttatctttccaatgtcctatttctttacagtaggcacattgattatgctgcagatgggagtgattggactgggcattcatcccggaatccccctttccctgtccctagggggagattcccctaattgctgcagccagcaaatcaatgttccacctggcctg

SEQ ID NO: 926925 - DNA, 560 bp, Homo sapiens
tgtgtttggagtttcttccttctggtgggttcgccttcttaaggcggcgcttctggagttgttcattcctcccagtggattcgtggtctcgctggcttcaggagtgaagctgcagaccttcgtggtgggtgttacagctcacaaaggcagtgtgaacccaaagagtgagcagcagcaagattattgcaaagagagaaagaacaaagctcccacagtgtggaaggggacccgagcgggttgcctctgctkgctcgggcagcctgcttttattctcttatttggccccacccacatcctgctgattggtaaagcccagtggtctgttttgacagggcgctgattggtgtgtttacaatccctgagctagacacaaaggttctccacgtccccaccagattagctagatagagtgtggactggtgcattcacaaaccctgagctagacacagggtgctgattggtgtgtttacaaaccttgagctagatacagagtgctgactggtgtatttacaaccccttagctagacataaaggttctccatgtccccaccagactcaag

SEQ ID NO: 926926 - DNA, 560 bp, Homo sapiens
tgtgtttggagtttcttccttctggtgggttcgccttcttaaggcggcgcttctggagttgttcattcctcccagtggattcgtggtctcgctggcttcaggagtgaagctgcagaccttcgtggtgggtgttacagctcacaaaggcagtgtgaacccaaagagtgagcagcagcaagattattgcaaagagagaaagaacaaagctcccacagtgtggaaggggacccgagcgggttgcctctgcttgctcgggcagcctgcttttattctcttatttggccccacccacwtcctgctgattggtaaagcccagtggtctgttttgacagggcgctgattggtgtgtttacaatccctgagctagacacaaaggttctccacgtccccaccagattagctagatagagtgtggactggtgcattcacaaaccctgagctagacacagggtgctgattggtgtgtttacaaaccttgagctagatacagagtgctgactggtgtatttacaaccccttagctagacataaaggttctccatgtccccaccagactcaag

SEQ ID NO: 926927 - DNA, 557 bp, Homo sapiens
gcctgaagagacagaatttgtgaggctcaagaagggacaggccgggcgcagtggctcacgcctgtaatcccagcactttgggaggccaaggcgggcggatcatgaggtcaggagatcgagaccatcctggctaacacggtgaaaccccgtctctactaaaaatacaaaaaattagccgggcctggtggcgggcgcctgtagttccagctactcaggaggctgaggcargagaatggcgtgaacctgggaggcggagcttgcactgagccgagatcgtgccactgcactccagcctgggcgacagagcaagactccatctcaaataaataaataaataaataaataaataaataaaagaagggactgcagggctgggactgcattatcctaagagaagtggtatgcctggggcacctgacgagggccacatgtaagacaggattgtagagaaaaggagaacattcacataagacagcacacaaaaggcagcacagaaacatatcgtcgcctttgtgaattttataaaaaccaaaatgtagctaaccaaggtatgtctt

SEQ ID NO: 926928 - DNA, 557 bp, Homo sapiens
gcctgaagagacagaatttgtgaggctcaagaagggacaggccgggcgcagtggctcacgcctgtaatcccagcactttgggaggccaaggcgggcggatcatgaggtcaggagatcgagaccatcctggctaacacggtgaaaccccgtctctactaaaaatacaaaaaattagccgggcctggtggcgggcgcctgtagttccagctactcaggaggctgaggcaagagaatggcrtgaacctgggaggcggagcttgcactgagccgagatcgtgccactgcactccagcctgggcgacagagcaagactccatctcaaataaataaataaataaataaataaataaataaaagaagggactgcagggctgggactgcattatcctaagagaagtggtatgcctggggcacctgacgagggccacatgtaagacaggattgtagagaaaaggagaacattcacataagacagcacacaaaaggcagcacagaaacatatcgtcgcctttgtgaattttataaaaaccaaaatgtagctaaccaaggtatgtctt

SEQ ID NO: 926929 - DNA, 793 bp, Homo sapiens
tccagtggtatggggcatgtcaagatatctcttctaaggtgaaggacaccttgtagcatctggcccctcctacaaccaaaaaagaggtgcaatgcctagtaggcctctttggattttggaggcaacatgttcctcatttgggtgtgtaactctgccccatttaccaagtgacttgaaaagctgctggttttgagtggagtctagacaaggagaaggctctgtaacaggtccaggctgctatgcaagctgctctgtcacttgggccatatgacccatcagatccaatggtgcttgaggtatcagtgacagatagggatctgtctggagcctttggcaggccctcatgggtgaatcacagtggaggccttcaggattttggagcaagttcctgccatcattcacaaataactacactccttttgagacagctcttggtctgctactgggcctcagtagaractgaatgtttgaccatgggccaccaagttaccatgtgacctgagctgcctatcatgaactgggtgctatctgacccactaagccatgaagttggatgtgcacagcagtactccatcatcaaatggaaatggtatataggtggtcaggctcaagcaagtcctgaagaacaagtaaattacatgaggaagtggcccaaatgcccataattcctacttctgcttcactgcctcctctctcccagcctgcacctatgaccttgttgggaatacccaatgatcagttcacagaagaagagatcaggcctggtaatagttctgcacaatgtgcaggcacc

SEQ ID NO: 926930 - DNA, 793 bp, Homo sapiens
tccagtggtatggggcatgtcaagatatctcttctaaggtgaaggacaccttgtagcatctggcccctcctacaaccaaaaaagaggtgcaatgcctagtaggcctctttggattttggaggcaacatgttcctcatttgggtgtgtaactctgccccatttaccaagtgacttgaaaagctgctggttttgagtggagtctagacaaggagaaggctctgtaacaggtccaggctgctatgcaagctgctctgtcacttgggccatatgacccatcagatccaatggtgcttgaggtatcagtgacagatagggatctgtctggagcctttggcaggccctcatgggtgaatcacagtggaggccttcaggattttggagcaagttcctgccatcattcacaaataactacactccttttgagacagctcttggtctgctactgggcctcagtagagactgaatgtttgaccatgggccacmaagttaccatgtgacctgagctgcctatcatgaactgggtgctatctgacccactaagccatgaagttggatgtgcacagcagtactccatcatcaaatggaaatggtatataggtggtcaggctcaagcaagtcctgaagaacaagtaaattacatgaggaagtggcccaaatgcccataattcctacttctgcttcactgcctcctctctcccagcctgcacctatgaccttgttgggaatacccaatgatcagttcacagaagaagagatcaggcctggtaatagttctgcacaatgtgcaggcacc

SEQ ID NO: 926931 - DNA, 467 bp, Homo sapiens
ctctcaaactgtgtctttcctctaccatcataccacaacaatcatcaacacagaagacttctgtgacctaatgtatgggtatttttccccacacaccaagcagggaacactagctggctgtcctctaattcagttccaacactgtctacctggagaccttgtcagatcccacaggttgagggctcagtccccaagactgccyccgaccacaccagtcagaagtccaggcctttggaactgctgaccaacaagcttcaagttggggtccccagagccccctctttggcttcagtgaatttgctggagcagctcacagaactcagggaagtacttacttatgtttaccggtttatggtaaaagatattgcaaaggatacagatgaagagacacgtgggatgaggaatgggggacagggtgtggagcttctacgccctccctcggtgccaccctccaggaacctcagcat

SEQ ID NO: 926932 - DNA, 572 bp, Homo sapiens
accctccagacctcatcctgggcatctatttatatgctggtcctgactcgtatcctttataataaaactgtaatcctaagtacagcactttgagtcattctagtgaattattgaaactgaaggagtcatgcaaaccccgaatttgtggccagttggtcagaagtgcaggtagctttgggacccccaaacttgagactgattctgcagtaaggggtgacttttttttttttttttttgacaggatctctgctctgttgcccaggctggagtgcagtgacaagatcatagtcactgcagcttccaactcctaggctcaggcaatccccctgctgcagcctcctgggctgctgagactacaggtgtgagccaccaaacccagctaattttttaatttttatttttgtagagatarggtctcgctatgttgcgcaggctggtcttgaacacctatgctcaagtgatcctcttacctcagcctcctgagtagctgggaccacagatatgtgccaccatgcttgggtaattaaaacaatttttttttcagagatggggtctcactatgttgccgaggc

SEQ ID NO: 926933 - DNA, 675 bp, Homo sapiens
aactgaaagagaaaagagagggaaaggatgttagggtctccagatcaaaaagagcctcagaaccagcccccaaagcaatgtacaaaaatgcagcagggtctatatactaatatactcactttatatgcacaatccaaaccataagtctctacatagctgtggtttagaccaggggctcccatcaccctcaactcaatgcggggccccacccccaaacaattcactcagaactggggatttgatggggatatgggtatgttttaaaagctctccagtgacttaccaagatcactgatctactgaagactaagagaattcattcattccctttattcattcaacagcccttccttccttccttccttccctccctccctccctcctttctttctttttctttctctctttcttttctttctttctttccttctctctctctctttctttctctctttctctctttctttctttcttcggagatggagtcttgctstgtcaccgaaactggagtgcagtggcgcgttctcggctcactgcaacctctgcctcccgggttcaagagattcctctgcctcagtctcctgagtagctgggactacaggcatacaccaccatgccaagctaatttttgtatttttagtagagaaaaatacgtgttggccaggctggtctcga

SEQ ID NO: 926934 - DNA, 675 bp, Homo sapiens
aactgaaagagaaaagagagggaaaggatgttagggtctccagatcaaaaagagcctcagaaccagcccccaaagcaatgtacaaaaatgcagcagggtctatatactaatatactcactttatatgcacaatccaaaccataagtctctacatagctgtggtttagaccaggggctcccatcaccctcaactcaatgcggggccccacccccaaacaattcactcagaactggggatttgatggggatatgggtatgttttaaaagctctccagtgacttaccaagatcactgatctactgaagactaagagaattcattcattccctttattcattcaacagcccttccttccttccttccttccctccctccctccctcctttctttctttttctttctctctttcttttctttctttctttccttctctctctctctttctttctctctttctctctttctttctttcttcggagatggagtcttgctgtgtcacygaaactggagtgcagtggcgcgttctcggctcactgcaacctctgcctcccgggttcaagagattcctctgcctcagtctcctgagtagctgggactacaggcatacaccaccatgccaagctaatttttgtatttttagtagagaaaaatacgtgttggccaggctggtctcga

SEQ ID NO: 926935 - DNA, 480 bp, Homo sapiens
ccaggggaccactaccaccaaggcgcggagatcggtagtggcccctaatgcctggttgtgctgttatttattgtatacaaggcaagagggcagggtaaggagtgtgagtcgtctccaatgataggtaaggtcgcgcgagtcacgtggccacaggacaaatagggagcctttccctatttggtagtcgaggaagagagagagaggacagcttacgtcattatttcttctatgtatttcttggagagatcaaagactttaatactttcactatttctgctactgctatctagaaggtggagccaagtgtacagggcagaacatgaaagtggaccaggagsgtgaccgctgaagcacagcatcagaaggagacgtttaggcctctggatggctgtgggtgggcctgattaatgtcaggccttccacaagaggtggtggagcagagtcttctctaactccccccggggaagggagacttccttt

SEQ ID NO: 926936 - DNA, 516 bp, Homo sapiens
cttcttggtgctgggcatggtggctcatgcttataatcccagaactctggaaggctgagacaggaggatctcttgaggccaggagcttgagatcagcctggacaacatagtgagacctcgtctctattaaaaaaaaaaaaaaaaaaaaaggccaggcgcaggggctcatgcctgtaatcccagcactttgggaagccgaggtgggtggatcacctgaggtcaggagtttgagaccagcctggccaacacagtgaaaccccatctctactaaaaatacaaaaatttgtcaggcatggtggtgggcgcctgtaatcccagctattcgggaagctgaggcaggagaattgctttaaccygggaggcagaggttgcagtgagccaagcttgtgccatttcactccagcctgggcaacaagagtgagactctgtctcaaaaaacaaacaaacaaacaaacaaacaaacaaacaaaactaccttctttcattatccattctgtattccccttgccctcaaca

SEQ ID NO: 926937 - DNA, 617 bp, Homo sapiens
aggcatggtggctcaagcctgcaatcctagcactttgggagaccaaagcaggaggatcacctgaatcgcttgagttcaagagttcaaggttacagtgagctatgatagtgccactgcactgcagcccgggtgaaagccagaccctgtaagtaaataagtaagttaagtaaggaaattaattaagccaaagaataaaagaaggggagtgcccagattctcaggaatctggtccagaaattactgttccatcctcttctccagggttcactgactttccagcagagttcttaaaaagggaagatgtgcaaagcctcctgcctgaatagccattaattgatggctatcataaatacatattgacagmttgaaatgcctgatgtaggagatttggttactttaagtattttttgaagggtatactgtttaacttcccattgcaacaggggataacttatatgattatttcagcgatgattttttgaatatttttccattaaaagtacaactgtgtgaaacaaggcaaagacatttctcacacacaaagcagatgtcattagccactctgatacactatgctgctgattcataaaataggtaagagcagatcgttttcttca

SEQ ID NO: 926938 - DNA, 723 bp, Homo sapiens
tggtgaacacttccaaacacttaaataataaataatgctgatattacacaaaggacaaatctgcccaacactttctttacagccagcacaaccttgaggtcaaaatctgacatattacaaaaaagggctaatacaggctgatctattattacatgaacaaagatgcaaaaatcctaatgaaatactgaaaaagggaattcagcgaaagtgatgtacaatggtctccccttatttgcagtgttgctttccacggtttcagttacccacagtcaaccatggtctgaaaatagatgagtactgtataatattttgagagagaaaaataccacattcaattaacttttgctacaatatgctgttatatgtgaccaatttataaataaaactttatcatagctaattaggagaaaacatagtatatacagtcatgcatcacttaacaggctatgttttaagaaatgtgttaggcgatttcatcattgtatgaacatcayagaatgtacttccacaaatctagatggtagagcctaccacacacccaggctatatggtatagcctattgctcctaggctaaaaatctgcatggcatgttactgtatggaatactttaggcaactgtaatacagtggtaactatttatgtatctaaacatatctaaacatagaaatggtattggagaaataaagcattatcttataggaccagtgtcataaatgagtcat

SEQ ID NO: 926939 - DNA, 482 bp, Homo sapiens
ccatttttatatgttcttttgagaaatgtctgtttatgttatttgcccacttttcgatagtattgtttgtttttttcttgctgagttgtttgagttccttgtagattctgaatacaagttctttgtcagatgcctagtttgcaaacattttctccctttccatgggttgtttgttwactctgataattatcttttactgtacaggagctttttaaatttaaccaggtttcatttatttattttcatttttgttccatttgcttttggagtcttagtcatgaattccttgcctcggccaatgtccagaagagtttttccaaggttatcttccagaattttttatggttttaggtcttaggtttaagtcttggatcattttgagttaatttttgcttaagggatccagtttcattcttctacatgtggctagccagttttgctagcatcatttattaaatggggtgtccttccccagtttacat

SEQ ID NO: 926940 - DNA, 608 bp, Homo sapiens
ttttcccacagaggctcggcatagacagcctttctggaacaattcagggtgattacattgccacaggaggtgcaccctccaggtgcagtctttcatgagaggtagagtcacaattcctctttccttggaatatcaacaatcctgcaaatgaagaaaggtacytgtctgatctgaatagctgaaatactgggtaagcagtgtgtctgggaggtggatagctttcctgctggactggcagtggagctgaggtggctattgccattccctctgataatacctcagagtgtttcatagagagctccttcagccacctctgtcaaggctgggacctctgtccaccattggataatgcattttccccctattttagccacagagagtttttacttgtagatatctcccctattggcttaagcctgaactattcaacccagtaaatagaatactggggaaaaagtagcaaataaaaaagtgcacaccatgggggcatgagataagcatcaagaaacctctgccattccaactctataggaaacagtgaacttgcacacacactgagcaccttgctaatacaaccagcatctgagaaagctatcatacacagactc

SEQ ID NO: 926941 - DNA, 466 bp, Homo sapiens
gcgcttgccattgctcaggcttgagtaggtaaccaaagcggctgggaagctcgaactgggtgtagcccaccacagctcaaggaggcctgcctgcctctgtaggctccacctctgggggcagggcacagacaaacaaaagacagcaataaactctgcagtcttaaaagtccctgtctgacagctttgaagagagtagtggttctgccagcatgcagyttgagatctgagaacaggcagactgcttcttcaagtaggtccctgacacccgagtagcctaacagggaggcaccccccagtaggggcagactgacacctcacgcagcagggtactcctctgagacaagacttccagaggaatgatcaggcagcagcatttgcagttcaccaatatccgctgttctgcagccaccgctgctgatacccaggcaaacagggtctggagtggacctccaataaactccaacag

SEQ ID NO: 926942 - DNA, 466 bp, Homo sapiens
gcgcttgccattgctcaggcttgagtaggtaaccaaagcggctgggaagctcgaactgggtgtagcccaccacagctcaaggaggcctgcctgcctctgtaggctccacctctgggggcagggcacagacaaacaaaagacagcaataaactctgcagtcttaaaagtccctgtctgacagctttgaagagagtagtggttctgccagcatgcagtttgagatctgagaacaggcagactgcytcttcaagtaggtccctgacacccgagtagcctaacagggaggcaccccccagtaggggcagactgacacctcacgcagcagggtactcctctgagacaagacttccagaggaatgatcaggcagcagcatttgcagttcaccaatatccgctgttctgcagccaccgctgctgatacccaggcaaacagggtctggagtggacctccaataaactccaacag

SEQ ID NO: 926943 - DNA, 601 bp, Homo sapiens
tgagagctggacactcatcaggatgacctgcctgcagaaaggatctacccactttgggtctcctgagagctgttctgttgctcagtgaagctcttcttgttcagtgaagctccggttgtccgtgtacctcattcttccyagacacaggagaaaaatttgggacctgccaaatgacaggactaaagatgtgctgctggattctgtttgcaagtattttgttgatgacttttgcattgatgttcatcaaggatattggcctgaagttttctttttctgttgtgtctctgccaggttttggtatcaggagtatgctggcctcatagaatgagttggggaggagttcctccttctcaattttttgtaatagtttctgtaaaaatggtaccagctcttctttgtacatctggtagaattcggctgtgaatccaacaacccattaaaaagtcagtaaaggacatgaacagacacttttcaaaagaagacatacaggtagtcaacaagcatatgaaaaaaagctcagtatcactgattattagagaagtgcaaatcaaaactccaatgtgatactatttcacaccggtgggaatagctattattaaaa

SEQ ID NO: 926944 - DNA, 666 bp, Homo sapiens
tcattgctgcccttcttcccaatccaaagcctcctttgcgtcctcctcttgtattcccccaccttaacccacaagtataagatacctctactccctctttgtcgaccgatcatgcaccccttaccatctcattaaaacctaatcacccttacccctctgaatgccaatatctcatcccacagcatgctttgaaaagattaaagcctgttatcactcgcctgctacagcatggccttttaaagcctataaattctccttacaattcccccattttacctgtcttaaaaccagacaagccttacargttagtccaggatctatgccttatcaaccaaattgttttgcctatccaccccatggtgccaaacccatatactctcctatcctcaatacctccctccacaatccattattctgttctggatctcaaacgtgctttctttactattcctttgcacccgtcatcccagcctctcttcgctttcacttggactgaccctgacacccatcaggctcagcaaattacctgggctgtaccgccgcaaggcttcacagacagcccccattacttcagtcaagcccaaatttcatcctcatctgttacctatcttggcataattctcgtaaaaacacacgtgctctccctgctgatcatgtccagctgat

SEQ ID NO: 926945 - DNA, 580 bp, Homo sapiens
tgaaagacaaaagtattaaaataactataatttaaaatatgtttatggatacacaatataaatagatgtaaattgtgacatcaaataacatagtgtggtgagagagaattaaaagtgtagagtttttgtatgtgattgaagttaagttgttattacctcaaaacagacttataattataattttttttttgagacggagtctctctctgtcacccagrctcaggtgcagtggcacagatctcggctcactacaatctctgcctcctgggttcaagtgattctcctgcctcatcctcccaagtagctgggactacaggcgctcgccaccacgcccggctaattttttgtatttttagtagagacagggtttcaccgtgttagccaggatggtctcgatctcctgacctcgtgatctgcctgcctcggcctcccaaagtgctgggattacaggtgtgagccactgcgcctggccaattataaaatattttatgtaagcctcatggtaaccacaatggaaatacctatagcagtttacacaaaagagaaaggaatcaaagcatatcggaaaaaaaaagaagaa

SEQ ID NO: 926946 - DNA, 628 bp, Homo sapiens
ctcacatctgtaatcccagcactttaggaggccaaggcagaaggactgcttgagcccaggagttcaagaccagcatgggaaacacagtgagaacttgtctccacaagtactaattttttaaaagttagctgggtgtggaggagcacacatgtacttccagctactagacaggctgagatgggaggatcgcttgagcctagttgaggctgcattgagccatgatcgtgccactgcactccagcctgggcaacagagaaagaccctgtctcaataaaataaaaataaataggactggctgactagatcacagattttatgtatactgggcatctacttacacctggagtagggacacagatatgtggtggatggagttgaaagtacaagaagtcggggaggggaggagaagaggaaatcagacaccagtgtkttttttctctgcttcatttcctgggacccaacctcaaacatccggatgaatgaggagaaacctgggcacattggggtttgtggctcacttctacagatgtagtacagacagtaccaaacagggctgcaaggtaaacaacaggaagcccaattaaatttgtatttcaagtaaacataaatgatttgtattataagtatg

SEQ ID NO: 926947 - DNA, 650 bp, Homo sapiens
atttaaatgatttttgagaaatccttgtacttttctccaataattacaaaacttgttatggcaacaatgcctttctggattagagaacacaaaaaacttattaccatgatattctttatattatttattgttccatattaaaactggataggctagacaggggctaccatgaatttgtgcagaaatgatatagtctgagttttcttatatgcagaaagataataaaacacagactcacttcttatgaacccaaattcatcttgaagagactacatatctcctttgtattctcagtatacattacagccattattctagcaatccatcactctgagtttcttagttggaaaatcagttttccaagaagtatttttccactcagctctgatactttaaagcctcagaaaacaacctaaggataaatcaaatgtgtcctgagtctgacataaaacaaaaatcagttctagaatraaagtcatctagtcaaagaaagtctggcttttacacattcttaaaaaatattcttttaaaggtctaaaatgacttgtaaatgaaatgtctacaacttttataatagaatcatcagtactaaaaataaacaaagaactatatatatacacatatatattaaagaaatatatatgtattaa

SEQ ID NO: 926948 - DNA, 789 bp, Homo sapiens
aatataaccaaatatgagacagcctgaatgagggaatggctctgggaaactgggccaactctgcgggaatggttccttgctaatattagaaatttgatgtattaggccattttttgttgctataaagaaatacctgaggatgggtaatttataaagaaaaggggtttaggctgggtgcggtggctcacgcctgtaatcccaacactttgggaggccgaggtgggcagatcatgaggtcgggagatcaagaccatcctggctaacacagtgaaaccccatctctactaaaaacacaaaaattagctgggcgtggtgttgggcacctgtggtcccagctactcgggaggctgaggcaggagaattgcttgaacccgggaggcggagcttgcagtaagcmgagattgtcccactgcactccagcctgggcgacagagcgagactccatctcaaaaaagaaaaaaaaaaggttcaattggttcacagttctgcaggctgtacaaccatggctccagcatctgcttctggtgagagcctcaggaagcttctaatcatggaggaaggcaaagggggagcaagcatgtcatatggtaagagcaggggcaagagaaggaggcaggaggcgtaaggtgccaccctcatttaaacaaccagatttcacatgaactactaaagcaaaaactcactcatcatcaagaggatggtgctccctatgatccaaaaacctcccaccaggccctacctccaactctggggattacatttcaacatgagacttagaggggtcaaata

SEQ ID NO: 926949 - DNA, 783 bp, Homo sapiens
aatataaccaaatatgagacagcctgaatgagggaatggctctgggaaactgggccaactctgcgggaatggttccttgctaatattagaaatttgatgtattaggccattttttgttgctataaagaaatacctgaggatgggtaatttataaagaaaaggggtttaggctgggtgcggtggctcacgcctgtaatcccaacactttgggaggccgaggtgggcagatcatgaggtcgggagatcaagaccatcctggctaacacagtgaaaccccatctctactaaaaacacaaaaattagctgggcgtggtgttgggcacctgtggtcccagctactcgggaggctgaggcaggagaattgcttgaacccgggaggcggagcttgcagtaagccgagattgtcccactgcactccagcctgggcgacagagcgagactccatctcaaaaaagaaaaaaaaaaggttcaattggttcacagttctgcaggctgtacaaccatggctccagcatctgcttctggtgagagcctcaggaagcttctaatcatggaggaaggcaaagggggagcaagcatgtcatatggtaagagcaggggcaagagaaggaggcaggaggcrtaaggtgccaccctcatttaaacaaccagatttcacatgaactactaaagcaaaaactcactcatcatcaagaggatggtgctccctatgatccaaaaacctcccaccaggccctacctccaactctggggattacatttcaacatgagacttagaggggt

SEQ ID NO: 926950 - DNA, 691 bp, Homo sapiens
tggtcagtctcctttcccagggccctcacaatgcgtggcctgtttaaagcctgcctctattcactgctgagtgaaaaatccagcttcaaaacagaatatggggaaggatactatcttgtgcaacttaagtttatagctgcagatacatgagaaaaaaagtctgaaaatactgttgaagtagttacttggggagagaaggggtttgctggtttttgtgtttttaacttttatatttcacaatttttatcacaatgtttagttacataatcaaartttattaaatgttaaaaattgacatgaagcctgatccagccacagcctatcattggcagagccaggaagccttccagatacagcagccctgcacctgcccccggtcacaccctgggcctgggcacatgctaggtcctctgtctggacaccctcaccccctggtggcctccatgtcagtacccaccagcacctcctgtgggcgagggccgcccctgcatccagccctgggtaccccctagcccagagggcacctcatggtgtgagagtccgcctgcctgtctctaaagagaggaaagctccttgggacatgtgttctgcttgacccatcacctctggcctggtacagaaaggtggacagtgggtatttggtgaataaatgaatgaatgattggaacgaaccccctaaatggtgatttcc

SEQ ID NO: 926951 - DNA, 730 bp, Homo sapiens
cactgggaggaagctgcagcagacacgtgtttctcagcctggtagatgcagaggggtgtccggacccccaactgggaggcccaaatgtggcagtgcaggaattctagccagctctgggaccctgggcaagtcatgtaacctctcagaaccccattcctggtcaccatggggctcttgtgtggatgtaaacaaccctcaggccacttatgtcccatcagtggaagcctagcatgggtggagacccccgagactgaactcagtggcgggatccagccttcccagctcttctacatagagcccagagctagcagggtgggctgcctggagaagcaggcactcctgtgggctggagaacatgagcagtggtccctttgggaaggtggaagaggctgtggtcagtggaggccataatggggcagaggttggrcagaaggggcatgatcggggaatctgagacccaacagagactggactgaggactctgtgccactcaggcagtggaaactgagctatggctgggacccatggtcctgagtgaggcctggccagtcttggaagctgtgccaaaggtggcttcatgtaagggtgcatctgagcactttttttttttttttttgagatggggtcttgctctgtcatccaggctggaatgcagtggcacgatcatagcttactgctgcctcaaactcctgggctcaagtgattctcccacctcagcctcccaaagcgc

SEQ ID NO: 926952 - DNA, 611 bp, Homo sapiens
ctccattctggggtgtgctgtgctgccagagtgtgcctgcccctgccttccctgaggccccctgtgctgcccaggaatggggcccggggtcccctcatccccctaatcctgggaacccctgccccaagagaggctagacagacggcgcctgtgtcccactctgctcattttcagatgaggaaatagtcaccaaggtcctgcgcaaactccctgcccgcccagcccacaccacttgcctcgctccagtttcccgcttgycagccggcgttcctgacaaccaacgggtccgcggggggccccgcttcagccaggctgggagccagcggctgggtctcagggactctgtggctgttggcggggctgtcccaagctggtgtggacagcagcctagagctcaggggcacctcagggctgagggactcaggctgacccttgggtcctgggttcagggcaggctcaggcatgtgcccgaggccagtcagggttgtggggaggaaggtcccccacactgccacagtctgcaggtcccatgagcctggtcctggggttgggaaggagggagtccccggctccagggaactgtccctgaccttcatctctggcagaggggc

SEQ ID NO: 926953 - DNA, 611 bp, Homo sapiens
ctccattctggggtgtgctgtgctgccagagtgtgcctgcccctgccttccctgaggccccctgtgctgcccaggaatggggcccggggtcccctcatccccctaatcctgggaacccctgccccaagagaggctagacagacggcgcctgtgtcccactctgctcattttcagatgaggaaatagtcaccaaggtcctgcgcaaactccctgcccgcccagcccacaccacttgcctcgctccagtttcccgcttgccagccggcgttcctgacaaccaacgggtccgyggggggccccgcttcagccaggctgggagccagcggctgggtctcagggactctgtggctgttggcggggctgtcccaagctggtgtggacagcagcctagagctcaggggcacctcagggctgagggactcaggctgacccttgggtcctgggttcagggcaggctcaggcatgtgcccgaggccagtcagggttgtggggaggaaggtcccccacactgccacagtctgcaggtcccatgagcctggtcctggggttgggaaggagggagtccccggctccagggaactgtccctgaccttcatctctggcagaggggc

SEQ ID NO: 926954 - DNA, 812 bp, Homo sapiens
gctgggagaaccactgctctcttcaaagctgtcagagagggacattaaagtctgcagaggctgctgctgtctttttgtttgtctgtgccctgcccccagaggtggagcctacagaggcaggcacgcctccttgagctctggtgggctccacccagttcgagcttcccggctgctttgtttacttaatcaagcctgggcaatggcaggcgcacctcccccagcctcgctgccgccttgcagtttgatctcagactgctgtggtagccatcagcgagactccrtgggcgtaggaccctccgagccaggtgagggatataatctcctggtgcgccgttttttaaaccagtcggaaaagggcagtattcaggtgggagtgacccgattttccaggtgccgtctgtcaccactttctttgactaggaaagggaactccctgaccccttgcacttcctgagtgaggcaatgccttgccctgcttcggctggtgcacagtgcatgcacccactgacctgcgcccactgtctggcactccctagtgagatgaacccggtacctcagatggaaatgcagaaatcacccgtcttctgcgtctctcacgctgggagctgtagactggagctgttcctattcggccatcttggctcctcagcttttttctagagttctacaattcacagttagtagacaagagtggttctcaaaaatgtagtctctggactagcagcaccagcagaacctgagaactttttataagtgcaaattctcaggccccaccctggacctggtgaatcaagaaactctggagtagggct

SEQ ID NO: 926955 - DNA, 593 bp, Homo sapiens
aaaaggttactcagcctgcaatgtagagaataaatgagactgggcaaaggcagagagtaaagataattttgtatacctgagggttggagttatgctggactggtacagcagaagggaaaattacatgatctttgagaagccagtaagggacaaaaagtctacaagaactggagctgttcaaggtagtggatatctcactacagtgaagactagctatagtagaattgaggagagtgagttggaaaacttgaggtcataaccagagaatggattcttggagtttaagatttcataggtggtraggtttcaagaaatgaaactgcctttgcaaaaattataacaatgagagaactgttgacagtaaaagagatcttttactgtctaaccaactccatcttgcctttaacctccaaactgcccttggtcactccttgtcatgagactagctaactttaggagaaatgtagtttatagtttaaatgatagtagcccttcccaaagagctaacctgcctttgtaaaactaatgaaaggccaccaggttaggagaatgagagggccctggattctgataagatgtaggcatagttaaac

SEQ ID NO: 926956 - DNA, 596 bp, Homo sapiens
tctaggttatgataaggggttgtagacaccaaggttttatcatgcagatgaagcctccaggtagcaggcttcagagagaattggttgtaaatgtttcctatcagacttacggctccggttgatgttaatgctagtcaggttttcctaaattccgaaagggasgagggtatacagaggcatgtttgagccccccttcccatcatggcctcaactagtttttcaggttaactttggaatgcccttggccaagaggagaggtctgttcagatgagttgggggatgtgtaggggtcttacaattttgtttctggtttacaataataactcagaatttagagcaaaatttatatgtgttcatttctatattttctcattaatgtaatcatgtattaggtatttatcaagtttatgtatgaaatcacactgttgtttgatgaatacaagtttagataagaaattttgtgtatccttaataaatcaagctgttacagtaaataggcagatatggtcaggacaggagaggtcccccacaaccaggaatgtcaggtgatgatcaggtaataggtggtttttgagctgtctctttaaaataataat

SEQ ID NO: 926957 - DNA, 580 bp, Homo sapiens
ggaaaaatagttttgtgggcagggcccagggccctgctcttctgtacaccctcgagacatgggaccctgcatcccagccactctagctctggccatggctaaatggggccaaggtacagcttgggatgttgctacagagggtgcaagccccaagcattggtggcttccaagtggttttgggtgtgcaggtgctcaggaagcaagagttgagttttgggaacttctgcctatacttcagaggatgtgtggaaacacctagatgtccaggcagaagtctgctgcaggggaagaactctcatagagaatctctactcaggcagtgcagaggggaaatgtggggttggagcccccacacagagtccctactgggacactgmctagtggaactttaaaaagagggccaccatccgcccgacctcaagatgttaaatccaccaacagcttgcaccatgcacttggaagagctgcaggcactaaatgccaggctgtgaaagcagtcttgggggctgtaccctgcaaagccacaggagcagagctgcccaatgtcgggggagcttgcctcttgcagcacatgccctgg

SEQ ID NO: 926958 - DNA, 444 bp, Homo sapiens
aaaatctagaaagaagcaatctgagaaaattcattgtgatgtctgcattcctctgagagttaaccctttcttttgattgagcagttttgaaactctcttttgtagaatctgcaagtgcacatttggagggatttgagggcaatggtggaaaaggaaatgtgttcacataaaaactagatagaagcattctgagaaacttatttgctatgagtgcatttatctcccagagttgaacctttcttttgatggaccaattttgaaatatactttttgtgtratctgcaagtggatatttcgagcgccttgaaacttatactggaaaatgaaatatcttcacataaaaactagacagaagaattctgagaaacttttttgtgatgtgtgcgttcatctcaccgagttgaacctttcttttgattaagcaatttggaaacactctttttg

SEQ ID NO: 926959 - DNA, 558 bp, Homo sapiens
gaagatatttccttttcctcaatatgccccatagcactgcaaatatccacttgcagatcgcactaagagtatttccaaactgcacagtcaaaagaaaggtgaaatgaatgcacatattgcaaaaagtatctcagactcttttgtgtagtttttatttgaagatattttcttttttacaatagrcctcaaagctctccaaagatccacttgcaaattctacaaaagagtgtttcaaaactgctccatcaaaagaaagattcaactctgtcagatgaatgcacacatcacaagatagtttgtcagaatgcttctgtgtagtttttatgtgaagatatttccttttccaccttaggccgcaaaaggctccacatatccacttgcagtttctgaaaaaataatgtttccaaactggtcaatcaaaagaaagtttcaactctgtgagttgaatgcacacatcataaagaagtttcacagaattctcctgtgtagtttctatgtgaagatatttccttttccacaataggcctcaaagtgttccaagtatccacttgcagatta

SEQ ID NO: 926960 - DNA, 593 bp, Homo sapiens
aatttatagattcaatgtcatctccatcaagctaccaatgactttcttcacagagttggaaaaaactactttaaagttcacatggaaccaaaaaagagcctgcatcaccaagtcaatcctgagccaaaagaacaaagccggaggcatcaagctacctgacttcaaactatactacaaggctacaataaccaaaacatcatggtactggtaccaaaacagagatatagatcaatggaacagaacagagccctcagaaataacgctgcatatctacaagtctctgatctttgataatcctgaacaaaacaarcaatggggaaaggattccctatttaataaatggtgctgggaaaactggctagccatgtagaaagctgaaactggatcccttccttacaccttatacaaaaatcaattcaagatggattaaagacttaaacgttagacctaaaaccataaaaaccctagaagaaaacctaggcattaccattcatgacatagacatgggcaagggcttcatgtctaaaacaccaaaagcaatggcaacaaaaaccacaattgacaaatgggatctaattaaactaaaaagcttc

SEQ ID NO: 926961 - DNA, 526 bp, Homo sapiens
caattcccctaataaatcccatctctcacttctctctctctctcaatgtacatgtttccctctggataaccctggctaaaactaagatccaaacgaactctaggtacttctctactgtttgcaatgcctgagcaggaccagagtgagtgtctggggatttggggagtgcttaaagggawtcctgctctcattgattggagggaaaattttctcgcagttggagagaaaagttccaaagaaacaggtagaaaatagagaaaaagggctttcagattgacctgaaatctcaacattttgttgaaggaagaaatcatattctcaatgccagtatatggtctggaattgtttcacaggatgggaaacgaataggaactaggaactgcatagtaaattgtaataaatagtatgattggtccacatgtctaagtggcttatggacttagcaaaaaggacagaaagctaatgaagctctctgtgatttaggatttaggatttaagtcatgattaacacaataacatttgcttt

SEQ ID NO: 926962 - DNA, 633 bp, Homo sapiens
tcattatatattaaaatgttcataacaatagaaatgaagtacacaataaatgtaatgcacttgaatcatactgaaacttccccccacaaatacatggaaactggtccttggtgctaaaaaaattgggcaccactacactagactattcagtcactgtccaatcaaacattctgcaatggcgggcttgctccactctgcactgtccaacatgggagctgctagccacccacatgggctgttgagcccttgaaatgtggctggtgagaatgaagaactgaattttcaattttctcttaactattttttttttttttcagacagagtctcactctatcctccaggctggagtgcagtggtgcaatctcrtctcactgcaacctccatctcctgggttcaagcaattctcttgcctcagcctcctgagtagccaggattacaggaacccgccatcatgcccggctaatttttgtatttttgtagagacgagatttcaccacgttggccaggctgatcttgaacgcctgacctcaggtgatctgcccatcttggcctcccaaaatgctgggattacagttgtgagccaccatgcatgcccttaattcatttctaaatcacgaaatctaaacaagtgga

SEQ ID NO: 926963 - DNA, 633 bp, Homo sapiens
tcattatatattaaaatgttcataacaatagaaatgaagtacacaataaatgtaatgcacttgaatcatactgaaacttccccccacaaatacatggaaactggtccttggtgctaaaaaaattgggcaccactacactagactattcagtcactgtccaatcaaacattctgcaatggcgggcttgctccactctgcactgtccaacatgggagctgctagccacccacatgggctgttgagcccttgaaatgtggctggtgagaatgaagaactgaattttcaattttctcttaactattttttttttttttcagacagagtctcactctatcctccaggctggagtgcagtggtgcaatctcgtctcactgcaacctccatctcctgggttcaagcaattctcytgcctcagcctcctgagtagccaggattacaggaacccgccatcatgcccggctaatttttgtatttttgtagagacgagatttcaccacgttggccaggctgatcttgaacgcctgacctcaggtgatctgcccatcttggcctcccaaaatgctgggattacagttgtgagccaccatgcatgcccttaattcatttctaaatcacgaaatctaaacaagtgga

SEQ ID NO: 926964 - DNA, 482 bp, Homo sapiens
cattctgcaatggcgggcttgctccactctgcactgtccaacatgggagctgctagccacccacatgggctgttgagcccttgaaatgtggctggtgagaatgaagaactgaattttcaattttctcttaactattttttttttttttcagacagagtctcactctatcctccaggctggagtgcagtggtgcaatctcgtctcactgcaacctccatctcctgggttcaagcaattctcttgcctcagcctcctgagtagccaggattacaggaacccgccatcatgcccggctaatttttgtatttttgtagakacgagatttcaccacgttggccaggctgatcttgaacgcctgacctcaggtgatctgcccatcttggcctcccaaaatgctgggattacagttgtgagccaccatgcatgcccttaattcatttctaaatcacgaaatctaaacaagtggataggaactaccatag

SEQ ID NO: 926965 - DNA, 482 bp, Homo sapiens
cattctgcaatggcgggcttgctccactctgcactgtccaacatgggagctgctagccacccacatgggctgttgagcccttgaaatgtggctggtgagaatgaagaactgaattttcaattttctcttaactattttttttttttttcagacagagtctcactctatcctccaggctggagtgcagtggtgcaatctcgtctcactgcaacctccatctcctgggttcaagcaattctcttgcctcagcctcctgagtagccaggattacaggaacccgccatcatgcccggctaatttttgtatttttgtagagacgagatttcaccaygttggccaggctgatcttgaacgcctgacctcaggtgatctgcccatcttggcctcccaaaatgctgggattacagttgtgagccaccatgcatgcccttaattcatttctaaatcacgaaatctaaacaagtggataggaactaccatag

SEQ ID NO: 926966 - DNA, 493 bp, Homo sapiens
cctttgtaatgtgttaaattatgctcttgtagggacctccaggcactgagggagagtctggtctgcaaggtgaaccaggtgcaaaggtaaccttctaaaaaataaaggagaatctctaaactttcaccattgaaccccctacatttgctaccattgaatcccctatatttgctaacttgaaagcaggtggaagcccccagataaaaacaggaaatgttttggaactcctattccttatgacagcagtccccaacctatttggctggcaccagggacaagtttcatggaagacagtttttccacagatggaagcagagcaggggatggtttcaggatgaaamtgtcctacctcggatcatcaagcattagattctcataaggactgagcaacccagatccctcgaatgcacagttgacaatagggttcgtgtttctatgagaatctaatgctgccactgatctgacaggaggtggagctcagacagtaatgctg

SEQ ID NO: 926967 - DNA, 725 bp, Homo sapiens
tgaatttctcccagaaaatgggtttttctttttaattgcatcatcaggctgcaaattttccaaacttttattctctgcttcctcttgaatgctttgctgcttagaaatttcttcaaccagatatcctaaatcatttgtctcaaattcaaagttccacagacctctagggcaagggcacaatgctgccagtctctttgcatagcaagagtgatctttactccagttcccaacaagtttgccatttccatctgagaccactttagcagggactttattgtccatatcactatcagcatttttatcaaagccattcaataagtgtctaggaagttccaaactttgccacattttcttatcttcttctgagccctccaaactattccracctctgcctgttacccagttccaaagtcagttccacattttcaggtatctttatagcagcaccccactcctggtcccaatttactgtattagtctgttctcacactgctaataaagacatgcaccagactgggtaatttataagggaaagaggtttaatggaatcacagttacccatggcttgggaggcctcacaatcatggtgtaaggcaaagaagaagcaaaggcctgtctcacatggcagcaggcaagagagcatgtgccaggggaactcccatttataaaaacatcagatctcatgagacccattcaccatcatgagaacagcatgggaaagacct

SEQ ID NO: 926968 - DNA, 497 bp, Homo sapiens
acttggccatttatagcaaactgcctgactttggagtgagaaaccaagcaccttctaggtcctaggataggtgaattggaggtgcagctgctgaagttcccattttctacatacttcaggagccagggtgtttcatttggttttgtaaaactttgctgtaagtcatcacagttaattctttgaatggacattttagagtgtaactttttttcaaaattagcagaacagatatctctgctcattctctttawacatttagttttttaaagttcccctagtatacctgttaggcactctaaataggacacagttaaagctaaaagaaggaccagttgctccctagagcctacagttcagaactatcttgttgtcatgtcctggtttggtttggtttgtttttaactcaacaagttggaaaccatgagtttaaagcaaactatttccttttcttaagcttaaagagaattttttttttaatctttagctcctcatttagg

SEQ ID NO: 926969 - DNA, 790 bp, Homo sapiens
cattttctgaaggtttcgaggagatattggatatgcaaatcaaatgtcctaaacacagcagaaaagatgactctttgggaaaggagattcaaaattctctttttttttctgtttgagacggagtctcgctctgctgcccaggcgggaatgcagtggtgtgatctcggttcactgtaagctccgcctcccaggttcccgccattctcctgcctcagcctcccaagtagctggkactacaggcgcccgccaccacgcctggctaatttttttgtatttttagtagagacagggtttcaccgtgttagccaggatggtctcgatctcctgacctcgtgatccacctgcctcggcctcccaaagtgctgggattacaggcataagccaccgcgcccggccccaaaattctttcataaagaatgagacaaaccagccaagcacgttaaagtcattgagctttcgggggaaaaatcagatttttccggtgactcggggtaaatgtggggacttagaaagctccccctagaaggcaaaagtagaagctgaaagtgtccccactcttgactgtcctgccttgtcagaaccctgcaatctgtgacaccgcacaggagccagtgggttttgatgactggtgtgttgctctctgctggaatacatctgtggggtcaagaagcgggaggaggaaatgcctgtctcaaccactaactaatttgcctttattatcttttcctgaacatcagatcaattgtggaagaacataaaatgcaaaacatgaacttgcagaaaacaagag

SEQ ID NO: 926970 - DNA, 790 bp, Homo sapiens
cattttctgaaggtttcgaggagatattggatatgcaaatcaaatgtcctaaacacagcagaaaagatgactctttgggaaaggagattcaaaattctctttttttttctgtttgagacggagtctcgctctgctgcccaggcgggaatgcagtggtgtgatctcggttcactgtaagctccgcctcccaggttcccgccattctcctgcctcagcctcccaagtagctgggactacaggcgcccgccaccacgcctggctaatttttttgtatttttagtagagacagggtttcaccgtgttagccaggatggtctcgatctcctgacctcgtgatccacctgcctcggcctcccaaagtgctgggattacaggcataagccaccgcgcccggccccaaaattctttcataaagaatgagacaaaccagccaagcacgttaaagtcattgarctttcgggggaaaaatcagatttttccggtgactcggggtaaatgtggggacttagaaagctccccctagaaggcaaaagtagaagctgaaagtgtccccactcttgactgtcctgccttgtcagaaccctgcaatctgtgacaccgcacaggagccagtgggttttgatgactggtgtgttgctctctgctggaatacatctgtggggtcaagaagcgggaggaggaaatgcctgtctcaaccactaactaatttgcctttattatcttttcctgaacatcagatcaattgtggaagaacataaaatgcaaaacatgaacttgcagaaaacaagag

SEQ ID NO: 926971 - DNA, 790 bp, Homo sapiens
cattttctgaaggtttcgaggagatattggatatgcaaatcaaatgtcctaaacacagcagaaaagatgactctttgggaaaggagattcaaaattctctttttttttctgtttgagacggagtctcgctctgctgcccaggcgggaatgcagtggtgtgatctcggttcactgtaagctccgcctcccaggttcccgccattctcctgcctcagcctcccaagtagctgggactacaggcgcccgccaccacgcctggctaatttttttgtatttttagtagagacagggtttcaccgtgttagccaggatggtctcgatctcctgacctcgtgatccacctgcctcggcctcccaaagtgctgggattacaggcataagccaccgcgcccggccccaaaattctttcataaagaatgagacaaaccagccaagcacgttaaagtcattgagctttcgggggaaaaatcagatttttccggtgactcggggtaaatgtggggacttagaaagctccccctagaaggcaaaagtagaagctgaaagtgtccccactcttgactgtcctgccttgtcagaaccctgcaatctgtgacaccgcacaggagccagtgggttttgatgactggtgtgttgctctctgctggaatayatctgtggggtcaagaagcgggaggaggaaatgcctgtctcaaccactaactaatttgcctttattatcttttcctgaacatcagatcaattgtggaagaacataaaatgcaaaacatgaacttgcagaaaacaagag

SEQ ID NO: 926972 - DNA, 610 bp, Homo sapiens
gctctataaggatgcttccaagatggccgaataggaacagctcctgtctacagctcccagcgagatcaatgcagaagatgggtgatttctgcatttccaactgaggtacctggttcatctcattgggactggttggacagtgggtgcagcccatgcagggcaagccaaagcagggtggggagtcacctcaccctcacaaggggtcaggggatttccctttcctagccaagagaagctgtgagtgactgtggaggagtggtacactcctgcccaaatcctgtgcttttcccacggtcttcacaaccagcagaccaggaggtcctctcccatgcatggctcagtgctcagtgggtcccacacccayggagacatgcttgctgctagtgcagcagtctgagattgacctgggacatgggagcttggctgggggagggctgtctgccattgctgaggtttgagtaggtggttctatgctcacagtttgaacaaagcagcaggtagctcgaacttggcggagcccaccacagctcagcaaggcctattgcctctgtagattccacctctgggggcagggcatatctgaacaaaaggcagcagacagcttccccag

SEQ ID NO: 926973 - DNA, 709 bp, Homo sapiens
gcctgcatattttgcagaatcatctgtgaaccaggctctagtcttctcttcctttgtcaactgatcataggggattcttcatgaggccattggtgtgggctgaaggagagaaggcagggtggcaggagtggcaggagtggagaccrtggtcatttgagccacttcctcaagtaatttacctgtgccttacgtacttcaggacctgctcgaccctgatcacatatataccacttccatttgatgttggaatgctgctgtccaaaatccactttatggctagatgggtcagaaagcacccagttcatgataggcagatcaggtctcatggtgacttgatgacccatagtcaaacattcagtttccaccaaagcccagtaacaggccaagagctgtctctcaaaaggagagtggttatctgcagaagatggcaggaccttgctccaaatcctaaaggcctccactgtgattcacctatggggacctgccaaaggctccagacagcatccctgtctgccactgacacctcaagcaccatttgatcttccgggtcatatggccaaagaggcagagcagcttgcacaggagcctggacccattgcagagccttctcctgttctggactgtactcaaaactggcagcctttcaggtcactcaataaatgagccagagtaacatacccaaatgaggaatgtgttgcctccaaaatcc

SEQ ID NO: 926974 - DNA, 585 bp, Homo sapiens
atgcagagaaccccagcaagatactacacaaacagaccatcccccagacacataatcatcagattctgcaaagtcaaaatgaaggaaaaaatgttaaaggcagctagaaagaagaaacagtcacctacaaagggaaccacatcaggctcacagcagacctctcagyagaaactctataagccagaagagattggaggcctatattcgacattcttaaagaaaagaatttccaatcgataacttcatatccagtcaaactaagcttcataactgaagaaaaaataaaatccttttcagacaggcaaatactgagggaatttgttaccaccagacctgccttacaagaggtcctgaaagaggcactaaatattaccagccactacaacacacttaagtacacaaaccagtgacaatataaagcaaccacacagacaagtatgcgtaataaccagctaacaagaaaatgacaagatcaaatctgcacatatcaatattaaccttgaatgtaaacaggctaaatgcctcaattaaaaggcacagggtggcatgctgaataaagaagcaagacccaaagatatgctgtct

SEQ ID NO: 926975 - DNA, 610 bp, Homo sapiens
ttccattttcaccttggttttttagaatgtctgtttgattatatattaataatggacacagtgtggtattgtaaaaagaactgggcaatctaagttctctgtttttcatttgctacttttttttttttttttgacagaatctcaccgcccaggatggagtgcagtggtgcgatctgggttcactgcaacctccgcctcccgagtagctgggactaccgacgtgagtcactgtgtccgtctagtttttttattttttggaagagatggggtttcaccatggtggccagaatgggctaaaactcctgatctcaagtggtccgccagcctcagccttccaaagtgctgggattacaggcatgagacatygcacctgaccctgatacatcatattgagtaaatttcttgtcatttcatctctctgctcgattccaaacctataaagtgacgtagggagtgaggatcttagatgatctaagggctttaacagtttcttttttttttttttttttttgagacggagtctcgctctgtagcccaggcgggagtgcagtggcgcaatctcgactcacggcaacctccgcctcccgggttcaagcgattctcctgcctc

SEQ ID NO: 926976 - DNA, 713 bp, Homo sapiens
cataagttcctactttaactggagggccacaatgacattttgagtaccctggaatcaacagctcagagccagtgtctagtagtccctgaaatctctgatcatttcccttttcccagtgcacagttaccctgtcaaaaggccagaggtctccctggagaaggttgggagaaagattaacagcatataaattatggatagcatagtggggtccttcctcaatgggactcggccttccctgcattaaaggggctctgggtgtgtaaacgggctcaagtctggaaattgattgaggagccataattctcttttttaataattcaaattagtcttttgtctattcgacctggaagttttctgctcatgtaaattaagtagaaatgcagtaggctttgtatcaatttcacttctaggaagactgtgattaatcagccgatgccaaagctctataagagtaagactattctgattgccgctttggctctgctgttcattacagyagcaacactaactttgccttggatgattgagtgccactactttgcccctgccaccttgggatccaattattccccaattattcccattgaatttaaattttgtagttgagtgactgaggttcccactattagatctgacatacagagaagagcaattacagggctcttcaaagatgcaggtgctgccctcacaaatctgtttcacaaggcattggt

SEQ ID NO: 926977 - DNA, 665 bp, Homo sapiens
tgggtgtgataatatggcccgcttaatgagtgaaccgaaaggctgtcagttttgaggggtccagaaaaagagaagccctgcaacaggtccaggccgctgtgcaagcttctctgccacttgggccataggacccaatagatccaatggtgcttgaagtttcagtagtagatagggatgctgtttggagcctctggcaggccctcatatgtgaatcacagtgaaggcctctaggattttgaagcaagaccctgccatmtcctgcagacaactactgtctttttgagaggcagctcttggcttgttattgggcttcggtggaaactgaatgtctgactatgggtcatcaagtcaccatgagacctgaactgcctgtcatgaactgggtgctttctgaccaatccagccataaagttgggagtgctctggagcattccatcatcaaatggaagtggtatatacatgactgggcttgagcaggtcctgaaggcacaagtaagttacatgaagaagtggcttgatgcccatgatctccactcctgccaccctgccttgtcttctccagcctgccccgatggcctaatggggagttccctatgatcagttgacagaagagaagactagggcctggttcatagacagttctgcatgatatgcaggcaccaccg

SEQ ID NO: 926978 - DNA, 631 bp, Homo sapiens
aattctatcagaggtacaaagaggagctgacaccattccttctgaaactatttcaaacaatagaaaaagtgggactcctacttaactcattttatgaggccagcatcatcctgattacaaaacctggcagagacacaacaaaaaacgaaaatttcaggccaatatccctaatgaacatcgatgcaaaaatcctcaataamatactgacaaaccgaatccagcagcacatcaaaaagctcatctaccatgatcaagtcggcttcatccctgggaagcaaggctggttcaacatatgcaaatcaataaacgtaatccatcacataaacagaatcagtgacaaaaaccacatgattatctgaatagatacagaaaaggccttcaataaaattcaacacccctttaactctctataaaaaactctcaataaactaggtatggatggaacatatctgaaaataataagagctatttatgacaaacccatagccaatatcatactgaatgggtaaaagctggaagcattccctttgaaaaccaacataagacaagggtgccctctctcaccactcttattcaacatagttttggaagttctggccagggcaatcaggaaagagaaagaaataaaggg

SEQ ID NO: 926979 - DNA, 792 bp, Homo sapiens
agtggaacagttgtcaagcaataacaatatcttgcagtcatcatccagtccagctttgctgcaatgagtgcaaaccactgatacaaaatatttgtgaaaccgatcagaaaagatgtccctggtaatccatacctttttgttagtgtaacaatgaactggtaagaaagtcactccttgaaaatagctgtaatgcaagatttagcctatcacagtaagtttataattatgtgtgcctgcagcattagcacatctcaacacagttattccctggcattcttaattcctgtgggggctgacacatyggctgtagtccgtctttcatggacaataacaccaaaacaatgatgtcttatcagcattataatcttgttctggcatcagattttcatcagcaatgatcttggcaaagtcttcaatgaatttctccactacttcatgtcagtagatgtattgtcactgtgaatctttaaaaatttaatgctgtgtcttttcttaaatttctacagtcagcccgttgaatattcacagttcccttccatttaaagttcattgtgatatatctttgtttgtttcatgatcagcataccatcaagtagcatgtgtttactgcaacaccagcagttccacactttcaatacatgattaagaccttcatttttagctttatgcagtgtttttctatttttccttacctctgttcactgcttttaccatagaacctcaatggtttatccttctatttctttaggtcatatatggaggtcatcccaacaccgtcatctgctctaagat

SEQ ID NO: 926980 - DNA, 622 bp, Homo sapiens
tttgctatgtatgctgcctcttttattttattttttaaaatcactattatagggcttcctgacatttgaaacatatctttacatcagagaacagagaataaacaaaaaaaatgatgagttagtcaggcacagtggctaactgtaatctcagctaatcaggaggctgaagtggaaggatctcttgaggtcagttcaagagcgggctgagaaacatagtgagtmctcatctctaaaaaaaaaattttaaaaattagttgagtgtggtggtgcatacctgtagtcccagctactgaggctggaggattgcttgagcccaaatatttgaggttgcagtgagctatgatcaggccactgcacttcaacctgggcaacaaagtgagatcctgtctataaaaacaaaacaaaacacactaaaacacgtaagtcttagccccttgaagggcatcctggggagttaatcattggtacatccagcctccacacatgcaattttattattttttgtaggcatgattgcatggggagattcggacttgaacagaagaaatatattgcagctgaaggtggctgggagggtctttttgcttttggggacactgaataaactgtatgttgtgtgact

SEQ ID NO: 926981 - DNA, 579 bp, Homo sapiens
tatatcttaaccagcagtatgaaaatggactaatacagcctataaagtgggaaatactggactgaattaagtgagaaagtatttatatgaaacgtccagaatagacaaatccatacagatagaaagtagattacagattgctaaggggtgagggatgtggggaatgggaagtgactaccaattaatggtttatttttgtagtgacaaaaatgtcttggaagtagataatggtgatggttgcacaactttgtcaatatattaggttggtgcaagagtaattatggtttttgccattaaaagtaatttgtctactctgaacatttcacataaatactttatcatttaattcagtccagtatttccaactttagagactgtwttagtctgttttcacactgctgattaagatatacctgagactgggtaatttataaagaaaaggagtcttaatggaatcagtttcacagtttcactctaaatggcaaaaactgtaattacttttgtaccaaactatactaaaaccatttaattgtatactacaaaagagaatgatatggtttgtgaatcatatgtcaaaga

SEQ ID NO: 926982 - DNA, 692 bp, Homo sapiens
caaatgagacctaattaaattaaagagcttttgcacagcaaaagaaactatcaccagagtagacagacaaaaggagaatgggagaaactatatatccaactaaggtctgatatccagaatctgtaatgaacttaaacaattaaacaagcaaaaaactatctattacaaaatgggcaaaagacatgaacwgacacttttcaaaggaagatacacaattggccaacaaacatatgaaaagctgttcatcatcactaatcatcagagaaatgtgaatcaaaaccacaatgagataccatttcacaccagtcagaatgtttattattaaaaagtaaaaaaaaaaacaacagttgttgatgagactgcacagaaaaaagaatgcttatacacttttagtgggaatgcaaattagttcagacactctggaaagcagtttgaagatttctcaaacaacttagaactaccacttaacccagcaatcccattactgggtatatactcaaaagaaaacaaatcattctaccaaaaagacacatgcattctcatgttcattgcaggactattcacaatagcaaatacatggagtcaacctaggtgcccattaccagtggcttggataaagaatatgtggtatctacacaccatggactactacacagccataaaaaaatggaatcacgtcctttacagcaaca

SEQ ID NO: 926983 - DNA, 692 bp, Homo sapiens
caaatgagacctaattaaattaaagagcttttgcacagcaaaagaaactatcaccagagtagacagacaaaaggagaatgggagaaactatatatccaactaaggtctgatatccagaatctgtaatgaacttaaacaattaaacaagcaaaaaactatctattacaaaatgggcaaaagacatgaacagacacttttcaaaggaagatacacaattggccaacaaacatatgaaaagctgttcatcatcactaatcrtcagagaaatgtgaatcaaaaccacaatgagataccatttcacaccagtcagaatgtttattattaaaaagtaaaaaaaaaaacaacagttgttgatgagactgcacagaaaaaagaatgcttatacacttttagtgggaatgcaaattagttcagacactctggaaagcagtttgaagatttctcaaacaacttagaactaccacttaacccagcaatcccattactgggtatatactcaaaagaaaacaaatcattctaccaaaaagacacatgcattctcatgttcattgcaggactattcacaatagcaaatacatggagtcaacctaggtgcccattaccagtggcttggataaagaatatgtggtatctacacaccatggactactacacagccataaaaaaatggaatcacgtcctttacagcaaca

SEQ ID NO: 926984 - DNA, 599 bp, Homo sapiens
aataatttgtaggtttggtcactttacataatccaatatttcttgaagactttgttcttttttaaaaaaattctttttttcttcattttaatctaactgggtcacttcaaaagactagtcttcaagctctcaaaatttttctgctgctaggtccagtctattgataaagctttcaattatattttgaaaatccttaagtaagttattcaattccaaaagctctgattttttttttaaaaaatatatttacctctttcttcatttcctggattgctttaraagtgtctttgtgttgattttcaacattgtcttggatctcagtgagcttccttgtaattcatgctctgaattctttatctgtcattcctgagtttccattttggctaatggctattgctggacaggaagtgaaaatcttggtggtgttactacattcagatttttcatggtgccagaatttatgcactggttccctcacatctagagactctggcacttctaatatttgtaattatttttgtgtgggtaggactttttttctttctttacctataatgctatagttattattttttttctctttccctccccaacgctcc

SEQ ID NO: 926985 - DNA, 630 bp, Homo sapiens
tgtaaaacaagagagcaacacctacttgatagggttgatgtgaagactaaataagttaaatgggaaagcacagaaagtgctcagctcagccactgacacataaaatatattcaataaatggtaaccaatgttattaaaaatatattaaggaagcaatatctaaggcatgactcctatttataatgttggctaccgtaatctggacagttgttccctatctcttctgtccaatcttggaaaaaatatttttggaataagaaatgaaaaaatttttaatagttttacacaaactatattagaaaacaaattaacttgaatttagaagcaataacttctgtgccttaaaargggtgcctaaatattattttcagatagttatatgtgtttataatgttcctcccctgtggtaaactgaggatggaggaataaattgaatcaaaatacatggtgaaaaataactggattcagaagaccctgagagacaaaaaaaaaaaaaaaaaaaaagaagcagatgataggaacacttcattccaatcccttaaaatgtgattctcagtttctctgttagatccaatgacaaaagaagcatattatctaggctcaggctggctggagattgatctgctgaat

SEQ ID NO: 926986 - DNA, 829 bp, Homo sapiens
gtgtacagtttttcttagttttctcttggcttgtttgttagtttatgcaaccagtggcaaattgtcatcagtttaaaatcatgggttataagatattatttgcaaggttcttgataacctcaaccaaaaagatatacacggatacacaaaaaataaaaagcaagaaattaaaacatactaccagagaaaatcactttcactaaaaggaagacagaaatgaaggaaagaaggaagagcagaccacaaaacaatcagaaaacaaacaacaaaatggcaggagtaagtccttactaatagcatttaatgtaaatatactaaactctccaatcaaaagatgtagaatggctgaatggataaaaaagtaagacccactgatctgttgcctacagaaacacacttcatctataaagaacacatagcctgaaagtaaagggatggaaaaagatattccatgctaatgaatccccaaaaaaaaaaaaaaaaaaaaaaaaaaaaaragaggaggagtggctacacttatgtcagacaaaatagacttcaggacagaaactataaaaagatacagttcattatataatgataaaggggtcagtgtggcaaggggatacaacaattataaatatgcacccaacactggagctccaggaatatataaaataaatattattagagctaaaaagagagatagactccaatataaaaatagctggagacttcaatactctactttcagcattggacagatcattcaaagagaaaatcaacaggaaaaaaaatcagacttaacctgcactataggctaaatggaactaacagatatttacagaac

SEQ ID NO: 926987 - DNA, 657 bp, Homo sapiens
tgcttccttcctcactttgtttgttttttgagatggagtctcacactgttgcccaggctggagtgcaatggcgcgatctcggctcactgcaacctccgcctcccgggttcaagagattctcctgcctcagctcctgagtagctgagactacaggcgtgtgccaccatgcctggctaatttttgtatttttagtagagatggggttttgccatgttggccaggttggtctcgaactcctgaccttaggtgatccgcccaccttggcctcctacagtgctggggttacaggcgtgagccactgcaccctgcatttcttccttactttgtgataaactttgctcgtgtgtgtgtgtgtgtgtgtgtgtgtgtgwgagagagagagagagagagagaaagatggagacagagacagagggaaggagggagagattagagattatgatggttaattttctgtatcaacttggctgggccatggtgtccaggtatgcagtcaaacacaattctggatatttctgtgagggtgttttggatgaaattaccattttaatctgtgcaccgtgagtaaagcaggttgccctccctagtaccggtgggcctcatctgatctgtcaaaggcctgaaaagaacaaaagactgacttcctccaacaagatg

SEQ ID NO: 926988 - DNA, 717 bp, Homo sapiens
accaagaaagaggcatgatgcctaatgggcctatttggattttgaaggcaacacattcctcatctgggtgtgttactctagcccatttattgagtgacctgaaaggctgccagttttgagtgaggtccagaacaggagaaggctctgcaacaggtccaggctgctctgccacttcggccatatgacccagcagatccaattgtgcttgaggtgtcagtggtagatagggatgctgtttggagcctttggcaggccccaatagatgaatcatagtggaggcatctaggattttggarcaaggctctgctatcttctgcagataactactctccttttgagaggcagctcttggcttgttactggactttggtgaaaactgaatgtttgactatgggtcatcaagtcaccatgcgacctgaactgcctatcatgaactgggtgctttctgacccatctaaccataaagtgggtcatgcacagtagcattccatcatcaaatggaagtggtatatatgtgatcgggctcgagccggtcctgaaggcacaaataagttacgtgaggaagtggctcaaatgcccatggtctccactcctgccacactgccttctttcccccagtccacaccagtggcctcatggggagttccctatgatgagttgacagaggaagagaagactagggcctgatgcacagatggttctgcacgatgtgtgggc

SEQ ID NO: 926989 - DNA, 673 bp, Homo sapiens
tcatctgggtgtgttactctagcccatttattgagtgacctgaaaggctgccagttttgagtgaggtccagaacaggagaaggctctgcaacaggtccaggctgctctgccacttcggccatatgacccagcagatccaattgtgcttgaggtgtcagtggtagatagggatgctgtttggagcctttggcaggccccaatagatgaatcatagtggaggcatctaggattttggaacaaggctctgctatcttctgcagataactactctccttttgagaggcagctcttggcttgttactggactttggtgaaaactgaatgtttgactatgggtcatcaagtcaccatgcgacctgaactgcctatcatgaactgggtgctttctgacccatctaaccataaagtgggtcatgcacagtagcattccatcatcaaatggaagtggtatatatgtgatcgggctcgagcmggtcctgaaggcacaaataagttacgtgaggaagtggctcaaatgcccatggtctccactcctgccacactgccttctttcccccagtccacaccagtggcctcatggggagttccctatgatgagttgacagaggaagagaagactagggcctgatgcacagatggttctgcacgatgtgtgggcaccacccaaaagtgt

SEQ ID NO: 926990 - DNA, 629 bp, Homo sapiens
tgtttttagagcagagaggaagacagggaagaaggaaggaaaggagggagggagggatgaacatacatacataaacataagcccagctttctgtcactaaactctgtaatatagatatgccaatctttcagtatatgaaaatctggatttacacacatgcaaaattagaggtgatgatttgttctaccaataggttcatgatagggaagatgggctcacgggaggctaaatggtcycctggagaacttaaaatggtttagattgatataatcaattataatacacattactagcataattattctttttttaaaaaatgtttgtctcactttttctttttttaaaaattttactttaagttctgggatacatgtgcagaacatgcaggtttgttatataggtatagacgtgccatggtggtttgctgcacccatcaacccgtcatttaggttttagccccacatgcattagggatttgtcctaatactctccctccgcttgcctcccaccccaggacaggccccgatgtgtgatgttcccctgtgtcatgtgttctcattgttaactcccccttatgagtgagaacatgcagagtttggttttctgttcctgtgttagtttgctgagaa

SEQ ID NO: 926991 - DNA, 607 bp, Homo sapiens
tccacacaggctttaaataccatctctatgttgacaatttccaaatttatgactccagcctagacttttcccctgaactccagactcacatatccaatagcatattcaatgtcttctcttagatttctaacgaacatttcaaatttaagaggtctgaaactatattcctgattttatccctcccaacatgttttgcccatcatgttttccatctcagtaaataaaacatccatccttctagttaggccaaaaccctggagcaatccttgccccactctttagctcataccttacatccagttcatcagaagaccattttggataaactttcactatatatgaagaatccagccactgctccacctccaccgctagcatactttctagctgccactattgctcaccttactagtaacggtgacctcctractatcctctctaattgtactcttgtctcccaaaagtctattctcaacgtaacagccagaacaatcctattaaacaatgtcattaggtgttattcatctctcaactcttccaatggctttccatttatctcagagaaaaattccaattctcacagtgcctataaggcacaataatttgc

SEQ ID NO: 926992 - DNA, 785 bp, Homo sapiens
cttattattccctgaggcttcctgcatgtttgaaagttgtgatatctcagaatttatcctataaactattgacatcgtccaaagttttactcctgtttttaccgttgttatcaacaaatattcattgaagcatctccttcatccaagtaatgaggctggacattagcaattaaaacaaaaaaaaaaagaagaagaaggaatcagacatagacctcttctataagatgtctgtgagaatcttcaataataagttcattagaaacaggcagtatgtgtgctggagcgtctagaaggacctcttagaagggcgttttagatattagcatccaaatcccatcacattcttttcctgccctttgatttcttgaagactgtatatacaataggagctcaataaatgttactgttgttaagatctagctattgtcagccaatctgccactgtaaaaatttcacttgactcattctttacaatatttctggaagacagggttgctattgtggctgctattgtttaatctgttttcttggattatttggattactccaaaatcttttcattaattaaarttgtaaaactactttcagtgaattaataccacagatttgttagttcagtctgggttgtgaaagggtctgaacccaggtcatggggttagtatttggctcatgcatctcttgttcaaaacattcattcacctgcaagttatttaagaaagaccagttgaccatgtaggtatccccatgacatgagcatacattaagaaagaaggggttataaatcc

SEQ ID NO: 926993 - DNA, 739 bp, Homo sapiens
tattttcaaaaaaacatttttcaaaaaacttttaccataggtttatattatcacaaaaaaaaatcacttctagtgttttctattttattactattttttaggtaaaagtgttatattattttttaaaggttttttcttcaacaggccaatctaataaatactcagccatctgttgagagataaggaatcttasgataggcttatgaagccccaaagagtctggaattggactgcctgaattcaaatcctgctccttcacttcccagttctgtgattttaagaaattatataacccttctctcttctgtttctgcacttgttaaaatagcactaataagaagcacctcatagcatttttgtaaaatgggatgaactgacacactcaataaacgtgtgcctggcacagagcaagtcatgagtggaagtcagaagcacctgctacaggtcctccctcttctacacaggcagccttcgacatctatacggcatcctctgcaatcctttgagtgttcaatttttttagactttcttgatagtctaaattaattttaataaagaattggaatgctgggcaggcatggtggctcatacctgtaatcccagcactttggtaggcctaggtgggtggatcacctgaggtcaggagttcaagaccagcctgaccaacatagtgaaacgccgtctatactataaatacaaaaaaaattagccaggcgtgatggcgggcacctataatccc

SEQ ID NO: 926994 - DNA, 623 bp, Homo sapiens
aatctcacttatgtgccagtcttgaacagtagaatctttgccaggagcagcgagtgagcctaaggtaaggctagtgtggctttagtgatactacctgggctagaaattaacagcattgctttgctttcattgtgccttttaaaaatgatgatctcctcctgttggcaagacatcatggctttttacttaaaatatgtttccttttaaagttaagtaaaatcagagagtgaatcaaatggttaaagtagcaaatactaattgtacagatggtgtgccaggtaaaaagtaagcagaaggtagtttgagacggattaaagacacagaaatgctgcctcgtctgagtcctttctgtctctgtcttacagataaggatctccacctwataggagaacactctgcaaaagtgagaagagaaggcacctattatcaaaatccatccagccataggtgctgtgctcacattgcacctgtcgtgtgacatgtggctgcccatgcacacgaacctgtggcactgaaagaccggggcaggcagcggcttcagtattcttggaatcctgtgtaatagacagcacttcctgggggctgcggggaagctccaccaagacacacgagcccctctcgcc

SEQ ID NO: 926995 - DNA, 623 bp, Homo sapiens
aatctcacttatgtgccagtcttgaacagtagaatctttgccaggagcagcgagtgagcctaaggtaaggctagtgtggctttagtgatactacctgggctagaaattaacagcattgctttgctttcattgtgccttttaaaaatgatgatctcctcctgttggcaagacatcatggctttttacttaaaatatgtttccttttaaagttaagtaaaatcagagagtgaatcaaatggttaaagtagcaaatactaattgtacagatggtgtgccaggtaaaaagtaagcagaaggtagtttgagacggattaaagacacagaaatgctgcctcgtctgagtcctttctgtctctgtcttacagataaggatctccacctaataggagaacactctgcaaaagtgagaagagaaggcacctattatcaaaatccatccagccataggtgctgtgctcacattgcacctgtcgtgtgacatgtgsctgcccatgcacacgaacctgtggcactgaaagaccggggcaggcagcggcttcagtattcttggaatcctgtgtaatagacagcacttcctgggggctgcggggaagctccaccaagacacacgagcccctctcgcc

SEQ ID NO: 926996 - DNA, 741 bp, Homo sapiens
attctacaaaacaacctggccagtactacttaaaactttcaaagtcatcaaaaaattaaaagcaaggaccctgaagagacatgactactaaatgcaatgtgtattctgatgggatcctgtaagaggaaaaaaaaagccattaggtaaaaactaatgaaatctgaataaagtgcaaacttttcttactagtaatatattagtaataatttcataatatcaaaagatattaatattagggaaatatgtgtgaggggtatattagaattcttggtagtatctttgcaattttctgtcaatctaaaaccagaatacagaacctagatataaaaccatatgcccacagccatttaacctttgacaaagtcgasaaaaataaacaatcaagaaaggactccctattcaataaatggtgctagaatagctagctagtcatatgcggaagaaagaaactggacccctacctttcactatatacaaaaattaactcaagatgtatcaaagagttaaatgcatgacatcgaactgtaagtatcctagaagaaaacctagaaaataccattttggacatcggctttgggaaagaatttataactaagtcctcaaaaacaattgcaatgaaaacaaaaattgacaagtgagacctaattaaactaaacagcttctgcacagcaaaagaaaccatcaaaagagtatacatacaacctacggaatgggagaaaatattcacaaactatgcatcca

SEQ ID NO: 926997 - DNA, 597 bp, Homo sapiens
attttcttttactctcaaagagtttttatatagcattaccaaagtttttgcagactaaatccttcaattctggaattattacctcagatctcatctgtctttcagataaaacagctattctgaggaggagccaagatggccgaataggaacagctccggtctacagctcccagcatgagcgacacagaagaygggtgatttctgcatttccatctgaggtaccgggttcatctcacaagggagtgccagacagtgggcgcaggtcagtgggtgcgcgcaccatgcgcgagccgaagcagggcgaggcattgcctcacttgggaagggcaaggggtcagggagttccctttctgagtcaaagaaaggggtgacggactcacctggaaaatcgggtcactcccacccgaatattgcgctttttggaccggcttaaaaaaaacggtgcaccacgagattacatcctgcacctggctcggagggtcctacgcccacggagtctcgctgattgctagcacagcagttctgagatcaaactgcaaggaggcagcgagtctgggggaggggcgcccgccattgcccaggcttgctttggtaaac

SEQ ID NO: 926998 - DNA, 545 bp, Homo sapiens
agggcaccacgtccctaggctgcatactgcacagggaccctggacccagcccacaaaaccattttttcctcctaggcctccaggcttgtgatgggaggggctgccatgaaaacctctaacatgccctggagacattttccccattgtcttggggattaatattcggctcctccttatgcaaatttctgcagccagattgaatttctcacagaaaatgggattttcttttctattgcatagacaggctgcaattttccaaacttctatgctgttttccttttaaaactgaatccttttaacagtatccaagccaccttttgaatgctttsctgcttaaaagtgtcttctgccagataccctaaatcatctctctcaagttcaaagttccacaaatctctagagcaggtacaaatgccaccagtctcttagctaaaacataacaagcatcacctttgctccagttcccaacaagtttctcatctccatctgagaccacctcagcctgaatttcattgtctgtatcattatcagcattttggcaaagc

SEQ ID NO: 926999 - DNA, 545 bp, Homo sapiens
agggcaccacgtccctaggctgcatactgcacagggaccctggacccagcccacaaaaccattttttcctcctaggcctccaggcttgtgatgggaggggctgccatgaaaacctctaacatgccctggagacattttccccattgtcttggggattaatattcggctcctccttatgcaaatttctgcagccagattgaatttctcacagaaaatgggattttcttttctattgcatagacaggctgcaattttccaaacttctatgctgttttccttttaaaactgaatccttttaacagtatccaagccaccttttgaatgctttgctgcttaraagtgtcttctgccagataccctaaatcatctctctcaagttcaaagttccacaaatctctagagcaggtacaaatgccaccagtctcttagctaaaacataacaagcatcacctttgctccagttcccaacaagtttctcatctccatctgagaccacctcagcctgaatttcattgtctgtatcattatcagcattttggcaaagc

SEQ ID NO: 927000 - DNA, 587 bp, Homo sapiens
ccagacagattcacagccaaattctaccagaggtacaaagaggagctggtaccattccttctgaaactgttacaaacaatagaaaaagagggactcctccctaactcattttatgaggccagtgtcttcctgaatccaaaacatggcagagacacaacaaaaaaaagaaaatttcaggccaatatccctgatgaacactgatacaaaaatcctcactaaaatactggcaaactgaatccagcagcacatcaaaaagattatccaccacaatcaagttagcttcattcccgggatgcaaggctggttcaaaatacacaaatcaataaacataatacatcacattaacagaaycaatgacaaaaaccacatgattatctcaatagatgcagaaaaggccttcgataaaattcaacaccaatttctgataaaagctctcaataaactaagtattgatggaacatatctcaaaataataagagctatttatgacaaaccggtactgaatgggcaaaagctggaagcattccctttgaaaaccggcacaagacaaggatgccctctctcaccactcctattcaacatagtat

SEQ ID NO: 927001 - DNA, 587 bp, Homo sapiens
ccagacagattcacagccaaattctaccagaggtacaaagaggagctggtaccattccttctgaaactgttacaaacaatagaaaaagagggactcctccctaactcattttatgaggccagtgtcttcctgaatccaaaacatggcagagacacaacaaaaaaaagaaaatttcaggccaatatccctgatgaacactgatacaaaaatcctcactaaaatactggcaaactgaatccagcagcacatcaaaaagattatccaccacaatcaagttagcttcattcccgggatgcaaggctggttcaaaatacacaaatcaataaacataatacatcacattaacagaaccaatgacaaaaaccacatgattatctcaatagatgcagaaaaggccttcgataaaattcaacacsaatttctgataaaagctctcaataaactaagtattgatggaacatatctcaaaataataagagctatttatgacaaaccggtactgaatgggcaaaagctggaagcattccctttgaaaaccggcacaagacaaggatgccctctctcaccactcctattcaacatagtat

SEQ ID NO: 927002 - DNA, 628 bp, Homo sapiens
tcttcgtggatttatctacctttgatctttgaggttaatgacattttgatgaggtttctgttttggggttctttttgttgatgttgatgttattgctttctgttagtttttattctaacagtcaggactctctcctgcaggtctgctgcagtttgctggaggtcaactccagaccctatttgcctgagtatcaccaggggagcctgcagaacagcaaagattgctgcctgctccttcctctggaagcttcatcccagaagggcaccggctttatgccagccagagctctcctatatgaggtgtctgtcaacccctgttgagaggtgtckcccagtcagcaggcacagggttcagggacccacttgaggaggcagtctgttccttagcagagcttgagcgctgtgctggtagaatcctccttgtcagggtccactgctctcttcagagctggcaggcaggaacatttaagtccactgaagctatgcccacatccgccccttccctcaggtgccctgtccccgtgagatggagttttatctataattttatttataatcccctgactggggctgtcgactttctttcagagatgccctgcccaatgaagaggaatctagagaggcagtct

SEQ ID NO: 927003 - DNA, 828 bp, Homo sapiens
tccagaccctatttgcctgagtatcaccaggggagcctgcagaacagcaaagattgctgcctgctccttcctctggaagcttcatcccagaagggcaccggctttatgccagccagagctctcctatatgaggtgtctgtcaacccctgttgagaggtgtcgcccagtcagcaggcacagggttcagggacccacttgaggaggcagtctgttccttagcagagcttgagcgctgtgctggtagaatcctccttgtcagggtccactgctctcttcagagctggcaggcaggaacatttaagtccactgaagctatgcccacatccgccccttccctcaggtgccctgtcccmgtgagatggagttttatctataattttatttataatcccctgactggggctgtcgactttctttcagagatgccctgcccaatgaagaggaatctagagaggcagtctggccacagccgctttgccacactgtgtttagttctgcccagtccaaacttccaggcctttttagtgcagtcaggggagaactgcctactcaagcctcagtaatggcagacgtctctctccccatcaagcttgatcatctcaggttgacttcttactgctgtgctggcagcaagaatttcaagccagtggttctcagcttgctgggctctatgggggtgggacctattgagcaagacaacttggttctctggcttctgcccgctttccaggtgagtgaacagttctgtctccctggagttccaggtgccactggggtatgaaaaaaatactcctgcagctagctcagtgtctgcctgaacagctgccc

SEQ ID NO: 927004 - DNA, 551 bp, Homo sapiens
acttgtttgcatttgtctaaagactttctttttgagacagagtctcgctctatggcccaggatggagtgcaatggcatgatcttggctcactgcaacccaacctccacctcctgggttcaaacaattctcctgcctcagcctcccgagtagctgggattacaggtgcatgccaccatgtccagcaaatttttttkgggggggggggcggggggggctgaggggatatttttagcagagatgaggtttcgtcatgttgaagctggtctcaaactcctgacaagtgatccacccaactcagcctcccaaagtgctgggattacacgaatgagccaccatgcctggcctcttatttactatatattgttgattaatatcaaactcacagccaaaagcactataacacatgcctgaacaaattttctccaaaaggcacagcacagccttcacgtatacaaaggaacactagacagcacataagttaaacagtgaaattaccaacaaaaagcacaaaaaagcgaaataatgtggcacaaaatagacctcaaaaagt

SEQ ID NO: 927005 - DNA, 534 bp, Homo sapiens
cagagactggtgccagcgcacagcgcgggtcttccgtatgctgagtgccggtcccctgggcccacttttctttctctatactttgtctctgtgtctctttcttttctcagtctctcgtcccacccaacgagaaagacccacaggtgtggaggggcaggccaccaccccttcatcttcattttacatttcttttagcatgctttgtaattggcctttagtgtaagattttaggctaatctggctaggggttgggctgtgtttaatgttttctgtacttgtacataccagaggtcacaaacccctctatatatattgcttgtctcccctgtgtgttttttttttttttttttttttggtttccstaagaactcctcctcagagagagtctgtgtcttgtgcctctttcagctataattctttgttatactgtgttctgttggtgtgttggtgtgttggtaaggtgttggggagggggaaggaacattctataattttacaattaaatctcagtctttacatgggcctgtgtcactc

SEQ ID NO: 927006 - DNA, 616 bp, Homo sapiens
gggcatgatggcacatgcttgtagtcccagctactctagtggctgaggtgagaggatcacttgtgcctgggaagtcaagactgctgcagtgagttgtgatcatgccactgcactccagcctgagtgacagagcaagaccccatctctgaaaacaaaagaaaggaaagaaaagaaacaatggcttaaatctccaaatttcataaaaatcagaaatgtttaaatttgatttagtgtttaaaaatgatttggtatttaaataaacactaaatcaacaccaaatagaacagttaaaaagagacaggccgggcgcagtggctcacacctstaattccagcactttgggaggctgaggcaggcagatcacgaggtaaggagatggaaaccatcctggctaacatggtgaaaccccgtctctactaaaaatacaaaaccttagccgggcgtggtggtggtcacctgtagtcccagctacttgggaggctgaggcaggagaatggtgttcacccaggaggcggagcttgcagtgagccgagatcgtgcactgcactacagcctgggcgacagagcgagactccatctcaaaaaaaaaaaaaaaatagaagcaggctgtagtttg

SEQ ID NO: 927007 - DNA, 616 bp, Homo sapiens
gggcatgatggcacatgcttgtagtcccagctactctagtggctgaggtgagaggatcacttgtgcctgggaagtcaagactgctgcagtgagttgtgatcatgccactgcactccagcctgagtgacagagcaagaccccatctctgaaaacaaaagaaaggaaagaaaagaaacaatggcttaaatctccaaatttcataaaaatcagaaatgtttaaatttgatttagtgtttaaaaatgatttggtatttaaataaacactaaatcaacaccaaatagaacagttaaaaagagacaggccgggcgcagtggctcacacctgtaattccagcactttgggaggctgaggcaggcagatcacgaggtaaggagatggaraccatcctggctaacatggtgaaaccccgtctctactaaaaatacaaaaccttagccgggcgtggtggtggtcacctgtagtcccagctacttgggaggctgaggcaggagaatggtgttcacccaggaggcggagcttgcagtgagccgagatcgtgcactgcactacagcctgggcgacagagcgagactccatctcaaaaaaaaaaaaaaaatagaagcaggctgtagtttg

SEQ ID NO: 927008 - DNA, 651 bp, Homo sapiens
tacaagccagaagaaatttgaggcctatattcaacattcttaaagaaagaaatcttcaactaagaatttcatatccaggcaaactaaacttcctaagtgacggagaaatagaatctttttatataagcaaatgttgaggaaattcattatcactagacctgccttacaggagatcttraaaagagcactaaataaaaaaaggaaagattggaaacagctaacacaaaaacacacttaaatgtgcagactagtgtcatggtaaagcaactacacaaaccaacagaatagccagctaacagcacaatgacaagatcaaatccacccatatcaataaaaccattaatgtaaacaagataaatgcctcacttaaaagacagagtggcaagctggataaaaaagcaagactcaatggtatgctgtcttcaagagactcatctcacacataatgacactcataggctcaaaataaaaggatggagaaaaatctatcaagcaaatagaaaacagaaaaaagtaggggttgcaatcctaattttagacaaaacaggttttaaatgaacgaagatcaaaaaagaaaaagaagggcgttaaataatagtaaagcattcaattcaacaagaagacctaactatcctaaatatatacgcaccc

SEQ ID NO: 927009 - DNA, 556 bp, Homo sapiens
tttccagtttagaatgacattttggggaactgttctctgcttctgattatcacagttctcaaaagaggagtatgcatttgcttgctccaattcctcttcttctacactctcttaagcattcctcaaccagtctaatatctcatagttccccaaaactgctctgttcaagaccattagtaagatctttgatgttaatctgtggaccgtatctctgtccttattttacttgaagcccaacagcamgtaaaaaagttgttctcctctcctccctgctacactttccttatgtggcttgctgggctcctcagtcccctgtgaaaaactctgacatggagatactgcagaccagtagaagggctgggcagacactatacagaaacagtatgccctacatgctccttggctaaatctctagaattttttcagaactcatccacaaattgaatggatttccttgataatcccagtcatctccttcttaataacagaatttctttttttattattacactttaagttttagggtacatgtgcaccacgtgaaggtttgttatat

SEQ ID NO: 927010 - DNA, 556 bp, Homo sapiens
tttccagtttagaatgacattttggggaactgttctctgcttctgattatcacagttctcaaaagaggagtatgcatttgcttgctccaattcctcttcttctacactctcttaagcattcctcaaccagtctaatatctcatagttccccaaaactgctctgttcaagaccattagtaagatctttgatgttaatctgtggaccgtatctctgtccttattttacttgaagcccaacagcacrtaaaaaagttgttctcctctcctccctgctacactttccttatgtggcttgctgggctcctcagtcccctgtgaaaaactctgacatggagatactgcagaccagtagaagggctgggcagacactatacagaaacagtatgccctacatgctccttggctaaatctctagaattttttcagaactcatccacaaattgaatggatttccttgataatcccagtcatctccttcttaataacagaatttctttttttattattacactttaagttttagggtacatgtgcaccacgtgaaggtttgttatat

SEQ ID NO: 927011 - DNA, 617 bp, Homo sapiens
aaaatccatacaatacaataaaggcagcattaagaggaaattatttagcaataaatgcctataccaaaaaagtagaaagacttcaaataaacaaccttatgatgtacctctaataattagaaaatttaaaaaataaaaaaaatacagaagatcaatgaaataaaaatttgggtttttgaaaagatagcgaaaatcaacaaacctttagctagactaacaaataaaagagagaacacccaaataaataaaaccagatccataaaagagacataacaattgagactacagaaatatagagaattatgagatactattatatataattatataytaacaaataaaaaaatccggaagaaatggataaaatttctggacacacacaatttaccaaagttgaatgataaagaaacagaaaacccaaacaaactaatagtgtgtaatgagatcaaagccgtaataaaaagtctcccttcaaagaaaagcccaggacctgattgtttcactgaagaattctaccaaacatttaaggaagaactaataccaattctcttcaaactcttcaaaaaaattgaagaggagggaatactttcaaactcatcctatgatgccagcattac

SEQ ID NO: 927012 - DNA, 553 bp, Homo sapiens
tctgttagaaggaaaactaacaacagaaaggacatccacaccaaaaactcatctgtacatcaccatcatcaaagacaaaaagtagataaaaccacaaagatgggaaaaaaacagagcagaaaaactggaaactctaaaaaccacagcgcctctcctcctccaaaggaacgcagttcctcaccagcaacggaacaaagctggacagagaatgactttgacgagttgagagaagaaagcttcagacgatcaaactaccccaagctactggaggarattcaaatcaaaggaaaagaagttaaaaacttcgaaaaaaatttagacgaatttataactaggataaccaatacagagaagtgcttaaaggaactgatggagctgaaagccaaggctcgagaactacgtgaagaatgcagaagcctcaggagccgatgtgatcaactggaagaaagggtatcagtgatgcaagatgaactgaatgaaatgaagtgagaagggaggtttagagaaaaaaaataaaaagaaatgacaaagcctccaagaaatatgggactat

SEQ ID NO: 927013 - DNA, 701 bp, Homo sapiens
atattaagtgaattaacacaagaaccaaaaaccaattaccacatgttcttatggataagtgggagctaaccagtgggacatgaacacaaagatggcaataatacacactggggattactggaaaggggagggaggaagcggagcaagggtttaaaacctaactgttgcatattatgcttattacctcagtgacaggatcatttgcatcccaaacctcagcatcacacaatatscccaggggatacatgtgcccccgaatctaaaatgaaagttgaaagaaaaatgaaaatgaaagtcacgtatacccaacagaaatgaacatctgtgttcaccaaaatgtgtgctctgaaatgttcataattgcaccattttaaactggaaacaacccaaattctatcaacagaaaatggataaacgacacaacgactatcacgaccataatgatgagcaaaagaactcacatgcacaatgtatgggttttacccatctaagtatcaaaagtatgatttcactcatctaaacatcaaaacagggacaatgacttgatggacctcagaggagcatttatcctcagaggatgctatgactgtgagggacatgagcagtggctctggggtattggtaattttctggtttttattctggtcgctcactatatggtatattcagtttgtgaaaattcattgatttgcacccttatg

SEQ ID NO: 927014 - DNA, 640 bp, Homo sapiens
gtatatataccacagtttctttatccactcgttgactgatggacatttgggttggtttaatgatttcacaattgtgaattgtgttgttttaaacatgggtgtccaagtatctatttcgattaatgacttcttttcctctggatagatacccagtagcaggattgctggatctaatggtagttctacttttarttctttaaggaatctccacagtgttttccatagtgactgtactagtttatattcccaccagcagtgtagaagtgttccctgttcactggatccacaccaacatctattgatttttgattttttgattatggccattcttgtaggaattaggtggtattgcaggagtaagatggtgtcacattcttgcaggagtaaggtggcattaatgatgttgagcatttttccatatgtttgttggcctttgtatatcttcttttgagaattgtctattcatgtccttagcccactttttgatgggattttttttttttaccaatttatttgagttcactgtagattctagatattagtcctttgtcagatgtacacattgtgaagattttctctgttctctgtttactctgctgactgttccctttgctgtgcaaaagctctttaatttaattag

SEQ ID NO: 927015 - DNA, 640 bp, Homo sapiens
gtatatataccacagtttctttatccactcgttgactgatggacatttgggttggtttaatgatttcacaattgtgaattgtgttgttttaaacatgggtgtccaagtatctatttcgattaatgacttcttttcctctggatagatacccagtagcaggattgctggatctaatggtagttctacttttagttctttaaggaatctccacagtgttttccatagtgactgtactagtttatattcccaccagcagtgtagaagtgttccctgttcactggatccacaccaacatctattgatttttgattttttgattatggccattcttgtaggarttaggtggtattgcaggagtaagatggtgtcacattcttgcaggagtaaggtggcattaatgatgttgagcatttttccatatgtttgttggcctttgtatatcttcttttgagaattgtctattcatgtccttagcccactttttgatgggattttttttttttaccaatttatttgagttcactgtagattctagatattagtcctttgtcagatgtacacattgtgaagattttctctgttctctgtttactctgctgactgttccctttgctgtgcaaaagctctttaatttaattag

SEQ ID NO: 927016 - DNA, 640 bp, Homo sapiens
gtatatataccacagtttctttatccactcgttgactgatggacatttgggttggtttaatgatttcacaattgtgaattgtgttgttttaaacatgggtgtccaagtatctatttcgattaatgacttcttttcctctggatagatacccagtagcaggattgctggatctaatggtagttctacttttagttctttaaggaatctccacagtgttttccatagtgactgtactagtttatattcccaccagcagtgtagaagtgttccctgttcactggatccacaccaacatctattgatttttgattttttgattatggccattcttgtaggaattaggtggtattgcaggagtaagatggtgtcacattcttgcaggagtaaggtggcattaatgatgttgagcatttttycatatgtttgttggcctttgtatatcttcttttgagaattgtctattcatgtccttagcccactttttgatgggattttttttttttaccaatttatttgagttcactgtagattctagatattagtcctttgtcagatgtacacattgtgaagattttctctgttctctgtttactctgctgactgttccctttgctgtgcaaaagctctttaatttaattag

SEQ ID NO: 927017 - DNA, 633 bp, Homo sapiens
accatttatttctttctcttgtctgattgctctggctaggacttccagtactatgttgaagaggagtggtgaaagtgggcctccttgtcttgttccagttctcagagagtatgcttttaacttttcccctttcagtattatgttggctgcgggtttgtcatagatggtttttatcacactatggtatgtcccttgtaggccaattttgctgagagttttaatcagaaagggacactgaattctgttgaatgcttttttttgcatctattgagattatcatgtgatttttgtttttaattctgtttatacagtgtttcacatttattgacttgcatatgttaraccatccctgcatcccttgtatgaaacccacttgatcatggtggatttttttttgatatgttggattttgttagtattttgttaaggattttagcatctatgttcatcaaggatattggtctgtagttttgttttttgattatgtccttccctggttttggtgttagggtggtgctggcttcatagaaggaattagggagggttccttctttctctgtcttatggaatagcatcattatataatgtccctctttgtctcttaactgctattgctttaagtttgttttgtct

SEQ ID NO: 927018 - DNA, 564 bp, Homo sapiens
cagaaagcacaaggggtaagggaattccctttcctagtcaaagaaaggggtgacagatggcacctggaaaatcgggtcactcccaccctaatactgcacttttctaacaggcttaacaaatggcacagcaggatattatatcccacacctggcttggagggtcttatgcccacagagcctcgctcattgctagcacagcagtctgagatcagactgcaaggcagcagtgagaatgggggaggggcgcctgccattgcsgaggcttgagtaggtaaacaaagtggccaggaacctggaactgggtggaacccaccacagctcaaggaggcctgcctgcctctgtatgctccacctctgggggcagggcacagataaacaaaaggcagcagtaacctctgcagacttaaatgtccctgtctgacagctttgaagagagtagtgtttctcccagcacacagcttgagatctgagaatgggcagactgcctcctcaagtgggtccctgatccccaagtagcctaactgggaggcaccccccaagtaggggcagactgacacttcacat

SEQ ID NO: 927019 - DNA, 568 bp, Homo sapiens
agttacctggagatctgcctaagcatgaagcagagagggtcccccaacaccaagatctttgcacaggaggagtggggtgactcagactgctgaaccaggaaagcagttgctctgagtgacaggacatctgcctgagcatggagtggagagggccccccgcctccccagcccatgcatcaggatctctgcacaggaatggtaggataactcagacggttgaaccaagtgaacagttcctctgaatgcctgaagatctgcctgggtgggaggcagagarggctcttctgcaccaagctatctgcacaggaggggtatggtgactcaggcaagctggtgctctgaatgccttgaaatctgtttgggcatgcagtaaagagagactcaccacacaaggtctctgcacaagagaggtagggctattcaggttggtagactatacaagtaggcgctctgaatgcctggagacctgcctagacaagtgtcagagaggacccctgcaccccatactacaatctatgtccaggaagggtggggtggctcaggctgctggaccaggcaaatgggtgct

SEQ ID NO: 927020 - DNA, 581 bp, Homo sapiens
aaactcccatggatggtgaggataggcagcatggcggaagtgtgcagagtggtggtgagggtggctgctattgcagcatatagcctaccttaaaggtagatacctgaaagatactcaggtaacaaggaaaaagtccaattctggttgtagatcactcttgggaatagattttttaaagtataagacccccaaaatgccagagtataaacgaccctccctttcaatcatgtatccttgtttttcctatttcccacattataaatatcaaagacctgagcatttacatcagattggtgtgctcaaaacttcttgaaaatggtgtgtaaaatgtcagtaagatgaaatgggttgtaaaatgtcagtaagatgaaatgggttaaaaagagaaatgcagcatattatacttctgattatttctgcagccacaagrttttcattaagcttcaagcatgtgggtttgtgattatgttcatgacaacaaacactaaaacatggaacaagatccgtagttcaaagaaatgaaatattccagaatttatccacatattccaatatactgtttttgtgtattttgtttccaa

SEQ ID NO: 927021 - DNA, 703 bp, Homo sapiens
atgggagtaatagttggaatggccatggcaatttcttaaaataagtcaacaataaagtttgctgcattgatagactcttcctttcacaaaacgcttctctgtagcttgcagtgctgtttgacagcattttccccagagtagcatatctttcagaattacagtcaattctcccactcctttgtcaactaaatttttgtaatattcaaagttctttgttgtcattttaacaatgtgcacagtatcttcatcaggagtagatgccatctgaaagaaccattttatttgtttatccacaagaaacaactcctcgctgggcacagtggctcactcttgtaatcccagcactttgggaggccgaggcgggcggatcacctgaggtcaggagttcaagaccagcctgascaacatggagaaaccccatctctactaaaaatacaaaaattagtcaggtgtggaggcgcatgcctgtaatcccagctactcgggaggctgaggcaggagaattgcttgaacccgggaggtggagtttgcagtgagccgagatcgagccattgcactccagcctgggcaacaagagtgaaactctgtctcaaaatagaaaagaaaaaacaactcctcatccattcaggttttatcatgagattgcagccattcagccacatctttaagccccacttctaattctagttgtggggatattttc

SEQ ID NO: 927022 - DNA, 568 bp, Homo sapiens
  misc_feature 188: n = A,T,C or G
tgtttgggtaattagaccacctattcaaagaacctcaattttgctagtttagaaaattaaaatatgactattcctttttttataaattaaactctatcttataaaagtaagaaaacatttaagagtatctcagtacaacctgtggcaaagatgtatcagctatgcgctttatgtcttgtcagccttcntacaactccacacaccccctaaggacaaattagtgaaagaatattttgagagtggaagctatgatatcatcacagtaccgttgaatcacatctcactgatgtaaaaacacttgccagggttggctaattgaaaagtagatgatgactaacagtctatttgggaggcgtccccyagttagtacagacattgtattgccccacatgttgagaagccttgaacactactgtgacagtttacccacatacagaagaaattgcttcaaatattttatcaaaggctggcaaattttagattcaggtaatttttgttttgttttgttttgagacagagtctcgttctgtcacccaggctgcagtgcagtggtgcgatcttcggtcac

SEQ ID NO: 927023 - DNA, 607 bp, Homo sapiens
actgatataattaattaactaataagtaattacaaagaaagtctctttcatagagtagaaaaataatgtataaatgataaaaatagagtaagaacttttcagggtagcatcccccataataataattggtacaggcaaacataatcaatggaaaataaaattaatgagtgaaaattgcaagagtacagactattcacatgttctcaaaatgcctctctattagatacttatttgtcaaaggattatactaactttacagtggagaaatctttcaggtatcacctaaattgtgattcacccataacataaaattaaatgaagttattaaaaatgactgtccctttctctttytttctctttgtgtttttttctctatatatatacataaatatatatgcacataaatacatatagatctctttatatatacacatagatacatatgggtgtctatatatatgatatacatattatctctcttctgtgtgtgtgtttgtgtgtttatgatatgatatgggttggctctgtttccccacccaaatctcatgtcaaattgtaatcctcatgtgtcagaggagggtcctggtgggaggtagttacatcataa

SEQ ID NO: 927024 - DNA, 607 bp, Homo sapiens
actgatataattaattaactaataagtaattacaaagaaagtctctttcatagagtagaaaaataatgtataaatgataaaaatagagtaagaacttttcagggtagcatcccccataataataattggtacaggcaaacataatcaatggaaaataaaattaatgagtgaaaattgcaagagtacagactattcacatgttctcaaaatgcctctctattagatacttatttgtcaaaggattatactaactttacagtggagaaatctttcaggtatcacctaaattgtgattcacccataacataaaattaaatgaagttattaaaaatgactgtccctttctctttctttctctttgtgtttttttctctatatatatacataaatatatatgcacataaatacatatagatctctttatatatacacatagatacatatgggtgtctatatataygatatacatattatctctcttctgtgtgtgtgtttgtgtgtttatgatatgatatgggttggctctgtttccccacccaaatctcatgtcaaattgtaatcctcatgtgtcagaggagggtcctggtgggaggtagttacatcataa

SEQ ID NO: 927025 - DNA, 627 bp, Homo sapiens
tgagatgaagcttccagaggcaaccaaaagcccctctgccactgccattgcagtggtactgtccttgctgccctcagactggaaaaggagcaaagactctcagtgatttaaccacacctcctttaggacagccactgctgtcctaaaaagaagaagccagtcagtttccccccatgagccacctggcctctctgctcatcaatatgcagggccccctggcttgagtccacaatgcagccaccccaccccaggctgatagccccaactgggagtggctctgccattttctgatatggaaacctgagagacaagtgaaagrccctcttccacatgtccctacccatggcaaggtcccttctcctgctgcctcccagctagaaaggaacataaagcctgagctcacccagggctgcagtgtgcagccaagaagtgccaagccaagagctatagccaggacttgagtgggagaggattccacactcttagagcacagagagggagcatatcgcagtcatgaggaaatacaaagcagtgaagtgactaagcaagagcctacctactggtcattatgcttaagcaccacctacttgatcacaacccaaacttcaacaacaaaaatactttgct

SEQ ID NO: 927026 - DNA, 666 bp, Homo sapiens
gaaaacttccttaacctcgctagagatgccaatgttcaaaatcaggaaatgcagagaatttctatgagatattacacaagaagaccatcctcaagatacagaatcatcagagtctcccaggtcaaaatgaaagaaaaaatgttaaaggcagctagagagaaggcataggtgacctaaaaagtgaaacccatcaaactaacagcaaacctttcagcrgaaactccacaaaccagaagagattgaaggcttatattcagcatttttaaagaaaagaatttgcaaccaataattttatatctagccaaactaagcatcataagcaaaggagaagtaagacaagcaaatggtgatggaatccattaaccctggacatgccttacaaaaggttctgtaaggagtgctaaatatggacaagaaagaatgttatgcaccactacaaaaacacacttaagtaaactgaccactgagaatataagacaaccacaaaaacaagtctacataataaccatttaccaacaccatgacaggatcaaatctccacataccaatattaatgctggatgtaaatgggctcaatggcaccaattaaaaggcacagagtagcaagctggataaagaagcaagacccaatggtatgctgtcttctagagactcatctcacatgca

SEQ ID NO: 927027 - DNA, 666 bp, Homo sapiens
gaaaacttccttaacctcgctagagatgccaatgttcaaaatcaggaaatgcagagaatttctatgagatattacacaagaagaccatcctcaagatacagaatcatcagagtctcccaggtcaaaatgaaagaaaaaatgttaaaggcagctagagagaaggcataggtgacctaaaaagtgaaacccatcaaactaacagcaaacctttcagcggaaactccacaaaccagaagagattgaaggcttatattcagcatttttaaagaaaagaatttgcaaccaakaattttatatctagccaaactaagcatcataagcaaaggagaagtaagacaagcaaatggtgatggaatccattaaccctggacatgccttacaaaaggttctgtaaggagtgctaaatatggacaagaaagaatgttatgcaccactacaaaaacacacttaagtaaactgaccactgagaatataagacaaccacaaaaacaagtctacataataaccatttaccaacaccatgacaggatcaaatctccacataccaatattaatgctggatgtaaatgggctcaatggcaccaattaaaaggcacagagtagcaagctggataaagaagcaagacccaatggtatgctgtcttctagagactcatctcacatgca

SEQ ID NO: 927028 - DNA, 666 bp, Homo sapiens
gaaaacttccttaacctcgctagagatgccaatgttcaaaatcaggaaatgcagagaatttctatgagatattacacaagaagaccatcctcaagatacagaatcatcagagtctcccaggtcaaaatgaaagaaaaaatgttaaaggcagctagagagaaggcataggtgacctaaaaagtgaaacccatcaaactaacagcaaacctttcagcggaaactccacaaaccagaagagattgaaggcttatattcagcatttttaaagaaaagaatttgcaaccaataattttatatctagccaaactaagcatcataagcaaaggagaagtaagacaagcaaatggtgatggaatccattaaccctggacatgycttacaaaaggttctgtaaggagtgctaaatatggacaagaaagaatgttatgcaccactacaaaaacacacttaagtaaactgaccactgagaatataagacaaccacaaaaacaagtctacataataaccatttaccaacaccatgacaggatcaaatctccacataccaatattaatgctggatgtaaatgggctcaatggcaccaattaaaaggcacagagtagcaagctggataaagaagcaagacccaatggtatgctgtcttctagagactcatctcacatgca

SEQ ID NO: 927029 - DNA, 725 bp, Homo sapiens
atattttctttatttccttctataagctgttttttattaaagagctttttttttttagatttttttctttaaaaacaaagacacagacacattaacccaggcctacacagggccaggatcatcaatattacagtcttccactttcacatcttgtccctctggagggtcatcaggggcaataatacgcatgcagccatcatcycctctgatgacaatgccttcttctggagacctcctgaaggacctgcctgaggctattttacagttagcttcatatgtgtatatatatatgtgtacatatacatgtacatgcatgtgtgtatatatatgtacatatacatgtacatgcatgtgtgtacatatatgtaaaataaagttttatacatatatacgtgtatatgtgtatatgtatggagtatactcaaataattataaaaagtaaacaaaccatgatagtcatgtattatcataatcacgtttttatgctgtatataattgtatgtgctatattttcatgactagcagtgcagtaggtttgtttacagcagcattaccaccaacacatgagtaatatgtcatgccactatgttatgaaggctacaatgtcgttaggtgataggaatttttcagctccatcataatcttacaggactgctatgtggtcctttgtttactaaaatgtcattatgtgacatgtgactgtatttaatttcatttgtttattc

SEQ ID NO: 927030 - DNA, 725 bp, Homo sapiens
atattttctttatttccttctataagctgttttttattaaagagctttttttttttagatttttttctttaaaaacaaagacacagacacattaacccaggcctacacagggccaggatcatcaatattacagtcttccactttcacatcttgtccctctggagggtcatcaggggcaataatacgcatgcagccatcatctcctctgatgacaatgccttcttctggagacctcctgaaggacctgcctgaggctattttacagttagcttyatatgtgtatatatatatgtgtacatatacatgtacatgcatgtgtgtatatatatgtacatatacatgtacatgcatgtgtgtacatatatgtaaaataaagttttatacatatatacgtgtatatgtgtatatgtatggagtatactcaaataattataaaaagtaaacaaaccatgatagtcatgtattatcataatcacgtttttatgctgtatataattgtatgtgctatattttcatgactagcagtgcagtaggtttgtttacagcagcattaccaccaacacatgagtaatatgtcatgccactatgttatgaaggctacaatgtcgttaggtgataggaatttttcagctccatcataatcttacaggactgctatgtggtcctttgtttactaaaatgtcattatgtgacatgtgactgtatttaatttcatttgtttattc

SEQ ID NO: 927031 - DNA, 592 bp, Homo sapiens
gttatttctcttccttctttgcttctgagactccccaatgtgtatattggttcacttgatgatcctataagtcccttaagctttcttcagtttttttttttttgcttctctgactaaactatttccaatgacctgttgtttaattgattcttttttctgcttggtgtagtctgctgttgaacttccctagcraatttttagtttacagttactatgtttttcacctccatgatttgattttggaattttaaaatatcttctattgttttgttgaaatcattacttagttcatgcacatttccttgaccttggtgaacatctttatgacagttatttttaattatctgtcaggtaaattatataaacccatttcattagggttggtttctgtaaatttatcttgttcctttgtttgaaatatctttacctgattcttcatcttccttctctctctgtattgttatctatgcattagacaaagcaggtacctcttcaagtccctcatggactggtcttgcacaggaacagaaccccaccaatctgcccagacaatgattctggagtcttcttccaactctttccctccccaggg

SEQ ID NO: 927032 - DNA, 768 bp, Homo sapiens
aactgctgctctcctcaaagctgtcagacagggacattttagtctgcagaggttactgctgtctttttgtttgtctgtgccctgcccccagaggtggagactacagaggcaggcaggcctccttgagctgtggtgggctccacccagttcgagcttcccggctgctttgtttacctaagcgagcctgggcaatggcgggcgcccctcccccagccttgctgccaccttgcagtttgatctcagactgctgtgctagcaatcagcgagactccgtgggtgtaggaccttccgagccaggtgcgggatataatctcctggtgcaccgtttcctaagcccattggaaaagtgcagtattcgggtgggagtggcctgattttccaggtgccgtctgtcacccctttccttgaccaggaaagggaactccctgaccccttgcrcttcccgagtgaggcaatgcctcgccctgcttcggctggcgcacagtgtgctgcacccactgtcctgcgcccactgtctggcactccccagtgagatgaacccagtacctcagatggaaatgcagaaatcacccgtcttctgcgtcgctcacgctgggagctgtagactggagctgttcctattcggccatcttggctcctccccccagtgttgattgttaagtgtttttaaacgttatcatctaccctttgatgctttttctcaacaatctttaatttttgggaattgatcttttatgttctattttttgcctccattgatttggaagt

SEQ ID NO: 927033 - DNA, 572 bp, Homo sapiens
aaatgtggaaatgattgactctttctgtggttccctactttacagatcaggaaatagaagcactgagaaatcaggtaacttgctgacactcacacaactagtgatatggacaggagaccgggaaatcctgggtagaagagggmagttcctgggcaaaggccccaccctcaagcctgtatacccatggccctaaatgagaccaggcattcctgtttttgtgcccaaaaagttgccttttggcctgctatgccccctatcctgcacccatataaaccctgaacaccaggcttcagaaatagaccagcagacagatggcagaatgatgcggcagagagagagagagacgaggaggaacatctgaactctgagaggagttcggctggtgggtcgtcggagaggagtcgggcctattccagctccctatccatcccaggatagggatagccacctccaccactcaataaaaccttgcattcatccttcaagcccgtgtgtgacccaatttttctgggatgctgggcaagagctcgagatacagaaagctgtcactggccctctgcccttgtgaaaag

SEQ ID NO: 927034 - DNA, 575 bp, Homo sapiens
agacttggaaccaacctaaatgtccaacaatgatagactgaattaagaaaatgtggcacatgttcaccatggaatactatgcagccataaaaaatgatgagttcatgtcctttgcagggacatggatgaaactggaaaccatcattcccagcaaactatcaccaaggacaaaaaaacaaacaccgcatgttctcactcataggtgggaattgaacaatgagaacacatggacacaggtaggggaacatcacactccagggactgttgcggggtgggggcaggggggagggatagctttaggagatatacctaatgctaaatgacgagttaatgggtgcagcacaccaacatggcgcatgtatacatatgtaactaacctgcacaatgtgcacatgtaccctaaaacttaaagtataataataatcaaatttwaaaaaaaaatagaatagctctcgcgctattctctactaaattatggctgcttctctcaacatgtcgttttacaggaaaatgttccttgaataggaaatgtaaggaaaaccgaaaccaaaattatacagcaaagagaatacaat

SEQ ID NO: 927035 - DNA, 604 bp, Homo sapiens
tctgtgtatgatagctttctcagatgctggttgtattagcaaggtgctcagtgtgtgtgcaagttcactgtttcctatagagttggaatggcagaggtttcttgatgcttatctcatgcccccatggtgtgcacttttttatttgctactttttccccagtattctatttactgggttgaatagttcaggcttaagccaataggggagatatctacaagtaaaaactctctgtggctaaaatagggggaaaatgcattatccaatggtggacagaggtcccagccttgacagaggtggctgaaggagctctctatgaaacactctgaggtattatcagagggaatggcaatagccacctcagctccactgccagtccagcaggaaagctatccacctcccagacacactgcttacccagtatttcagctattcagatcagacargtacctttcttcatttgcaggattgttgatattccaaggaaagaggaattgtgactctacctctcatgaaagactgcacctggagggtgcacctcctgtggcaatgtaatcaccctgaattgttccagaaaggctgtctatgccgagcctctgtgggaaa

SEQ ID NO: 927036 - DNA, 565 bp, Homo sapiens
accctaatactgcacttttccaacggtcttagcaaacggcacaccaagagataatatcctgctcctggcttggaggctcccacgcccacagagcctcgctcactgctagcacagcagtctgagatcaaactgcaaggcggcagcgaggctcggggatgggcgcctgccattgctgaggcttgagtaggtaaacaaagcagccaggaagctcgaactgagtggagcccaccccagctcaaggaggcctgcctgcctctgtagactccacctctgggggcagggcatagccaaacaaaaggcagcagaaacctttgcagacttaaatgtccctgtctgacagctttgaagagagcagtggttctcccagcatggagtttcagatctgagaacrgacagactgcctcctcaagtgggtccctgacccccgagtagcctaactgggaggcaccctccagtaggggcagactgacacctcacacagccgggtactcctctcagacaaagcttccagaggaacgatcaggcagcaacatttgctgttctgcagcctctgctgctgataccc

SEQ ID NO: 927037 - DNA, 500 bp, Homo sapiens
gatgagctaaaaaaagtcacaaaaaaatctcagaacgttataagaaagtttatgaatttgtgctgggccacaatcaaagccatcctgggctgcatatggcttgtgggctgcgtgttggagaagcttagtctaactggaacatgattctygaggctaccatctgaacactagaggcaaaagtgggaggagggcaagtggtggagaggaaacaggactaacgtgcagctcatgcttggatggacgaaacagcatctggagactcacattgtgaacttttgctccaggaacaactgcagaaacacaccaggaaaaccaaaagaattcaaagaccatttgaaagacgtggcttgccactgcaaatgctgtgacacagccaaaaaactccaaagacaaaagacataagctcttggaagcactatggccctgcccatcacctgagaaacataagtattcatcctggccaacataggacaacattatatcccccttttactactaca

SEQ ID NO: 927038 - DNA, 569 bp, Homo sapiens
tgagtttttcttttctattgcatagtcaagcaggaaattttccaaacttttatgttctgcttcccttataaaactgaatgcctttaacagcacccaagttaccccttgaatgttttgctgcttagaaatttcttccaccagataccctaaatcatttgtctcaagttcaaagttccacaaatctctagagcaggggaaaaatgtcaccaatctctttgctaatatgtaacaagagtcacctttactgcagttcccaacaaattcctcmtctccatctgagagcacctcagcctggaccttattgtacctattctatcaacattttgagcaaagccattcaacaagtctccaggaggttccaaaatttcccacattttcttgtcttcttctgagtccttcaaaatgttccaacctctgcctgtttcccatttgcaaagttgcttccatattttcaggtattttttcagcagtgtcccactctgctggtactaatttactgtattagtccagtccatagtcatgctactgatgaagacatacccaagactggggagaaaaagaggtttagt

SEQ ID NO: 927039 - DNA, 569 bp, Homo sapiens
tgagtttttcttttctattgcatagtcaagcaggaaattttccaaacttttatgttctgcttcccttataaaactgaatgcctttaacagcacccaagttaccccttgaatgttttgctgcttagaaatttcttccaccagataccctaaatcatttgtctcaagttcaaagttccacaaatctctagagcaggggaaaaatgtcaccaatctctttgctaatatgtaacaagagtcacctttactgcagttcccaacaaattcctcctctccatctgagagcacctcagcctggaccttattgtacctattctatcaacattttgagcaaagccattcaacaagtctccaggaggttccaaaatttcccacattttcttgtcttcttctgagtccttcaaaatgttccaacctctgcctgttwcccatttgcaaagttgcttccatattttcaggtattttttcagcagtgtcccactctgctggtactaatttactgtattagtccagtccatagtcatgctactgatgaagacatacccaagactggggagaaaaagaggtttagt

SEQ ID NO: 927040 - DNA, 640 bp, Homo sapiens
aaataaaccttgctactgctcactcattgggtccgtgccatctttaagagctgtaacactcactgcgaaagtctgtggcttcattcttaaagtcagcaagaccacgaacccaccggcaggaaccaactccggacacaccagtgctttgagaggccaaggcrggtggatcatgaggtcaggagttcaagaccagcctggccaagatggtgaaaccccgtctctactaaaaatacaaaaattagccgagagcggtggcaggtgcctgtaatcccagctacttgggaggctgaggcaggagaattgcttgaacccagggggcggaggttgcagtgagcaaagatcgcaccactgcactccagcctgggcaacagattgagactctgtctcaaaaaaaaaaaagaaaatacaaaaattagccaggaatgatggcgggtgcctttaatactttaatactagctacttgggaggctgaggcaggagaatcgcttgaacctgggaggtggaggttgcagtgagctgaaattgcgccattgcactgcagcctgggagacagagcgagactcagtctcaaaataaaagaaaagaaaagaaaagaaaaaaatgtgttcagtaagccttggtccccaccatcaaaactacc

SEQ ID NO: 927041 - DNA, 607 bp, Homo sapiens
gcctgagttaattctcagatctatgttttagcagaaatgaaatctccaagaaggattagaagattaagttgaaactctcctagaaagtagaacaaaaaggcatagatgaaaaatagaaaataaaaaaggttgtcaaattaacggatyactctgtgaagtcttatatttgaataatagaagtgccagaaaaatagtggtgaaaactaaggaaggggaatcaaagaaataaattaagaaaaattttcagaactgaagtatgagttttcatacccaaagtaataagcacctacataatagattaatgtatacccacaccaaggttctaatcattgtgaaatttaatgatactggaaagagatgaccccgaaaacttccaaagctgtcacaatgaattgggaatcaagatgacattggacttctcaacagcaacgttgtattctaaaaaatagaatattggcttcaaaagttaagagagactgggcactgcacatcacacctgtaatcccagcagtttgggaggctgaggcgggaagattacttgagcccaggagtttgagaccagcccaggcaacatagcgagaccctgactctacaaaaaataaaacat

SEQ ID NO: 927042 - DNA, 609 bp, Homo sapiens
ggacttcactgtccatatctctatcagcattttggccacaaccatttaaccagtctctaagaagttccaaactttccctcatcttctgttttcttctaagccctccaaagtcttctaacctctgcctgttacccagttccaaagctacttccacattttcagttatctttatagtaacgccctactcctcagaaccaattttctgtgttagtccatttgtgttactgtaaaggaatacctgagactgggttacttataaagaaaagaggtttaattcgttcatggttctgcaagctgtacagaaagcatggtgccagcatctgcttggcttttgtgaggtcttcaggagsttacaatcgtggtggaaggcaaagcagtagcaggcatgtcacatggcaagaacaggcatgagagagagaaagggggaagtttacactcctctaaacaaccaggtctcatgtgaacaccaggtcccacctccaacgttggagaatacatttcaacatgagatttggaggacacaaacatccaaaccatatcagtgggtcttggagaagaacattctttctctttgttcatgtttctgcatgggaagaatatctactagag

SEQ ID NO: 927043 - DNA, 574 bp, Homo sapiens
taggaggctgaggcaaaaggattgcttgagcccaggtattaaagccttcagtgagctgtgatcacaccactctactccagcctgggcaatagagtgagaccctgtgtctaacaaaaaacaagagtgagaaatgaaaacatattcacagaaacatttgcacataaatctttatagcagcattattcataacagccaaagcttggaaactactcagatgtccatcaaatgatgaatggataaataaaatgtagtatatctggcygtataatggactacatttcagtgataaaaaggattgaagtacttactgacacatgctacaacatgaatgaaccttgaaaatgttatgctaagtgaaagaagccagtcagaaaagacctaataatggataattctatttacatggaatgtccagaataggcaaatttataaaaacagaaagtagtttagtagttgcctagggctgggagggcctggtgggtggaaatgaagagtgactgctaatgaatacagggtatctatactatttggggtgattaaaaaaagttccaaaattgattgtggtgatggttgc

SEQ ID NO: 927044 - DNA, 574 bp, Homo sapiens
taggaggctgaggcaaaaggattgcttgagcccaggtattaaagccttcagtgagctgtgatcacaccactctactccagcctgggcaatagagtgagaccctgtgtctaacaaaaaacaagagtgagaaatgaaaacatattcacagaaacatttgcacataaatctttatagcagcattattcataacagccaaagcttggaaactactcagatgtccatcaaatgatgaatggataaataaaatgtagtatatctggccgtataatggactacatttcagtgataaaaaggattgaagtacttactgacacatgctacaacatgaatgaaccttgaaaatgttatgctaagtgaaagaagccagtcasaaaagacctaataatggataattctatttacatggaatgtccagaataggcaaatttataaaaacagaaagtagtttagtagttgcctagggctgggagggcctggtgggtggaaatgaagagtgactgctaatgaatacagggtatctatactatttggggtgattaaaaaaagttccaaaattgattgtggtgatggttgc

SEQ ID NO: 927045 - DNA, 574 bp, Homo sapiens
taggaggctgaggcaaaaggattgcttgagcccaggtattaaagccttcagtgagctgtgatcacaccactctactccagcctgggcaatagagtgagaccctgtgtctaacaaaaaacaagagtgagaaatgaaaacatattcacagaaacatttgcacataaatctttatagcagcattattcataacagccaaagcttggaaactactcagatgtccatcaaatgatgaatggataaataaaatgtagtatatctggccgtataatggactacatttcagtgataaaaaggattgaagtacttactgacacatgctacaacatgaatgaaccttgaaaatgttatgctaagtgaaagaagccagtcagaaaagacctaataatggataattctatttacatgraatgtccagaataggcaaatttataaaaacagaaagtagtttagtagttgcctagggctgggagggcctggtgggtggaaatgaagagtgactgctaatgaatacagggtatctatactatttggggtgattaaaaaaagttccaaaattgattgtggtgatggttgc

SEQ ID NO: 927046 - DNA, 604 bp, Homo sapiens
gagcttatagcggtggaagctttatccgtttgtttttagcgccacactacaacctcccaagcagagattattctaaaaaaaatgattgcgcatatacttgcaaactcataggaataaaatgattttggtctcaagcaatgaccaaagaagkgattttttttttttcttttttttttttttgagacagagtctcgctctgtcgcccaggctggagtgcagtggcgcgatctcggctcactgcaagctccgcctcccgggttcacgccattctcctgcctcagcctccagagtagctgggactacaggcgcccgccaccatgcccggctaatttttttgtgtttttagtagagacggggtttcacccatgttagccaggatggtctcgatctcctgacctcgtgatccgcccgcctcggcctcccaaagtgctgggattacaagcgtgagccaccgcacccagccaagaagtgatgttttaaaaagtcatgaagctttagaattggatggaggtagaagaagctatgacagataatgttttgcaaccgtggctatagaaactgtcagtgactgtagcattttattctccaatatcatgtcaacacc

SEQ ID NO: 927047 - DNA, 623 bp, Homo sapiens
ccatatcagaaataaagttgttttgcttttgtatcatttgtgtgttcactggagtagcacttttaatttcctccaataactttttctttgcattcacaatttggctgcaagaagcctaactttcaacctaacttggctttagacatgccttcctcactaagcttaatgatttataggtttgtttgttttttgtttgtttgtttttttaagatggagtctactgtggctcaagctggagtgcagcggtgcgatttcggctcactgcaacctctgcctcyttggttcaagctgttctcctgcctcagcctcctgagtagctgggattacaagcatgcaccaccatgccaggctaatgtttgtattcttagtagagacggggtttcaccatgttggtcaggctggtcttgaactcctgacctcaagagatctgcccacctcggcctcccaaagtgctgagattacaggcgtgagccaccatgcccagcccacttctagctcttgatttaaagtaagagacatgcaactcttcctttcacttgaacacttagaagctgttgtagagttattaattggccttatttcagtattgttgtttcttagggaatcgggaggcctgaggagag

SEQ ID NO: 927048 - DNA, 592 bp, Homo sapiens
taaagttgttttgcttttgtatcatttgtgtgttcactggagtagcacttttaatttcctccaataactttttctttgcattcacaatttggctgcaagaagcctaactttcaacctaacttggctttagacatgccttcctcactaagcttaatgatttataggtttgtttgttttttgtttgtttgtttttttaagatggagtctactgtggctcaagctggagtgcagcggtgcgatttcggctcactgcaacctctgcctccttggttcaagctgttctcctgcctcagcctcctgartagctgggattacaagcatgcaccaccatgccaggctaatgtttgtattcttagtagagacggggtttcaccatgttggtcaggctggtcttgaactcctgacctcaagagatctgcccacctcggcctcccaaagtgctgagattacaggcgtgagccaccatgcccagcccacttctagctcttgatttaaagtaagagacatgcaactcttcctttcacttgaacacttagaagctgttgtagagttattaattggccttatttcagtattgttgtttcttagggaa

SEQ ID NO: 927049 - DNA, 592 bp, Homo sapiens
taaagttgttttgcttttgtatcatttgtgtgttcactggagtagcacttttaatttcctccaataactttttctttgcattcacaatttggctgcaagaagcctaactttcaacctaacttggctttagacatgccttcctcactaagcttaatgatttataggtttgtttgttttttgtttgtttgtttttttaagatggagtctactgtggctcaagctggagtgcagcggtgcgatttcggctcactgcaacctctgcctccttggttcaagctgttctcctgcctcagcctcctgagtagctgggattacaagcatgcaccaccatgccaggctaatgtttgtattcttartagagacggggtttcaccatgttggtcaggctggtcttgaactcctgacctcaagagatctgcccacctcggcctcccaaagtgctgagattacaggcgtgagccaccatgcccagcccacttctagctcttgatttaaagtaagagacatgcaactcttcctttcacttgaacacttagaagctgttgtagagttattaattggccttatttcagtattgttgtttcttagggaa

SEQ ID NO: 927050 - DNA, 770 bp, Homo sapiens
ctgctgggatgctggaatgacatggcgtattagtctgtttttatgctgctgataaagacatacctgaggctgggaagagaaagaggcttaatggacttacaattccacatggctggggaggcctcctaatcatggtggaaggcaaggaggagcaagtcacgtcttacatggatggcaaagagcttgtgtagggaaattcccatttttaaaaccatcagatctcgagagacttattcactatcgtgagaatagcatgggaaagaaccgtccccatgcttcaattacctcccactgggttcctcccatgacacatgggaattgtgggagttacaattcaaaatgagatttgggtggggacacagccaaacggtatcatttcatccctggcccctyccatatctcatgtcctcacattttacaaccaatcacgcttttcaacactctcccaaagtcttaactcattgcagtgtcatctgagacaaggcaagtcccttctacctatgagcctataaaatcaaaagcatgttagttacttcctggataaaatgggggttcaggcattggataagtacaccccattccaaatagtagaaattggcctaaacaaaggggctacaggccccatgcacgtccaaaatccagtggggtagtcaaatctagaagttccaaaatgacctcctttgactctgtgtctcacatccaagtcatgatgatgcaaaaggtgggttcccatggtcttgggcatgggaactgtggctttgcaggataca

SEQ ID NO: 927051 - DNA, 573 bp, Homo sapiens
cctacaccttgatcttgaaattctagcccccacaactgtgagaaaataaatttctgttgtttaagtgccacgcagttggtgatattttgttgtggcagccctagcaaattaatatagttcattttccaccatatttgattgaaatttggatataacaaagaagatcataaaaatagtaagaataagatgcttctaaaagccaacttttgctaacagttgaaaaatcaggtattagatcatggttaagaaacwtgacacatatggaatcacattggccccatcacctgtgagctgaaggtctaaggtgttgagttgagctgaggtggggcttgcagagttggaacatggagccttagactctctgtccccttagggcttgtcctcagtctgtcatctttcaatctggcagggggaggaccctgaaatagaaggtcttaaagggcaagggaagagtagattgagggggtttcctggtggcaagtgttcctgatgggaagtgaatcaggggtccattctgccctctcaaacaccaatcagcatggacagcagcagtctgggttgtggaatgctgca

SEQ ID NO: 927052 - DNA, 540 bp, Homo sapiens
ttatattcctctagcctgaaatgtaccactgagttgcttcccagaaacctgggaaccgattttcctcatttaagtgcattttgtaaaagacttcaaaagttcagactagcattttaaaaaacaaagcctccagcctggagacacgcagcccccgcccagcaggggcattcaaggagcacccttcttggggccgcctgtttgtgacaggcttaggaaaagcaggcagggcytatggaatctgcttctagggcaccaacatcagcttctgactgtgctcacaaagggactcagtcttccaaggcccagggcaggtgcagtcatcttcagggtgagctgatatgctggacccatgcccattgcagggctctccttccagagcaccttcctcctggacacccacacatcactctcctaacccctggctccccaacaagccaccccgacagagaaacagaggaggtactttaggggagcccaacagagccaaacaggcagactcacactgaaaatcccatgggatttcttgcccgagatgaatac

SEQ ID NO: 927053 - DNA, 556 bp, Homo sapiens
ggctataaaaaattggttgcttatatttcctgccttttgagacttttaatcttagaagccagttaccatgctgtggagcccaaactgtctttggagaggcccatgtggagatgaacagagacccccagctctcagccggcaccaacttgctaaccatgagtgagctgtgtgaaggagacaagctttctctaccaagccctagtaaatttcacacttttaagctaaaaataaatgatttttaaaaaacattattttaagccagtaagttttggtgagatttgttctgcagcaagacaaccgataatgattttgatacaccagaggcagggtgctgccttaacaaaatcctcaatcatagggctttggacttgagactaggtgatgggctgaagctggagggatctttaggagaatktaagtgaaaacttaaaaggacttctagaagaatactagaggaagcctatggagctttgaggacttaaaaaaaaaaaaaggaaggaaaaatctcagacaaccctctgttaaacaatagggcttcaataaatcttaagggtgt

SEQ ID NO: 927054 - DNA, 573 bp, Homo sapiens
tcctgcagaggtattcctagcttttgggttgagattatggagttttctagatataggatcatgtcatctgcaaacaaaaacaatttgacttcctctcttcctatttgagtaccgtttatctctttctctttcccaattgccctggcyagaactttcaatactatgttgaataggagtggtgagggagggcatccttgtcttgtgccagttttcaaggggaatacttcccacttttgcccattcattattacatcactatgggtttgtcatatatggctctctatcctgagatatgttccttcaatacctagtttattgagagtttttaacataataggatgctgaattttacagaaggccttctgtgcatctattgagataatcatgtgttttttgtctttcattctgtttatgcaatgaaacacatctattgattcgcatacgttgaacaaaccttgcatcccagggatgaagccaacttgatcacggtggataagctttttgatgtgctgtgggatttggtttgccagtattttattgagaatttttacatggatgttcatcaaggatatt

SEQ ID NO: 927055 - DNA, 709 bp, Homo sapiens
atactgcacttttcccacagtcttagcaactggctaagtgctgtggttttcagctccatcagttcatttaacaacctctctacactgtttattctagttagccattcgtctaaccttttttcaaggttttcaaggttttcaaggttttttgccacgtgcctggctcagtgagtcccatgcccacagagccttgctcactgctagcgcagcagtctgagactgacctgtgaggctgcagcctggtgcagggaggggtatcctccactgctgaggcttgagtaggtaaacaaagtggccaggaagctcgaactgggtggagcccactacagctcagcaaggcctactgcctgtatagactccacctctgagggcagggcatcactgaacaaaagcagcagacaacttctgcagacttaaatgttgctgtctgacagctctgaagagaacagtggttctcccagcatggtgttcaagctctgagaatggacagactgcctcctcaagtaggtccctgacccctgtgtggcctgactgggagacacctcccagtagggggcgatagmcacctcatacagtcgggtgcccctctgggatgaagcttctagaggaagggtcaggcagcaatatttgctattctgtaatatttgctgttctgcagcctccgctggtgatacccaggcaaacagggtctggagtggacctccagcaa

SEQ ID NO: 927056 - DNA, 619 bp, Homo sapiens
tgaagaggtccttcacttcccttgttaactgtattcctaggtattttattatcttaggggaaattgtgactgggagttcattcatgatttggctctctgcttgtctgttgtggtgtataggaattcttgtgatttctgcacattgattttgtatcctgagacttcgctaaagttgcttatcaacttaagaagtttttgggctgagtcaatgggcttttctagtcatagaaaagtttgcatgttgtctgcaaacaagggcaatttgactttctgtcttcttacttgaataccccttatttctttctcttgcctgaktggcctagtcagagattccaataatatattgaataagagtggtgagagagggcatccttgtgttgtgccagttttcaaggggaatgcttccagcttttgcccattcggtatgatattagctttgggtttgtcataaatgactcttattttgagatatgttgcttcaatatccagtttattgagaatttttaacatgaagggatgttgaattttatagaaggccttttctgcgtctattgagataatcatgtggtttttgtctttagttctgtttatgtgagaaattatatttgttgattcgtgt

SEQ ID NO: 927057 - DNA, 578 bp, Homo sapiens
tctcagtaaactatcgcaagaacaaaaaactgaacaccgcatattctcactcataggtgggaattgaacaatgaaatcacatggacacaggaaggggaatatcacactctggggactgttgtgggctagggggaggggggaggtgggagggacagcattgggagatatacctaatgctagacaacgagttagtgggtgcagcgcaccagcatggcasatgtatacatatgtaactaacctgcacaatgtgcacatgtaccctaaaactttaattaaaaaaaaaaaagtacacattcaatgaattaaaaactaagcaaaatcaccaagtgataagagctcttgattttaaaatatttgtagactttgtgagtttagacataagagacttgaattagagggtagggagcatagctcaaaacacgtctaaagctccgaatctcaaaataactggatttcatctcccaaacattgtttctaagttctacatcaaaagaaatataagcatttacttgtacaatattttagtcccatatgtaattccattaaatcataccagtacaggggaggcagagataata

SEQ ID NO: 927058 - DNA, 667 bp, Homo sapiens
agaaatatacctttatgtccaaccccatgggtatgtcaactctccagattagtgtcaaaatcttgtttggagagatctcaatcgttttttacttccatgagatatcacactggcgcactaaattgatgacattgtgttgattggatccagtgagcaagaactagccaacaaactgaaygtattggtgagatatttgcatgccagaggatgggaaataaatccaactaaaattcagggatcttctacctcagtaaaatgtgtaggggtccagtggtgtggggcctgttgagatattccttctaaggtgaaggataagttgctgcctacaaccaagaaagaggcacaacacctggaagaccaattggattttggaggcaataccttcctcatttgggtgtgttactctggcccatttatcaagttaccccaaaggctgccagttttgagtggggtccagaacaggagaaggctctgcaataggtccaggctgctgtgcaagctgctctgccatttggtccatatgacccagcagatccaatgtgcttgaggtttcagtgcagataagaatgttgtttgtggcctttggcaggcccccttaggtgaatcagagtggagtcctctagaatgttggggcaaggccctgccatcttctgcagataactactct

SEQ ID NO: 927059 - DNA, 646 bp, Homo sapiens
cctttatgtccaaccccatgggtatgtcaactctccagattagtgtcaaaatcttgtttggagagatctcaatcgttttttacttccatgagatatcacactggcgcactaaattgatgacattgtgttgattggatccagtgagcaagaactagccaacaaactgaatgtattggtgagatatttgcatgccagaggatgggaaataaatccaactaaaattcagggatcttctacctcagtaaaatgtgtaggggtccagtggtgtggggcctgttgagatattcyttctaaggtgaaggataagttgctgcctacaaccaagaaagaggcacaacacctggaagaccaattggattttggaggcaataccttcctcatttgggtgtgttactctggcccatttatcaagttaccccaaaggctgccagttttgagtggggtccagaacaggagaaggctctgcaataggtccaggctgctgtgcaagctgctctgccatttggtccatatgacccagcagatccaatgtgcttgaggtttcagtgcagataagaatgttgtttgtggcctttggcaggcccccttaggtgaatcagagtggagtcctctagaatgttggggcaaggccctgccatcttctgca

SEQ ID NO: 927060 - DNA, 728 bp, Homo sapiens
cagaaatatacctttatgtccaaccccatgggtatgtcaactctccagattagtgtcaaaatcttgtttggagagatctcaatcgttttttacttccatgagatatcacactggcgcactaaattgatgacattgtgttgattggatccagtgagcaagaactagccaacaaactgaatgtattggtgagatatttgcatgccagaggatgggaaataaatccaactaaaattcagggatcttctacctcagtaaaatgtgtaggggtccagtggtgtggggcctgttgagatattccttctaaggtgaaggataagttgctgcctacaaccaagaaagaggcacaacacctggaagaccaattggattttggaggcaataccttcctcatttgggtgtgttactctggcccatttatcaagttaccccaaaggctgccagttttgagtggggtccagaacaggagaaggctctkcaataggtccaggctgctgtgcaagctgctctgccatttggtccatatgacccagcagatccaatgtgcttgaggtttcagtgcagataagaatgttgtttgtggcctttggcaggcccccttaggtgaatcagagtggagtcctctagaatgttggggcaaggccctgccatcttctgcagataactactctccttttgagagatagctctttgcctgctactgggctttggtggaaactgaacgtttgcct

SEQ ID NO: 927061 - DNA, 613 bp, Homo sapiens
ggtccagaacaggagaaggctctgcaataggtccaggctgctgtgcaagctgctctgccatttggtccatatgacccagcagatccaatgtgcttgaggtttcagtgcagataagaatgttgtttgtggcctttggcaggcccccttaggtgaatcagagtggagtcctctagaatgttggggcaaggccctgccatcttctgcagataactactctccttttgagagatagctctttgcctgctactgggctttggtggaaactgaacgtttgcctatagatcatcaggtcaccatgcaacctgaagtgcctatcataaactgggtgctttctgatccatctagccataaagygggtcatgcacagcagcattccatcatcaaatggaagtggtatatacgtgatctgtctctagcaggtcttgaaggcaccagtaagttacatgaggaagtgccacaaatgcccattgcctccttcacttttgccaccccgccttctctcccccagactgcatcgatggcctcatggagagttcctttgatcagttgacagaggaagagaagactagggcctggttcacagaagggtctgtacgatatgcaggcaccactg

SEQ ID NO: 927062 - DNA, 593 bp, Homo sapiens
cgatattttttttaagacatggtttccttgaggtgtttgaatatgcctataattgccgatttaaaaagtttatttagtgaatctaagtctgggctccctcagagacagtttctgttgactgctttttttcctgtttgagtgtttcataatattttgttgaaaattgggcatttaaaataaaataatgtggcaactctggaaattggatattccctttctcctcccccaggatttgctgctgttgctgtttattgttacagcttgcctagtgactyttcctggacaaaggctatataaagtccgtccccttaagtccctgcttgtttagtttagtggttagctaatggttggacagagaagtcaccacaaccactgtctcctatcctttaccgacggcttgtgtgtttgtgttggggtgtgccatcacttcctatttgtgtagacagtcatgctcagccacaggtgacaaatgaggaccccctcacgtctttcctgggtgtgcacatggccttgcacctgcatgtggctgtctagatccccaggaatgtattggaccttttcaaagcccaccattaacactgtattccccacat

SEQ ID NO: 927063 - DNA, 662 bp, Homo sapiens
ctgctggcccaggtgctaagcccctcactgcccggggcccgcggggtccgccggccggccgctccgagtgcggggcctgccgagcccacgcccacccggaactcgtgctggcccgcaagcaccgcgggcagccctggttcccacccgcgcctctccctccacaccttccccgcaagctaagggagccggctccagaaaggggttcccacagtgcagcggcaggctgaagggctcctcaagtgccgccaaagtgggagcccaggcagaggaggcaccgagagtgagcgagggctgtgaggactgccagcacactgtcacctctcattatgaaatgtgtttcttcaatcataagaaagtcaaaatgactccttgatccatgggctgcagaatggatgttgtgttagcaggcatgaaaacagcattcatgtccttgcacatctccgygggagctctcaggtgaccaagtctattgttaatgggcagtcatatttgaaaggaatatttttttcctgagcagtaggtcaacaatgggcttaaagtgttcaataagccatgctgtaaacagatgtgctgccacccaggctctgttgttccatttctagagcacaggcagagtagatttagcatcattcttcagggccctactgttttggaaatggcca

SEQ ID NO: 927064 - DNA, 710 bp, Homo sapiens
tttactcttctcttttcctgtttgccaatgcaggtgacgaacttggccagcacaggtgaccagtctacagggtggaatgcctgcccttttgcacgcattcttgcaaaatgcataagcttgtatttctcagtaaacttttcaaagtaaaacattcatgcagaaaaaagcacaaatgacgcatgtagagctttatgcattttcacaacctgagcacacccgtgtcacccagaatgagaagcagaatataaygggcattgtggaagcccccacatgctccttcccccaagggggtcactcccctgactctgactccagaaagcagaagtagctgtcctgtgctctatacaaatggcatcctgcaccatgtaccccttggtgcttggctgctgttgctcaactgcacatctgtgagattcacccaggtggttgtgtctggtttgctctggttcgttcgctctcatgctgtcacatattcccttgtagaaaactaccccaggccatttgcccagtctcctgttgttagatgtgtgggttgtttccagcttggcgctattacaaacagggctgcacattctggaacaagtccttcggtgatcataagcacacgcttctgttcggtaaacggctaggggtggtattgctgggtcacagcatatgtgtatgttgagctttggtaggttctgcccaagttttccaacgtgcctataccg

SEQ ID NO: 927065 - DNA, 710 bp, Homo sapiens
tttactcttctcttttcctgtttgccaatgcaggtgacgaacttggccagcacaggtgaccagtctacagggtggaatgcctgcccttttgcacgcattcttgcaaaatgcataagcttgtatttctcagtaaacttttcaaagtaaaacattcatgcagaaaaaagcacaaatgacgcatgtagagctttatgcattttcacaacctgagcacacccgtgtcacccagaatgagaagcagaatataacgggcattgtggaagcccccacatgctccttcccccaagggggtcactcccctgactcygactccagaaagcagaagtagctgtcctgtgctctatacaaatggcatcctgcaccatgtaccccttggtgcttggctgctgttgctcaactgcacatctgtgagattcacccaggtggttgtgtctggtttgctctggttcgttcgctctcatgctgtcacatattcccttgtagaaaactaccccaggccatttgcccagtctcctgttgttagatgtgtgggttgtttccagcttggcgctattacaaacagggctgcacattctggaacaagtccttcggtgatcataagcacacgcttctgttcggtaaacggctaggggtggtattgctgggtcacagcatatgtgtatgttgagctttggtaggttctgcccaagttttccaacgtgcctataccg

SEQ ID NO: 927066 - DNA, 710 bp, Homo sapiens
tttactcttctcttttcctgtttgccaatgcaggtgacgaacttggccagcacaggtgaccagtctacagggtggaatgcctgcccttttgcacgcattcttgcaaaatgcataagcttgtatttctcagtaaacttttcaaagtaaaacattcatgcagaaaaaagcacaaatgacgcatgtagagctttatgcattttcacaacctgagcacacccgtgtcacccagaatgagaagcagaatataacgggcattgtggaagcccccacatgctccttcccccaagggggtcactcccctgactctgactccagaragcagaagtagctgtcctgtgctctatacaaatggcatcctgcaccatgtaccccttggtgcttggctgctgttgctcaactgcacatctgtgagattcacccaggtggttgtgtctggtttgctctggttcgttcgctctcatgctgtcacatattcccttgtagaaaactaccccaggccatttgcccagtctcctgttgttagatgtgtgggttgtttccagcttggcgctattacaaacagggctgcacattctggaacaagtccttcggtgatcataagcacacgcttctgttcggtaaacggctaggggtggtattgctgggtcacagcatatgtgtatgttgagctttggtaggttctgcccaagttttccaacgtgcctataccg

SEQ ID NO: 927067 - DNA, 624 bp, Homo sapiens
aggcactcctcacttcccagacagggtggccgggcagaggcgctcctcacttcccaggcagggtggcggctgggcagaggcgctcctcacatcccagacggggcggccgtgcagaggcgctcctcacatcccagacgatgggcggccgggcagaggtgctcctcacatcccrgacgatgggcggccaggcagaggggctcatcacatcccagacgatgggcggccaggcagagacgctcctcacttcctagacggggtggcagccgggcagaggctgtaatcttagcactttgggaggccaaggcaggcggctgggaggtggaggttgtagctagccgagatcacgccactgcactccagcttgggcaacattgagcattgagtgagcgagactccgtctgcaatcccagcacctccggaggccgaggcgggcagatcactggaggtcaggagctggagaccagcccggccaatacggcgaaaccccgtctccaccaaaaatagaaaaaccagtcaggcgtggcggcgcttgcctgcaatcccaggcactcggcaggcgggggcaggagaatcacgggagcccgaagcagggaggttgcagccagccgagatcagggcagtaca

SEQ ID NO: 927068 - DNA, 624 bp, Homo sapiens
aggcactcctcacttcccagacagggtggccgggcagaggcgctcctcacttcccaggcagggtggcggctgggcagaggcgctcctcacatcccagacggggcggccgtgcagaggcgctcctcacatcccagacgatgggcggccgggcagaggtgctcctcacatcccagacgatgggcggccaggcagaggggctcatcacatcccagaygatgggcggccaggcagagacgctcctcacttcctagacggggtggcagccgggcagaggctgtaatcttagcactttgggaggccaaggcaggcggctgggaggtggaggttgtagctagccgagatcacgccactgcactccagcttgggcaacattgagcattgagtgagcgagactccgtctgcaatcccagcacctccggaggccgaggcgggcagatcactggaggtcaggagctggagaccagcccggccaatacggcgaaaccccgtctccaccaaaaatagaaaaaccagtcaggcgtggcggcgcttgcctgcaatcccaggcactcggcaggcgggggcaggagaatcacgggagcccgaagcagggaggttgcagccagccgagatcagggcagtaca

SEQ ID NO: 927069 - DNA, 660 bp, Homo sapiens
aggcactcctcacttcccagacagggtggccgggcagaggcgctcctcacttcccaggcagggtggcggctgggcagaggcgctcctcacatcccagacggggcggccgtgcagaggcgctcctcacatcccagacgatgggcggccgggcagaggtgctcctcacatcccagacgatgggcggccaggcagaggggctcatcacatcccagacgatgggcggccaggcagagacrctcctcacttcctagacggggtggcagccgggcagaggctgtaatcttagcactttgggaggccaaggcaggcggctgggaggtggaggttgtagctagccgagatcacgccactgcactccagcttgggcaacattgagcattgagtgagcgagactccgtctgcaatcccagcacctccggaggccgaggcgggcagatcactggaggtcaggagctggagaccagcccggccaatacggcgaaaccccgtctccaccaaaaatagaaaaaccagtcaggcgtggcggcgcttgcctgcaatcccaggcactcggcaggcgggggcaggagaatcacgggagcccgaagcagggaggttgcagccagccgagatcagggcagtacagtccagcctcagcaacagagggagaccgtcaaaaga

SEQ ID NO: 927070 - DNA, 624 bp, Homo sapiens
aggcactcctcacttcccagacagggtggccgggcagaggcgctcctcacttcccaggcagggtggcggctgggcagaggcgctcctcacatcccagacggggcggccgtgcagaggcgctcctcacatcccagacgatgggcggccgggcagaggtgctcctcacatcccagacgatgggcggccaggcagaggggctcatcacatcccagacgatgggcggccaggcagagacgctcctcacttcctagacggggtggcrgccgggcagaggctgtaatcttagcactttgggaggccaaggcaggcggctgggaggtggaggttgtagctagccgagatcacgccactgcactccagcttgggcaacattgagcattgagtgagcgagactccgtctgcaatcccagcacctccggaggccgaggcgggcagatcactggaggtcaggagctggagaccagcccggccaatacggcgaaaccccgtctccaccaaaaatagaaaaaccagtcaggcgtggcggcgcttgcctgcaatcccaggcactcggcaggcgggggcaggagaatcacgggagcccgaagcagggaggttgcagccagccgagatcagggcagtaca

SEQ ID NO: 927071 - DNA, 629 bp, Homo sapiens
cagcaagagaaaccacaaataaacatacaacttacagaatgagagcacatattcacaaactatgcatccaaataaaaggactaatatccagaatctataaggaagttaaacaaatcaacaagaaaacaacaaacaaccccattggaaaagtgggcgaatgacatgaaaagatacctctcaaaagaagacctacaagtaacgaagaaacatgaaaaaatactcaatatcacaaatcatttgaaaaatgcacatcaaaacaatgagatattatctcacaccagtcagaacggctattattaaaaagtcaataaacaaccaatgtttgctaggctgtggaaaacaaggaatatttatacactgttggtgggaaggtaaattagtcactgtgaaaagcagcttccagamttctcaaagaactaaaaatagaactattcaacccagcaatcccattactgggtaatacccaaagaaaaataaattgttctatcaaaaagacaccttcactcgtatgttgatcacagcactatttacattaacaaagacacaaaatcaacagtagattggataaagaaaacgtggtacatatacaccatcaaatactaggaagccatttaaagaatgaaatcatg

SEQ ID NO: 927072 - DNA, 471 bp, Homo sapiens
accctgaatacaagagaccctaatagttaggagtatcatcgcccctattcagcatgaagttacagaagatggaccttcatccttctgcaacccctaggattaagggtccccttgtaaaagggaaaggtggggaggtatgtgggaagcattcaaactagagcaactctagtttgaataagagctaagaaaaatatagctggatcaccaaccagtaattaagggctgcacagcctgcaactgccttgytccattagaaggccaccttctatgctagtaatgataccttctcttttacaaaaaaaaaagaggaggggcatgttgggaaaaagctgagtgttggaagggaaactgaggcagggcattcatgtctgacataatgtcctctggactgtgtctagacttgctggctccttgctactagccctcctaggctcctacttccattatctcgagcagcagaacatgttccat

SEQ ID NO: 927073 - DNA, 523 bp, Homo sapiens
tctgttggagttttctagaggtccactccagaccctgtttgcctgggtatcattagcggtggctgcagaacattgtatattggtgaacctcaaatgctgttgcctgatcattcctctggaagttttgtctcagaggagtacccggccgtgtgaggtgtcagtctgcacctactggttggtgcctcccagttaggctcctcrgtggtcagggagccacttgaggaggcagtctgcctgttctcagatctcaagctgcgtgctgggagaaccactactctcttcaaagctgtcagagagggacatttaagtctgcagaggttactgctgtctttttgtctgtgccctgcccccagaagtggagcctacagacgcaggcaggcctccttgagctgtggtgggctccacccagttccagcttccccggctgctctgtttacctaatcaaacaactaactgggccatggcaggtgccctttccccagcctggctgccgccttgcagtttgatcttggactgctgtgct

SEQ ID NO: 927074 - DNA, 578 bp, Homo sapiens
gttgaagatcagatggtcataggtgtgcagtgttatttctgggttctcttttccagttcattggtctatgtacctgtttttgtatcagtaccatgctgctttggttactgtagccctatagtatagttggaagtcaggtcatggatgcctccagctttattytttttgcttaggattgccttggttattcaggctcttttttggttccacatgaattttaaaatcattttttctagttctgtgaagaatgtcattgatagtttgataggaatagcattgaatctgtacattgctttgggcactatggtaattttaatgatattaattcttcctatccataaacatgaaatgtttttccatttgttcgtatcttttctgatctccttgagcagtgttttgtaatcctcattgtagagatctttcacctctctggtttgctttattcctatgtattttattctttttgtggcaattgtgagtgggattgcattccagatttggctttcagcttgaccgctgttggtgtataggaatgctggtgatttttgtacattgattttgtatcctgaaactgctga

SEQ ID NO: 927075 - DNA, 578 bp, Homo sapiens
gttgaagatcagatggtcataggtgtgcagtgttatttctgggttctcttttccagttcattggtctatgtacctgtttttgtatcagtaccatgctgctttggttactgtagccctatagtatagttggaagtcaggtcatggatgcctccagctttattctttttgcttaggattgccttggttattcaggctcttttttggttccacatgaattttaaaatcattttttctagttctgtgaagaatgtcattgatagtttgataggaatagcattgaatctgtacattgctttgggcactatggtaattttaatgatattrattcttcctatccataaacatgaaatgtttttccatttgttcgtatcttttctgatctccttgagcagtgttttgtaatcctcattgtagagatctttcacctctctggtttgctttattcctatgtattttattctttttgtggcaattgtgagtgggattgcattccagatttggctttcagcttgaccgctgttggtgtataggaatgctggtgatttttgtacattgattttgtatcctgaaactgctga

SEQ ID NO: 927076 - DNA, 578 bp, Homo sapiens
gttgaagatcagatggtcataggtgtgcagtgttatttctgggttctcttttccagttcattggtctatgtacctgtttttgtatcagtaccatgctgctttggttactgtagccctatagtatagttggaagtcaggtcatggatgcctccagctttattctttttgcttaggattgccttggttattcaggctcttttttggttccacatgaattttaaaatcattttttctagttctgtgaagaatgtcattgatagtttgataggaatagcattgaatctgtacattgctttgggcactatggtaattttaatgatattaattcttcctatccataaacatgaaatgtttttccatttgttcgtatcttttctgatytccttgagcagtgttttgtaatcctcattgtagagatctttcacctctctggtttgctttattcctatgtattttattctttttgtggcaattgtgagtgggattgcattccagatttggctttcagcttgaccgctgttggtgtataggaatgctggtgatttttgtacattgattttgtatcctgaaactgctga

SEQ ID NO: 927077 - DNA, 584 bp, Homo sapiens
ggaactctcctgtttgaggtgtctgtcgacccctgcaattactgaagcctcagtaatggcagacgcccctccctccaccaagctcaagcataccaggtcgacttcagactgctgtactggcagcgagaattttaagccagtggatcttagcttgctgggctccacaggggtgggatctactgagctagaccacttggcttcctggcttcagcyctcttcccaggggagttaatggttctgtctcactggctttccaggtgccactggggtatgaagaaaaactccggcagctagcttggtgtctgcccaaatggccgcctagttttgtgcttgaaacccagtgcccttgtggcataggcacctgagggaatctcttggtcttcagtttgtgaagtcggttggaaaagtgtagtgtctgtgccagagagcaccattcctcatggcacagtccttcacggcttcccttggctaggggagggagtcctctgtcttctgtgttgatctcgctgggagccgcagactggccatcttgtcagccactcatgtcttcttttgagaagtgcctgtttatgttctttacccac

SEQ ID NO: 927078 - DNA, 573 bp, Homo sapiens
tcgttatagcagtgtgaaaatggactaatacagtaaattgatactggggagagtggggtactgccataaagatacctgaaaatgtgaaagtgactttggaactgggtaacaggcattggtgggaacagtttggagggttcagaaaacaagaagatgtggaaaagtgtggacttgttgaatgactttgaccaaaatgctgatagtgatayggacaatgaagtccaggctgagatagtctcagatggagatgaggaacttgggaattggaataaaggtgcttcttactatgctttagcatagggactatcagcatgttgcccctgctctagagatctgtgaaactttgaactagagagagattgatttagagtatctggcagaagaaatttcgaagcagcaaagcattcaataggtgccctgcatgctcttaaaagcattcagttttatgcattcgcagagagatggcttggaattggaacccatatttaaaagggaagcagagcataaaaatttggaaaatttgcagcctgataatgtgacagaaaagaagaatctattttctgtggacagact

SEQ ID NO: 927079 - DNA, 580 bp, Homo sapiens
gagctacccacagcacaaaaatcaagtgcaacacataggttccagttaggggtactagctgctttctgaccttttactctcatttctctccctttttaaaaaaatccctctagcatcccctacttctcctttttgttcttcagccttcctaatcactttataagtcattcactatattatatctcttctagtttaaatccttaaagtagtttacattttcctaacgtaataagactgacagattctcaggcttcatggagatgcattttgggaaacaacaagcttaaatattccgcaraagttcctctttatctctaaatatttcagaaatacatgaaactatagtatttaccttcatttttctctagaaggccatgcatatgatcaaagttttttaacatctggaaactagtacagtgctaacacttctagtaagaaccaatgcaaagcaatccatgatccagaaactagtaatatgaaacatttaactcagtacttaaatattcaactaaaagtaaaatgttctcatgctgagatacgtttatcttcaatataattatttgcttatttaactggaaac

SEQ ID NO: 927080 - DNA, 580 bp, Homo sapiens
gagctacccacagcacaaaaatcaagtgcaacacataggttccagttaggggtactagctgctttctgaccttttactctcatttctctccctttttaaaaaaatccctctagcatcccctacttctcctttttgttcttcagccttcctaatcactttataagtcattcactatattatatctcttctagtttaaatccttaaagtagtttacattttcctaacgtaataagactgacagattctcaggcttcatggagatgcattttgggaaacaacaagcttaaatattccgcagaagttcctctttatctctaaatatttcagaaatacatgaaactatagtatttaccttcatttttctctagaaggccaygcatatgatcaaagttttttaacatctggaaactagtacagtgctaacacttctagtaagaaccaatgcaaagcaatccatgatccagaaactagtaatatgaaacatttaactcagtacttaaatattcaactaaaagtaaaatgttctcatgctgagatacgtttatcttcaatataattatttgcttatttaactggaaac

SEQ ID NO: 927081 - DNA, 580 bp, Homo sapiens
gagctacccacagcacaaaaatcaagtgcaacacataggttccagttaggggtactagctgctttctgaccttttactctcatttctctccctttttaaaaaaatccctctagcatcccctacttctcctttttgttcttcagccttcctaatcactttataagtcattcactatattatatctcttctagtttaaatccttaaagtagtttacattttcctaacgtaataagactgacagattctcaggcttcatggagatgcattttgggaaacaacaagcttaaatattccgcagaagttcctctttatctctaaatatttcagaaatacatgaaactatagtatttaccttcatttttctctagaaggccatgcatatgatcaaagttttttaacmtctggaaactagtacagtgctaacacttctagtaagaaccaatgcaaagcaatccatgatccagaaactagtaatatgaaacatttaactcagtacttaaatattcaactaaaagtaaaatgttctcatgctgagatacgtttatcttcaatataattatttgcttatttaactggaaac

SEQ ID NO: 927082 - DNA, 752 bp, Homo sapiens
agtctggtggggacgtggagagtctttatgtctagctcagggattgtaaatacaccaatcagcaccctgtgtttagctcaaggtttgtgagtgcaccaatcgacactctgtatctagctgctctggtggggccttggagaacctgtgtgtggaaactctgtatctaactaatctgatggggacgtggagaacctttgtatctagctcagggattgtaaaggcaccaatcagcgccctgacaaaacaggccactgggctctaccaatcagcaggatgtgggtggggccagataagagactaaaagcaggctgcccgagccagcattggcaacccgctcgggtccccttccacactgtgggagctttgttctttcgctctttgcaataaatctttctactgctcactctttgggtccacgctgcttttatgagctgtgacactcaccgtgaagatctgcagcttcaytcctgagcccagcgagaccacgaacccaccagaagaagaaactccgaacacatctgaacatcagaagggacagactccagacacgccaccttaagagctgtaacaccgcgagggtccacggcttcattcttgaagtcagtgagaccaagaacccaccaattccggacacaaaaccaaggaagtgaatttcaaacttaatttacatttaaatagcaacatacagctagtggctactatattgggcagttcatctccgaactctctttaccatgaacacagagtgcatt

SEQ ID NO: 927083 - DNA, 652 bp, Homo sapiens
taaacagccattgtgatgtctgatggtccaaggtggccatttctgaaaagcaggtgcaaaacagaaggtaaattttccaggcctaggtctacagacaattttgaagaggtgagtgataaagaatcatactgttcggtataatttcaccactctaatgtgatgtagactacaaatgaatcctgtctttaccatgaaggctacttatcatgggctctccactgccgtaacccaagttgagcaattcaggtgcatcatcagcggtggacaacttacagacactgcctttggcaaaattgaggacacttaactgcraatcacagccatttgacaagtaatggtgctgattattttaaagggctactggaatctcaaatacagataagcttttgttaaaaaaatagtcacattctgtgaaaaggctcaggaagcaagttatttagtagcagagtctattggccacaaaaagcaaagtcaagcagttggtgcaaacttagtgatgtagcaataaaattatagtgaatgcatagtggggaatgctaggacagggtgcagtgggagaaactggaaaggtttagctcctaagccaaacaattagtcaacatattgatgagtcacatgacactgagaaagatttctctaataaaccaaaatg

SEQ ID NO: 927084 - DNA, 652 bp, Homo sapiens
taaacagccattgtgatgtctgatggtccaaggtggccatttctgaaaagcaggtgcaaaacagaaggtaaattttccaggcctaggtctacagacaattttgaagaggtgagtgataaagaatcatactgttcggtataatttcaccactctaatgtgatgtagactacaaatgaatcctgtctttaccatgaaggctacttatcatgggctctccactgccgtaacccaagttgagcaattcaggtgcatcatcagcggtggacaacttacagacactgcctttggcaaaattgaggacacttaactgcgaatcacagccatttgacaagtaatggtgctgattattttaaagggctactggaatctcaaatacagataagcttttgttaaaaaaatagtcacattctgtgaaaaggctcaggaagcaagttatttagtagcagagtctattggccacaaaaagcaaagtcaagcagttggtgcaaacttagtgatgtagcaataaaattatagygaatgcatagtggggaatgctaggacagggtgcagtgggagaaactggaaaggtttagctcctaagccaaacaattagtcaacatattgatgagtcacatgacactgagaaagatttctctaataaaccaaaatg

SEQ ID NO: 927085 - DNA, 541 bp, Homo sapiens
ctaggaaaaccatccttcaaaaatgaaagggaaattaagacactcccagataatcaaaatagagtgagtttattaccaatgtatgttccctacaagaaagtccttcaagttgaaatgaaagggcactacacagtcacttgaascctcatgaaaagaaaagggtccctagtacaggtaaatacatgaaaatatatataaaaaagtattatactaagtttgacttaaaacccccatgttcatttcctacagtatttaaagataaatgcataaaataattatgcatttacgctaatagttacattatatataaagatgtaatttacaacagcaatagcataaagtaagggagcagacttgtaaggattgaagttttcgtatatgaatgaagtaaactggtgtcaatttaagatactgccatcattgtaggatgttatatgttatctccatggaaaccataaagaaagtatctatagaatatgtaaaaaagaaaagagaagacaatcacaacgtgacactacaaaaatatcaactaaacatagag

SEQ ID NO: 927086 - DNA, 541 bp, Homo sapiens
ctaggaaaaccatccttcaaaaatgaaagggaaattaagacactcccagataatcaaaatagagtgagtttattaccaatgtatgttccctacaagaaagtccttcaagttgaaatgaaagggcactacacagtcacttgaagcctcatgaaaagaaaagggtccctagtacaggtaaatacatgaaaatatatataaaaaagtattatactaagtttgacttaaaacccccatgttcatttcctacmgtatttaaagataaatgcataaaataattatgcatttacgctaatagttacattatatataaagatgtaatttacaacagcaatagcataaagtaagggagcagacttgtaaggattgaagttttcgtatatgaatgaagtaaactggtgtcaatttaagatactgccatcattgtaggatgttatatgttatctccatggaaaccataaagaaagtatctatagaatatgtaaaaaagaaaagagaagacaatcacaacgtgacactacaaaaatatcaactaaacatagag

SEQ ID NO: 927087 - DNA, 541 bp, Homo sapiens
ctaggaaaaccatccttcaaaaatgaaagggaaattaagacactcccagataatcaaaatagagtgagtttattaccaatgtatgttccctacaagaaagtccttcaagttgaaatgaaagggcactacacagtcacttgaagcctcatgaaaagaaaagggtccctagtacaggtaaatacatgaaaatatatataaaaaagtattatactaagtttgacttaaaacccccatgttcatttcctacagtatttaaagataaatgcataaaataattatgcatttacgctaatagttacattatatataaagatgtaatttacaacagcaatagcataaagtaagggagcagacttgtaaggattgaagktttcgtatatgaatgaagtaaactggtgtcaatttaagatactgccatcattgtaggatgttatatgttatctccatggaaaccataaagaaagtatctatagaatatgtaaaaaagaaaagagaagacaatcacaacgtgacactacaaaaatatcaactaaacatagag

SEQ ID NO: 927088 - DNA, 515 bp, Homo sapiens
atttttaaaaatttttgtagagatgaggtctccctatattgtcctggtcggtcttgaattcctgggctcaagagatcctcctgcatctgcttcccaagttgctgagattacaggcatgtgccaccacacctgactgagtgtagttttgagcatgcagtgagacggatactacattgtgaattcaggagactttaaatataacaacttatcaatattttaagattatatatttgaaatcctctttttttaaataataattttttttttttttgagatggactcttgctctgtcacccaggctggagtgtagtggtgcgatctcagctcactgcaagctccacctccygagttcatgccattctcttgcctcagcctctccagtagctggaactacaggcgcctgccatcacacctggctaatttttttgtatttttagtagagatggggtttcaccatgttggccaggacggtctcgatctcctgacctggtgatccacccgcctcggcctcccaa

SEQ ID NO: 927089 - DNA, 659 bp, Homo sapiens
cagctgttttgagtttcaactgcagttttcatggaacatcacttttatttgaagtaactgatgaactatagttattcagacttggatatttggtggacattttctcaaaagaacagtgaaactgatacttcagtgtacagtgtttgttgcccatgatgaaatttgagctttcaagcaaaaattagaattttggaaaacacgtctctgccattgtgagcttgacagcctcccaatacttaaaatattttttcaaataaaatcagtagtcatattaacgaatgtgattttttgatactatgtaatgtgttaacatttggaagatctgtataactcagtaaatcagtcttttacgggtgaccgatgcatgtgatgttaaacagtcatacatcagtaaaagtgcrtgctagagcattgaattttaatgtgacagactcccgatatgttttgagattccacaaaccttcaagaatccaccactgtggaattttggtgtagtatcaaaggtatatccataactacctgaaacacctattaaaatattcctccctttctaactacatatctgagtgaggctggattttcttcatatatttaactgacagaatatattgtggtgcagtacattgaatacagaagcaattaagagaatcttcattctg

SEQ ID NO: 927090 - DNA, 717 bp, Homo sapiens
actatgaccctttatccctaacaccagaacaggtcttggcatggaggaagcattcaggatatgcttattgtctacttgaagagcaatttcacaatatctttcacgaattacattgcacctaccctttgccctaaatattccacttctaggaatttatcttacagataaacttgtacaagtatgcaaagagataagggtcccaaaaaatgtgcattgtgacattgtacataatagcaaaccaaaccaaccaacaaatcaacaaaaaatacttttttttttttttgagactgagtctccctctgccgcccaggctggagtgcagtggcgcgatcttggctcactgcaagctccgcctcccaggttcacgccattctcctgcctcagcctcctgagtagctgctactacaggctcccgccaccacacccggctaattttttgtatttttagtagagatggggtttcaccgtgttagccaggatggtctygatctcctgacctcgtgatccacccgccttggcctcccaaagtgctgggattacaggtgtgagccactgcacctggccaacaaaaaacactttaaatgtccataattaaggtccagtttaaaaaacaaataaagacataccaaggaatactatgtaatgttaaaaaaaaaaaatgtgcagtagatctccagatactggtatgaagaggtgcctaataacatattgctaaat

SEQ ID NO: 927091 - DNA, 784 bp, Homo sapiens
gctgaggcaggaaaatcacttgaacccaggaagcggaggttgcagtgagatgagatcacaccactgcacttcagcctgggcaacagagcgagagtccatctcaaaaaaaaaaaaaaaaagaaaagaaaaagaaaaactattctgaatagctccatacctattaaagaaagtgaattctactaaaaattgatacaccgagcttcattaaaattagaagacacacactgggaaaaaatattttcaaagtatgtatctaaaaatggtcttgtatccagaaaatatagattctcaaaattcaacattaaacaagcaactccattttttaaaatgggcaaaaatattggaaatagcaaaaaagatatatagatggcaaataagcacataagatgttcaatgttattaagtggttgcaaattaaaaccataatcagataccattacacacctattaaaatggctaaaataaaaaagactgaccataacaaatgttggtgaggatttggaggaactagaastctcatctctgctgatagaaaggtaaaacagtacaactactttggaaaacagtcttttaaaatgttatataaacacttatatgtcatgtagccaccccttcctaggtatttgtccaaaggaatgaaagcatatggctatacaaagacatgtacatgaatggtcataatagctttatcagtaatgtaaaagaaataccaatgccacgaatgcatttactaaagaaacaaattattgaatatccaaataatagcatgctagtcagcaataaa

SEQ ID NO: 927092 - DNA, 642 bp, Homo sapiens
agacccccaaatgctgtgagtgccccaactgcggaagtgggaaaagaagattcactgctcccgaacacatacccccactggggaaaataagggtctagtttgcaggagaagtttctgaccttgcctgaagctgagtcaatttagagagccaagcaaaatacaggggtagagcaagcagcgggaaaggccctgggagcttcccgggtccccargtaggccactcttgcctggcaccacagggatccttcaagagggcagccagaggtgtggggggaaatgccacaaacagaaggaaatctttagctaaactttgtaacaatttgaaccaggcaagaagcctcctggccagaactcggggcagaacaagaatccggcatgcagactccacaagcaggggaagaaccaaagtccttttctttccaagctgggaggcaggtagcctggggcaagttctcaagccctgcttgcccactgcctggacacagactcggggctgtttgtgggggttcatggtggaagtgagaccgcccttcagattgcgtgggagctgggtgaggcctgtgattgccagctttccccacttccctgacaacctgcatgactcaacagaggtagtgataatcctcttaggtacgcaactcc

SEQ ID NO: 927093 - DNA, 565 bp, Homo sapiens
tctcccaaagagaagacagcatccttaatgtgaacagtttttcccaagttcacagattaagacttctactgtcatgaaactcttatctttgaatgttttttcttgcttgtgtctctgtgaacaatagaagtggaaaaggtgtcggttttgtgcacttatggggtgtacttttatttgtgaaggagtttgcagcctgccttatacatggataaacgtatactttgatagataaaggatgaaggccsagtgtaggtaagacactttaatggtacatgtgttgcctcataatcagtcaaaaacaaaacactggttcactcctcttaacccacgtcatgggttaaagggaacattgccaggaggccttccttcacccttcttctaaaagggcctcatttgttaggtccttttcccatggtttaaaataaaagaagcaatgattagaaatgtacccctcatgataggttctatagcaaattctactgtagaggctacagtcacacaacagactttaaattctcttgtgaaagctatgctaaataacagaattagctaaacagaaaagtta

SEQ ID NO: 927094 - DNA, 565 bp, Homo sapiens
tctcccaaagagaagacagcatccttaatgtgaacagtttttcccaagttcacagattaagacttctactgtcatgaaactcttatctttgaatgttttttcttgcttgtgtctctgtgaacaatagaagtggaaaaggtgtcggttttgtgcacttatggggtgtacttttatttgtgaaggagtttgcagcctgccttatacatggataaacgtatactttgatagataaaggatgaaggccgagtgtaggtaagacactttaatggtacatgtgttgcctcataatcagtcaaaaacaaaacactggttcactcctcttaacccacgtcatgggttaaagggaacattgccaggaggccttccttcacccttcttctaaaagggcctcatttgttaggtccttktcccatggtttaaaataaaagaagcaatgattagaaatgtacccctcatgataggttctatagcaaattctactgtagaggctacagtcacacaacagactttaaattctcttgtgaaagctatgctaaataacagaattagctaaacagaaaagtta

SEQ ID NO: 927095 - DNA, 597 bp, Homo sapiens
attctgaggaaagacagcagcgcaggagaggaacggttctccccataaaggcaggcagcagtgtctcctgcaccctccacagtagctctgacagtatgaataggagctgtcccacaaagatcctcgctttgcgcctcttccacaagcccagtctaacactttcccatccaactggagatggggtgggagctggacattttccggtcctggtgaaaatctctcccatgcttcctccatttactggtagaaaagrgccagggagttggcccagcagatgaggaaaggagtctgggggggcctgggagggagggcaggttcccagaaaggccaggcacagcctcttttatttatttattttcttgaggcaaggtctctctctgtcacccaggctggagtgcagagctggaattctagctcactgcagcctcgatctcccaaggctcaagcaatcctcccacctcagcctcccgagtagctgggattacaggtatgtgccaccacgcccagctaatttttgtattttttgtagagttggggtttcaccatgttgcctaggctggtcctgaaccccagagctcaagccatccgcccgcctca

SEQ ID NO: 927096 - DNA, 720 bp, Homo sapiens
ttttagttgggttatttgttttctgattgatgaattttgagaattctttatatattccagatacaagtctcctgttgaacaccaggtttgcaaacattttcttcccatctgtagcttgtcttaactttcctactgtgtctttgtggagtaaaagttacccagtttgatgaaatccaacatatcaaacttttttcttttatgaatcatgcttttagtagcgttctaagaatactctgcctcagcccagattacaaacattttctcctatgatttctttttaaagttttatagttttatgtcttacactgatgcattttgaaataagatttatgtgcagtgtgaggtttagattgaggttcattttatttttgcatattaatgcccaattatcccaacaccattgttgaaagactgtccttcattaaattgcttttgcccctttgtaaaaaatttgctatatttttggagtccatttttggactctgctcttttccatagacctctatgtcttttccttcacaaatactatggtatcctgattactgtggctttatagtaggtcttaacrtcaagtagtatgcttcctccctttttttttttttgagacagggtctctctttgtcgcctaagctggagtgcggtggcacaatcttggctcaatgcaacctccacctcctgggttcaaactattctcaagcctcaacctcctgagtagttggg

SEQ ID NO: 927097 - DNA, 622 bp, Homo sapiens
gctcactttttaatgggattatttcctttttgcttgttgatttgtttaaattccttataaattctccatgttagatatctgtcagatggacagtttgtaaatattttctcccattctatagattgtttatagtttctgttcatagattgtctcttttgctgtgcagaagctctttagtcccacttgtcaatttttgtttttgttgcaattgcttttgaggacttagttataaattccttccgaaaactaatgtccagagtggtgtttcctagattttcttctaggattttttatagtttcaggtattaaatttaagtctttaatccatcttgagtaaatttttgtatatgatgataggtaggygtcaagtttcatgcttctgcataggatagccagtgtttgccacactatttattgaatagggagtctttccccattgcttatttgtgttgactttgtcaaagatcaattggttgtaagagtgtgactctatttctgggttgtctattctgttccattggtcaatgttattggggaaaatccgcccctagtattttaacataggttctttctattttccataagtgtcggccggctgagaaataaagagagacagtataaa

SEQ ID NO: 927098 - DNA, 823 bp, Homo sapiens
agacctccccccaggaatgcattcctttcccagggtattaatattaatattccttgctaggaaaagaatttagcaacatctcttctacttgcacgtctgtttataggctctctgcaagaagaaaaaatatggctctttttgcccgaccccacactttttgcccgaccccgcaggcagtcagaccttatggttgtcttccctygttccataaaaatctctgttattctgttctttttcaaggtgcactgatttcatagtgttcaaagacacattttacaatcagtttatacagttaacacaagtatctcagtggtcctgaggtgacataacgtcttcaccttacgaagataacaggattaagagagtgaagtaaagacaggcataagaaattataaaagtattatttgggaactgataaatgtccacattaaaatgaaatcttcaaaatttatgttcctctgctgtggctccagccagtccctccattcgggatccctgacttcctgcaacactacctgtctgtttttgtaccagcattatgctgtttccgttattgcagccctgtagaacagtttgaagtcaggtaatatgatgtctccagctttttttctttttttttttccataggatcaccttgcttgtttgagctcttttttgttccatatgaattttagaatactttttttttctaattctgtgaaagatgatgttgatagtttgatagaaagtgtttttttctagtttttataggtgtgatgtttgactgttaatttgcaatctttctaacttctcgatgtaggcagttagcactataaactttcct

SEQ ID NO: 927099 - DNA, 823 bp, Homo sapiens
agacctccccccaggaatgcattcctttcccagggtattaatattaatattccttgctaggaaaagaatttagcaacatctcttctacttgcacgtctgtttataggctctctgcaagaagaaaaaatatggctctttttgcccgaccccacactttttgcccgaccccgcaggcagtcagaccttatggttgtcttcccttgttccataaaaatctctgttattctgttctttttcaaggtgcactgatttcatagtgttcaaagacacattttacaatcagtttatacagttaacacaagtatctcagtggtcctgaggtgacataacgtcttcaccttacgaagataacaggawtaagagagtgaagtaaagacaggcataagaaattataaaagtattatttgggaactgataaatgtccacattaaaatgaaatcttcaaaatttatgttcctctgctgtggctccagccagtccctccattcgggatccctgacttcctgcaacactacctgtctgtttttgtaccagcattatgctgtttccgttattgcagccctgtagaacagtttgaagtcaggtaatatgatgtctccagctttttttctttttttttttccataggatcaccttgcttgtttgagctcttttttgttccatatgaattttagaatactttttttttctaattctgtgaaagatgatgttgatagtttgatagaaagtgtttttttctagtttttataggtgtgatgtttgactgttaatttgcaatctttctaacttctcgatgtaggcagttagcactataaactttcct

SEQ ID NO: 927100 - DNA, 564 bp, Homo sapiens
cactacaacatgaatgaactttgaaaacatcatgttcagggaaagaagctagttacaaaggaccacggagtgcatgatttcagtttttaagaaacgtccataataggcatatctgcagagatggaaagtggatccgtggttgccaggggctgggaaggggaagaatgaagaatgactgctaagggatgctgcgttccttctgtggtgataacaacgttccagaattagacagtagtgatcgttgcacaaccttgtgaataccctaaaaaccactaagctgtatactatgagagggtgaatatcatggtatgyaaattatatctcaattaaaaaggtaaaaagtatctgggggtggtgtattccaggtagagggaatggcatgtgttcagaggaagaaaaaaaggagaatgaggaagaggagaaggaggaggaggaagaaaggagaaggaagaggaggagaagggaaagaggaagaagaagaagaagaggaggacaaggaaaagaaggaggaggagaagaagagaagatcaatcaaaatgaaaagtgccccccaccagttaatct

SEQ ID NO: 927101 - DNA, 564 bp, Homo sapiens
cactacaacatgaatgaactttgaaaacatcatgttcagggaaagaagctagttacaaaggaccacggagtgcatgatttcagtttttaagaaacgtccataataggcatatctgcagagatggaaagtggatccgtggttgccaggggctgggaaggggaagaatgaagaatgactgctaagggatgctgcgttccttctgtggtgataacaacgttccagaattagacagtagtgatcgttgcacaaccttgtgaataccctaaaaaccactaagctgtatactatgagagggtgaatatcatggtatgtaaattatatctcaattaaaaaggtaaaaartatctgggggtggtgtattccaggtagagggaatggcatgtgttcagaggaagaaaaaaaggagaatgaggaagaggagaaggaggaggaggaagaaaggagaaggaagaggaggagaagggaaagaggaagaagaagaagaagaggaggacaaggaaaagaaggaggaggagaagaagagaagatcaatcaaaatgaaaagtgccccccaccagttaatct

SEQ ID NO: 927102 - DNA, 614 bp, Homo sapiens
tctcatcgtggttttgatttgcgtttctctaatgatcagtgatgttgagctttttttcatgtttgttggccacatgtgtgtctattgagaagtgtctgttcatgtcctttgcccaatttttaacggggtttttttttcttgtaaatttgtttcttgtagatgctggatattaracctttgtcagatacattggttgcaaaaattttctcccattctgtaggttgtctgtttatgcagttcgtagtttcttttgctgtgcagagctctgaagtttaattagatactatatgtcaatttttgctttgttgcaattcagccggattggttccttctaggggctgtgagggaaggctctgttccaggcctctctccttggcttgttgacggccatcttctcccagtgtctcttcacatcaccttccctctgaatgttcatgtccaaatttctcctttcaataaggacatcagtcatattagctcgggggtctaccctactccagtatgacctcaccataattgattatatcttcaattaccttattccaaataaggtcacattcagagttcctggggattaggacttcaacatgtgaatgcttggaggacacaagtca

SEQ ID NO: 927103 - DNA, 607 bp, Homo sapiens
gcagccggaggcaggggagacagaaaagttccactataaaacatttgatgagtccgggcgtggtgactcactcctgtaatcccagcactttgggaggccgaggtgggcggatcatgaggtcaggagatcaagaccatcctggctaacacggtgaaaccccgtctctactaaaaatacaaaaaattagccgggcgtggtggcaggcgcctgtagtcccagctacttgggaggctgaggtgggagaatggcgtgaacccgggaggcggagcttgcagtgagccaagatcgagccactgcactccagcctgggcgacagtgataccctgtctcaaaaaaataaaaaaaaagaayatttgatgagcactggcttataggattctccctgtggccttcattccattgcacagcctctaccgttttcccgtctggctctctgttttgcctttcagtaataatacaagaaggtgcaccattcttttggttgaaaagggaattaagaatgaactcaagttctttcgcattatttaccgtgtaatgtgaaaagaaatctacttttgtagggatgtcttttaaagatgtttttactttgaatttttagttttctcct

SEQ ID NO: 927104 - DNA, 682 bp, Homo sapiens
cacagagtgagactccatctcaaaaaaataaaaaggacaaagaaggacattacataatgataaatggttcaactaaataaacagtcttaactatcttaagtatatttgcacccaacactggtgtgcttagatcaataaaacaagtttgtaagagacctatgaagagacttagataaccacacaataataatgggagacttcaacatgtcactgacagtgttagatcatcgaggcaggaaagaaacagatactagggacctaaacttgacacttaaccacatggatctaaaagacatctatacaatatgccacccaacaacaacagaatgtacattcttctcacctgcacatggcacatactctaacrttgaccacacatttggccataaagcaattctcaacaaaaacaaacacaaaaccctaccaaccagtctttcagacctcagtgcaataaaaatagaaatcaataccaagaagatcccccaaactgtacaattacttggaaattaacctgtccctgaatgacttttgtgtagagtgaaattaaggtacaaatcaataagttatttgaaattaatggaaacagatacaactcacctgaatctttgggatgcagctaaagcagtggtaagaggaaagtttatagtgctaaatgcttacatcaagttagagctcagattaa

SEQ ID NO: 927105 - DNA, 596 bp, Homo sapiens
tttttatatcgcatcaaaagtattatctgcatgtaaatagtagacattcagtgatttgtaactagtcatcatctgatcaaacctcccaatttcaacaaagtttatctaaactctgcaagacagttggctactttgtgtctaaaagtgtttaggaactttcatgttggcttgtttcaatattaattatttttactgagaggacaattaattccctaatctgttataacactttctgagtcacttaagcagaactctaaaaataagaagatggatttaatttcgattttgaaattaagtttcttaacttgatattcctggctttattaatttaaacctaaatatatasaaatgaagtttttgctatatttgttgtaaaaactagcacagctcatagaaatattaaaaagtaagaaattgaatagattgatagcattgttttgattgttactgttattttagtaaataatctgaaataaattaaacattttaaagcacaatttagaaaaaaatatgcagaatacagagaatggaatctagagacatttatggaatttaagaagctattttgttcaattcccaagtctagctcgaaattt

SEQ ID NO: 927106 - DNA, 616 bp, Homo sapiens
ctagtccaagctcataatttatctctttctcttacctctccccaaactcccagccccgtttctgccagggctagtattgcttctcaatactattgcttcaggcttttataaaagaaaaaacatttaatatcccaaaaatcatataatgcagttactagttttatctctcttttatgaatgaggaaattgagggcagggcagatggagtagcatgcccaaggctacaaagctagaaagtgtcagaacccagatgtgaacacagcctagcaccagggagatccagttaccttgttgaatgggggaaaacaaatattagaataacatgcggtggctcatacctgtaatcccagcattttgggaggccaaggcgggtgggtcacctgaggtcaggagtttgagaccagcctcgccaacatggtgaaascttatctctagtaaaaatccaaaaattagccaggacatggtggctcgtgcctgtaatctgagctactcgggaggctgaggcatgggagtctaagacagaagaatagaagaattgcttaaacccgggaggcagaggctgcaatgagctgagatcgtgccactgcactccagcctgggcaacaggctttttctg

SEQ ID NO: 927107 - DNA, 598 bp, Homo sapiens
agggaacatcttctccccagggaaccagaaattgttaaattccagaaacagtgataatagcagcaatagataatatgtatgaaggactcaccattattggtctggcatcctggaaagcactttacatgatctcttttaatgctcccaacacaaccctatatgacaggtgctattgtcactccgttctacagatgaagaaactgaactacagaagtcccacaggtcacacaaccaatcaatggcagagctgctgggattacaccccaggacaatgctttttttttttttttttttttttttttagacagagtcttgctctgtcgcccaggctggagttcagtggccygatcttagctcattgcaatctccacctcctgggttcaagcgattcttctgcctcagcctcccaagtagctgggattacaggtgcacaacaccacgctcagttaatttttgtaattttagtaaagatggggtttcaccatgttggccaggctggtctttaacgcctgaccttgtgatctgcccacctcagcctctcaacaagacgatgctcttaccaggacccatctgtcctagggtcttacctgcagggttt

SEQ ID NO: 927108 - DNA, 735 bp, Homo sapiens
caaatatttgccgaaggaatgagcagagtcatcaaggtcagagaagggaactcagagcgtctagtctgacctgaggcccagggagaggaaggggggctggtccaagtcgtcaggcagaggtgggaccgacccaagtgagtctccccacacccagctctgggctcgtgacccacaagccccatgcccaattcagcgggtgtaggctggagcctgggaagttgcatttccaacaagttctcaggtgttgccgctggtttgggagccatgcctctgtacctcccacacccttcattttcctggactgggggcaacacgatggggaagctcgggaaggcttgcccttgagcacgtgggtcctgctgagaccacagcccaccagaggtgtcgcggaacagagccaggactgacactgaccagccctcttgaaacaagctcattcctggctcatctcagaacaaaggttccccctaaaaaatcmcccagccccaatacatcagccgtcgcccggaccagtgtttctccatctcccagcatgtcgggcctcctgctcatccttccctaaaccctctcaccaccacctctaacgtccagcaatactcctcacacagccttccttcccctcccctcccagaacgcctcctgcttttgtaattaataccacactgcttagtgcctaattgctccaaaattgttttgcaagtttgccttatctctacaactgcatcttcaattcct

SEQ ID NO: 927109 - DNA, 653 bp, Homo sapiens
tcccacaattaccattgttcctggcctggacttcaatccggcctcccacattattcctgataccacacctgacccctatgactgtatctctctgataccacacctgacccctatgactgtatctctctgatccacctgacattcaccccatttccccatatttccttctttcctgttcctcaccctgatcatgcttgatttattgatggcagttccaccaggsctaatcgccacacaccagcaaaggcaggctacgctatagtccaagccactagcccacctcttagaacctctcattttctttccatcgtggaaatctatccttaaggaaataacttctcagtgttccatctgctattctactactcctcagggattattcaggccccctcccttccctacatgtcaagcttgaggatttgcccccacccaggactggcaaattagctttactcaacatgccccaagtcagataactaaaatacctcttactctaggtagacactttcactggataggtacagtcctttcctacagggtctgagaaggccaccgcagtcatttcttcccttctgtctgacataattcctcagtttagccttcccacctctatagagtctgataacagaccagcctttattagtcaaatcagc

SEQ ID NO: 927110 - DNA, 615 bp, Homo sapiens
tggaatatccacaatgccctaagtataagctttagaggtacttggcatggaagtctaggccatcagttcatgcttcctaagtgtgctttctggccttgttcagatccaactctaaatggaccatttccatcctacaataaattgttgctgtatgtacccaagcttatgattccagtgtgtttcataatttttagctaatgatgggcaacgtttttctgaggtcctgcggttgttcagtctctactaaggcacaataacatggctggaggtgatttttcaaacagcaagccgttctctgccacagagtgcatgamcttgctccagaatgcttcaggatcctaggggtctacaccgtggcttcctatggggatctgtggggtacctctagtactatggaatctgctggggcataaggccttcacagcaggatgtctttcatcgtagcttctgtctgctgcagagctcctgcttcctcttggctccatccaaactttcagccttatgaattatcctataaatgggtcacagcagtgtgttcccatgtagtacatgctgcctccacaatctgtggatgaactaagcacagtgcctctttcttaatggtaggggccacat

SEQ ID NO: 927111 - DNA, 611 bp, Homo sapiens
gttttcctgctctctttcaggagacattttgttccttttgctcttcaatcaaatgacctttctgctctagccagccataaaataccatgttatcgctttcaaattcaaatgtcaccttgtcattctctgcattctctgcagctccccatggctgcagaataaagccagaactatttggcataatatgggccagtttactttcccagcctcactctaaccattccctatccatccatctgtctatccatccatccatccacccacccatctaaccagacagccagccagacatccatccatccatccatccttgcatccatccatccatccattcaygcatccatccatccacctatccatttatgcatttatccatccatccattcaaccatccctccatccatccattcatccatccatccattcacccatccatccatccacccatccagccagacagacagccatccacccacccatccatccacccatccacccatccacccatctatccatccaaccatccatccatccatccatccatccactcacctaaccatccatccatccatttattcatccatctatccacacattcatccatccatcca

SEQ ID NO: 927112 - DNA, 567 bp, Homo sapiens
cattaaaaaggaaggaagatctcaaataaataagctaactctctaacataagcaactaggaaaagcagaacaaattgaacacaaagctagcagaatgaaggaaatcacaaagattagcacagagaaaaataaaatagagaatataaaaacagtagagaaaatcaatgaactaaaagttgtttctttcaaactgacaaacctttagctagactgacaaaaaagagagagaaaagaaaaccaacttaaatcagaaatggaaaagaagatatatcactacagaccttatataaataagaattgtaaaggaatactaagaataactgcaaaccaaaaaattagataacttaagtgaaataataaagtttctagaaatacacaaattatctaaattgactcaaggagaaayagagactctcaatagaccataacattaaagagattgaataagtagtcaaaatctcccaagaaggaaaagtttacaaccagctggcttcgacagtgaattctaacatttaaagaattaacatcaatcctgctgggattacaaagtgtaatctcagcactttg

SEQ ID NO: 927113 - DNA, 638 bp, Homo sapiens
gaaaaagcatgggacgagttggggagtgctagtgtgggagctgtctccagggcctttttgagagagcaaaaagaacaatgggcaaaaaacttagggtctatgggatcagttaagttacctcttgtgagcttgtaaagtggttttgttaggatagcaaagcctggtatccagagtcggaaatatccaacaatgcctaagaaggaaaggagttgttgttttgtggtggggattcgggtctgggagattaactgagcacagtctgcaggaagggcatgtgtatgctgatggaggattataccgagataggtaacactaggggaagaaatttgtgycttggagggggatactcggtacccctttaaatagagatgttgaagaagcagggtagtgtcctgctgggaagattggtaagagggactgcaaagaagaagatcatcaaaatattgaataagatgggaggcagacaggtgaaaagaaagcagatcatgagaaagggcctggccgaagtagtgtgggctgttcctgaagccttggggcagaacagtccaggtgagttgttgggattggtgggtgtcacggtcagtccaagtaaaggcaaaaagaggctgagaggagggatacaaggggatagtaaagaa

SEQ ID NO: 927114 - DNA, 795 bp, Homo sapiens
cagctgccaagtaagtggtgggatcaaatttctttctttctttctttttgaggcagagtttggctcttgttgcccaggctggagtgcaatggagcaatctcggctcacggcaacctctgcctcctgggttcaagtgattctcctgcctcagcctcccaagtagctgggattacaggcatgcgccaccatgcccaattttgtatttttagtagagatggggtttctccatgttggcgaggctggtcttgaactcctgacctcaggtgatctgcctgccttggtctcccaaagtggtgggattacaggtgtgagccaccgcaccrgcctaaatgctacacaatttaagagcttgtttggattaatgcaggacccacagctcattacttaacaatcactgagtatacgtgttccaaatgcacagggggttattcctaagaaagcaatcagcctagtggaccgcagaatgccattataaggtctgtttgctctgagaaggggactgcccaactctccctataaaataccaagtgaagccccccagatgaagcagttaatatgcttcatatgcaagccatggtggactagctttatattctcccagcaaataggcctattacccaggccatggtaaattcggggcctaaggggaccccttttacatgggtgcccctcccacagaatcatgggactgtttaagcagccttgacaaatctgctctccctcatagtgagaggtgacagcctgctggcagccctcccagcccttgctctctgcgtgcctccttggccttggtgc

SEQ ID NO: 927115 - DNA, 795 bp, Homo sapiens
cagctgccaagtaagtggtgggatcaaatttctttctttctttctttttgaggcagagtttggctcttgttgcccaggctggagtgcaatggagcaatctcggctcacggcaacctctgcctcctgggttcaagtgattctcctgcctcagcctcccaagtagctgggattacaggcatgcgccaccatgcccaattttgtatttttagtagagatggggtttctccatgttggcgaggctggtcttgaactcctgacctcaggtgatctgcctgccttggtctcccaaagtggtgggattacaggtgtgagccaccgcaccggcctaaatgctacacaatttaagagcttgtttggattaatgcaggacccacagctcattactkaacaatcactgagtatacgtgttccaaatgcacagggggttattcctaagaaagcaatcagcctagtggaccgcagaatgccattataaggtctgtttgctctgagaaggggactgcccaactctccctataaaataccaagtgaagccccccagatgaagcagttaatatgcttcatatgcaagccatggtggactagctttatattctcccagcaaataggcctattacccaggccatggtaaattcggggcctaaggggaccccttttacatgggtgcccctcccacagaatcatgggactgtttaagcagccttgacaaatctgctctccctcatagtgagaggtgacagcctgctggcagccctcccagcccttgctctctgcgtgcctccttggccttggtgc

SEQ ID NO: 927116 - DNA, 649 bp, Homo sapiens
taaatacaccaatcggcaggctgtatctagctaatctagtggggacagagaacttttgcgtctagctcagggattgtaaaggcaccaatcagcagcgtgtcaaaatggaccaatcagctctctgtaaaacagaccaattggctctctgtaaaatggaccaatcagcagaatgtgggtggggccagataagagaataaaagcaggctgcccgaatcagcagcggcaatttgcttggatctgcttctgggtcgtggagggtttatatttttttttttttttttttagttttagctgtttgcagtaagtcttgctgctgcttgctgtttgggtccacattgcttttatgagctataacactccttgagaaggtctgtagcttcactccttgaagccrgtgagatcacgaactcaccaggaagaacgaacaattccagacgcgccattttaagagctgtaatactcaccgtgaaggtctgcagctttactcctgagccagtaagaccacgaaccccacagaaggaagaaactctgaagacgtccgaatgtcaggaggaaccaagtctgaccacactgcttttaagaactgtaacactcacttcgagggtgcacggcttcattcttgaagtcagtgagaccaagaaccccccaa

SEQ ID NO: 927117 - DNA, 557 bp, Homo sapiens
gttttggggccagtttatggccagatttttggggagggggggcttgttcccaacatgtcccccttctttggtttgcaaatcaataaaagcaaaggcagctttgtcacggtgagctacttctcacaggagtcaggatccacatctgcagaytatgcaaagacaaacaacacagattaaaagcacaatcatcattgaaatcacagagcttccaagtgtttttatccattttaatgggttactagctgctaatttgtctgcagctcctttaagcactccagttcctggcattaaggccaggtgtgcctgggatgctttaaatatttgttcttttaattttgcaatatccaaaaacaagtttgtagagtgtccttttagatgcttttttattctttcccaaactttgatcttattaagagctattaatagtttccacaaatccttatgtttagctcctacaatgggccatatcatttgaggttgaggtgccactataccgccatgattccagataatatgaactcttgctggacttcttatcatttctaccatctgaccat

SEQ ID NO: 927118 - DNA, 667 bp, Homo sapiens
cacctacacttcatgttgaatcttttcattttagccaatctactctgtttatacttttccctcattgtgggtttaatttgggttatatgatttataggtgtttaatttttacgtaactatatatactggatatgactcctttgtcaagtatatgtattacaaataygttcccccaatctgtggcttgctcactgaactcgcttccttaactatgtcttttgatgaacagaagttcttaattttaagaaagcccaatttatctttttcctttttcttttatggcttaatgttttttgtgtcttgtttaagaaatcttgcctactccatgatcattttcctttgttacattctagaagctttattgttctgcctttcacattcaggtctatgatccactttgaattaatttttatgtgtggtataaggtcaagttcaagattcatttcttttttccctgaatagataccaatttctccagcaccatttatttaataatgatctttttccactgaatgacaatggcacctttattgcaaatcaagaaaccatatatgtgcacatctatttgtggactttatctgctccattggtttatttgtccatccttacaccaaaatagtatttccatgaggtgggattagcttgtgtgtctctgatgagtacaaat

SEQ ID NO: 927119 - DNA, 637 bp, Homo sapiens
atagctccaagtttaaaaaaacttgctctccataagctaacaaagaaagatgtccctgacatacaaagtagtgggaaaaacacaaattgcaggtcgggcacagtggctcatgcctgtaatcccagcactttgggaggccgaggtgggcggatcacgaggtcaggagatcgagaccatcctggctaacatggtgaaaccccatctctaataaaaatacaaaaaattagccgggtgtggtggcaggcgcctgtagtcccagctactcgggaggctgaggcaggagaatggcgtgaacctgggaggcggagcttgcagtgagccgagatcacgccactgcactccagcctgggcaacaaagtgaggaaaaaaaaaaaaaaaaaaaaaaaaaggaccaaattgcagaacaatatgtatattattgagaggtgacagcatgctggcagccctcagagccctcgcttgctctcsgcacctcccctgcctgggctcccactttggtggtatttgaagagcccttcagccccccactgcactgtgggagcccctttctgggctggccaaggctggagcccactccctcagcttgcagggaggtgtagagggagaggcaccagcgggaacgggggccgcgcacggc

SEQ ID NO: 927120 - DNA, 616 bp, Homo sapiens
acaatcatggctgaaagctgctagatttcagaagatgtatggaaactcctggatgtcgaggtagaagtttgctgcaggggaagggctctcatagacaccatctgctagggcagtatggaagagaaatgtggggtgggaaccccccctccacagagtccctactggggcaccacctagtggagctgtgagaagagggccaccatccaccagaccttagaatggtagacccagtgacggcttgcaccatgtgcctggaaaagtagcagacactcaaagccagcctgtgaaagcagccaggaaggaggctgtaccctgagaagccacatggacagagctgcccaagaccatgggaacccacctcttgcatcccastgtgacttggatgtaagagaaggggtcataaaagatcattttggagctttgtctgccccactggatttcagacatgcatgggacctgtagcccctttgttttggccaatttctccatttggaatgactgtatatacccaatgtttgtacccccactctatttaggaagtaagctaacctgcttttggtttcacatgctcataggtggaagggacttgccttgtctcagatgagacattggactg

SEQ ID NO: 927121 - DNA, 647 bp, Homo sapiens
ctactctcttcaaagctgtcagacagggacatttaggtctgcagaggattttgctgccttttgtttggcaatgccctgcccccagaggtggagtctacagaggcaggaaggcctccttgagctgccgtgggctccacccagttcgagcttcctggccactttgtttacctactcaagtctcggcaatggctggcgcccctcccccagcctcactgccgccttgcagtttgatctcagactgctgtgctagcaatgagcgaggctccgtgggcatagaaccctccaagccatgcacgggatataatctcctggtgtgctgtttgctaagaccattggraaagcacagtattagggtgggagtgacctgattttccaggtgccttctgtcacccctttctttgactaggaaagggaattccctgacccctttcgcttcccaggtgaggcgatgcctcgccctgctccggctcacatttggtgtgctgcacccactgtcctgcacccactttccgacactccgcagtgcgatgaacctggtacctcagttggaaatgcagaaatcacccatcttctgcatcgctcacgctgggagctgtagactggagttgttcctattcggccatcttggctccaaccctctccctgac

SEQ ID NO: 927122 - DNA, 552 bp, Homo sapiens
ggcaggcagctccaggtgctgacacaggtgccggccccctgtgaggctgtggctggaccaggcatactgcaagcagcttccactaggggcactggggaacacggtggcacctggaagctaggagacaccaggaaccacacagccccaaagaaggtgtcacagccctggcttggggagcttcaaggtctgggttgcccaaatggtcgcagctctcctttcttctctccttctcatcacctgcaacatggtgagcaggggggcatgtttaagctctgttagtgttacagctctttcagacttgccatttgggggtcccaagttcctgtcccacatccaggaagaatgaggtatgtggacaactggasggtgagcaaggtgaagaggtgttttattgagcaacagtacagctctcaggagacccaaagtgggtagctcctttctgcaagcaggtcaccctgacatctctgcttcctcagcggaaaggagacctggagtgggtagctcctatccacagacaggtcatcccatcatctcagcagagaggagactgga

SEQ ID NO: 927123 - DNA, 761 bp, Homo sapiens
gccaattgtaatatttaacctaactttcacaagataatttaaaatccattttatgactatagcctttacagtagaatctgctatagggcctatgatgagggatacatttctaattattgcctcctttattccaatccatggaaaaaggacctaacgaatgatgcccttctagaatagtgaaggcttcctggcaatgttctctttaayccatgatgtgggttaagaggagtgaatcagtgttctgtttctgatggattatgagcaacatatgtaccattaaattttctcacatacattgggacttcatcttgtatcgttcgaagtgtaagttcttccatgtaaaatgctggcttcaaaatccttcacaaatagaagtatactccataagtgcacacatcagaccctcttttatttctattgttcatagagacagacacaaggaaaatacattcaaagataagattcagatgacagtagaagtcttgatcaagtcttaggaaaagttgttcacatacaggataccattatcgttggagagacttccttagttggcttttcttttaggattccactatatgcacagctccaagagtgtggagagacccctctcagttatgagattatgaacccaaggttcaagatcctgaagttttgttgcactgtggatggcaaagacagtctttctctgatgttctcagaagatccaatctttgggttctagattgtgaggggattgaatattttcagtgaaccataaaaac

SEQ ID NO: 927124 - DNA, 615 bp, Homo sapiens
atagattatttaaatctcccaaggtagcctgggatgctttttttttttttttttttttttgagacagagtttcactctcgttgcccaggctggagtgcaatggcacgatcttggctcaccacaacctccgcctcctgggttcaaacgattcttctgcctcagcctcccaagtagctgggataacaggcatgcaccaccacacccagctaagtttgtatttttagtagagatggggtttctccatgttggtcaggctggtctcaaactcccgacctcaggtgatccgcccgcctgaacctcccaaagtgctggcattacaggcaggatgcttttttgacacccccacttctactcagctttctttccttccktcagaaccctgttcagggtgtgaaggacaagttaagccatctccgtctctctcatactgcagcccacctgttctttaggtcataaccacagactcacatctttaaagaaagttagcaaatcaactcagaacccttacatgggtctttctctcctgctgtctcatcaatcagagcaagttcaactttctactaaatttatctatatttatatatgtatgtttataaaaggtatgagttaggtgtg

SEQ ID NO: 927125 - DNA, 598 bp, Homo sapiens
ttcttagaggttttatttcttaaaattactatttctttatttttgtctgactgagttgatttgatgaactggtcttcaagttgtgagatcatttccctagcttagtctagtttgctgttaatgctaccaactctgttaaaaaattattgttgtaaatttttcaattctakgaatttggttttgttttttcttaaaatgactaatttgtcttttaacttttggatcattttattggattcctggatcccttggattgggttacaactttctccagaatctcgatgaatttccttgccattccttctgaattccatgtctattatttcaagaatcattctggggagctaatatgcttatttagaggtaagaggacactgagcttttggattgccagagtttttgcgctgattctttctggtgttcctttgtcctattggcttttctgtcatttggatgcaattttttttgtatttatattctttatttactttgaggtttaagctgtggtgtaagttgagtatagtcaattagcttaatttctgtgtgctttcagagggccaaggctctgtatgtgatctttatttgtggctaggttctt

SEQ ID NO: 927126 - DNA, 598 bp, Homo sapiens
ttcttagaggttttatttcttaaaattactatttctttatttttgtctgactgagttgatttgatgaactggtcttcaagttgtgagatcatttccctagcttagtctagtttgctgttaatgctaccaactctgttaaaaaattattgttgtaaatttttcaattctaggaatttggttttgttttttcttaaaatgactaatttgtcttttaacttttggatcattttattggattcctggatcccttggattgggttacaactttctccagaatctcgatgaatttccttgccattccttctgaattccatgtctattatttcaagaatcattctggggagctaatatgcttatttagaggtaagaggacactgagyttttggattgccagagtttttgcgctgattctttctggtgttcctttgtcctattggcttttctgtcatttggatgcaattttttttgtatttatattctttatttactttgaggtttaagctgtggtgtaagttgagtatagtcaattagcttaatttctgtgtgctttcagagggccaaggctctgtatgtgatctttatttgtggctaggttctt

SEQ ID NO: 927127 - DNA, 663 bp, Homo sapiens
atggaactgggcatcattatgttaaggtcatccaaactggaaattaagaagtcaaattatccttgtttgctgatgatatgatcttatatttggaaaaatctaaagacttcccaggaaaactgttagaactcatcaactgattacagatttatttcacaaacgtaatgatctccagttccatccatgttgttacaaatgactggatcttacatgataaacatcacatgttctcacttatttgtgggatttaaaaatcaaaacaattgaactcatggacaccaagtagaaggatggttaccagtggctgggaaaggtaatggagggttggggggaggtgggcatgattaatgagtacaaaatcagttacaaagaatgaataagacctacttttaatagcacaagagggtgactatactcaataatcacttaaytgtacattttaaaataacttgaatagtgtaactagattgtttctaactcaaaggataaatcctggaagggatggaaaccccactttccatgatgtgtttatgtcacattgtatgcttgtatcaaaacaactcatgtaccccataaatatatacacctactatgtactcaaaaacattaaaataaaaactaataaaaaaagcttcaaaaaacaggctgactttcttggtaggg

SEQ ID NO: 927128 - DNA, 789 bp, Homo sapiens
gctccagccatgactaaaaggggccatggcacagctcaggccattgcttcagagggtgcaaaccccaagccttgatggctttcacatgatgacggcctgtgggtgcacagaagtcaagaattgaggtttggaaaaccctgcctggatttcagaggttatatcaaaacacctggatgtccaggccaaagtttactgcagggacagagtcttcatggagaacctctgctagggcagtgtagaagggaaatatggggttggagcccccacacagagcactacctagtggagctgtgagaagagggctactgtcctccaaaccccagaatgatagatccactgacagcttgccctgtgggcctggaaaagccacaggcactcaatgtcagtccatgaaggagctgcccaagatcttgggagcccaccccttgcatcagcatgtcccagatgtgagacatagagtcaaaggtgatcatttyggtgccgtaaggtttaatgactgcttcactgaattttggacttgcatggggcctgtagccccctttgttttggccaatttctcccatttagaatggatgtatttgcccaatgcctgtaccccctttgtatcttggaaagagctaacttgttttttattttacaggttcatcggcagaagggacttgcctttactcagatgagactttggacttggactattgagttaatgctggactgagttaagactttgggggactgttaggaaggcaagattggttttgaaatgtgaaaagacatgagatttgggagggg

SEQ ID NO: 927129 - DNA, 740 bp, Homo sapiens
ctccgtttggggtccctgacttcccgcaacagtcgggctttggtatcaggatgatgttggcctcataaaatgagttagggagaattccctctttttctattgtttggaatagtttcagaaggaatgatatcagctcctcttttaaccactgggtgaattcatctgtgaatctgtctggtcctggacttttttttagttggtaggctattaattactgcctcaatttcagaacttgttattgttctattcagggattcaacttcttcctggtttagtcttgggagggtgtatgtgtccasgaatttacccatttcttctagattttctagtttatttgcatagaggtgtttatagtattctctgatggcagtttgtatttctgtgggatcagtggtgatatcccctttatcattttttattgtgtctatttgagtctcctctcttttcttctgtattaatatgggtagtggtcaatcgattttgttgatattttcaaaaaaccagctcctggattcattaatcttttgaggggtttttcatatctctatctccttctgttctgctctgatctcagttatttcttgtcttttgctagattgtgaatttatttgctcttgcttcccaagttattttagttgtgatgttagggtgttgattttagatctttcctgctttctcttgtgagcatttagtgctttaaatttccctctagacactgctttaaatgtgtcccagatatt

SEQ ID NO: 927130 - DNA, 612 bp, Homo sapiens
ctataagaagacactctttctgcttgagaaaagtggagggaaaagtaaaggagacttcgtcttggaccttaggtaccatctcaaccacagcagggtagagcaccaagcagattcttgggctccctcactctaggccttagctcttggatagcatttctggaccatctctgggctagaggggaacctaatgccctgaatgttgagtcccaggccaggcagtgttcaccacaagccaaatgaggttcccttrggcctgaagggaatattggcagtagcctggcattacttactatggggcttcacttcctgtggaaagggagggaagagagggaaggactgtgtcttatggtttgggtgctcgctcagccactgtacaatagaacacaaggtagacttgtaaggttttttattgcagtccctggctcccagaatgcacttctggacctgctgggggcccagaggaactcactgtcctgaagtgaaggacacaagcctaggtggcttcactacctgctgattgtagagcctctgggccttgagcaaacataagacagtagcaaggcagtgattacagtgggccttggtgagcccctgtactgtactggctttagg

SEQ ID NO: 927131 - DNA, 657 bp, Homo sapiens
tgagaattttgtgatcagataagttccttgccttcatggagctccccatccagtgttaaaaaaatcattagacaaatatttagaagtgtaaatgagaagtacagcatataggaaatgactgtttcctctattacacttgcttggtatttctctggcatgtgaaaattatcacaatttgcatctatttggaactgggagtgtatatgtatttccacgtgtataatgcaccattaaccaatatttaacaggactttagcctttctcagaaattgtaaattgttttaggtgagaatatatatttttcaacatttttattccttgcaaaagcctctacaattcagttgttgaattacactgtaatatatgagtgattttaggtgtagtcattggaactctatctacaataattgtggaatctgaaactttacttctatccttaatgcagtggctttttcatgcrtaacacattgctcattttccaagaaaagtacaggaaaggttaacagaagtggaaaatagttttagaaatagggttattttagcggcaatccaatataaacaaatagtaatgcggttaatagtgagaactttattcttgtgctgactagaaacttctgttctgtttatattgtcagcctaaagaaatcctcacgagat

SEQ ID NO: 927132 - DNA, 637 bp, Homo sapiens
actctcaggatacctgaaatgggtagctcctttctgcaggcaggtcattccaacatctgtttgagtctggctgagtctggggtttttatggccttagaagagaggaaatatgtgctgtttggtccatggatagccacgagtgggcccagaaaaagcaccataatttctcagtctgggctgtggactccacccagaactggcagcccgggccccaggcttcaggccatccctggcttgaaggtggcgtttcactgggacctgcccctttctacccaggaatctgtctgcctcctactgctatcaacatgccatccacaactcctaggttgttaatgctgagggtcgcctgtaggcccattccaagccaccctcatgctccctcaacctccctcccatgctcctcagtgcccaaagtctggagggggtggaggcagaagggggctggtgtgtcagcattgcccrggatgagcacacacctggccaggtcacaacagctttcccagcttggccacaactttgttccacccccatttgagtgcagggagcggggaaaagccagacagcaggagcaggcactttcaagcctgtgagggagaggggcttcctgggcctggccgagagtgtagggatgtccagg

SEQ ID NO: 927133 - DNA, 842 bp, Homo sapiens
cagcctaaggctgcaacttttgcctcgtcttttataacttttttttttttaaggtaaactgttgaggtatagcacacatattgaaaagtgtaagtcctagcggtataatgatgaatcttcacaatataaaacacacttgtgtaactggcattcagcccaattagcagaacgtgaaatcaaccttccatccgcttctaggcactgtctcctcactatgggcycctatagcctgactgctaacactattatttcatctgcctgtttctaacccgcttgtagccatttcttagtgagagctctcaggggatgtccacatgggaggctttccccagaactggcaggcaggtcctcagcagtgcacccacaccaagacctgctagttacatgaatatatcctaatgtctgaaagcttccaacaatgaaacttgacagttgaagctcttctggactgtcttctctgagggttgcagtgcagcaggggccatctcagatggatcatctagagcagggatggcaaaacctagccaactatccccagtgcccttgcctacaaccacccagacaccattcatcgacagcagcactcctggtgctcagaacgagtctctgaattcttcttcgtaccatataatcagaaagcacagagttattatgtgaaatgtatcacttatttctttggtatttcttgagtgcttgctatgtgcctggcactgagctaggcactggggatataatgttgggcaaagcaatctctgcccttggggagccagcctgtttacgatcactgaaccaaaccaatgcctgacaactctcagagctgtgagggaggaaaagaaagagtg

SEQ ID NO: 927134 - DNA, 620 bp, Homo sapiens
atgaacattcatgtacaggtttttgtgtaaatataacttctcatttctctgggtaaatgctgtggtttgaatgtctcctctaaaactcttattgaaacttaatccccaatggcagtattgagaagtggggcctttaagaggtgattggaaggccgggcrctgtggctcacgcctgtaatcccaacactttgggaggctgaggcgggtggatcacctgaggtcaggagttcaagaacagcctggccaaaatggcgaaaccccatctctactaaaaatacaaaaattagccaggtgtgttggcatgtgcctgtaatctcagctacttgggaggctgaggcaggagaatcgcatgaacccaggaagcagaggttgcagtgagcttagatcgcaccactgcactcaagcctgggtgacagagcaagactctgtctcaaaaaaaaaaaaaaaaaaaaaaggtgattggattacaccattaatggattaatggattaataaattagtggattgatgagttatcatgggaggggaattggtgaccttataaaaagaagaaaagagacttaagatggcaagttagcatgctcagcccctcaccacatgatgccctgcaccccctcagg

SEQ ID NO: 927135 - DNA, 620 bp, Homo sapiens
atgaacattcatgtacaggtttttgtgtaaatataacttctcatttctctgggtaaatgctgtggtttgaatgtctcctctaaaactcttattgaaacttaatccccaatggcagtattgagaagtggggcctttaagaggtgattggaaggccgggcgctgtggctcacgcctgtaatcccaacactttgggaggctgaggcgggtggatcacctgaggtcaggagttcaagaacagcctggccaaaatggcgaaaccccatctctactaaaaatacaaaaattagccaggtgtgttggcaygtgcctgtaatctcagctacttgggaggctgaggcaggagaatcgcatgaacccaggaagcagaggttgcagtgagcttagatcgcaccactgcactcaagcctgggtgacagagcaagactctgtctcaaaaaaaaaaaaaaaaaaaaaaggtgattggattacaccattaatggattaatggattaataaattagtggattgatgagttatcatgggaggggaattggtgaccttataaaaagaagaaaagagacttaagatggcaagttagcatgctcagcccctcaccacatgatgccctgcaccccctcagg

SEQ ID NO: 927136 - DNA, 622 bp, Homo sapiens
tgagtgcagactcacttctcaaagtagagacccatatttctgattccatactatcttttcttttctttttttttgagacagggtcccactctgtcacccaggctagagtacagtggtgtgatctcagctcactgcaacctctgcctcccaggttcaagcaattctggtgcttcagccacccaagtagctgggattacaggcacatgccaccacacccaactaatttttgtatttttagtagagatggggtttcaccatgttggccaggctggtctcgaactcctgacctcagatgatctgcctgtctcagcctcccaaagtgctgggattacaaacatragccattgcacctggcctccacactatcttttctcaaagaagaaatgtgtatttgcaaattttgcaattataatatgatgttaccaggaggctgggaggtgaggggttatagaataaaagtcactaggtaatatctagaactggtgaatcaaaagacagcagtataggcatatacggcacatggacagacatacagatagggatgtctatgccagagaaacagcaggtggcacagactaccagttgacccctgtacctgcttcctcttctaactcagcaatag

SEQ ID NO: 927137 - DNA, 592 bp, Homo sapiens
tcacacatttgtggatgaatgaatgaatgactctatctactcaatgctcagcaagtcccaatcatgggatttggcctgatttattcccagggatccagctcttatttcaatttccctgaaccccaaaagtctatgagaataagacttccattttccaggaagatggagtagacatacttttccctattcctactaagtataactaaaagccctaggcattatatataaaacaaatataagaagactctgaaaggtacagagaagaaggcagaasagccagagaccatgggacttaaggaataacatgacaatgagtttcttattgcctcatatatcccaagattaggtatttggaaagtcagcaacctggaactgctaattagtgtagacaaaaaaaaaaaaaaaaaaaaatgccagctctttctagccaaagaaccaggaaaggaaaaacctagcaagacagaaaacttttaggaataaaatgcctactccagccaaacacagaaaaactgtggctccacctccacttgcacaagtcaaggctgagcagggagactagacttctgcccttactgtgttgttatgtggcatc

SEQ ID NO: 927138 - DNA, 572 bp, Homo sapiens
acccctctgagatgaagcttccagaggaacaatcaggcagcaacatttgctgttcagcaatattcgctcttctgcagcctccgctgctgataaccaggcaaacagggtcagagtggacctccagcaaactccaacagacctgcaggtgagggtcttgactgttagaaggaaaacaaacacaaaggacatccacaccaaaaccccatctgtatgtcaccatcatcaaagaccaaagttagataaaaccacaaagatgggggaaaaacagagcagaatagctgaaaattctaaaactcagagcgcctctcttcctccaaaggaacgcagctccttaccagcaatgaaatgaagctggayggagaatgactttgatgagttgagagaagaaggcttcagactatcaaacttctctgagctaaaggaggaagtttgaactcatcgtaaagaagctaaaaccttgaaaaaagaatagacaaacggctaactagaataaccagtgtagagaagtccttaaatgacctgatggagctgaaaactgtggcatgagaaccacatgatgaatgcacaacctt

SEQ ID NO: 927139 - DNA, 612 bp, Homo sapiens
tctaactaagcctatttaataaagggttgaatatctcatataatttattaaatactgtgctggaagtgagaaatagaatgactgtatggtgtttgaagtatggtttctactgaatgggttttgcttttacaccatcttaaagtcgaaawattgtaagttgaatcatcgtaagtcagggaccatctgtacttcatctaataaaagcagaatacacatttttctcaagctcatatgggatacttaccaagatagattccattctgggtactgaaacagattgaacaaatttttaaaaataaaattcataaaaagtatgctcttggaccataatgaaattagctagaaatcaataatggaaagatagctggaaaagaaccaaatatttggagattaagcaacatacttgcaaataacacgtgagtcaaaagagaaatctcaagagaaattagaaatatttttaattaaatgaaaataaagatacaacttatcaaaatttggggaatacatcaaaaggaatggttagagagaaatttatagcattgaatgcatatatgcatatattagaatagaaggaggacctgaaatcaatagaggaaataggaaaataaagca

SEQ ID NO: 927140 - DNA, 772 bp, Homo sapiens
tatgtatacattatgcaatgattaaatcaaactaattaacattctacacctcacatacttaccatttttgtaaagagaacttttaaaatcaagtcccttagcaatattctattatactatatattattattaattatagtcaccatgttgtacactagatctccagagcttagtctttctaactgaaactttgtgcccttgatcaacatcttcccattccccaccccagccgctggtaactgctattctactctgggtttctatcagtttaattattttacattctacatacaagtgagatcatgcagtatttgtttttctgtgtttggattattttagtaagtcctccaggttcatctrtgttgccacaaatgacaggatttccttattttataaggctgaataacattccattatgtacagatactactttttctttatttgttcattcgttaatggacacttagtttggtttcgtatcttggctattgtgaatactactcaaagtgatctatagcttcaatgtaactgctatcaaaattccaatgacattttttacagaaatagaaaaaacaatcctaaaattcttatggaaccacaaaacatcccaaatagccaaaacaattttgagcaaaaagaacaaatctggatgtatcacacaacctgactacaaactatactacaaagctatagtaacaaaaacagcatgatactggcacaaaaacagacacatagatcaatggaacaaaatagagggcccagaaatgaatct

SEQ ID NO: 927141 - DNA, 772 bp, Homo sapiens
tatgtatacattatgcaatgattaaatcaaactaattaacattctacacctcacatacttaccatttttgtaaagagaacttttaaaatcaagtcccttagcaatattctattatactatatattattattaattatagtcaccatgttgtacactagatctccagagcttagtctttctaactgaaactttgtgcccttgatcaacatcttcccattccccaccccagccgctggtaactgctattctactctgggtttctatcagtttaattattttacattctacatacaagtgagatcatgcagtatttgtttttctgtgtttggattattttagtaagtcctccaggttcatctgtgttgccacaaatgacaggatttccttattttataaggctgaataacattccattatgtacagatactactttttctttatttgttcattcgttaatggacacttagkttggtttcgtatcttggctattgtgaatactactcaaagtgatctatagcttcaatgtaactgctatcaaaattccaatgacattttttacagaaatagaaaaaacaatcctaaaattcttatggaaccacaaaacatcccaaatagccaaaacaattttgagcaaaaagaacaaatctggatgtatcacacaacctgactacaaactatactacaaagctatagtaacaaaaacagcatgatactggcacaaaaacagacacatagatcaatggaacaaaatagagggcccagaaatgaatct

SEQ ID NO: 927142 - DNA, 615 bp, Homo sapiens
atgtctactgtcctatctcagggtatatcaactctccagcttggtgccataatctgactcagagagaccttgatcgttttttgcttccacaaggtatacattaatgatattatgcttattggactcagtgagtaagaagcagcaaacacactggacttattggggagacatttgtgtgccagagggtgggaaataaatctgactaaaatgcatggaccttctacctcagtaaaatttctagggatccagtggtgtgaggcctgttgagatattccctctgaggtgaaggacaagttgctgcatwtggcccctcctacaaccaagaaagaggcacaatgcctcatgggcctatttggattctggggacaacacattcctcatttgattgtgttactccagtctatttatccagtgacctgaaaggttgcctgttttgagtggggtccagaacaggagaaagctctgcaacaggtccaggctgctgtgcaagctgctctgcaacttgggccatataacccagcagatccaatggtgcttgaagtatcagtggcagatagggatgctgtttggagcctttggaaggctcccaaaggttaatcatagcagaggcctcta

SEQ ID NO: 927143 - DNA, 549 bp, Homo sapiens
ctgcaacttgggccatataacccagcagatccaatggtgcttgaagtatcagtggcagatagggatgctgtttggagcctttggaaggctcccaaaggttaatcatagcagaggcctctaggaatttggagcaagtcccttccatcttcagcaaatgactactgtccttttgagagacatctctttgcctgttactgggctttggtggaaacacaatgtttgactacgggtcatcaagtcgacatgagacctgaattgcctttcatgaactgagtgcttcctgacccatctagccataaaccgggtcatgcacagcagcattccatcatcaaatggaaatggtgtgtacgtgatcaggctcaagtgggtcctgaaggcacaagtaagttacatgagratgtggctcaaatgcccatggtctccactcctgccactgcctgccttctctcccccagcctgcaccaatggcctcttcaggagtcccctatgatcagttgacagaggaagagaagattagggcttggttcacagatagatcagcatgatatg

SEQ ID NO: 927144 - DNA, 763 bp, Homo sapiens
cgttacagtttttggtgcatctcatcaatttgttgagcatacttctcagatataatggtttctccaggattcagaaagctgtactggatcagacccgcagtggaccactaaatagagaccatgaccatttttttggttcaaatgtggctttgagaagtgctttggagcttcttcagggtccaaccaatgaggtggttgtctccggttgtcctataaaatctacttttcatggcatgtcacgatccgattgagaaatcgttcattgtttagaattagaattgttagaataagagaagatgacacttcaaaatgattttttttaactcagctcctgtggcacccacttatcaaggtttttcacttttccaatgtacttccaatgcaaatgaccgaagaatggttgacgttgagttctttgacaacttctcttgtagttgtaggacaatcagctacgatgaytgctctcagttggtcattgccaacttctgatggccggccactacacttctcatcttcaaggttcttgttttctttgcaaagcttcttgaactaccactgtactgtatgtgcgttagcagttcctgggccaaatgcgttgttgatgttgtgagtttctgttgctttacgacccattttgaactcaaataagaaaattgctcgaatttgctttttgtctaacatcacttccatactctaaaataagcattaaaaaaatcaagtaataaatcattagcaagaaaacataaagcaagaaatgcccatt

SEQ ID NO: 927145 - DNA, 601 bp, Homo sapiens
ggaatttgagaccagcctgggcaacataggaagaccccatctctacaaaaaataaaatacttagctgagcatggtggtgcatgcctatagtcttagctactcgggaagctgaggcaggaggatcacttgagccctggtgtttgaggctgcagtgagctatgattgcactactatactccagcctgggcaacagagcaagactctgtctctttaaataaaataaataaataaataaataatactcttataatatggggaaggcactttgagactagaggtctcagaaggatgagtgccatttaaagtatgctgtgggctccacgttagagaaaaagtgaagaccacatggaggtgaaaacctgcagttagaagtttcaaactatgctcagatggtctttatttttaataatgattttttwaaaaaatttgtgaataatagattctctttttcatttaacttgtaacagaaataagcctcaatgaaacaatttggacctgaatttttcatgctgaggaataggccattttgctaattccataatcatatcaacaaataaacaaattagtgtttattcaatttgttagaaaatttgggatctca

SEQ ID NO: 927146 - DNA, 797 bp, Homo sapiens
acttaaggagtatattattgaatacgtcttgagaggctggcttggaatagagttgattaataaggcccagtagctcatagcaaagaatttattctttatgctgagaataaaggttagcataattagattaaaatttttttttaatgtttatgggtatacagttggtgtatatacttataggatatatgagatattttgacacaggcatataatacatgataattacctcaggataaatgtgatatccatcacatcacaaacttatttctttatgctggaagcatatcaattatattcttttagattttttaacatgtaaaaaattatkattaactgtaatcaccctgttacagtatcaaatattaaatgttattccttctatttaattacatttttgtacccattaactatctcacttttccctatcccccactcactacccttctcagactctggtaaccatcattctactctctatctccatgaaatcaattgctataatttttagctcacacaaataaatgagaacatgtaaaatttatctttatgtgcctggcttatttcactcaacatgatgtcctccaattccattcgtgttgttgcaaatgattaaatctcattcttttttatggctaaatagtactccactgggtatatatacattttctttatccatttgtctgtcgatggacacttaacgttgcttccaaattttggctattgtgaatagtgctacaataaacaagggagtacagatatcttttcaatatactgatttcctttcttagaggtgtgca

SEQ ID NO: 927147 - DNA, 797 bp, Homo sapiens
acttaaggagtatattattgaatacgtcttgagaggctggcttggaatagagttgattaataaggcccagtagctcatagcaaagaatttattctttatgctgagaataaaggttagcataattagattaaaatttttttttaatgtttatgggtatacagttggtgtatatacttataggatatatgagatattttgacacaggcatataatacatgataattacctcaggataaatgtgatatccatcacatcacaaacttatttctttatgctggaagcatatcaattatattcttttagattttttaacatgtaaaaaattattattaactgtaatcaccctgttacagtatcaaatattaaatkttattccttctatttaattacatttttgtacccattaactatctcacttttccctatcccccactcactacccttctcagactctggtaaccatcattctactctctatctccatgaaatcaattgctataatttttagctcacacaaataaatgagaacatgtaaaatttatctttatgtgcctggcttatttcactcaacatgatgtcctccaattccattcgtgttgttgcaaatgattaaatctcattcttttttatggctaaatagtactccactgggtatatatacattttctttatccatttgtctgtcgatggacacttaacgttgcttccaaattttggctattgtgaatagtgctacaataaacaagggagtacagatatcttttcaatatactgatttcctttcttagaggtgtgca

SEQ ID NO: 927148 - DNA, 609 bp, Homo sapiens
atatcattgctcttagtagtgtctactgactctttgaattttgatggtatcaattgtaatgtctcccttttgatttatcgttttgtttatttggatcttctcttatttttagcccattagtctgatgaaataattgtgggttttgtttctctccaagaaggcaaatttttgttttgttgactttttgtatttttttgtttcagttccacttatttctgttctcatctttattatttcttttcttctactaattttgggtctgctttgctctcgtttttctgattctttcagatacatcattaggttgtttattttacattttcctacttttttgatgtaggtgctgattgctatacacgttcctcttagcatggcttttgccatatctcataagttttggtatgttatatttccatttttgttttcatttatttcaagaartgtttaaattgatttgaaaagtgttattggcttctagttttattccaatgtggtcagaaaggatacttaatatgatttcaattttcttgaaatttttaagccttttattgtggctcaacgtttggtctatccctgagaatgattcctgtgctgaggagagtaatgtgt

SEQ ID NO: 927149 - DNA, 642 bp, Homo sapiens
agaataaatgtgtatacagatagcaagtatgcttatctaatcctacatgcccatgctgcaatatggaaagaaagggagttcctaacctctggggaacccccattgagtatcacaaggaaaccatggagttattgcatgcaatgcaaaaacccaaggaggtggcagtcttacactgctgaagccatcaaaaggagagcgagaggggagaacagcagcataagtggctggcagaggcagggaaagatcagcagaaaggaaagagagaaagagacagaaagtcagagaaagagagagagaggaagaaacagagacaaagagaaggagacrgaggaagagacagagagacagaaagtcagaaggaaagagaggaagagaaaaaaggggagtcagagagaaagtcagagagaaagagagagacagacaaacaaggagtcaaagaaagagagaaagagaagcagtaaagaaaaaagtgtaccctattcctttaaaagtcagggtaaatttctgtctacctcgccaaggcatattcttcttacatggaatctcaaccgatatctgtctctcagacagtttacaagaaataatgagatctatccttactctacaatcccaaatagattctttggcagcagcaactatcca

SEQ ID NO: 927150 - DNA, 609 bp, Homo sapiens
acaacctgacttcaaaatatattacgaggctgttataaccaagaagcatggaattggcataaaaacagacacatagaccaatggaacagaacagagaacccagacataaatccacatatttaccaccaactgacattagataaagtcaccaagaacwtacatttaggaaagaacaacatcttcaataaatgatgctggtaaaactggatatccacatgcagatgagtgaacctagactcttatctctcaccatatacaaaaatcaactcaagatggattaaagtcttaaatgtaagcccccaatctattctagataaaaacatagggaaacacttcaggatattgttctatgcaaatactttatggctaagaattcaaaaacataggcaacaaaaccaaaaatagacaaatgtgactctattaaaccaagcttctgcacagcacaggaaacaaccaacacagcagagacaagctgttgaatgggagaaaatatttccaagctatttattcaacaaaggaagcatacccagaatatacacagaactcaaacaactcaacagtaaaaaagcaaaattttttaatcattaaaaatttgtcaaaggacacaaa

SEQ ID NO: 927151 - DNA, 777 bp, Homo sapiens
catcatcttcgtataccccatctaccttaacgcagagcaagcattaatctactctctgtctctatggaatttgcatatcatgggcatctaatataaatggaatcatatgacatggtctcttgtgtatggctttttcacataccataatgtatttaatatttagattctagcatgtgtcagtacttcatttgtataacaataatattttattgtatggttatatcacattttgcttctcagttsattgacattgaggttgtttccaacttttggctattatgaataatactgccatgaacatttgtgtaaaaatttttgtgtagctatatatttgaatatctcttcagtatatagctaggaatggaattgctgcatgtctgagtctgggttgctataacaaaatacaataaactgggtggtttacaaaaagcccagaaatttgtttctcacagttttggaggctggaaagcctaagatcaaggcattggcagattccatgtctggttagggccctcttattagacaatcgtcttttatctgtgtcctcacatagtggagagtttgagagatctctctgaggcctcttttataatcctattcatgggggctccaccctggtgacctagtcacctccaaatgccacacttcttaacactatcatcttggggattaggatttcaacatatgaatctgcttcagggccagtgggggcacataaacattcaacccattgcactgggtcatatgattactctataactaacgttttgaggaact

SEQ ID NO: 927152 - DNA, 482 bp, Homo sapiens
ctgtacctgatatggtttcattgcttgagctaattaacacatctcctggtagctggtatgcagccattaacttggcaaatgactttttctccattcctgtctgtaaggcccaccagaagcattttgcctcccactggcaaggccagcagtacacatttactgtcctatctcaggtgtttatcaactctccagctttgtgtcataatcttattcagagagaacttgatyacttttcgtttccataagatgtcacactggtccattacattgatgacgttatgctgattggatccagtgagcaagaagtagcaaacacactggacttattgctgagacatttgtgtgccagaggatgggaaataaatctgactaaaattcaggggccttctacctcagtaaaatatctaggggtccagtggtgtggggcctgctgaggtattctttctagtgaaggataagttgctgcatgtggcctcccctac

SEQ ID NO: 927153 - DNA, 614 bp, Homo sapiens
ggggaccactaccaccaagacgcagagaccggtagtggccccgaatgctaggctgcactgatatttattggatacaagacgaaggggcaggataaggagtgtgagccatctccaatgatagggaaggccacatgggtcacatgtccactggacagggggcccttccctgcctggcagccaaggcagagagagagaggagaaagagcgaaacagcttacattattatttctgcttatcagggacttttagtactttcactaatttgctactgctaactaaacggcagagccaggtgtacaagatggaacataaaggcggactaggagcgygaccactgaagctcagcatcacagggagatggttaggcctccggataactgcaggtgggcctgactaatgtcaggccctccacaggaggtggaggagcagagtcttctctaaactcccccggggaaagggagactccctttcccagtctgctaagtagcgggtgtttttccttgacactgaggctaccgctagaccacagtccgcttggcaacggccatcttcccagacgctggtgtcaccgctagactaaggaggcctctggtggccctgcctgggcataacag

SEQ ID NO: 927154 - DNA, 565 bp, Homo sapiens
tctgtatcttgacataagtattccaaggatggacatttgctgaaatcaatcatactgctattgtcctttagcacaggagtgctgatcagttctgtggcctctgttaccacatacaggttctcccttctcttatgcactgctccagaaataatggttctcggtccatcaatccaacagtttcctgggatataaggcaggaggaaaagagtaagagttggggaaraacaccttcttatttgttctgaattacacatctcctcaggtgctggacattgtgcagtgcctctggaagttgacaggtgaaccctcaataggtaggaaaatcaattaactttgtagctggccaagaaacattacatatcctgcatcccatttactaaaagaatctcatgccttattttttttcatatttaaagctttgacttcagggttacttatttcttttagtgctagctaataaaatttatcatataagttgagcctctttcaatatgaagaaaaacctaaaagaaatcttgtggacgaccagtgagcaccaggtgaatttgttggaagtggcaaagag

SEQ ID NO: 927155 - DNA, 565 bp, Homo sapiens
tctgtatcttgacataagtattccaaggatggacatttgctgaaatcaatcatactgctattgtcctttagcacaggagtgctgatcagttctgtggcctctgttaccacatacaggttctcccttctcttatgcactgctccagaaataatggttctcggtccatcaatccaacagtttcctgggatataaggcaggaggaaaagagtaagagttggggaagaacaccttcttatttgttctgaattacacatctcctcaggtgctggacattgtgcagtgcctctggaagttgacaggtgaaccctcaataggtaggaaaatcaattaactttgtagctggccaaraaacattacatatcctgcatcccatttactaaaagaatctcatgccttattttttttcatatttaaagctttgacttcagggttacttatttcttttagtgctagctaataaaatttatcatataagttgagcctctttcaatatgaagaaaaacctaaaagaaatcttgtggacgaccagtgagcaccaggtgaatttgttggaagtggcaaagag

SEQ ID NO: 927156 - DNA, 629 bp, Homo sapiens
ctttgtaataattttggctgaacatgaattttccagggtaaaatccgggggtggggagcaaacaggaagtgcagatttgagcacagaagccatggcatgtgggtaggggtgaagcctgaaagccctacttgctttctcagcaggaaggcttgtagcctggggcaagaactcagccctgcacactgactgcctggrtataaacctggtgatttgttggggcatggtaagagtgagactggccttgctggctgcatgagagctggctgaggcccatcatggctgggtttcccccacttccctggtggcttgtatgatgcagcagaggcagccataatccccctgggaacataacctcattggcctgagaaccaccaaccccacagtggctgcagcaagtcctgcccaaggagagtctgaactcagacatgcttaaccccgcccccaactgatggtctttctctacctgccctgggagccaaagacaaaagatataatctcttggaagctctatggctctactcattcaatgagaaacccgaatacttatccagacaggcttgtatccctgctatactaccacagttgatgctcttttaaaagcaccacctccctgctggtggtcaagcaac

SEQ ID NO: 927157 - DNA, 629 bp, Homo sapiens
ctttgtaataattttggctgaacatgaattttccagggtaaaatccgggggtggggagcaaacaggaagtgcagatttgagcacagaagccatggcatgtgggtaggggtgaagcctgaaagccctacttgctttctcagcaggaaggcttgtagcctggggcaagaactcagccctgcacactgactgcctggatataaacctggtgatttgttggggcatggtaagagtgagactggccttgctggctgcatgagagctggctgaggcccatcatggctgggttkcccccacttccctggtggcttgtatgatgcagcagaggcagccataatccccctgggaacataacctcattggcctgagaaccaccaaccccacagtggctgcagcaagtcctgcccaaggagagtctgaactcagacatgcttaaccccgcccccaactgatggtctttctctacctgccctgggagccaaagacaaaagatataatctcttggaagctctatggctctactcattcaatgagaaacccgaatacttatccagacaggcttgtatccctgctatactaccacagttgatgctcttttaaaagcaccacctccctgctggtggtcaagcaac

SEQ ID NO: 927158 - DNA, 651 bp, Homo sapiens
aataaattactgctcactgataatgcacctagtcaatcaagaactttaatggaaatgtgtaaggagattaacgctgttttcatgctgctaacacaatatccactctgcagctcatggatcacaaagtaattctggctcttaagtcttattatttaagaaatacatttcttaaagctaaacctgtcatagatatggattttttctgatggatctgagaaagtaaattgaaagccttctggaaaggattcaccattttggataccgttaagaccctttgtgatttcatgggaaggggtcaaacatcaataggagtttgaaagaagttgattctaactctcacagatgactgtgaggggggttcaagacttcagtggagaaatggcagatgtggtggaaayaccaagagaactagagtagaagttcatcttagaagggcctttaagatgtgactgaatagctgcaatcttatgataaaaacttgagtggatgaggagttgcttcttatggataatcaaagaaaatggtttctttcctttttttttttttcttttgagacagagtttccaccttgtcatcttggctcactgcaacctcagctctcgggttcaagcaattctcgtgcctcaacctactgagtagctgagactacag

SEQ ID NO: 927159 - DNA, 563 bp, Homo sapiens
agatctttgggtgaggaagtatagacatgattttgtgttatactttagttcatagaatggatttgtttgcttagaatgggcacttgatatatgtatcttgtcagcattcatgaacaacagtgaattcaaataatttattgggcatttagagtttctacarttatacataaatgttcttggatgtgtgaactcattctatattatgatcagttcactaaatcctggctcttaattacgctgtagtattgaacacctactgtttgccagattccttataaccattaggttagttttataacaactctgtaatgtgtaggttaacttctatttaatttctaattaacattaggaaagtaaggctcagagaccttaggtatgccattaatcataattaaatatttccaattaggtatacttgttcaagtatactcccaagtgggagacgttgaagactggcatttgaacccatcacgtttacttaaattctatttcaacctactaatttgaggtcttatattttatattaagtatttgtaaaacatacttaaaacagcaaatctcaa

SEQ ID NO: 927160 - DNA, 672 bp, Homo sapiens
gtggctcacgcctgtagtctcagcactttgggaggccgagacgggcagatcacgaggccaggagatcgagaccatcctggctaacacggtgaaaccccgtctctactcaaaatacaaaaaaattagctgggcgtggtggcaggcccctgtagttccagctacgggaggctgaggcaggagaacggcgtgcatctgggaggcggagcttgtagtgaacagagatcctgccactgcactccagcctgggtgacagagtgagactctgtctcaaaaaagaaaagaaaagaaaagaaaacaaaacaaaacagaccaccatgactttttttttttttttaaggatagaaacattgaattaaattatgctggtttagaaattgaatccagtgcagctcattcataatagtgatggtgcattaaatgtagtataatttgtcttgcaggcttctcatgagaaggaactattttaaactgattgtagacctggcacctggcccactttctgggtgatctcccaagtgtgaactttcccyacccttagcccctcctttccttcctggaggtggctgatagaggtggattatactgataattacacaagcagtgtcagttgcacacatgatttgcataactgtgctgtgctgatttcatccatcaaattctgatactgatgcc

SEQ ID NO: 927161 - DNA, 598 bp, Homo sapiens
gcccaagcaatgtgctctgcaagagtagtaacttgtgcttctatagttatgaaacattaccaaggggtagaaccaccagggggctcattgcattcaataaaaccaagagcacagctcctcctagttatacaggtgtctggcaatgtagggagaacagtggcagataaataaggccatycccagggacaatatccagtccagtccactggtaggtaaggccaccctgtgtcctcagagacccataaactcccagggggcacaaaatccatcagggcctggccttggtggggctgcttgttccaccataccttcagtgtgatgacatgtgttatgtttacacaggctgtgacagatacctatcccacaggggtgttaccccagtgtcgctctatgcgctgcagtgcatgggcttggggtattacatgtgcccccgctagccagtcccacccatcataaacgctatgggccagccgtggggaaggcacactgtgggtcttacagcatcctttgtccagagcttgtccaggcatcagccatgggaccccagtctccagccatgtccagtcctctgaagacgctgaatgtatgtgccaaggca

SEQ ID NO: 927162 - DNA, 598 bp, Homo sapiens
gcccaagcaatgtgctctgcaagagtagtaacttgtgcttctatagttatgaaacattaccaaggggtagaaccaccagggggctcattgcattcaataaaaccaagagcacagctcctcctagttatacaggtgtctggcaatgtagggagaacagtggcagataaataaggccattcccagggacaatatccagtccagtccactggtaggtaaggccaccctgtgtcctcagagacccataaactcccagggggcacaaaatccatcagggcctggccttggtggggctgcttgttccaccataccttcagtgtgatgacatgtgttatgtttacacaggctgtgacagatacctatcccacaggggtgttaccccagtgtcgctstatgcgctgcagtgcatgggcttggggtattacatgtgcccccgctagccagtcccacccatcataaacgctatgggccagccgtggggaaggcacactgtgggtcttacagcatcctttgtccagagcttgtccaggcatcagccatgggaccccagtctccagccatgtccagtcctctgaagacgctgaatgtatgtgccaaggca

SEQ ID NO: 927163 - DNA, 512 bp, Homo sapiens
gaccccaacactaattgacctgttgcataagtttaattcccatatgtcccaatttctggtgtagccacaaggccacatctcgtgttggtgctgactctagccattggaacttggccaaggcatttgccttatcattgttggggttgcaaaaaagcatatggcctggcacatgayaaataattacctctttctgatggcccattttccagaggtcttgccacatggcctggccccaaatgagtcggtggccaactagctacttctgtattttccaggtacttaaccacaaggttaagctttgatagactgcccagttatcagtacagattaccaaaggtgtcacctccttggtgatcaccatccatactactctaagttcagcccattggctactttgtccacacccagtttcaaaccatatggtgtcagtagtagactggactgcaacagtggtccaggcagcagtagcactgaggcagagccatctgtgtaccatgccccattgggaatgt

SEQ ID NO: 927164 - DNA, 587 bp, Homo sapiens
ccatgaagtttcaacttctggccttcagtgctagggtattttctgcttctctgctttgacaaatcatttgagagatacatgacctttgtcaaaatgcattttctagatacattttattttgtgatttttttcataactgycttttctattctttgtttgtttgtttggttgatgggcctcttgctctgttgccaaggctggagtgcagaggtgtgatcacagctcactgaacctccaactcttggctcaagtgatctttctgcctcagctctctgagtagctgagactacaggtgcatgcctggctagtttttttttttttcctgtatttcttgtagagatgaggattcaccatgttgtccaggctggtcttgaattcttgggttcaagctttctgtccaccttggcctcccaaagtgctgggattacaggcatgaaccaccaaacccggcccataactgtcttagacaaacttaagaataaatgaatcatttagatgattataaatgttgtcttaataaatttcaaagtgaataagcttttattaaaataatctatatttgctgactcatgtatgactcatatatg

SEQ ID NO: 927165 - DNA, 561 bp, Homo sapiens
cagtatggaggttcctcaaaaaactaaaatagaaattccagcaagcccagtgctagatatatattttaaaaaaggaaactagtatattgaaggaatatctgcaatcccatgtttattgtagcactattcacaatagccatgatatggaatcaacttaacttttcatcaatgaatggaaagagaaaatgtggtatattagattggtgcaaaagtaattgctgtttttgccattayttttaataatagatacataatagaatactattcagccatgaaaaaatgaaatcctgtcatttgcaacgatatgaataaaactgaaggatattatgttaagtgaaataagccaagcacagaaagacagatattgtatattttcactcatacttggaactaaaaaaaatatattgtgtattccaaaataactagaggagtggatttggaatgttccaaacacaaagaaatgataaatccttgagctgatggatatcttaattattttgatcagatcattacacatcatacgattttatcaaaatatcacatatacttcataaatacata

SEQ ID NO: 927166 - DNA, 561 bp, Homo sapiens
cagtatggaggttcctcaaaaaactaaaatagaaattccagcaagcccagtgctagatatatattttaaaaaaggaaactagtatattgaaggaatatctgcaatcccatgtttattgtagcactattcacaatagccatgatatggaatcaacttaacttttcatcaatgaatggaaagagaaaatgtggtatattagattggtgcaaaagtaattgctgtttttgccattatttttaataatagatacataatagaatactattcagccaygaaaaaatgaaatcctgtcatttgcaacgatatgaataaaactgaaggatattatgttaagtgaaataagccaagcacagaaagacagatattgtatattttcactcatacttggaactaaaaaaaatatattgtgtattccaaaataactagaggagtggatttggaatgttccaaacacaaagaaatgataaatccttgagctgatggatatcttaattattttgatcagatcattacacatcatacgattttatcaaaatatcacatatacttcataaatacata

SEQ ID NO: 927167 - DNA, 632 bp, Homo sapiens
agttctcgtgccatcgttttcagctccatcaggtcctttagggacttctctgcattgattattctagttagccattcatctaatcttttttcaaggtttttaacttctttgccatgggttcaaacttcctcctttagctcagagaagtttgatcatctgaagccttcttctctcaactcatcaaagtcattctctgtccagctttgttccattgctggtgaggagctgcgttcctttggaggaggagaggtgctctgatttttagaattttcagtttttctgctctgttttttccccatgtttgtggttttatctacctttggtctttgatgatggtgatgtacagatggggttttggtgtggatgtcctttctgtttgttagttttccttctaacagtcaggaccctcagttgcaggtctgttggagttttccrgaggtccactccagaccctgttttcctgggtatcagcagtggaggctgcagaacagtgaatattggtgaacagcaaatgttgttgcctgatcattcctctggaagttttgtctcagaggagtaccttgccgtgtgaggtgtcagtctgcccctactgggggatgcctcacagttaggctactcggggatcagggacc

SEQ ID NO: 927168 - DNA, 576 bp, Homo sapiens
cttttttcaaggtttttaacttctttgccatgggttcaaacttcctcctttagctcagagaagtttgatcatctgaagccttcttctctcaactcatcaaagtcattctctgtccagctttgttccattgctggtgaggagctgcgttcctttggaggaggagaggtgctctgatttttagaattttcagtttttctgctctgttttttccccatgtttgtggttttatctacctttggtctttgatgatggtgatgtacagatggggttttggtgtggatgtcctttctgtttgttagttttccttctaacagtcaggaccctcagttgcaggtctgttggagttttccggaggtccactccagaccctgttttcctrggtatcagcagtggaggctgcagaacagtgaatattggtgaacagcaaatgttgttgcctgatcattcctctggaagttttgtctcagaggagtaccttgccgtgtgaggtgtcagtctgcccctactgggggatgcctcacagttaggctactcggggatcagggacccacttgaggaggcagtctgtccgttctc

SEQ ID NO: 927169 - DNA, 700 bp, Homo sapiens
atgactcattccctgatgtgagactttgtaacctcacacatcagttatgtggaaaatactggctcactgaggaatgcaggtcttcagagtgttgacacatttcattatatgatttttttttttttagacggagtctagctctgtcgcccaagctggtgtgcagtggtgaaatgttggctcactgcaacttctgcctcccgggttcaagtgattctcccgcctcagcctcccaagtagctgggattataggcacacgccaccatgcccggttaatttttgtatttttagtagagatggggtttcactatgttgtccaggctggtcttgaactcctgacctcatgatccacccacctcagcctcccaaagtgctaggattacaggcatgagccaccatacccagcctatatgatgttttttaaaaatcacagtcattagtatcattactggtctcatcagaaaagctgttaagtattaggatgccgtcaagkttgcagtggcagatataagttttccaaaagtctgattttcactggaaagctcagattttatcattggcaacaaatattgtcaggtttttttcccctggaagtgacaggcccactttgtccacttttgagaaaatagctgccaaacactcaaatctgaaaaatcacaatttgtctgtcagtcactctttcaggtaaagatggtgttccctg

SEQ ID NO: 927170 - DNA, 533 bp, Homo sapiens
aacatgtgcactgacgtccagccactcgggacatggagacaaagccccccaggtgaggagtgagacccgctgcccccttcagtgggcactgccagaggcagtgcagtgcaagcctggcaggagctgcccggggataactttggttcttaatctatctgggcccatataggaaagagcgcggaaacttctccattacggtttctgtaccaggaaagaaaaagaagctctctcacaaggggtttgtgggaactcatttccagagtgactcctaagtgaagatcattcttcagcagcacatgtatagacgcattttctattttgcaaagtgcttttcamccacagtgtgagctattacccacaactgagccaaaactcatcaaaggtagccttacacttcaggatgaaatgtcctcagcaagaaaggtaaagaattcttggccgggcgcggtggctcacgcttgtaatcccagcactttgggaggctgaggtgggcagatcatgaggtcaggcgttcgagaccagcctggccaaca

SEQ ID NO: 927171 - DNA, 613 bp, Homo sapiens
aaatgcatcccagtagatttcagcctcattttacccagctcctactcaagatggagttgttctggttcacatgcctctgacaatactagatggaaatttgggtcttcaggaagggataaagagccgtgggaatgttaaatacataggaaaatatacaatactattttattttaattcttcagttctgtaaaagtcagttgactaaagcaataacaataatgtagtgttagatttatagtatactcatatatttatatgtaatgaacattttacaacaagagcacaaaggacagaaggggtgtaaatggaattaagactctttttcttttttttgagataggatctcactctgtcacccaggctggcatgcactggcaccatctcaactcactgcaacttctgcctcccaggttcaagcgattctcctgccttggcctcccgggtagctgggattacaggtgcatgctacctygcctgggtaatttttgtatttttagtagagacagagtttcaccatgttgcccaggctggtctcgaactcctgagctcaggtgatccacctgccttgacctttcaaagtgttggggttacaggcgtgagccactgcacccaa

SEQ ID NO: 927172 - DNA, 613 bp, Homo sapiens
aaatgcatcccagtagatttcagcctcattttacccagctcctactcaagatggagttgttctggttcacatgcctctgacaatactagatggaaatttgggtcttcaggaagggataaagagccgtgggaatgttaaatacataggaaaatatacaatactattttattttaattcttcagttctgtaaaagtcagttgactaaagcaataacaataatgtagtgttagatttatagtatactcatatatttatatgtaatgaacattttacaacaagagcacaaaggacagaaggggtgtaaatggaattaagactctttttcttttttttgagataggatctcactctgtcacccaggctggcatgcactggcaccatctcaactcactgcaacttctgcctcccaggttcaagcgattctcctgccttggcctcccgggtagctgggattacaggtgcatgctacctcgcctggktaatttttgtatttttagtagagacagagtttcaccatgttgcccaggctggtctcgaactcctgagctcaggtgatccacctgccttgacctttcaaagtgttggggttacaggcgtgagccactgcacccaa

SEQ ID NO: 927173 - DNA, 749 bp, Homo sapiens
atcaaaacagagaccttaagactgacagaaatgataggaaacatttacaatctattatttctgaagcccactatctggaggcttcatctgcatgataaaaccctggtctcaacaatcacttaatcttaacccagacagtcccttctactgattttcatgtttttagataataactctttcaaccaattgccagtcagaaaatcttttaatccacctatgacctggaagccagaggctttccaaatcacactaaaatgacagtccacagtgcctgaacctcagagaaccttttggactaaaccagtgtacatcttgtatgtattgattgatgtcttttttctttttttttcttttttttttttttttttgagacagagtcttgctcttgtcacccaggctggagtgcagtggtgtgatctcagctcactgcaaccttcgcctcctgggtttaagtaattctcctgcytcagcctcccgagtagctgggactacaggtgcgtgccaccacccccagctaattttttgtattttcagtagagacagggtttcgccgtgttagccaggatggtcttgatctcctgacctcgtgatccgcctgccttggcctcccaaagtgctgggattataggtgtgagccaccgcccccagccaattgatgtcttatgtctccctataatgtataaaaccaagctgtagcccaactaccttgggcacatgttctcaggatctcctggggctgtgtcatgagc

SEQ ID NO: 927174 - DNA, 602 bp, Homo sapiens
agggggagggaagagatgcaagggaggaagtgtggaatgaataagtgaaccacaggggtttttagggcagtaaaactatcatgtatgatactgtaatggtggatacatgacatgatgtatgtctcagctcaggctgctataacagaataccagaccaagtggcctaaatggcatttatttttcatgcttccggaagtygagaagtccaagattaagatgctggcagatttgattcttaggccttcttgaatcctcatgtggtagacagaggaagctctaggtctgtcttccatttcttatctgggcactatcccatcattgtcgctccatccttatgaccttgtctaaacctaattacctccctagcaccctacttcctaaaaccatcgtgttggaggttagcacttcaaaatgtgaatttgtggggacacagaaattcaagccataacaatgcatttgtgaaaacctgtatagtgaaccctaatgtaaactatgggccttggttgataataaagtatcagtattggtacatcaattgtagcagatgaacaatacaaatgttagaccttaataataggggaaactgggagaatgacaggtat

SEQ ID NO: 927175 - DNA, 591 bp, Homo sapiens
gtttttcacctctcaatttcattcagttcagctctgatttgggttatatcttgtcttctgctagctttgtggttgatacgcatttgtttttctagttctgtgtgatatcaggttgttaactgaagatttttctatttgatgtggttgtttagtgttttaaacatgccttttaacattgttttatctgtaccccatagattccaatatattgtgtctttgtackcattagtttaaaacaatttattaatttctgtcttaattttattgtttaccccaaagtcattcagaagcagattgtttaagttttatgtaattatatggttttgggcaatctacttagtattgatttctatttttactgccctgtggtccaagagtgtggttggtatgatttaagttttttttgccaaaattgttttatggccaattgtgtggttgattttagagtatgtgccatgtgcagatgacaagaatttatattctgttggttttgggtgcagcattctataaatgtctgttaggtccatttgatcaagtctccagttcaggtctcaaatatctttgttagttatccaccttgaggatctaata

SEQ ID NO: 927176 - DNA, 636 bp, Homo sapiens
tgaaatatgttttccaagttgcttgttttctctccctctctttcagggatgttaatgagttatagatttggtgtccttgcataatctgacatttcccagaggtttcattcattcttttttgttcttttctcttcatttttatttgactaagttaattaagaaaaacagtcttcaagctcagagatttatttctcagcttggtctattctgctgttaaaacttggaaatgggctgggcgaggtggctmatgtctgtaatcccagcactttgggaggctgaggcgggcgggtcacctgagatcgggagtttgagaccagcctgaccaacgtggagaaaccccatctctactaaaaataaaaaattagctgggcatggtggcacatgcctgtaatcccagctagtcgggaggctgaggcaggagactcacttgaacgcaggagaatcgcttgaacccaggaggtggaggttgcggtgagctgagatcatgccattgcactccagcctgggaaacaagagcaaaactccatctcaaaaaacacaaaacaaaacttggaaacgtatcgtgaaattcttgtagtgagtttttcagctctattagatcagtttgattctttctttaaatagctgtttcatctt

SEQ ID NO: 927177 - DNA, 742 bp, Homo sapiens
acatacctgagactgggaaggaaaagaggtttaatggatttatggttccacgtgcctggggaggccttacaatcatggtggaaggtgaaaagcacatctcacatggcagcagacaagagaagagagattgtttggggaaattcccatttttaaaaccgtcagatttcatgagacttattcactatcatgagaagagcgtgggaaaaacctgctcccataattcaattacctcccaccaaggtgctcccatgacacatgggaatggtgggagttacaattcaaggtgagatttgggtagggacacagccaaaccatatcaatctgtgcctagaccctcccaaatytcatgtcctcacgtttcaaaaccaatcacgccttcccaacagtaccccaaagtcttaactcatttcagccttaactcaaaagtccacagtctgatgtctcatctgaaacaaggcaagtcctttctgcctatgagccagtaaaataaaaagcaagttagttatttccttgatacaatgggtacagagtacaggaactgggtaaatacagttgctccaactgggagaaattgtccaaaacagagaggctagagaccccatgcaagtctgaaatccagtagggcagtaaaatcttaaacctccaaaatgatcttctttgactccatgtttcacatccaggtcatgctgatgtaagagggaagttcccatggtcttgagcagctctgctcctatggttttgc

SEQ ID NO: 927178 - DNA, 426 bp, Homo sapiens
agtcatatttactcacaaagagatgatatgaaattggaacttatgtttaaaagggaagcagagtaggccagttctggtggctcacacctgtaatctcagcactttgggaggccaagacgggcagatcacctgaggtaaggagttcaagaccagcctggtcaacatggwgaaaccccatctctacttaaaaatacaaaaattagtcaggtgagatggcaggagcctgtaatcccagctacttaggaggctgaggcagaagaatcccttgaacctgggaggtggaggtgtggaggttgcagtaagctgagatcgcaccagtgcattccagcctggctgacagagcaaaactcagattccaaaaaaaaaggaagcagtgtataaaagtttgaaaaaatttctaagaaaaacccactttctggggagaaa

SEQ ID NO: 927179 - DNA, 572 bp, Homo sapiens
ggaaacatcgtcaaatggaatcgtaaggaatcatcatcgaatggagtcgaatgaaatcatcaatgaatggaatcgaatggaatcatcatagaaaggaatcgtagggaatcattgcaaggaatcgaactgaatcatcaaatggaatcaaatggaatcaacattaaatggaattgaatggaatcatgaagtggacacgaatataatacataaatagactcgaatggaatcatcaaatggactcgaatggaatcatcawcaagtggaatcaaatggaatcatcgaatggaaacgaatcaaatcatcgttgaatggaatcgaatggaatcatcgaatggactcgaagggaatcattattgaatggaattgaatgaaatcataatcgaatggattcgaatggaatcatcatcgaatacagtcgaatggaaacatcactgaatggaatgaaatgaaatcaccgaattgaatcaaatagaatgatcatcaaagggaatcacaggaaatcatcgaatgggatcaaatggagtcatcgaatggaatcgagtggaatcatcaaatggatttgaacagaatca

SEQ ID NO: 927180 - DNA, 573 bp, Homo sapiens
ggaaacatcgtcaaatggaatcgaaaggaatcatcatcgaatggagtcgaatgaaatcatcaatgaatggaatcgaatggaatcataatagaaaggaatcgtagggaatcattgcaaggaatcgaactgaatcatcaaatggaatcaaatggaatcaacattaaatggaattgaatggaatcatgaagtggacacgaatataatacataaatagactcgaatggaatcatcaaatggactcgaatggaatcatcawcaagtggaatcaaatggaatcatcgaatggaaacgaatcaaatcatcgttgaatggaatcgaatggaatcatcgaatggactcgaagggaatcattattgaatggaattgaatgaaatcataatcgaatggagtcgaatggaatcatcatcgaatacagtcgaatggaaacatcactgaatggaatgaaatgaaatcaccgaattgaatcaaatagaatgatcatcaaagggaatcacaggaaatcatcgaatgggatcaaatggagtcatcgaatggaatcgagtggaatcatcgaatggatttgaacagaatcaa

SEQ ID NO: 927181 - DNA, 512 bp, Homo sapiens
  misc_feature 425: n = A,T,C or G
cagctgtgatggcttggagaaacagtgtaaaccggcagtgtaaacaagagcagggcacgtatgagtagttgagaacggtgaataggagtatgactagacaaaagatagtagggatgacaagttttttgggggcacagtctcagttggtctggtgtcaaatgagactggggcctaataaaaaggagcatctacacaggagcttaaatgggctgtaccttgtagaagcgaaagtggtaaaagtattgtccagtcctttttaagttggtggctgagcttggtgagctgtgtttttaaaagacctttagtccgttctayttttcttgaagacggaggaccgtaagggatataaaggtttcactgaaacctactaagagcctgaaaaactgcttggctgatttgactaataaaggctggtctattatcanactgtatagaggtgggaaggctaaactgaggaattatgtctgacagaagggaagaaatgactgcggtggccttctcagaccctgtag

SEQ ID NO: 927182 - DNA, 616 bp, Homo sapiens
ccatctctactaaaaatacaaaaattagccagtgtggtggtgcatgccagtagtcccagcttccctggaggttgatgcaggagaatcgcttgaacccaggaaactgaggttgcagtgagccaagattgtgccactgcactccagcctgggtgacagagcaagactctgtctcaaaacaagacaaaacaacaaaacaaaaaacagaaagaattgatcatcatttattgtcctgttgaggtcagagaagagttggccaagtttatgtaggaactagagtatgctttttagataaaaaaaaaataaatccctaaagatttaaaagtctctaaagactttgagcacttttacttattctaatatggaaaatctgttttattgataaaaraattttgtactctttaaatttaattgaaaggattattttttaataaactcagaaatttagaaattaggtatataagttaacttgaaaattcagtgttttaattgtaatttcttcactctgctttatccagttgaggggaaaggggtaagacagtcttcagaatgagaagatgagcacaatttttattaatttattttaaggcgagaaggcatgtgtaatataaaaacaaaa

SEQ ID NO: 927183 - DNA, 619 bp, Homo sapiens
tcagaagaacttttatttggtttcagtttctccaacagttatttttttcaaatgttgtataattgttatacattctgcatccttgcatgtctaaaacagttttccatttgcctttgttaaataaaatttacaggaggctattgatttagactgagctcctgcattgtgccctaatagatcaaaccraaatggagttgtcagaggcatttaaaccagagtgactccatcttgtatagaggttgggtaaaataaggatggaacttactgagctgcattcccaggaggttaaggcattcttagtcacagcatgagataagaggttggcaggagatacaggtcataaagacctggcagataaaataggttacagtaaagaagctggtcaaaactcaccaaaaccaagatggcaaggagtgtgacttctgggcatcctcacagctcattatatgctaattataattcattagcatgctgaaagacactcccactagtgccatgaaagtttacaaacgtcatggcaatgtcaggaaattacactatttggtctaaaaaggggatgaacccgtagttccaggaattgtccactcctttcccagaaaactcatgaataatccatccc

SEQ ID NO: 927184 - DNA, 619 bp, Homo sapiens
tcagaagaacttttatttggtttcagtttctccaacagttatttttttcaaatgttgtataattgttatacattctgcatccttgcatgtctaaaacagttttccatttgcctttgttaaataaaatttacaggaggctattgatttagactgagctcctgcattgtgccctaatagatcaaaccaaaatggagttgtcagaggcatttaaaccagagtgactccatcttgtatagaggttgggtaaaataaggatggaacttactgagctgcattcccaggaggttaaggcattcttagtcacagcatgagataagaggttggcaggagatacaggtcataaagacctggcagataaaataggttacagtaaagaagctggtcaaaactcaccaaaaccaagatggcaaggagtgtgacttctggscatcctcacagctcattatatgctaattataattcattagcatgctgaaagacactcccactagtgccatgaaagtttacaaacgtcatggcaatgtcaggaaattacactatttggtctaaaaaggggatgaacccgtagttccaggaattgtccactcctttcccagaaaactcatgaataatccatccc

SEQ ID NO: 927185 - DNA, 749 bp, Homo sapiens
gacaaatttattggctaaataagttttagtattatacttggcctgattatttgcaaaatgtgcaacaagaagaatgattggccatataggctcttttccattgactttgcagaatttttaataagaaatctcagattacacttttaaaacctctaaagactagtaagccaagccagggattcactgtgggactgcttgtaacatatgtaaaaattgagtgaattcctatcttctcaatgacccaaaatatcttgtggttcctgggtgcatcagaaaatgacagtctttacttaccgcaagctgaggaaccttgtaagrgaaccgtgtgggcaaggcatgaggccagtctttcccatgtctattggctttataaagtcagcctcaattcctcaaagcagtttggtcacattcaaaaatgtaacattccagccaaagccttggtaaaataaccggtgtatccaatgtgttctgttacaaaagaaaacagattcttattgatcttatgcaaataactatattgccacaaaatacaaatactcatgaatagtttccaaattttagagaaatcaggtagggagaaatgcagatgttttaattttgctcacaaaaggttacccagttgctgtaagctataattagctaaaaagagacattttcttgactctggaaaacaaaacataaaataatcagcaatgtttcaaagagaaaagttaaagaaagcatttccaccctctgtcaggctagcccca

SEQ ID NO: 927186 - DNA, 596 bp, Homo sapiens
ctgctccacaaaagtgtggtcagactgcctccctaagcatgtccctgatctattccttcttgctgggtaggacttcccaactagggcctccagccgctctcactgatgttttctggctgtcagaggtttgaaaacttcctgggacaaagctcctagacagaggggtgggctgccatctttgctgttttggcaacttagccattccagcctccaggttttggagagcccaagctgactaagggcagaattagtaccccagcacagcacaactgctctatgaaagcatggctagactgcttctttaagcaggtccctgatcctgttcctcctgactgggtgaggcttcccaacctgggtctccagccacctcctacaggtgcatttgggctggcaaygggtctatacccctctgggatggagtccccagaggaaagagcaggctgccatctttgcttttttgcagccttcactgctgatactgccacatactgaaaaatccataggcaactaggggctggagtggaaactcagcaaaacccacagcagccctatagaaaagtggccagactgaaaaaacaaacaaacaaacaaacaaa

SEQ ID NO: 927187 - DNA, 626 bp, Homo sapiens
aatgtctaaactctaacaacgggagagacaggttttagggaggaaaacaaattttttttgaagatatgtcaagaaactaagaagccaaaatgttgaaagcaacctctatgtggaggtattaaagccaccaggaatagtgacagaaataatgtaagaaaatgagtgagccagagccaaaaatcttccaaagatgcggagacatgatgctagccagttgatgactgcaaatgcatraggagagaaaggtaagattggttagtatagtctgatgacataaaactcaactatgggtatttgtaggtaggaaggagagagaatgtccacaagcagcaacaagggaaatggaagatcctatccatcaccaggttcggggtaaaagtggtaagagaaaaaaaagttcatcatttgagaaggctgcagagaaaacattgtcctcagggacagccaagtgtctgttgaaaaggacagtaagggaaatggaatgttcaaaaccaatactgaggacataagaaattttgttgataactgtgactgcagaagggcacaggaaaaaggcttcaagagttaaaaagagatggatatgggacctcttgattcaagagaaggcttggatacttgaaaataac

SEQ ID NO: 927188 - DNA, 558 bp, Homo sapiens
tattttttactacctgttatgagctgaatgtgtcccttcaaaaaatcacacgttgaagctctaacccccaatgtgatggaatttgaaagtgaggcctttgggaagtaattttgtttctattagatcatgatggtaggatcctggtgatttgatggtattagcgcccttataagaaggaaactgatctctctctctctctctctctctctctmtatctctctctctctcaagcttgcaccaaagaaaagccctatgaggacatagtaagaaggtgactgcctacaagccaggaagtgagccttcctgagacaccaaatctgccagtatcttgactttggacttcacagtctccagaactgtgaactgtgaataataacagattaacaggttaatctatccagtctacggtattttgttatagctgagaagcagtctgagatagagatttgtatataagatatttattaggaagtgttctcagcattcactcctgtaaacactgaagcagaattaggtagagagagaagctggcctacagtgcaatcacagcaacggctt

SEQ ID NO: 927189 - DNA, 476 bp, Homo sapiens
gtgatccagctccaaactccaattttatattatattttttactacctgttatgagctgaatgtgtcccttcaaaaaatcacacgttgaagctctaacccccaatgtgatggaatttgaaagtgaggcctttgggaagtaattttgtttctattagatcatgatggtaggatcctggtgatttgatggtattagcgcccttataagaaggaaactgatctctctctctctctctctctctctctatatctctctctctctcaagcttgcaccaaagaaaagccctakgaggacatagtaagaaggtgactgcctacaagccaggaagtgagccttcctgagacaccaaatctgccagtatcttgactttggacttcacagtctccagaactgtgaactgtgaataataacagattaacaggttaatctatccagtctacggtattttgttatagctgagaagcagtctgagatagag

SEQ ID NO: 927190 - DNA, 573 bp, Homo sapiens
aggccattatcctaagcaaattaacacagaaacagaaaaccaaatatcacatgttctcacttataagtggtagctaagcattgggtacacatggacatcaagatgggagcaatagacactgaggactactaaggaggatgagagagagtgaagaaatagctgaaaaactacctattccttactatactcactacttgggtgatgggatcacgtgtaccccaaacctcaaaatcaaacaatatagccatgkagcaaacctgcacatgtcccccacttggccatgtccataagtgtctctttaccaaatcatccttgcaagggtaaaccatgctgctcatgttctcacacctaggccttatgggtggccaagggatggccacttgcaggagtgtaaacagagcttatacattcttgcttggatgtctgtgcaagtgcagtcatgtgggctagcaaccagtcctcctcaccaacactgccttccagtctggaattccaaggatcccaagaattcttccttccagatattataaaggatagttgttaaggaggtaggataaaatgtgttttagtaat

SEQ ID NO: 927191 - DNA, 601 bp, Homo sapiens
ggaaaaaatcagtagttgaagttagaacagaagttccccaacctgaacaactaaaagaaaacaggctagaaaaataaataaataaacagacgctcacaaacttggaggactataataaaagacatgacatcagggtcatcagagtcccacagggagaagacaaagaaagtggtgctgaaaaagtactcgaagaaataatgattcaaaattccccaaatttagccaaagacataaactaacagattgaggaagtcaagcaaaccctcaactggatatacccgaaggaatccacaccaagacacatcacgtcatcattctaaaaacaaaacaaaactcttacaagcagcaagagaggagtgacatctkgcctatagaggaaaagtgattcaaatgtcagtagatttttcaccagaaaccatggatgcaagaaggaagcggcacaacatttttcaaaggctgaaatagaagaactattagcccagaatcttatatctgatgaaaatgttaaggtatgaaggaaaaataaagatattttcagatgaagaaaaataaagataatttgctgccatcatacctgctctaaaagaatggctaaaggaga

SEQ ID NO: 927192 - DNA, 764 bp, Homo sapiens
catctttcttcccaaagctttttttgttcttttttttccttgcttttggtttacctccttaaaagaattctgggtcaaaggttatgaacatttttcaaaagacctttgttgtcatgatggcagagaggcagcactaaaatagtttggagcaatagggatttcaccaaaatagctatgattgatatctggaaagaaagayagagaaaataatggcatgggaatctttctagagttttagggccttgttctgatttaaaaaaaaaaaaatatatatatatatatatatatatatatatgaaaggaaaataaatcttcgggcccccaaatcactaagggaataatcaagctgggaactgcttagggcaaacctgcttcccattctattcaaagtcacccctctgctcactgagataaatgcatatctgattgcctcctttggaaaggctaatcagaaactcacaagaatgaaccgtttgtctctcaagtatctgtgacctggaagctccctcccagcttcaagttgtgccgcctttccagacagaaccaatgtacagcttatatatattgattgacgtctcatgtcttcctaaaatgtataaaaccaagctgtgttctgaccaacttggacacatgtcatcaggacctcctgaggctgtgtcatgggcatgcatcctcaaccttggcaaaataaactttctaaattaactgagatctgtctcagatatttggggttcacatatatatgaatatatgaaataattgta

SEQ ID NO: 927193 - DNA, 593 bp, Homo sapiens
gatttgccttttcctcagtctcttttctatccattccaattgagctttctttttcactcctccacagaaacagctcttttcaaggtgatgaatgatggtctatattggcaatttcaaaatttaattctctgttcttatcgaattcaaatattacgcagcatgtgacccagttattttctctctcttggcaatattctggctatcttctcaggttctgttgattattcttaatcttagattcactctaaatgctgggaagcacaaggagctcagcccctagcccttttctctagctgcattatctcccaagataatttcatctagtttcatggcttcgaatagcatctatatatgggtgtcttccatcatcatcatcatagctaataaatgtggaatacttactatgtaccaggtactataccctaagtgctttacactcattgaatcatttcartgtaaacttactagaatgtaagtttcatgagaacaggaaccttatctgttatagtgcttgagacatggaagttgattaaaaaataatcactgaaagaatgaataaaacttcgcagactttagaaataagagtgcctgca

SEQ ID NO: 927194 - DNA, 560 bp, Homo sapiens
gggtgctttgtgggggaccaggatgtcacggaaaagtcagataggagacctttccccaaactgctcacaggcagcaaaaaccataatgaaaagtagaaatgattcaatattatagcagacatatggctatatttttttgtcccagttcagaggaggacattatttctaccatggagggtgtgaaataatcaggcaggttcagtggaaggaaggatatttgagttggaaaataacaggtgagttaaattttgttcttaaaggacatattggtattcccaaggtacccatcccgacagttgacacaagtgcacgartatctgtctgctggtgtttgccttcacctgaatgtaacttagctgctagattcctaaaacgctgcacctctgataagaagccagttcgtgttcttttcttcaaatatgggcttccaattgtatcacttctataacacaaagcacagttcattcatttacatgaaacaagaagacattgacattctgcctgtcttcagtccttacctttgttatgaaggaatctttggtgtctctgaccctctaggg

SEQ ID NO: 927195 - DNA, 810 bp, Homo sapiens
gccaccatgcccagctaatttttttatttttttatcatagagacgggatcttgctaggttgctcagactgggctcaaacttctgacctcaagtgatcctcctgcctcagcctcccaaagagctgggattacaggcaggcatgactacctgtgcccagccccttattattattatttaaaataatagctttattaaaatataattcacataccattcactttatttattgaaatctgcaattcagtaggttttagagtattcccagagctgtacatcgatcaccacagtcacttttagaaactttcattactctatagagaaatccgcaccccttagccactacctcctactcccccsacctgccttggccaccagccttaggcaaccattgatccatttttttgtcactatagatttgcctaacctggacaaatagaattgtataatatgtggtcttttgtggctttttttccctctcagcacaatgttttcaaagttcctttatgtcatagtgtgtatcaatatttcattgcttctatggctgaataatattctgtggtagagacacactgcattttgtttatctgttcatcagttggtggacatttgggttttttccatgtattggccattatgaataatggtgctatgaagattgctgtacaagtttttgtgtggacatatatttttatttctctgggatatatgcctaggagtgaaattgttgcattatacgacgactgtacatttagcattttgagacactgccagactgttttctaaagtggctacaccaactgggtgcaatgg

SEQ ID NO: 927196 - DNA, 810 bp, Homo sapiens
gccaccatgcccagctaatttttttatttttttatcatagagacgggatcttgctaggttgctcagactgggctcaaacttctgacctcaagtgatcctcctgcctcagcctcccaaagagctgggattacaggcaggcatgactacctgtgcccagccccttattattattatttaaaataatagctttattaaaatataattcacataccattcactttatttattgaaatctgcaattcagtaggttttagagtattcccagagctgtacatcgatcaccacagtcacttttagaaactttcattactctatagagaaatccgcaccccttagccactacctcctactccccccacctgccttggccaccagccttaggcaaccattgatccatttttttgtcactatagatttgcctaacctggacaaatagaattgtataatatgtggtcttttgtggctttttttccctctyagcacaatgttttcaaagttcctttatgtcatagtgtgtatcaatatttcattgcttctatggctgaataatattctgtggtagagacacactgcattttgtttatctgttcatcagttggtggacatttgggttttttccatgtattggccattatgaataatggtgctatgaagattgctgtacaagtttttgtgtggacatatatttttatttctctgggatatatgcctaggagtgaaattgttgcattatacgacgactgtacatttagcattttgagacactgccagactgttttctaaagtggctacaccaactgggtgcaatgg

SEQ ID NO: 927197 - DNA, 810 bp, Homo sapiens
gccaccatgcccagctaatttttttatttttttatcatagagacgggatcttgctaggttgctcagactgggctcaaacttctgacctcaagtgatcctcctgcctcagcctcccaaagagctgggattacaggcaggcatgactacctgtgcccagccccttattattattatttaaaataatagctttattaaaatataattcacataccattcactttatttattgaaatctgcaattcagtaggttttagagtattcccagagctgtacatcgatcaccacagtcacttttagaaactttcattactctatagagaaatccgcaccccttagccactacctcctactccccccacctgccttggccaccagccttaggcaaccattgatccatttttttgtcactatagatttgcctaacctggacaaatagaattgtataatatgtggtcttttgtggctttttttccctctcagcacaatgttttcaaagttcctttatgtcatagtgtgtatcaatatttcattrcttctatggctgaataatattctgtggtagagacacactgcattttgtttatctgttcatcagttggtggacatttgggttttttccatgtattggccattatgaataatggtgctatgaagattgctgtacaagtttttgtgtggacatatatttttatttctctgggatatatgcctaggagtgaaattgttgcattatacgacgactgtacatttagcattttgagacactgccagactgttttctaaagtggctacaccaactgggtgcaatgg

SEQ ID NO: 927198 - DNA, 810 bp, Homo sapiens
gccaccatgcccagctaatttttttatttttttatcatagagacgggatcttgctaggttgctcagactgggctcaaacttctgacctcaagtgatcctcctgcctcagcctcccaaagagctgggattacaggcaggcatgactacctgtgcccagccccttattattattatttaaaataatagctttattaaaatataattcacataccattcactttatttattgaaatctgcaattcagtaggttttagagtattcccagagctgtacatcgatcaccacagtcacttttagaaactttcattactctatagagaaatccgcaccccttagccactacctcctactccccccacctgccttggccaccagccttaggcaaccattgatccatttttttgtcactatagatttgcctaacctggacaaatagaattgtataatatgtggtcttttgtggctttttttccctctcagcacaatgttttcaaagttcctttatgtcatagtgtgtatcaatatttcattgcttctatggctgaataatattctgtggtagagacacactgcattttgtttatctgttcatcagttggtggacatttgggttttttccatgtattggccattatgaataatggtgctatgaagattgctgkacaagtttttgtgtggacatatatttttatttctctgggatatatgcctaggagtgaaattgttgcattatacgacgactgtacatttagcattttgagacactgccagactgttttctaaagtggctacaccaactgggtgcaatgg

SEQ ID NO: 927199 - DNA, 751 bp, Homo sapiens
tagcctcaactctgacatggaagaacaaaagcagctataggcagtaagtaaaccaaccagcctggctgcattccaataaaactttatttatggatgccaagatttgaatttcatataatgttcacatgtcacaaaaatagccatctttttattttttcaattttttttttttttttttttagacagtctccctctgctccctctgttgcctagggtggagtgcagtggcatgagtagctcactgtaacctctaacttctggcctcaagcaatcctcccgcctcagcctactaaagcactgggattacaggccaccatgcctggcctattttttgtttcaacactttaaaaatataggccaggcacagtggttcatgcctgtaatctcagcagtttgggaggccaagaagggcggatcactggaggtcatgagttcgagaccagcctggccaacatggcaaaacctaaaaatacaaaaaattagctgggcatggtggcaggcacctgtaatcccagctactcaggaggctgagacatgagaatcacttgaacctgggagrcagaggctgcagtgagccaagatcgcatcattgcactccagtctgggtgacagagccagaatccatataaaaaaaaaaaaaaaaagtaaaaaccattcttagtttgtgggctgtacaaaaacaagcagcaggctaaatgtgtcccacgggccatcatttgctgccacctggttcatatgattcattggtatt

SEQ ID NO: 927200 - DNA, 637 bp, Homo sapiens
ttaagtacattcacagtgttacgcaaaagtcaccaccatccatttctagaaccttttcatcatcctaaacaaaaactatgtacccattaaacatgctctccccattccttctccctccccgtccctgaataagctctggtctactttctgtccctatgaatttgactattctaggtacttcatagaaatggaatcatacagtatttgtcattttgtgactgatgttctgtcacttacgataatgtgttcaargttcatgtacactatagtgtcagaacttcattccttttcacataatattatgaaataatattcattccttttcatataatattatgaaataaaatgtgttctatccctacaatagaatattattcagccataaaaaggaatgaagttcttctatcttctacaatattctattgcagggatagaacacattttgtttatcattcatcagtgacaaaagcttgggctgtctctgccttttggtgattgtgaataacgctgctacaaacattagcatacaagcatctgtttgtgtcctggctttcagttcttttgggtatatacctagaagtgcaattcctggctcactgggtaattataagtttaactttttgaggaaccaccagcg

SEQ ID NO: 927201 - DNA, 637 bp, Homo sapiens
ttaagtacattcacagtgttacgcaaaagtcaccaccatccatttctagaaccttttcatcatcctaaacaaaaactatgtacccattaaacatgctctccccattccttctccctccccgtccctgaataagctctggtctactttctgtccctatgaatttgactattctaggtacttcatagaaatggaatcatacagtatttgtcattttgtgactgatgttctgtcacttacgataatgtgttcaaagttcatgtacactatagtgtcagaacttcattccttttcacataatattatgaaataatattcattcsttttcatataatattatgaaataaaatgtgttctatccctacaatagaatattattcagccataaaaaggaatgaagttcttctatcttctacaatattctattgcagggatagaacacattttgtttatcattcatcagtgacaaaagcttgggctgtctctgccttttggtgattgtgaataacgctgctacaaacattagcatacaagcatctgtttgtgtcctggctttcagttcttttgggtatatacctagaagtgcaattcctggctcactgggtaattataagtttaactttttgaggaaccaccagcg

SEQ ID NO: 927202 - DNA, 600 bp, Homo sapiens
cgcagcactgtgttcacattactcttattttacttagcagtggccccaaagtgcaagagtagtgatactggcatattgttataattgttctattttattattattgttgttaatctcttactgcgcctaatttgtacgctaaattttataggtatgtatgtagaggaaaaaaacatagcatatatggactttggtactatctgaggtttcagacatcgatgtgggtcttggaacatatcccctccagggtgaggggrgactactgttctcctctttccccatctgcaggctgaatgaagggcattctgtgctcttaggggatgaaggtgctacagaatggaagaagcttgggtccctgaattgccatgtggcagggagccacctaccacccccctacattggatggttacatgtctgataaactttttgtttttttgagacgaagtctcactttgtcgcccagcctggagtgcagtggtgcaaactcagctcactgcaacctccgcctcctgggttcaagtgattctcctgcttcagcctcctgagtagctgggcttacaggcactcaccaccacatctggctaatttttgtatttttag

SEQ ID NO: 927203 - DNA, 710 bp, Homo sapiens
aggaaaagtgtaaatgaagtgacaataagaaaataaaatgctatcatgaaaatgaaaactttagggcagaaaacaagcaaaggcaagaccaagattcccctaggtggaactccaactcacagtcctagaagaaatatgaattctgaaagccctaaatcattgccaacaatagcaaatgccaaaaatccagagtacctgagtatcagccaacaagggtccccattccaaactccagaaattccagaatatctaggggctgaccaaatgctgaaaaccctggagcatttagaggatggccaacagtgaaccccaaagtcctggttgggccacagaacaatgtaactrtggcatcccagagttaatacaatggaggatctcacacaaccaattagattgccttaaacaattgctcagggaatcagagcaaagcaaaagactgcaaacaaaacatacattttaggacagaaaataacatggcttgcagagtaataaaatagagtcagaagaaaaagggtgaaggggtgaaggggtgacaaggaagtgttttgaggcactcaaacaatggggaagtttttcactgactgcttagccaaaggcttttattccctagctcactctatattatgagggcgacagaggggatactcatccatccgctggagcaaaagggtgctgactgatcttccatgtgggtgggacttgagtaatat

SEQ ID NO: 927204 - DNA, 559 bp, Homo sapiens
gaataccatagagtgtgcttacacaaacctagatggtacccctactccacacctaggctatagggtacagcctgcggctcccaggccacaaacctgtgcaggatggtgctgtatggaatactgtaggcaactgtaacacaatgataagtgtttgtgtacctaaacacacctaaacataaaaagggtacagtcaaaatacgacattagaatcttatgcaatgactattgaatatggggtctgctactgatggaaatgtcattttgcagcacaygactacacaaatagtgctctatccttggtcacatagggagcaactacttgaggtgagcagagcaagggccctggaacaacagggtctggaacctggctttgcccctgctagcaaattacttcatctctgttccttagtttcctcatttgtaacgtggggataataataacgtctccgaatgtctacctcacagggttgctttggagattaaatgacttcatgatggtaaagcacttagaatagagactggcacgcaggagctgtccattaagggaaacctactgcac

SEQ ID NO: 927205 - DNA, 630 bp, Homo sapiens
tatagtcatgtgtagcttaactatggggatacctcctgagaaatgcaggtgattttgttgttttgtgaataccatagagtgtgcttacacaaacctagatggtacccctactccacacctaggctatagggtacagcctgcggctcccaggccacaaacctgtgcaggatggtgctgtatggaatactgtaggcaactgtaacacaatgataagtgtttgtgtacctaaacacacctaaacataaaaagggtacagtcaaaatacgacattagaatcttatgcaatgactattgaatatggggtctgctactgatggaaatgtcattttgcagcacacgactacacaaatagtgctctatccttggtcacatagggagcaactacttgaggtgagcagagcaagggccctggaacaacagggtctggaacctggctttgcccctgctagcaaattacttcatctctgttcyttagtttcctcatttgtaacgtggggataataataacgtctccgaatgtctacctcacagggttgctttggagattaaatgacttcatgatggtaaagcacttagaatagagactggcacgcaggagctgtccattaagggaaacctactgcacacgtc

SEQ ID NO: 927206 - DNA, 556 bp, Homo sapiens
ttgccctacgtgtcctgcttacgtccggctacctgacccacaagaaccttccgctgccccagcctcccctctcccgctcccctggggccctgtttcccttccctggaaactttcctcctcctgctgctgcccagtgttgtgcccttgggataatagagggcaggtcctgccaggcctattgggarccaccccttggctgggtagtgctgtccttgcgccatcaggcattttaaaaactaccctagcccaggaagggtggctcacacctgtagtcccagcactttgaggggccaaggtgggtggatcacctgaggtcaggagttcgagaccaacctggccaactcttgtctctactaaaaatacaaaaattagctgggcgtggtggcacgcacctgtgatcccagctacttgggaggctgaggcaagagaatcacttgaacccaggaggcggaggttgcagtgagctgaggtcacgcctctgcactccagcctgggtgacagaaagagagtctgtctcaaaaacaaaaaacaaacaaacaaaaactaccctgaggct

SEQ ID NO: 927207 - DNA, 773 bp, Homo sapiens
ccaaaaagaacagaaaagacctctttgatcatttttgtatcgaatacataatggagtgctaacattttagatatattcagtaaaataaaatatatattgaaaattaatttcacctgtacctttttactttttaaaaatgtggcttgcaaaacatttaaaatcatgtgtgtggctctcatgacattcccgtggacagcgctgatatggctgacagacgcttgaatgaatgaaggcttgaacacagtcagggccgtgggctggggcccccgcctgggggtggaggagaaggccccacctgtgcctgggaagcggtgcacctctctgtgaggcccagcttcatctgccgatgagggtaatggttgtgcctgtcgtccagggctgttgtgagggttaaatgagattgtcatcaacaagggtgagaaatcatgaaatcygcacacgaggaggctctccctgttgctctgtaatgtgtctgtgaagctgaaggtactgtcaggggataattctcaaaccttttgttgacccgcaggctgtcagccagtgggtgaggggacttcagttgggaagggtctggggtcaggaggcttgggcttaagtcaactgggcctggcaccctttccagcagaaaagtcccttgcacactcactaataacagcagcctccaccttccaggagggtagggtcccatgccgctgcctgcccagggtcttgggtgagcaggggctgtttgtgggagaaaatggggttgggtccatggaaggagaggtgtgagg

SEQ ID NO: 927208 - DNA, 591 bp, Homo sapiens
aggagaaggaagcaggactggacagacagaggtcaaggtcaagttcaagagagctcatggggctgggcgcggtggctcacgcttgtaatcccagcactttgggaggccgaggcgggcggatcacgaggtcaggagatcgagaccatcctggctaacatggtgaaaccccgtctctactaaaaatacaaaaaaattagccgggcgtgatggtgggcgcctgtagtcccagctactcgggaggctgaggcaggagaatggcgtgaacccgggaggcggagcttgcagtgagccgagattgcgccactgcactcccgcctgggccacagagcgagactcygtctcaaaaaaaaaaaaaaaaaaagagagctcatgggccaggcaggcctgatgaccttagttgaccccatgaggatcccaggaactaaaacaccctgttggaggtgtccagttggggtttcatccttgcttccctcagtcactggatgtgtacagccttgggaaggccacccttgggaaggtcagggtggccatctcctgttgaggctgtccatctcccgttgaggctgtccctgaaaagactggcatctgaag

SEQ ID NO: 927209 - DNA, 627 bp, Homo sapiens
cacccagaatgtgcccctcagctcttcctttctcctcccccatctcagacctgcagtgacctcagggacagagggcgggcacatgctctcagatgggggtgatgttaaaagagggcctgggggacttcggggaagtgtcccagcggtactttctggagactctgggaaggtgcaagagggtaaactgaggagtcctatgcccagtggcgaaatagaattattccctgtggcccacagcagtgaatccaagactcttgtgaaccccaagctgatcccagcctctcccctccctggtccccactcttgccactatactctgatcctctaatcctttgctgttaccagaatacataaggccctttcacctgctgttgcctcagcttgtgttgccttccctttctcgtaccggtgaactcctrttcaacctccaactctaccttccctcagcctgcctactctcttctttcctgaaggagtctttcaccgccaagacttaaaaatgccagactcacagcctcgcagcctccggcagcagacagtggtgcaggctgttcctggagaggtgggaggggacctggtgagggtttttttcctccctaatgaaaaagagccttgtgggaggaagta

SEQ ID NO: 927210 - DNA, 473 bp, Homo sapiens
atttgaaacactctatttgtgcaatttgcaagtgtagatttcaagcgctttaaggtcaatggcagaaaaggaaatatcttcgtttcaaaactagacagaatcattcccacaaactgcgttgtgatgtgtttgttcaactcacagagtttaacctttcygttcatagagcagttaggaaacgctctgtttgtaaagtctgtaagtggatattctgacatcttgtggccttcgttggaaacgggatttcttcctattctgctagacagatgaattctcagtaacttccttgtgttgtgtgtattcaactcacagagttgaacgatcctttacacagagcagacttgaaacactctttttgtggaatttgcaagtggagatttcagccgctttgaggtcaatggtagaaaaggaaatatcttcgtatagaaacaagacagaatgattctcagaaactcctttgtgatgtgtgcgtt

SEQ ID NO: 927211 - DNA, 578 bp, Homo sapiens
acgtgaaaaagccagactggcttagcctcccagcctacatctttctcccctgctggattcttcctgcccttgaatatccaactttgagttcttcagtttgggactcggattggctctccttgctcctcagcttgcagacagccacttgtgggaccttgtgatcatgtaagttaatacttaataaactcatatatatatatgcttgcagacagcctcttgtgggaccttatgatcatgtaagttaatacttaataaagycacatatatatatatatatatatatatacacacacacacatatatttcatgttcacgtaaactaagattcataaaagaaggagaaataaattatttttcaggcaagtaaacattaagaatttgttaccacatataccacatatgttaccatatataccacatatgttactatatatatataaaattagttctgtccctctagagaaccctgactaatacagattttggtaccaggagtggttctagagaaacagaatattaaggatacagttctttcactggttttggggtttctagagttgactgcttaatatgattag

SEQ ID NO: 927212 - DNA, 749 bp, Homo sapiens
tccatacggaagtaaggaagagtacgcatggaatacagaaggtccagtaggtcgtctcttagtattactgtgccctgtgattaaggtcaatgggaaactacaatagtccaatccaggtaggactacaaatggcccagacccctcaggaatgatgatttgagtcacttcaccaggaaagaaaccactacctgctgaggtgcctcctgaagggaaagaaaatacagaatgagtagtaggagaaggtagtcatcaataccagctatgatcacgtgacaacgtgcagaaacgaggactgtaactgtcatcagtatttcctccttcttttgttaaaaacatgtttgtgcacgtatacaattgcactaacaaaataccttaattgtacttccttttcctttatcatgtgayataagatttattgactttatatcagcatttaaacattgttaactttatgtaatagtatttgggatggggataggtgcatttccggtcatatgaagaatagttgtattatgttaggcataattataaccttattactgtctttatttgaagatcatatataatctcaggagatgtgtatgggttcaattggacaaggggtggacttgggatggttaatactgagtgtcaacttgattggattgaaggatacaaaatattgatcccctgagtgtgtctgtgaaggttttgccaaaggagattaacatttgagtcagtgggctggggaaggcagatccatccttaat

SEQ ID NO: 927213 - DNA, 536 bp, Homo sapiens
ggaatggaatgaaatggaatcaacccgagtgcaattgaatgcaatggaatgcaatggaatggaatagaatgtaatcaacccgaatgcaatgaaatggaaaggaatcaacccgagtggaatggcatggaatggaagggaatggaatggaattgaatggaatggtacggaatagcatggaatggaacgraatggaatggaatggattatacccaattggaatggaatggaaatgtgtggaatggaatggaatggaatggagtgtaaaggaattgaaaagaatcaacccgaaatgaatggaatggaatggaatggaattgaatggaatggaacggaatggaatggaatggaatggaatggaatggaatggaatcaactcgagtgaaatggaatggaatggaatggattggaatggaatgcaattgaatggaatggaatcattccgagtggaatggaaggcaatgtaatcgagtcgaatagaaaagaatggaatcaacccgagtggaatggaagggattgcgatggaatggaaaggaatg

SEQ ID NO: 927214 - DNA, 747 bp, Homo sapiens
tcgatgggtgcagcaaaccaacgtggcacatgtatacctatgtaacaaaactgcactttgtgcacatgtaccccagaacttaaaatatattaaaatattgttatatatattatatattttatatttatacatatttatatatatatatatatatatatatatatatatatataattgaatactactcagccataaaaaggaatgaaataatggcatttgcagcgacctggatggaattggagccaattattctaagtgaagtaactcaggaatggaaaaccaaatatcgcatgttctctctcataagtgggagataaactatgaggacacagaggcataagaataatacaatggacttttgggactcagggggaaagggtgggagggggtgagggataaaatactacacattgggtacagtgtatactgctcagttgatgggtgcaccaagatttcagaaatcacgacttaagaacttattcatgtaaccaaacaccacctgttcccacgaaacctacggaaataaaaaatttwaaaaaaaagttagctgggtgtggtggcgtgtgcctatagtctcagctactcgggaagctgaggcaggagaatcgcttttacccgggaagcaaaggttgcagtgagccaagatcacaccactgcactccagcctgggcgacagaccaggactctgtctcaaataataataataacaatcaaacatcaggagatgacccagtctttttaatatat

SEQ ID NO: 927215 - DNA, 527 bp, Homo sapiens
ctttctggtgtccttgtacaccctgtatagagttaccacatcccatggcacctgctttttaaagttttgtttctctggatctgagttgtccaacctgaaggggtggggctgccggcaggagccgtggccttgggcagagtcactcactagctgagaggggggcctgtgagtctggtattgtaatttttaaattgtttttgagatggggtctccctctgtcacccaggctgcagtgcagtggtgcgatctcagctcactgcaacctccgcctcccggtttcaagtgactctcctgcctcagcctcccgagtagctgggattacaggtgttcaccaccacaccyggctattttttgtatttttagtagaggtgggggtttcaccatgttggccaggctggtcttgaactcctgacctcaggtgatctgcctgcctcggcctcccaaagtgctgggattacaggggtgagccaccgcgcctggcccaaattaattttaaataaaatttaaagctcagttgccctgtgtga

SEQ ID NO: 927216 - DNA, 577 bp, Homo sapiens
ggccaggagttcaagaccagcctgaccaatatggtgagaccctgtctctactaaaaatgcaacaattagccaggcgtggttgcccggacctgtagtcccagctactcaggaggctgaggcaggagaatggcttgaacccgggaggtggaggctgcagtgagctgagactgtgccagtkcactccagcctgggcaacagagtcagactcagtctcaaaaaaaaaaaaaaaggcttaagtaggcacagtagctcacacctgtaatcatggcacttttagaggctgaggtgggtggatcacttaagcccagaagttcaagaacaatctgggcaacatggtaaaaccacatctctacaaaaaaatacaaaaattagccaggcgtgctagcacacacctgtggtcccagctaccctggagggtgaggtgggatgatctcttgggcctgggaggttgaggcggcagtgagccgtaattttaccactgcactccagcctggcaacagagtgagaactcatctcaataaaaaagaaaaaaaaaaggctgaggtgatgattcaaagttgtgagacggttggaagca

SEQ ID NO: 927217 - DNA, 577 bp, Homo sapiens
ggccaggagttcaagaccagcctgaccaatatggtgagaccctgtctctactaaaaatgcaacaattagccaggcgtggttgcccggacctgtagtcccagctactcaggaggctgaggcaggagaatggcttgaacccgggaggtggaggctgcagtgagctgagactgtgccagtgcactccagcctgggcaacagagtcagactcagtctcaaaaaaaaaaaaaaaggcttaagtaggcacagtagctcacacctgtaatcatggcacttttagaggctgaggtgggtggatcacttaagcccagaagttcaagaacaatctgggcaacatggtaaaaccacatctctacaaaaaaatacaaaaattagccaggcgtgctagcacacacctgtggtcccagctaccctggagggtgaggtgggakgatctcttgggcctgggaggttgaggcggcagtgagccgtaattttaccactgcactccagcctggcaacagagtgagaactcatctcaataaaaaagaaaaaaaaaaggctgaggtgatgattcaaagttgtgagacggttggaagca

SEQ ID NO: 927218 - DNA, 571 bp, Homo sapiens
gtggcttgccaattatcccaacactgtttattgaatatggtgtcctttccccacttagtgtttttgtttgctttgtcaaagaccagttggctgtatttgggcttatttctgggttctctgtgctgttcagtggtgtatgtgctatttttacaccagtgtcatgctgttttggtgactatggccttttagtatagtttgaagtcagataatgtgatgcctccggatttgttctttttgcttagtcttgctttggctgtgagtctcttttttggttccatatgaattttaggattgtttttcctaattttgtgaaaaatgatggtrgtattttgataggaattgcatgaatttgtagattgcttttggcagtatggtcattttcacaatatggataccacccatctgtgagcatgtgacgtgtttccatttctttgtgtcatctgtgatttctttcagtaatgttttgtagttttcctcgtagaggtctttcacctccttggttaggtatattcctaagtattttttttttttttttggcagctattggaaaagggattgagttcttgatttt

SEQ ID NO: 927219 - DNA, 707 bp, Homo sapiens
tgacataacatagattaacaggagaaaagcataatacatgctttatgtagcacaggaaccctcatgaagaaatgaagaccgtaggctgggcgcaatggttcacgcctgtaatcccagcactttgggaggctgaggtgggtggatcacaaggtcaggagtttgagaccagcctgaccaacatggtgaaaccccatctctattaaaaatacaaaaattagctgggtatggtggcacgggcctgtaatcccagctactcaggaggctgagtcaggagaatcacttgaacccgggaggtggaggytgcagtcagccaagattgtgctactgcactccagcctgggtgacagagtgagagtctgtctcaaaaaagaaaaaaagaaagaaatgaagacctaaagaagcagagtcagttatttatatactggattggacaaaaaagtagtaaattgtgaagaagcaactaaattatgtgggcaggcttaaaagataagacttatttaacaaggtcagtacagtattctcttggtctcaccttctcgcccttgaagataagcatgttgcctttccttcaggttcagggagtgtcttccacacaggaatttcatcttccactcttaagaaacaacaagaagatcagagtgatttttttgcacccgctgttatacaaatgtctttaacttagtcaatatgccagaatagcgtatctt

SEQ ID NO: 927220 - DNA, 707 bp, Homo sapiens
tgacataacatagattaacaggagaaaagcataatacatgctttatgtagcacaggaaccctcatgaagaaatgaagaccgtaggctgggcgcaatggttcacgcctgtaatcccagcactttgggaggctgaggtgggtggatcacaaggtcaggagtttgagaccagcctgaccaacatggtgaaaccccatctctattaaaaatacaaaaattagctgggtatggtggcacgggcctgtaatcccagctactcaggaggctgagtcaggagaatcacttgaacccgggaggtggaggttgcagtcagccaagattgtgctactgcactccagcctgggtgacagagtgagagtctgtctcaaaaaagaaaaaaagaaagaaatgaagacctaaagaagcagagtcagttatttatatactggattggacaaaaaagtagtaaattgtgaagaagcaactaaattatgtrggcaggcttaaaagataagacttatttaacaaggtcagtacagtattctcttggtctcaccttctcgcccttgaagataagcatgttgcctttccttcaggttcagggagtgtcttccacacaggaatttcatcttccactcttaagaaacaacaagaagatcagagtgatttttttgcacccgctgttatacaaatgtctttaacttagtcaatatgccagaatagcgtatctt

SEQ ID NO: 927221 - DNA, 625 bp, Homo sapiens
acgcctgtaatcccagaaatcaggaggctgaggcagcagaatcgcttgaacccaggagacggaagttgcagtgagctgagatcacaccactgcactccagcccagccaacagagcgaaactccaactcaaaaaaaaaaaaaaaaaaccatcagaccttgtgagacttatttaccatcactattgcgagaayagcacagaaaaaccctgcccccgtgattcaattaccttccactgggtccctccaacgacacatggggattatgggagctacaattcaagatgagatttgggttgggacacagccaaaccacatcagacatgatttgtttagccctaccaagtcgcatgttgacatctgatccccagtgatggaggcgggcctggtgggaagtgttcatgatcgtgggggcagatccctcatgaatagcttgcaggaactcattcttacagggaagagtgaattctcactcttagttcctatgagaactggttgttgaaaagagcctggcactctcccctctctattgcttcctctctcaccgtgtgatctgcatacggagactcctctttggcttttgctctgagtggaagcttcctgaggcctcaccagaagcagatactggt

SEQ ID NO: 927222 - DNA, 625 bp, Homo sapiens
acgcctgtaatcccagaaatcaggaggctgaggcagcagaatcgcttgaacccaggagacggaagttgcagtgagctgagatcacaccactgcactccagcccagccaacagagcgaaactccaactcaaaaaaaaaaaaaaaaaaccatcagaccttgtgagacttatttaccatcactattgcgagaatagcacagaaaaaccctgcccccgtgattcaattaccttccactgggtccctccaacgacacatggggattatgggagctacaattcaagatgagatttgrgttgggacacagccaaaccacatcagacatgatttgtttagccctaccaagtcgcatgttgacatctgatccccagtgatggaggcgggcctggtgggaagtgttcatgatcgtgggggcagatccctcatgaatagcttgcaggaactcattcttacagggaagagtgaattctcactcttagttcctatgagaactggttgttgaaaagagcctggcactctcccctctctattgcttcctctctcaccgtgtgatctgcatacggagactcctctttggcttttgctctgagtggaagcttcctgaggcctcaccagaagcagatactggt

SEQ ID NO: 927223 - DNA, 557 bp, Homo sapiens
tcaacttgcttcccgtagcgaatcttttttcctagtcattaaaacacttttttctaggccatgtacaatgtttgaaatagttattttgtcaacacacatctgcataatctcaaaggctacatcatgtgacttaacaatgcaattagtagcatttcatttggagaggtccaaaagaatatttaaaaaataagaaaatgccttcaataagaggcaaatggatgtgttctagaagaataatgataactttttacatcagtgcataataactgtccattttgttattgctttacaaatasaaatgaaaagattagcagaaatatgaaaaaatagactgtactcacggaagtgataaaacaaagttcacatgagacttaaaatcaacatactcttaccttgctaaattaccagtttatttgaaataagtatagtgataattgctctacaagtatttaaattcattttattttagcaattcatttagcaattttaaaaagacacttcagggctgggcatggtggctcatgcttgtaatcccagcactttgggaggccaaggca

SEQ ID NO: 927224 - DNA, 753 bp, Homo sapiens
aattaatagcctactaaccaaaaaaagtccaggaccagatggattaacagccaaattctaccagaggtacaaaaaggagctggtaccattccttctgaaattattccaaacaatagaaaaacagggaatccttcctaactcattttatgaggccagcatcatcctgataccaaaacctggcagagacacaacaaaaaaagaaaatttcaggccaatatccctgatgaacatcaacacgaaaatcctcaataaaatactggcaaaccgaatccagcagcacatcatcaaaaagcttatccaccatgatcaagtyggcttcatccttgggatgcaaggctagttcaacatacacaaatcaataaacataatccatcacataaacagaaccaatgacaaaaaccacatgattatctcagtagacccagaaaaggcctttgacaaaattcaacagccttcatgctaaaaactctcagtaaactaggtattgatggaacgtatctcaaaataataagagctatttatgacaaacccacagccaatatcatactgaatgggcaaaaactagaggcattccctttgaaaatccacacaagacaaggatgccctctctcactactcccattcaagatagttttggaagttctggccagggcaatcaggcaggagaaagaaataaagggtatttacttaggaaaagaggaagtcaaattgtctctgtttgcagatgacgtgattgtatatttagaaaccccc

SEQ ID NO: 927225 - DNA, 610 bp, Homo sapiens
acaaaataccagagactgggcagcttacacaacagaaaactattttgtcacagttctaatggctagaagttcaagattgaggtgccatttctagtgagacctttttttaatagactgtagtgggctacttcttgctgtartgcttatatggtctttcatttctgcatgcatgaagaaagaaagatctctgatgcctcttcctcatctcataatggcaccagttctatcagattaaagtttcaccttcatgatctcatttaacctggattacctctcaaaagaccccttctccaaatacagtcacattggggcctagggcttcaacatatccatttgaaggagaaaaagttcattccataacaggaagaaaacatgaaagaacagaaagattgaaatatcatgtagatttcagaaagccacggggcaaggagctctggagtgagtatccaacaggttgtcccccactgagctcgaatggcagatttctgtaccctcatttatctctgtctcatattcaggcagacctagaatggacatgactttggacaaagcagctctccatagctgagtagaacatgaagttgctaacaattggaagccatctgatgac

SEQ ID NO: 927226 - DNA, 628 bp, Homo sapiens
ttgggtaaatacgcccattcctaatgggagaaattggccaaaacgaaggggctgcaggccccatgcaagtccaaaatccagcagggcagccaaatcttaaagctctgaaatgatctcctttgactccatgtctcacatccaggtcatgctgatgcaagaggtgggttcccacagccttgggaagctccacccctgtggctttgcagggtacagcttcccttctggctgctttcacaggctggtgttctgtggcttttccaggtgcatggtgcaakctgttggtggttctaccattctggggttgggaggatggtggccctcttctcacagctccaataggcagtaccccagtgaggactccatgtgggggctcccacctcacatttcccttccacactgccttagcagaggttctccatgagaactccacccctgcagcacacctctgcctggacatccaggcatttccgtacatcctctgaaatctaggcggaggttcccaaacctcagttcttgacctctgtgtacccacaggcccaataccacatgtaaatttacaaggcttggggcttcttccctctgaagcagtgacctgaggtgtacattggccctgtttagccacagctgg

SEQ ID NO: 927227 - DNA, 628 bp, Homo sapiens
ttgggtaaatacgcccattcctaatgggagaaattggccaaaacgaaggggctgcaggccccatgcaagtccaaaatccagcagggcagccaaatcttaaagctctgaaatgatctcctttgactccatgtctcacatccaggtcatgctgatgcaagaggtgggttcccacagccttgggaagctccacccctgtggctttgcagggtacagcttcccttctggctgctttcacaggctggtgttctgtggcttttccaggtgcatggtgcaatctgttggtggttctaccattctggggttgggaggatggtggccctcttctcacagctccaataggcagtaccccagtgaggactccatgtgggggctcccacctcacatttcccttccacactgccttagcagaggttctccatgagaactccacccctgcagcacacctctgcctggacatccaggcatttccrtacatcctctgaaatctaggcggaggttcccaaacctcagttcttgacctctgtgtacccacaggcccaataccacatgtaaatttacaaggcttggggcttcttccctctgaagcagtgacctgaggtgtacattggccctgtttagccacagctgg

SEQ ID NO: 927228 - DNA, 598 bp, Homo sapiens
caaaataaattttcaaacacaaaaaataaatttaatgatgtagctaaaagaaaggtaaaaatttgaaaagatatgacagaaagagaaagttaattggtggtgagaaacttaagaaaatgagtatagaaaactcttctgaagagattttctgtaaaggaaataagagaaaccaggtcatggatgcatggatggaggagaatgtggactaaggtggtgatttaagccaggggatgggatagcctgtttgtgctkcaccggaatgatccaatagaaagaagcaaagggagacgtggtcattatgcacagtgtttcagtgcagagaggggtgttttctttatcaaagtggtggtattttagcagctggtgttttctttatcaaggtaataatgcattcaggtgtatattttctttacaaatggcagagaagtgaattcaaggtcaaagtgtccttgaatcctattctccagaggccaccacttgccatagtttactttttttttattattatcagctctgaataatacacttatatttcattttaatttgtcagtatgaacaagtggaccaattgatttcttttacacaatgtaaagagttc

SEQ ID NO: 927229 - DNA, 594 bp, Homo sapiens
tagccaaatagtttttaaatcaaagtggaaaaagactttcaattataggatacaattcagaagatattaaagaaaatatttataaagacaaaaaggctagctgtgatggcccattcctgtaatcccagcactttgggaggctgcgtgggtggattgcttgagcttacaagtttgagaccattctgggcaacatagtgaaaacccgtttctacaaaaaatacaaaaactagcctggtgtggtggtgcatgtctgtagtcccagctacctgggacgttgtggtggcaggatggcttgagcccaggccgtggaggttacagtgagctgacakcacaccattgcactcccctggctgatagagccagactttgtctcaaaaaaaaaaaaagttattttttttagcataacattaaccatcataatcaagatataaataaactgtggccaggcatggtggttcacccctgtaatcccagcactttgggaggccaaggcaggcagatcacctgaggtcaggagtatgagaccagcctggccaccatggtgaaacctggtctctactaaaaatacaaaaattaattcgttgtggtgggaca

SEQ ID NO: 927230 - DNA, 575 bp, Homo sapiens
tcagcacctattgataaccttcaacatactgtagtttacacgaagttaaattggggcctgaggtttacccagattcagtgtcttaatctcccagcttttcttctgcaacagtaatgcagaatcaaaataaccattttctaccattgccttcagttttcaggatgtcccgcaaggggcagggaaagattaccccttctttaaaamcaataatgacgataaacattgggctactcagcaaataacgcagttggcagtttctctcctgaaactttaaaaaaaaggtcagaaagaagaggcactgagcaccctctgaaactaatttttccatcacctctgcacaacttctcttaactaagaccacgcagttaaatccctttgaatcaaaggcgaagtagaaatgaattcctctgaccgaaggcaacggagggagggaaggaggcggggagcgaacactggcttaaagacatccagagagttccgatctccactcctagtcaagaccggttttaatgaagttaataagcccaataatggtgatacttggtactgaaatgacgccgtcctccaaagaggtc

SEQ ID NO: 927231 - DNA, 831 bp, Homo sapiens
tatttcctacaggtgaccatttataaatgcttactcattcctgtatttgaacataagaacacaaaattcttcataaacaattttgaaggtgacagggacaagtagttagttataattctcaaataaagaaattaggccaggcccagtggctcactcctgtaaccccagcactttgggaggccaaggcgggtggatcacctgaggtcaggagttcaagaccagcttggccaacatggtgaaactccatctctactaaaaatacaaaaattagctgggcgtggtggcggacacctgtaatcccagctacttgggaggctgaggcaggagaatcacttgaacccaggaggtggaggttgcagtgagctgaaatcgcgccactgcactccagcctgggcaacagagcgagactgtctcaaaaaaagaaakagaggcaacgatgatgttaatcaagttagccagcagatttgctgttattagtggcagaaattcataaggtatgggtttcaagttacagttagttgtagaatctgcagaggaactgcatggggcccactgcatgctcttggtcaaggcaaaacctacctgaaacggcaggggctgttttcagtgtacactctgtcagggcacaggcccagctcttaattagccaggaccccatttcagatctttgctgatactgacagggttttaattagttaaatctacaagttggctcttgttctctggcagagaggaaaatatgctaacatgtgaatgttccacatttacacttccaaaacaccccttccccgaggctttgaggaagtaccctgaagaaggaccaccctttgg

SEQ ID NO: 927232 - DNA, 591 bp, Homo sapiens
tgacaatggacagactgcctcctcaagtgggtccctgatccctgagtagcctaactgggaggcaccccccagtaggggcagatggacgcctcacacggccaggtactcctctgagacaaaacttccagtggagcgatcaggcagcaacatttgctgtccaccaatatccgctgttctgcagcctccactgctgatacccaggaaaacagggtctggggtggacctccagcaaactccaacagacctgcarctgagggtcctgactgttagaaggaaaactaacaaacagaaaggatatccacaccaaaaccccatctgtacgtcaccattgtcaaagaccaaaggtagataaaaccacaaagatggggaaaaaacagagcagaaaaactggaaactctaaaaatcagagcacctatcctcctccaaaggaacacagcttctctccagcaacagaacagaactggatggagaataactttgatgagttgagagaaggcttcaaatgatcaaactactccaagctaaaggaagaatttcgaacccatggcaaagaagtttaaaaccttgaaaaacaaattagacaaatggcta

SEQ ID NO: 927233 - DNA, 734 bp, Homo sapiens
gactcctaagccatggtttctaatcttgtgcctagtttcttggtctggtccctaggcaaaaagggaggttcattttgagagagagctattattgactttgttttaaactataaactgtaaaccaagctcttcccagagttggttccatgtatgcctagagatggggctggagatgccagctttggggctggaggcaacatagagttggttgggttggatctctttcactgtctcagtcacaactttgcaaaaacagtttcaaaacctgcttgcccctcctttgaaaatatcttgtatactcatggttaagtcataacctaagtaaggcttttgatttcacctgtgaggtaacttttggtaaagttcaaaagccaaaaatcctaactgcttggtgtggctaaartcgagtaacaagggatttaaagggattttcttaaagagcactcagcttaattaaagtggatatccaagttataggcatatttaaaaggcctttatatttttctgttcttggatcttgtttttctgaaaaatgttttttctcagccaactaaattccttttctccattttgttttgccactcccaatgtatgcattacttaatgcacacatgagaggccccaagataacttctgatagtgtgagacttcttgggaaaacagaaaaggcaccacaaatctcatcttgggagaaatctctgttttttctcatggaactccaggaattagtggtg

SEQ ID NO: 927234 - DNA, 517 bp, Homo sapiens
aagaagcatccgcacagtcaaagaaatcatcatcagagtaaacagacaacccacaaaacgggagaaaatatttgcaaaccatgtatctgacaaaggactaatatccagaatctacaaggaactcaaacaaatcaacaagaaaaaaaatcccattaaaaagtgggcaaatgacagacatttctctaaagaagataaacaaayggccaaacatgaaaaaatattcattagggaaatgcaaattaaagccacaatgagataccaccttaccccagctacaatggttattactaaaaagtcaaaaagcaatagataatgcatggatgtgatgaaaagggaacacttatacactgctggtgggaatgtaaattagtacaacctctgtggaaaacactatggagatttctcaaagaactacaagtagatctaccgtttgatccagcaatcccactactatctacccaaaggaaaagaagtcactgtatcgaaaagacaactgcacatttattgcagcacaatt

SEQ ID NO: 927235 - DNA, 517 bp, Homo sapiens
aagaagcatccgcacagtcaaagaaatcatcatcagagtaaacagacaacccacaaaacgggagaaaatatttgcaaaccatgtatctgacaaaggactaatatccagaatctacaaggaactcaaacaaatcaacaagaaaaaaaatcccattaaaaagtgggcaaatgacagacatttctctaaagaagataaacaaacggccaaacatgaaaaaatattcattagggaaatgcaaattaaagccacaatgagataccaccttaccccagctacaatggttattactaaaaagtcwaaaagcaatagataatgcatggatgtgatgaaaagggaacacttatacactgctggtgggaatgtaaattagtacaacctctgtggaaaacactatggagatttctcaaagaactacaagtagatctaccgtttgatccagcaatcccactactatctacccaaaggaaaagaagtcactgtatcgaaaagacaactgcacatttattgcagcacaatt

SEQ ID NO: 927236 - DNA, 684 bp, Homo sapiens
acacgcctgtaatcccagctacttgggaggctgaggcaggagaattacgtgaacctgggaggtggaggttgcagtgagccgagattactccctccagtctaggtgacagagcaagactccgtcacaaaaaagaataaaaaataaaataaaataaattttaaaaaataacctaattagattaagaagcatccgcacagtcaaagaaatcatcatcagagtaaacagacaacccacaaaacgggagaaaatatttgcaaaccatgtatctgacaaaggactaatatccagaatctacaaggaactcaaacaaatcaacaagaaaaaaaatcccattaaaaagtgggcaaatgacagacatttctctaaagaagataaacaaacggccaaacatgaaaaaatattcattagggaaatgcaaattaaagccacaatgagataccaccttaccccagctacaatggttattactaaaaagtcaaaaagcaatagataatgcatggawgtgatgaaaagggaacacttatacactgctggtgggaatgtaaattagtacaacctctgtggaaaacactatggagatttctcaaagaactacaagtagatctaccgtttgatccagcaatcccactactatctacccaaaggaaaagaagtcactgtatcgaaaagacaactgcacattta

SEQ ID NO: 927237 - DNA, 685 bp, Homo sapiens
ctgcagtggtctattcctagggaaccccttccctagagctcatctagagtcagcatcccttgttcccactgtgctgaggagaggcaggggactgcctggggtgggaatggtgaggggtgaagggggtgggctgtgtgtgtgtgtgtgtgtgtgcggggttgtgcgtgttcacgctatgcctgaggtgcctgtgtgtggggtgtgtcctgtgtgtggccctgtggacacacaagcatagcacaaagatgcactttgtatatggcctggttgagtgtgggcaccccaaggatcactgtgtgtggctgcgagggcttkaatatgggttagtgtgaggaccagggtggccagacagaggagcaagcgagaaggagcagcgtgggaaagcagaagagccaccagctcctggggtcccatcaaatgctgaagactcaggttttcatggaggggaaatgaggggaaaagaaaggaaaaatcttgagttgcctatcaatgccagtgcttcctcaatccctgcttcctggaaaagcatctgacccctaagtccagggccggggcagggtcctccccatgctctgaacctgagctgcagtgtggccttggaaaagttgctacccctctctgggcctctgtttcctcacttgacaacttggccgcgggatgaactccatgatcactgaagtcctcc

SEQ ID NO: 927238 - DNA, 685 bp, Homo sapiens
ctgcagtggtctattcctagggaaccccttccctagagctcatctagagtcagcatcccttgttcccactgtgctgaggagaggcaggggactgcctggggtgggaatggtgaggggtgaagggggtgggctgtgtgtgtgtgtgtgtgtgtgcggggttgtgcgtgttcacgctatgcctgaggtgcctgtgtgtggggtgtgtcctgtgtgtggccctgtggacacacaagcatagcacaaagatgcactttgtatatggcctggttgagtgtgggcaccccaaggatcactgtgtgtggctgcgagggcttgaatatgggttagtgtgaggaccagggtggccagacagaggagcaagcgagaaggagcagcgtgggaaagcagaagagccaccagckcctggggtcccatcaaatgctgaagactcaggttttcatggaggggaaatgaggggaaaagaaaggaaaaatcttgagttgcctatcaatgccagtgcttcctcaatccctgcttcctggaaaagcatctgacccctaagtccagggccggggcagggtcctccccatgctctgaacctgagctgcagtgtggccttggaaaagttgctacccctctctgggcctctgtttcctcacttgacaacttggccgcgggatgaactccatgatcactgaagtcctcc

SEQ ID NO: 927239 - DNA, 685 bp, Homo sapiens
ctgcagtggtctattcctagggaaccccttccctagagctcatctagagtcagcatcccttgttcccactgtgctgaggagaggcaggggactgcctggggtgggaatggtgaggggtgaagggggtgggctgtgtgtgtgtgtgtgtgtgtgcggggttgtgcgtgttcacgctatgcctgaggtgcctgtgtgtggggtgtgtcctgtgtgtggccctgtggacacacaagcatagcacaaagatgcactttgtatatggcctggttgagtgtgggcaccccaaggatcactgtgtgtggctgcgagggcttgaatatgggttagtgtgaggaccagggtggccagacagaggagcaagcgagaaggagcagcgtgggaaagcagaagagccaccagctcctggggtcccatcaaatgctgaakactcaggttttcatggaggggaaatgaggggaaaagaaaggaaaaatcttgagttgcctatcaatgccagtgcttcctcaatccctgcttcctggaaaagcatctgacccctaagtccagggccggggcagggtcctccccatgctctgaacctgagctgcagtgtggccttggaaaagttgctacccctctctgggcctctgtttcctcacttgacaacttggccgcgggatgaactccatgatcactgaagtcctcc

SEQ ID NO: 927240 - DNA, 613 bp, Homo sapiens
tttttgcaagagttttatggtttcaatctttgcatttaggtttatgatttgttttgagttaattaatttttgtatatggagcaaattaagaatttaagttctttttttaatataaaaaaacactattgttgaaaagtgtattctttcttcacaaaattgcatttgtatctctatggaaaatcaagtggccgtgcacatacatgtgggyctatttctgtactctttttttccttcaccaatagcaaactggcttgattactgtggttttatagtgctatgatgacctcgtattcacctcattagtgaggaaggcatccactgccctaaacagaatgagatggttgaacacatcgcaacactgggcagatagatgggcagcattttattacccacatctactcatggtcctgcgggaggacactgcacaccacacagggccacaccggggtgcacttgggaacagatgaacaagcaggggcagcaagagagaggcaggctttgaatatcaacagcacagggtgcccctggttactatgtgaggacgatactgccttgttttaatggtttgcggctggcagggaactgaagtctgtcagattgaggaccaggtggt

SEQ ID NO: 927241 - DNA, 715 bp, Homo sapiens
ggaaggattgctttaacctgggaggttgaggctgtagtgagtggtgatcacgccactgcacctttagcctgggcgactgctttccttataaaactgaatgcctttaacagcacccaagtcacctcttgaatgctttgctgcttagaaatttcttccaccagataccctaaatcatctctcttaagttcaaaaaaaaaccccatctgaaattcaaagcacttctggtcccaagcatcttggataaaggataatcaatctgtacaaggtttcctttggttcttagggtaaatctcattagggatgtatagtcaaatacagttgacccttgaacaacacaggtttgaacagtgcaggttcacttacacacggatttttttcaataaaagascaagcgtgcttgcctctcctgcctccccttccatctccttcacttcttgtgcctctaatacccctgaaacagcaagaccaacccctcttcttccgttcctactcctcagcctacttaacatgaagatggtgagaatgaagaccttcaagatgatccacttccacttaatgaacagtaaatatattttctcttccttgtgattttcttaacattttcttttctatagattataagaatacaatataaaatacatatataaaatatgtattaaccaactgtttatgttatcataaggctgccagtcaatagtgggctattagtagttaa

SEQ ID NO: 927242 - DNA, 701 bp, Homo sapiens
tggaaggattgctttaacctgggaggttgaggctgtagtgagtggtgatcacgccactgcacctttagcctgggcgactgctttccttataaaactgaatgcctttaacagcacccaagtcacctcttgaatgctttgctgcttagaaatttcttccaccagataccctaaatcatctctcttaagttcaaaaaaaaaccccatctgaaattcaaagcacttctggtcccaagcatcttggataaaggataatcaatctgtacaaggtttcctttggttcttagggtaaatctcattagggatgtatagtcaaatacagttgacccttgaacaacacaggtttgaacagtgcaggttcacttacacacggatttttttcaataaaagaccaagcgtgcttgcctctcctgcctccccttccatctccttcacttcttgtgcctctaatacccctgaaacagcaagaccaacccctcttcttcygttcctactcctcagcctacttaacatgaagatggtgagaatgaagaccttcaagatgatccacttccacttaatgaacagtaaatatattttctcttccttgtgattttcttaacattttcttttctatagattataagaatacaatataaaatacatatataaaatatgtattaaccaactgtttatgttatcataaggctgccagtcaatagtgg

SEQ ID NO: 927243 - DNA, 662 bp, Homo sapiens
tcttccttgaatatttggcagaacctattaatgaagccatctgggactggagtttctttgtgggaaggcttttgattaatgatttaatttcttaatgtctatgtatatactatttatgtattctcttccttctggagtcacttttggatgattagatgtttctagaaatttatctatgttatctaaatgtgtaaatttattactaaaakgttcttcatattatcctattaatatctctttcatatctttagaatctggagatatgtctccatttagttctagatatagtttgcttgggacttctttcttttgtcataactagtctaatctgaggaataatcaatttaagcagtctttttaaaatcaattttttatttttatgattctctttattatatatttttctgatatataataataatttctgactctatttttgattttgcctgttctgtttctaatgcatcaggattgctagttcattaatttccaacactttctgtctctgtctaaaatgttatacataaatatatttaaaactttatatatatgtatataaactgtgttcctgtgtggctttagctgccttccatgtgttttgttatgtgctaacattttcattatcattcagctttttctactttcttcttttacactaatat

SEQ ID NO: 927244 - DNA, 791 bp, Homo sapiens
acttcagcactggacagatcacccagacagaaagtcaacaaacaaacatttgacatatctgcactatagaccaaatggtcctaatagatttctattcttctcagcacatggatcattctcaaggatagaccatatatttggccacaacatcagtcttaaaaaatttataaaaattgaaattatggaaaatatcttttctgaccatatggagtaaaaatagaaagcaataataacaggaattttagagattatacaaatacatgtaaattaaacaatatgctgctggatggccagtgggtgaatgaaaaaaaaagaaattttaaaaatttcttgaaataaatgaaaatgaaaacccaacacaccagaacctatgggatagagtaaaagcagtattaagaggcaagtttatgctaataagtgactacatctgaaaagtagaaaakcttcaaataaacaacctaatgatggatcttaaagaatttaaaaagcaatagaaaaccacatacaaaattattagaagaaaaataataaagatgaaaacagaaataaaattgaaacaaagaaaacaataaaaagataaataaaacaaaaccttggtttttttgaaaagttaaagaaaatctacaaaccacttgccagatgtaatggttaattttgggtgtcaacttgatgggattgaagaatgcaaagtattggtcttgggtgtgtctgtgagggtgttgccaaaggagactaacatctgagtcagtggactggaagaggcagacacacgctcaatatgagtggacact

SEQ ID NO: 927245 - DNA, 621 bp, Homo sapiens
atcaaaatagattatttaaatctcccaaggtagcctgggatgctttttttttttttttttttttttgagacagagtttcactctcgttgcccaggctggagtgcaatggcacgatcttggctcaccacaacctccgcctcctgggttcaaacgattcttctgcctcagcctcccaagtagctgggataacaggcatgcaccaccacacccagctaagtttgtatttttagtagagatggggtttctccatgttggtcaggctggtctcaaactcccgacctcaggtgatccgcccgcctgaacctcccaaagtgctggcattacaggcaggatgcttttttgacacccccacttctactcagctttctttccttccktcagaaccctgttcagggtgtgaaggacaagttaagccatctccgtctctctcatactgcagcccacctgttctttaggtcataaccacagactcacatctttaaagaaagttagcaaatcaactcagaacccttacatgggtctttctctcctgctgtctcatcaatcagagcaagttcaactttctactaaatttatctatatttatatatgtatgtttataaaaggtatgagttaggtgtg

SEQ ID NO: 927246 - DNA, 617 bp, Homo sapiens
ggacactattggcctccacattcgctttttttttttctttttaaagttggggtctcgctctgttgcccaggctggagtgcagtggtgcaatcatagctcactgacgcctccaactcctgggctcaagtgatcctcctgcctcagcctccccagkggctaggaccacaggtatgtgccagcacaccagtctaatttttattttatttattcatttatttagagatgaagtctccctcttcttgctcaggctggagtgcaatggtacaatctcggctcactgcaacctctgcctcccaagttccagcaattctcttgcctcagcctctgagtagctgggattacagtcatgtgccaccacacctggctaatttttgtatttttagtagagatgggatttcaccttgttggtcaggctggtctcaaactcctgacctcaagtgattagcctgcctcagcctcccaaagtgctgggattacaggcataagccactgtgcccagcagcctggtccttgttgaaggccctgagccgaccccatgggagcatcgggcgttctgtcttttgcaccatgaagcacactggctaagatccagctatctaagtgcagctcagaacaac

SEQ ID NO: 927247 - DNA, 652 bp, Homo sapiens
agcctgtatcccagcctcatctctgttcatatatatatatatatatatatatatatatttttttttttttttctttcttttttttttttttttttgagatggaatcttgctctgctacccaggctagagtgcagtggcacaatctcggctcaccacaacctccatctcccgggttcatgctgattctttcgcctcagcttccggagtagctgggattacaggtgccccccaccacgcccggctactttctgtattttttttagtagagacgaggttttgctatgttggccaggccgrtgttgaactcttgacctcaggtgatccacccaatcttgcctcccaaagtgctgggattacaggcatgagccaccgtgcctggcctcatattttttttaagagacagggtcttgctctgttgctgaggctggagtgcagtggcacaatcagagctcactgcagcttccaacttctgggctcaagcaatcatcccgcctcggcttcccaagtagctgggaccacaggggcacagcaccatgcatggctaatttttaatttttttgtagagatgaggtggatgacatcttgctatgttgccctggctgggtcttgaactccaggcctcaagtgatcctcccacctctgcctcccaaag

SEQ ID NO: 927248 - DNA, 652 bp, Homo sapiens
agcctgtatcccagcctcatctctgttcatatatatatatatatatatatatatatatttttttttttttttctttcttttttttttttttttttgagatggaatcttgctctgctacccaggctagagtgcagtggcacaatctcggctcaccacaacctccatctcccgggttcatgctgattctttcgcctcagcttccggagtagctgggattacaggtgccccccaccacgcccggctactttctgtattttttttagtagagacgaggttttgctatgttggccaggccggtgttgaactcttgacctcaggtgatccacccaatcttgcctcccaaagtgctgggattacaggcatgagccaccgtgcctggcctcatattttttttaagagacagggtcttgctctgtygctgaggctggagtgcagtggcacaatcagagctcactgcagcttccaacttctgggctcaagcaatcatcccgcctcggcttcccaagtagctgggaccacaggggcacagcaccatgcatggctaatttttaatttttttgtagagatgaggtggatgacatcttgctatgttgccctggctgggtcttgaactccaggcctcaagtgatcctcccacctctgcctcccaaag

SEQ ID NO: 927249 - DNA, 784 bp, Homo sapiens
ctcctcctccctccctttttttctgaggcggagtcttgctctgttgcccaggctggagtgcagtggcacaatctcagctcactgcagcctctacctcccaggttcaagcaattcttctgcatcaccctcccgagtagctgggattacaggcatgcgccaccacgcctggctaatttttgtttttttagtagagacaggggttcatcatgttggccaggctgggctcgaactcctgacctcaagtgatccaccttccttggcctcccaaattgctgggattatatgcgtgagccactgtgcccagcccctctcccatcttttatttttaagaarcaaagacactttttctttctgtctctttctctctcttgcttttttctaaggtgttgctttgtctcccaggctgatgtgcagtggcgagatcacaggtcattgcagcctccaactcctgaagtcaggtaattctcccatctcagcttctcaagtagttgggaccagaggcacgtgccaccacgaccagctaatttttttttttttttttttttttttttttggaaagatggaggccttgctttgttgtccaggctgatcttgaactcctgggctcaagcgatcctcccacctcagcctcctaaagtgctgggattgcaggtgtgagccttggagcccggcccaaagccatcttttctttagaataccataaatatatcagatagaggcacacagcagcttctctccagcatcctcctcctgctcagctcctggggtcttcatggtgcctcct

SEQ ID NO: 927250 - DNA, 789 bp, Homo sapiens
agaaaaatcaatatacaaactacaggcatccaggatccaggagaagaagtgagaatgaaaggagcaacaaacttatttttttaaaaagagggagagaggattaagatggcatataggagacaggactagcttgcagctcccacttggacgggcagagcggcatgtggtaacttacactgtgaacttttgctccaagaattaccacaggaacaaccaggaaagccaagagaatccacggaccctttgaaggaactgaatcaccgctgcaggctccctgagatgccaaaaacctgagagtctgattgctttctgcttgctttctcagcagggaggctagtggtctggggcaagtcctcacccctggtcactggctgcctggaaatagactcagtgtggtgttgggggatcggtcatggtgrgaatgagactggcctttaagactgcgggctgtgtgggtgtggagtgagtcctgtgactgccagctttctctcacttccctggtgacctgtatgactcagcagaggcagccacaatccttctggaaatataactccattggactgggaaccacacccctatccccacagcagccacagcaagccctgcccaaggagaggctgagctcagacacacctatatctgcccccacccactgacctttctctaccagccctggtagtggaagacaaaagttataatcacttgggagttccatggccctgcccactacccgagaaacctgaatacttaaccaggtgtccctagggcaagtttacatcttccttatag

SEQ ID NO: 927251 - DNA, 789 bp, Homo sapiens
agaaaaatcaatatacaaactacaggcatccaggatccaggagaagaagtgagaatgaaaggagcaacaaacttatttttttaaaaagagggagagaggattaagatggcatataggagacaggactagcttgcagctcccacttggacgggcagagcggcatgtggtaacttacactgtgaacttttgctccaagaattaccacaggaacaaccaggaaagccaagagaatccacggaccctttgaaggaactgaatcaccgctgcaggctccctgagatgccaaaaacctgagagtctgattgctttctgcttgctttctcagcagggaggctagtggtctggggcaagtcctcacccctggtcactggctgcctggaaatagactcagtgtggtgttgggggatcggtcatggtgagaatgagactggcctttaagactgckggctgtgtgggtgtggagtgagtcctgtgactgccagctttctctcacttccctggtgacctgtatgactcagcagaggcagccacaatccttctggaaatataactccattggactgggaaccacacccctatccccacagcagccacagcaagccctgcccaaggagaggctgagctcagacacacctatatctgcccccacccactgacctttctctaccagccctggtagtggaagacaaaagttataatcacttgggagttccatggccctgcccactacccgagaaacctgaatacttaaccaggtgtccctagggcaagtttacatcttccttatag

SEQ ID NO: 927252 - DNA, 789 bp, Homo sapiens
agaaaaatcaatatacaaactacaggcatccaggatccaggagaagaagtgagaatgaaaggagcaacaaacttatttttttaaaaagagggagagaggattaagatggcatataggagacaggactagcttgcagctcccacttggacgggcagagcggcatgtggtaacttacactgtgaacttttgctccaagaattaccacaggaacaaccaggaaagccaagagaatccacggaccctttgaaggaactgaatcaccgctgcaggctccctgagatgccaaaaacctgagagtctgattgctttctgcttgctttctcagcagggaggctagtggtctggggcaagtcctcacccctggtcactggctgcctggaaatagactcagtgtggtgttgggggatcggtcatggtgagaatgagactggcctttaagactgcgggctgtgtgggtgtggagtgagtcctgtgactgccagctttctctcacttccctggtgacctgtatgactcagcagaggyagccacaatccttctggaaatataactccattggactgggaaccacacccctatccccacagcagccacagcaagccctgcccaaggagaggctgagctcagacacacctatatctgcccccacccactgacctttctctaccagccctggtagtggaagacaaaagttataatcacttgggagttccatggccctgcccactacccgagaaacctgaatacttaaccaggtgtccctagggcaagtttacatcttccttatag

SEQ ID NO: 927253 - DNA, 719 bp, Homo sapiens
tgatttacttctctgtttgcaagcatctcctcataaaatctagtctaggagctggaggacttttccaccagaaaaaaaaaaaaaaaaaagttaaacacgagatgtaacctgcattaggcctgctgtatccagtgagcagtgatgtctgtcaagccatggctgtataccttcactttccacatctccgtgaggcaaataataggttatttctatactgaaaagactgccagactatactttccagtggctaacgtaattacaaacaatttagatcttttaactcccctctttgtctctaatattttatccttctaagatgcctagattataaaaaaaaaaaaaactaaacgcccccccctttttttttagaagattcccatctgtttaatgtatataaagcmaaggaaaggacagtcccgaactcaatagaaaaatattctgtgcaattcatatggtggggttgagaggaaagggataaagctgtagaactcacacctgaacatgtacaaaaaataacttacacagcaacccccaccctcaaggatgatgcaggtctgcccagcccccggggctcgcgggcacactgcagacatggcactgcgggagccaaccaatgtgggccccaggtgcaggtaggagtcaggagggcatcagtccggaggggtgggcggctattaggaggccttgaagcggttgctgccagaacacgagctcagcag

SEQ ID NO: 927254 - DNA, 766 bp, Homo sapiens
gcccaggctaaagtgcaggggggtgatcttggctcactgcaacctctgcctcccgggttcaagtgattctcctgcctcagcctcctaagtagctgggagtataggcgcgtgccaccacgcccggctaatttttgtatttttagtaaaratggggtttcaccatgttggtcaggctgggacttgggttcttaataaaataccactctctgtgatggctacatctaagcctttgaaggtgagctgtggacataccacatgtggacagcatgaaatgcttcttctgacactgagagtcacttgaaaaacttgaattcaaagtcaagcaggccaaatctcacacctcatgaatcccaggaggtacacaatgaagaagagcttctgccttaaaggaacaaggctgtctgggaggcctgagagtccattaaaagacaccgcattaactacaacaaaaagaagagcagcaccacccaccagtggtgccccagacacacctctcctccaagctctgggctgctcctcttggagtctacacttagaccctgggggtgggggtgggcacacaaatggacagagtggtctaaatgcaggtctcctggggttctgcgaaatctagccagaagcatctccatctcggtgtccatttcgatccaactaagcttccagtaaagacactgcagcaatgtaaacatgcaacctaagctagcatgaggttctagatagtaagcctgaactaggaataaggcaactgaactgtgactttcgggcc

SEQ ID NO: 927255 - DNA, 713 bp, Homo sapiens
ggcacgtgagctgagtcagctttgactgttgtgagttgtgagtgtggccctgggcctcccagtgcaggttttcatgtggacagatgtctgtgcctaagagaggggcagcagggtccctggaactctgtctttagggttccaaggaattgccaaactgttttgcccagaggcattctggttttcattcccaccaacagcatactaggtctctcatctcctcgtgtcctcgccagcacttcatgttctctgtctttctgcttgtagctctctctgtgggtgtgatgtgggcggtaygttttttttttgttttttttttttgagacgcagtctcactccatctccagcctggagtgcagtggcatgatctcggctcactgcaacctccgcctcctgggttcaagcgattctcctgcctcagcctcccgagtagctgggactacaggtgtacgccaccacacctggctaatttttgtatttttagtagagacagggtttcaccatgttgtgcaggatggtctcgatcccttgacctcgtgatcctcccacctcggcctcccaaagtgctgggattacaggcgtgagccaccatgtctggccgggcggtatgttcttaaggggcctgtggatgcttgagtttcaggggagctggtgccacttctgcctgccccacagcctcgcctcctgatggttggtgctgtggtcggcagccatgc

SEQ ID NO: 927256 - DNA, 603 bp, Homo sapiens
ctggaatttcagatgcaaagccagggtttgagcccaagccacctgccggaacctgtggcttagccatgctgctttgctgccggtgcgcctgtgactttcgatcctacagcccttcagaagacggtgaccatgggagggggctgcagagagtctcaraagcttggacacccgaggtgctgcttcctggagtgtttcgggagctcgcctctgacctcattgtctggaccccactcaacagacacattcattctcaggaaagcccttgtctggttaatcacgctgagtggaaatcagaggtttttttttttttttttttttcatcaagagtctgaaagctccattttcaaaggatgcctctcgctgaacaaatgaatagccatctccttataaagcattctgctttgaaattctgggatgaaagggccagagcacaaatgattgcagtgctggtaataatggtaacaataatcatgatgatcatactgtaccgggattttatttttgaagtcaggggagggctcattcgtgctctccggcttcaggctgaaagcctgaaccaggcccttcttagaagccgggatgcgatcaggctgagaaaagttt

SEQ ID NO: 927257 - DNA, 650 bp, Homo sapiens
tataggcatgcaccactatgcctggctaatttttttggatttttagtagggatgagttttcaccatgttgcccagggtggtatccaacccctggactcaagcgatctgcctgcttcagcctcccaaagtgctgggattaccagcgtgaaccactgcacccagccacgggtacaaaatattctaatttatatcatcagttagtttgtttttcttaaamctcatataaataaaatcatatagtacaaacttttttgtatctggcttcttttgctcagcatagtatctgcgagtaacatccatgaatgatattatgtaagtgatttattcatttttaggttcatagtactctatgcatattctatgttatatttatccattccctattgatgaatagttgagggtttccagtttggggctattgtgaataaaattctataaatattcttatacatctctcttgataagcatgtgcaattatatagagttaaatttttgaatcataaggtaggtttagtagctactgtccaagtttccaaagtgattgaaccaatttatactcccaacacatgcttgccaacacttggtatggttagtctttctaattttagccattctagtgggtgagtagtaatatctcattgtagctttaa

SEQ ID NO: 927258 - DNA, 549 bp, Homo sapiens
gcagtacgtttgtttatgccagcatcatcacaaacacatgagtaatgtgttgcactacgtgttacagtggctacaatgttgctagatgataagaagttatcagctcaattataatcctatgggaccatcctcgtatatggggtccatcgttgaccaaaatatcattgcatggcgtatgactgtattcaatgaataagcaatgaccatggctaaagtgttccttctactggcaaaatcttctagtccagaaacaatactacagagcagaygaataggataattagaaccgaagtcttctcatcccagaagaaatacggggattcagtgatcattctgtctccttacaatgtgatccagttctgtgtccatcctgctgttcctgttttcatgaagggcagactttacaggtcttcgacaatttaaaagcagatacttgaggattaaactggaattgaggcaaagattcataaatctccttcttgccacaagaaggctagagactttgcctccagaatcctgggaacagggactgatgaactatccatcacc

SEQ ID NO: 927259 - DNA, 619 bp, Homo sapiens
cagctgcttgggaggctgagatgggaggattgcttgagcccaggagttagaggctgcagtgagccatggttgtgccactacagtgcagcctgagtgacagagtgagaccctgtctcaaaaaaaaaaaaaaaagaaaaggaaaaaaagagaaagaaaagaaaaaaggaaagacagaggttatgttagaaagcagcactttaggcacagaaygtggaaaacaaaattagcccctacattcagctcctagcgggctctgccgggtcagccaatgtatgctgaaattaacaaaaatcttgccccctttctatatcactatgccaatcaatgtgaagaatgagctaaaacaaaatgaaatatatggtcatcccaataacaatgtgggcctttatttaagggagtcatacatacacctttgcttttcaagagagtatttcatcagattttcattggaattggatggctgcacagaagtctatctatggggagcatgtgaaaacggctttcacggctactgttaatgatcagagataattttgatgagggactacacaaggatgaaagtctttgatgctaagaaaatgtctgcagcgtcagttcttaagcacgggataaaccatcc

SEQ ID NO: 927260 - DNA, 548 bp, Homo sapiens
aaaaggcatttaagaaaatggaaggctgggcactttggctcatgcctgtaatcccagcactttggaaggctgaggcgggtggatcacctgaggtcaggagtttgagaccagcctggccaacatggtgaaacactgtctctactaagaatataaaaaaattagccaggcgtggtggcgggcacctgtaatcccagctattcgggaggctgaggcaggagaatcactttaaccagagaggcggagcttgcagtragctgaggacgtgccattgcactccagcctgggcaacaggagtgaagctccgtctcataaaaaacaaagaaaaaaaaaaagaaaatccaacatgcaatcctgataaaaactcttagcaaactaggagttcaagagaactttctcagtctgaagaaaaggaatctaagaaaaatcagcagctcttcatattaatatattaatggcaaatgatgggatgttttcaccctaatattagaaaacaaggtaagaaggtcttctctcactactccttgtcaaggttatattggaaatcctag

SEQ ID NO: 927261 - DNA, 576 bp, Homo sapiens
ccaaaagaacaaagctggaggcatcacactacctgacttccaactatactacaaggctacagtaaccaaaacagcatgtactgtaccaaaacagatatatagaccaatggaacagaacacagccctcagaaataataccacayatctacaaccatctgatctttgacaaacctgacaaaaacattccctatttaataaatggtgctgggaaaactggctagccatatgtagaaagctgaaactggagcaacaaaaatttttatacactgctggtgagatcataaaattgtactatcacatgaaaacacaatttgggctttattctttaaatatagttgcactaattccgttcctaattagagacccaaaagaaattcttgcacatgtacaatcctacatgcctccacctgcaggatgttgaccgactgggaaagggctagtggccacatttcatctgcagatgctttgctgttggtctcgtcaaagtgcctggtatctgtcatgcactgtgtgagcctagggctccatatccaatgtcatgctcattctgggaaggccagtactcagttcgggcta

SEQ ID NO: 927262 - DNA, 576 bp, Homo sapiens
ccaaaagaacaaagctggaggcatcacactacctgacttccaactatactacaaggctacagtaaccaaaacagcatgtactgtaccaaaacagatatatagaccaatggaacagaacacagccctcagaaataataccacacatctacaaccatctgatctttgacaaacctgacaaaaacattccctatttaataaatggtgctgggaaaactggctagccatatgtagaaagctgaaactggagcaacaaaaatttttatacactgctggtgagatcataaaattgtacyatcacatgaaaacacaatttgggctttattctttaaatatagttgcactaattccgttcctaattagagacccaaaagaaattcttgcacatgtacaatcctacatgcctccacctgcaggatgttgaccgactgggaaagggctagtggccacatttcatctgcagatgctttgctgttggtctcgtcaaagtgcctggtatctgtcatgcactgtgtgagcctagggctccatatccaatgtcatgctcattctgggaaggccagtactcagttcgggcta

SEQ ID NO: 927263 - DNA, 600 bp, Homo sapiens
ggggactttgaggacataggcaagtcctgtaggcctcagtgacccacattaagcagagccgacatcatctgccgtaacaacctgcccacaaagccagggctagaggcaaagccttccttgtgagaaagtctaaataccagaaggtgtgaggcatcgttgccatgagtatgaagggcctgaggtgtctccttttccgtgtctctccccccatccttctctctcctaggagagccagtttctgagtgccccagaggagaatgctgtagtgaacacagccctgtacagagaagacagcagcttgattcctctcatttctcagtcattagcccctcactcgctctccgggaggataacggggtgtgygcagctcctccccttctttcctgaggaaacctcagtggcttccgtgcccttgccagggtgagtgttctcctgagtccttcctctgctcctacagaatagagaaggggcttctgttgccatcagcttagtaagcctggtgcgatggatgcccctgacagggaaagccatttaggggaagacctggcactacagcccggaggtcctgggttcttttgtggttttccccgtgctcgcctc

SEQ ID NO: 927264 - DNA, 605 bp, Homo sapiens
catggtgtattcatttattgacttatgtatgttaaaccatccttgcatccctggtatgaaacccacttgatcttcgtatattatattttcgatatgctgttggattcagttagctagtattttgttgaggatttttgcatctaagttcatctaggatattggtctgtaattttctttttttgttatgtcctttcctgattttagtattagggtaatcctggcttcacagaatgatttagggaagatttcctctttatctttttgaatggtttcygttagattggtacttttttttttttttttgaggcaagctctggctctatcacccaggctggagtgcagtggcataatctcagctcactgcaacctctgcttcacaggtccaagctatcctcccaccttagcctcccgagtagctgggactacaggcgcatgccaccacgcatggctaatttttgtattttttgtagatgatgggtttcgtcatgttgcccaggctggtctcgaactcatgagctcagtgatctgcccatcttggcctcccaaagtgctgagattacaggtgtgagccacagtgcccagcccaattcttctttggatgtctg

SEQ ID NO: 927265 - DNA, 646 bp, Homo sapiens
gactgtcagctgcaggtctattggagcttactggaggtccactgttttcctgggtatgagcagcggtggctgcagaacagtggatattggtgaaccgcaaatgctgctgcctgatcgttcctctgaaagttttgtctcagaggagtacccggccgtgtgaggtgtcagtctgcccctactggaggtgcctcccagttaggctactcgggggtcagggacccacttgaggagcattctgccggttctcagatctcaagctgcgtgctgggagaaccactactctcttcaaagctgtcagacagggacatttaagactgcagaggytattgctgtcttttgtttgtctgtgccctgcccccagaggtggagcctacagaggcaggcaggcctccttgagctgtggtgggctcctcccagttcgagcttccctgtcgctttgtttacctactgaggcctgagcaatggcggcacccctcccccagcctctgccgccttgcagtttgatctcagtctgctgtgctagcaatgagggagagctccgcgggcgcaggaccctctgagccaggtgtgggatataatctcctggtgtgccgtttgttaagcccattggaagagcacagtattagggtgggagtgacccgatttt

SEQ ID NO: 927266 - DNA, 674 bp, Homo sapiens
ccagttcgagcttccctgtcgctttgtttacctactgaggcctgagcaatggcggcacccctcccccagcctctgccgccttgcagtttgatctcagtctgctgtgctagcaatgagggagagctccgcgggcgcaggaccctctgagccaggtgtgggatataatctcctggtgtgccgtttgttaagcccattggaagagcacagtattagggtgggagtgacccgattttccaggtgctgtctgtcaccgcctttctttgactaggaaaggaaactccctgaccccttgcacttcccagcgtgagcgatgcctcgacctgctttggctcatgccaagcactgcacccagtgtcctgcacccgctgtccggcaytccctcgtgagatgaacccggtacctcagttggaaatgcagaaaccacgccatcttctgcatcactcacgctgggagctgtagactggagctgttcctatttggccatcttggctccacccccggctcttgatccactttcaagaggaagagtgcaggtcccctccactttaacctgggtgggcatttttgatggccctgacaaatagagcacagtgctgtggaagtgatgttatgtggcacttaaggctaggccataaaatacaatacatctgaatcctggctgtctcctaggatgc

SEQ ID NO: 927267 - DNA, 674 bp, Homo sapiens
ccagttcgagcttccctgtcgctttgtttacctactgaggcctgagcaatggcggcacccctcccccagcctctgccgccttgcagtttgatctcagtctgctgtgctagcaatgagggagagctccgcgggcgcaggaccctctgagccaggtgtgggatataatctcctggtgtgccgtttgttaagcccattggaagagcacagtattagggtgggagtgacccgattttccaggtgctgtctgtcaccgcctttctttgactaggaaaggaaactccctgaccccttgcacttcccagcgtgagcgatgcctcgacctgctttggctcatgccaagcactgcacccagtgtcctgcacccgctgtccggcattccctcgtgagatgaayccggtacctcagttggaaatgcagaaaccacgccatcttctgcatcactcacgctgggagctgtagactggagctgttcctatttggccatcttggctccacccccggctcttgatccactttcaagaggaagagtgcaggtcccctccactttaacctgggtgggcatttttgatggccctgacaaatagagcacagtgctgtggaagtgatgttatgtggcacttaaggctaggccataaaatacaatacatctgaatcctggctgtctcctaggatgc

SEQ ID NO: 927268 - DNA, 588 bp, Homo sapiens
ggagaaccactgctctcttcaaagctgtcagacagggacatttaagtctgcggaggttactgctgtctttttgtttgtctgtgccctgcccccagaggtggagcctacagaggcaggcaggcctccttgagctgtggtgggctccacccagttcgagtttcctggctgctttgtttacctaagcaagcctgggaaatggcgggcacccctcccccagcctcgctgctgccttgcagtttgatctcagactgctgtgctagccatcaggagactccgtgggcgtctcgctgccaggaccttcccagccatgtgcgggatataatctcgtggtgcaccgttttttaagccygtcggaaatgcgcagtattcgggtgggagtgaccccattttccaggtgccctctgtcacccctttctttgactaggaaagggaacttcctgaccccttgtgcttcccgagtgaggcaatgcctcgccctgcttcagctcgtgtacggtatgctgcacccactgtcctgtgcccactgtctggcactccctagtgagatgaacctggtacctaggatggaaatgcagaaatcacccatct

SEQ ID NO: 927269 - DNA, 724 bp, Homo sapiens
ctgctgttaatgcttgtgattgtatcatgaaatacttgaagtgagttttccagctctgtcaaatctgattctttcttaaaataaccttttcaaatttcagttcctgtattattttattgtattccttagtatccttggattgggttttgactttctcctgaatctcagtgatcttcattaatccatattctgaactctatttctgacattttagccatttcaggctggttaagaaccattgctggggaaatagtgcagtcatttgaaggtaggaagcctttttaagttgccagagttctttctctgtttctttctcacctaggtgtgctgatgttccttcagtctttaaagttgctgtcctttggattttttttttcttttcgcttttatcttctttgatgcccttggggattttattgtggaataargttgacaggctttgtttctgtaagatttaagcggggaaggctcaactcagcactccttggctgtgtgtccttactctgggcttcattttctggcccctcaagattaggaacctgttgtacttgagggactgaggtgttcttggcccactggccacaatactctgacgtgggggaggcagtcaaagcacttactcagggcagtggcagcaggatctgtgctcacttgcatgtacgactagccacagcatccccacagggtgcacgcacatgagctgggaggggtcaccagcaggagt

SEQ ID NO: 927270 - DNA, 597 bp, Homo sapiens
ccagtttttctttctgctgtaacagaacagcaatgagtttaatgcctcacaattgctgtgttctccctcccccagcacccagagacattctctgcaccaccctgtggctgccaggagtgaaggaggcatggcatccgcaattctggattgttttatttatctcttcagtgactctttcagtgatgtgaagataaaatcagctactatggggacttaattgatttttggttcttgtaaaggtgtttttgggtttttttttgttttgttttgttttttctctgtagatagttgttaaactggtgttcttcggtggyggtggcgggatgatcattggagacttcttttccaccaccttgctcctcctctgaagtggtatttatattgatattactaaacttgttacaggtagttagacaggcatgagcgggacagaagagggctctcccccacccaccatgaatgtcaggtgatggtttgacaatgatcgcattgcccctctaaaagtgataaattgagagcctgccctagggaaaagccatttcctgatggtccacacctgtagcacttaagtgctaattgaatgcagacaccagggag

SEQ ID NO: 927271 - DNA, 480 bp, Homo sapiens
actttcttccttccttaggttgtctgtttactctgttggtagtttcttttgccgtaagggacctctttaatttccataggtcccagttgtcatttttttattatgttgtaattgctttgggagtcttcatcataaaatctttrccagttcctagttccatgattgtatttcataattttttttccagggcttttacagttttaggtttcacatttgagtctttactccattgtgagttgatttttgtatatggcgacaggaaggtgtccagtttcagtcttctgcatatggttagccagttattccagcactattaagtgaataggaagccctttccccattgcttgtttttgttgactgtgttgaagatcatcacactatctgatttcaaactgtactacaaggctacaataaccaaaacagcttacaaaaccagacacataaactaatggaacatgagagagaacccagaaataaagc

SEQ ID NO: 927272 - DNA, 480 bp, Homo sapiens
actttcttccttccttaggttgtctgtttactctgttggtagtttcttttgccgtaagggacctctttaatttccataggtcccagttgtcatttttttattatgttgtaattgctttgggagtcttcatcataaaatctttaccagttcctagttccatgattgtatttcataatttttyttccagggcttttacagttttaggtttcacatttgagtctttactccattgtgagttgatttttgtatatggcgacaggaaggtgtccagtttcagtcttctgcatatggttagccagttattccagcactattaagtgaataggaagccctttccccattgcttgtttttgttgactgtgttgaagatcatcacactatctgatttcaaactgtactacaaggctacaataaccaaaacagcttacaaaaccagacacataaactaatggaacatgagagagaacccagaaataaagc

SEQ ID NO: 927273 - DNA, 480 bp, Homo sapiens
actttcttccttccttaggttgtctgtttactctgttggtagtttcttttgccgtaagggacctctttaatttccataggtcccagttgtcatttttttattatgttgtaattgctttgggagtcttcatcataaaatctttaccagttcctagttccatgattgtatttcataattttttttccagggcttttacagttttaggtttcacatttgagtctttactccattgtgagttgatttttgtatatggcracaggaaggtgtccagtttcagtcttctgcatatggttagccagttattccagcactattaagtgaataggaagccctttccccattgcttgtttttgttgactgtgttgaagatcatcacactatctgatttcaaactgtactacaaggctacaataaccaaaacagcttacaaaaccagacacataaactaatggaacatgagagagaacccagaaataaagc

SEQ ID NO: 927274 - DNA, 614 bp, Homo sapiens
taaagtttaacattaattaacatcttttttacttgagatatattttactcctattataatgttaacaccaccctatgggctatcaacatttgaacttttgatcaatattgagttaaatttccacatgtgcaatgaccatatatatcctgtcaatcattaagtatccttaagaggtcgctaatgttcagttccaaacaggagttttgtaaggtcttagaattacaagagtcaacattcaattcattttagtgttcatatttcagaaaataaattggcaggttttatttctgtaaatttgttaagactaccagacacttcacggttcttctaacattgttgcattcaatgcataatcaggtgttgctaagcagcacattatgactttattattttaggtagcatataaacatattttggttactttaagccatgatagaygtttctctgattttttcttcatttttagtttctcctttttctctttcctcaatagtacagtaaaatagtactattttactgtacagtaaatagtacagtaaatagtacaataaaatagtaaagtagaaccctcagttttcccttataaaatagaataagagttttatgtatcattc

SEQ ID NO: 927275 - DNA, 710 bp, Homo sapiens
cctctgtggccagtggcaccttctgcctaagtattgctggctcctgctgggctcattctacccatttggcctggcaggctgcacttggcttgcagtaccagctcagatcccacacttgccaagggcaagctaggtgtggggcagcaaggagagtgtgakcaagtaagcacagggattggctactgcacatagccaggcatgctggctgttcagcagggcaggcagctagggttggcaacacagatgctggctccatgcaaggctacagttgaaccagatgtactgcacatggcttctgctgcaggcatccacctctggattaggggaatgtggttgtgttcagaagtttggagattccagggactacagagctccaaagaaggtgtcacgaccctggctcagggagcccctaggtctgggctcccaaaagggctgcatctcttctctcctcatcacccacaacatggcaggcacagggacacgtttcagcactatttgggttacaactcttttagtcccaccatttggcaggtccagagttcatgtcccatatccaggaagaatgagatacgtgaacaactggagggggagtaaagtggagaggagcttcattgaatgacagaacagctctcaggagacccatagtgggttgctcctttctgcaggcaggtcatctcaacgagtggccagacgagtgtctggagaggaga

SEQ ID NO: 927276 - DNA, 853 bp, Homo sapiens
catgtcccatatccaggaagaatgagatacgtgaacaactggagggggagtaaagtggagaggagcttcattgaatgacagaacagctctcaggagacccatagtgggttgctcctttctgcaggcaggtcatctcaacgagtggccagacgagtgtctggagaggagaattgcagtgggtagctcctttccacaggcaggttgtccacatatcccactctaagcctagaggagacctgcagtggatagctcctttatgcaactggtagtccttatgtctgttagaggctgactgagtctggggtctttatgggcttataagagagaaactgcatgctgattggttcattggtggccataggtggtctgggaagaagctatgtaagttctcactctgggccagatttcacctggaaatgacagccccgatcccaggctttaggtcacccctggcttgaaagtggggcttcacagtggacctgactctttctgcccaggatcctgtttttctcctgcggccatcaataagtcatccacaacatccaggctattcatgtcgaggggtccctgcaagcccatgccaaggcactctcaactcctcctcagtctgccttctatgcttgtggttggcacctgaggtccagagggggccaaagcagcagggrctagtgtgtcagcaccaccccaagtatgtacacacctggctgggtcttaatagtgcctggacttggacacaactttgctctgaaatcagagtgggtgctgggagtaagaagaagcagaagcaagcactttcaagcccatggtggcagggggccttcctgggcccctgagagcacaaggatgactgtgt

SEQ ID NO: 927277 - DNA, 853 bp, Homo sapiens
catgtcccatatccaggaagaatgagatacgtgaacaactggagggggagtaaagtggagaggagcttcattgaatgacagaacagctctcaggagacccatagtgggttgctcctttctgcaggcaggtcatctcaacgagtggccagacgagtgtctggagaggagaattgcagtgggtagctcctttccacaggcaggttgtccacatatcccactctaagcctagaggagacctgcagtggatagctcctttatgcaactggtagtccttatgtctgttagaggctgactgagtctggggtctttatgggcttataagagagaaactgcatgctgattggttcattggtggccataggtggtctgggaagaagctatgtaagttctcactctgggccagatttcacctggaaatgacagccccgatcccaggctttaggtcacccctggcttgaaagtggggcttcacagtggacctgactctttctgcccaggatcctgtttttctcctgcggccatcaataagtcatccacaacatccaggctattcatgtcgaggggtccctgcaagcccatgccaaggcactctcaactcctcctcagtctgccttctatgcttgtggttggcacctgaggtccagagggggccaaagcagcagggactrgtgtgtcagcaccaccccaagtatgtacacacctggctgggtcttaatagtgcctggacttggacacaactttgctctgaaatcagagtgggtgctgggagtaagaagaagcagaagcaagcactttcaagcccatggtggcagggggccttcctgggcccctgagagcacaaggatgactgtgt

SEQ ID NO: 927278 - DNA, 720 bp, Homo sapiens
ttcattttctctctcaaatttgattggtttaatatatttaatgttctgtctttaaaatttctcatcattttctctttttaattcatttcttgttttgttttgtttttccttccctccacttctgaatagatttcacatttggaggcttgtgggaaaggakgacagagccttataatgtgaaagaccttattctatttgatgaataggttgctccgttttgccattcccaccctagcattcaaaaattatcatcttttatacatgggaaaaagggagggggtgggatctggcattagttcttttagtcgtcaggaaattacaaaatgtacacttgcgaagtaagcgatttttgcagtctgcctgcacatccatctttttaatgagccttgtttataacccggcgccatgtttccagtcacctaccctgtttacgtctttggcctctttaattaagagaagaaccagttaaaagaaagtaagaagaaatattaatatgatctgattaattcagctagcaggaggttatggggtaccaaggttattataacctataaaggcaatgtgaatgaagctgtatccatttgtaattttattaggtggagcaaattagtgagtctgcatagcagtgacaaaagacccattcctgttctcccttaccccctactgcaagggccaggtgcccaaagttaggctccatattaggcaaatgagctctgataa

SEQ ID NO: 927279 - DNA, 633 bp, Homo sapiens
caccaggagacacaacaatgatccatcaaactggaagttaagattgccacctggccactttgggcttctcttacttctaaatcaacaggctaagaaggaagttacagtgttgtctggggtgattgacccagaccatcaagatgaactcagtctaccactccacaattgaggtaaggaagggtatgtgtggaatacgggagatcccttagggcatctcttagtattaccataccctgtgattaaggtatacaggaaactacaacaacccaattcaagcaggactacaaattgcccagacctgcaggcwtgaagatttgcatcactccaccaggtaaaaatcaagatttgctgaggtgcttgctgaaggcaaagggaatacagaatgagtagcagaagaaggtagtcatcaatactagctaccaccatgtgatcagttgcagaaacagggactgtaattgttgtatttggatttcctccttattttcttaatatgtttgtgcaggtatacacttgtattaagaaatgatttccattttatttattttctttttcctttatcatgtgacataagatttgttgacttcacaacagcatttaagtgttgttaacttcatgtattagcatttatgttaa

SEQ ID NO: 927280 - DNA, 646 bp, Homo sapiens
tacaagtcatcatggctctgctcatgcaaaccccgacaaaggaatccgtaataaatcttcctagaacagcactcaccataaatatgtatcacataaggcatctgttttacattctgcatataaatcagcatagcgctgaatagcaatgaatcagcttctcaatgcctgatttgataacaaatcgacttggatcttaggagagagaatttacagccctcaccctcaagacagatagtcaatacttaagaygagtgccaagttaacttttcttcagcaaccaagtttacagaatgagagtcctgaggctggggtgggagcccagcgggtggggctggacagttcctgggggagggaaagcagtcactcttcccagggagaggagctttgaggtttgcagctctggatttgaaggatgtcgtgtggcatatctctgcattctgcatctgacctcctctccgctttgtcccctttcttggatctcccacaggtacagtttccgcaggctgtaatgatgatggagtcatcttggtggtgtcatttggggcggggatggggagaacccaaggtgcccccccaggccgggtagggctttctctctgcagcctcttcacctgtcccaacttggctggggtgactcccacgacta

SEQ ID NO: 927281 - DNA, 709 bp, Homo sapiens
tgcctgcatattgtgcagaaccatctgtgaaccaggctctagtcttctcttcctctgccaactgatcatagggaactcctcatgaggccatcagtgcaggctgtgggagagaaggcagggtggcaggagtggagaccatgggcatttgagccacttcctcatgtaacttacttatgccttcaggacgtgctcaagcccartcacatttatatcacttccattcgatgatggaatgctgctgtgcatgacccactttatggatagatgggtcagaaagcacccagttcatggtaggcagttcaggtcacatggtgacttcatgacccatagtcaaatgttcagtttccaccaaagcccagtaacaggccaagagctgtctctcaaaaggagagtagttatctgcagaagatggcagggccttgctccaaaatcctagtggcctctgctgtgattagcctatggggccctgctgtaggctccaaacagcacccctatctgccactgacaactccagcaccgttggatctgctgggtcatatggcccaagtgacagagcagcttgcatagcagcctggacctgttgcagagccctctcctgttctggaccccactcaaagctgacagcctttcgggtcacttgataaatggaccagagtaacacatcaaaatgaggaatgtgttgcctccaaaatccaaataggccccctag

SEQ ID NO: 927282 - DNA, 480 bp, Homo sapiens
accacgcccggctactttttgtggtttttgtatcttctgtcttctgctctttagtaccgcatagagccgcagaagactagcgagtcgaacaaacggcccctcttgcagcagttgttgatcacggggctgccccccggtactcatcctgtgtctctcgtccaaatccccgytcctcctcagctatcacctctgccgatgctggtggtttccctgggtaccgggaaccaaactctcattccccaggggcctaagccccccgtggccaggcccttctcaagtcagggttcctgcacattcacagttacgggtggccctgggagtaacacctggcacccaaacaggtcaccagagtccacacatagtccacctgccctccctgcgtaagatcagctcttcctcctcccgacgatagatcagggtcaatgatccctgccaagatggcgactgctccagcctgctggtccaacctgtccagccaca

SEQ ID NO: 927283 - DNA, 582 bp, Homo sapiens
caccaagaaattaaggtgacctactgagaacagagaggagtgagataggacaatggcctgagagtggcatggagccaggggaggccccccaccacagagaaaaggtgaggaagtgagagtccccaaggacccacacttctgccttgaacctttgcaaccttgagctaaagagatccctcatgagctcctcagtggggccttcagactgacatggagagctgtgtggtctcggcagagctgccattcaggcacacaaggagttccaggagccatggatccctgagcaccatggcaccagtggctacagctctagcaaggggtgaggccaggctccttcacatgcccccagaataggggccatatccacagggctagacaatrgatggactgtgggcctagtcttcactgaacctcatcagatggtgcccactgcactggcaccctagcacagccaccccaggtccacctgagctctctggccaggagcagctttgcacttccctggtatggagctcccagggaagtgggagtaggcaggtcaccatttctcctgctttgcagccctagctcctattgtcctca

SEQ ID NO: 927284 - DNA, 578 bp, Homo sapiens
tgcattagtctgttttcatactgctatagataacttcccaagactgggatctaccatcctagggtctggaggatgggggccctcttcttacagctcaactaggtagtaccccagtggggactctgtgtgggggtgcccacccgacatttcccttccctattgccctatcakaggttctccatgagggctcctctcccacagcaaacttctgcctggacatccaggcattttcatacatcctctgaaatcgaggtggaggttcctaaacttcagttcttgacatctgtgtacccacaggctcaacaccacatgtaagctgccaaggcttggggcttgcatactctgaagcaatggtctgagctctacgttggccccttttactcatggctggaatgcagggcaccaagtccagagatttcataaagcagcaaggccctcgtccttgcccacaaaaaccatttttttctcctaggcctccaggtctgtcatgggaggggttgccatgaagatgtccaacatgccctggagacatttttcccattgtcttggtgattaacgttggttccttgttcattatg

SEQ ID NO: 927285 - DNA, 561 bp, Homo sapiens
gaggctgtaccctgcaaagctatagggccagagcttctcaagaccataggaacccacctcttgcatcagcatgacctggatgtgagacatggagtcaaaggagatcattttggagctctacaatttgactgcctcactggatttcagacttgcatagagcctatagcccctttgttttggccaatgtctctcatttggaatggctgtatttacccaatgcctgtagccccattgtatctatgaagtaattaacttgcttttgattttacaggctcataggcggaagggacttgccttgtctyagatgagactttagactgtggacttttgagttaatactgaaatgagttaagaatttgggggttgttgggaaggcatgattggttttgagatgtgaagacatgagatttgggagggggtaggggcagaatgatatggtttgactccgtgtccccagacaaatctcattttgtatctcccagaattcccacatgttgtgggagggtcccagtggaagagaattgaatcatgggggtgggtctttcctgtgctgttcttgtg

SEQ ID NO: 927286 - DNA, 610 bp, Homo sapiens
tatagcatttatgtttctgatcccaaacagcaaacatactatcccttctctcatatgaaacacacaaaaaatgacagaaatgaacaaaaatggtaattatagaaattaaatacacaactaggaagacaactgaataggagtcatctgctgtgagattttttttttgtttttcattaatacagaaaaaattggaggggtatagaaagaggaggagtggtaactgaaggaaagtgtggaagaaaccacaattacaaagagaaagaagggactatgacttggaaggaaagaatctgtctagaaaaagctctaaatgttttttccccctgaataaatcttgactyaaatggtaaatgtgatggattgctgaagtgagctaatgggtctgaaagcttaggaattagttgaagggttgcaattaacagttgaccctgcccactatttaccccaaacttaaccctcaatcttgaccagcagcatctgtcaactcccagacagaaaataaaaaagtcacagatttactgaaaataactaagggtttccctactgtgtacttgatgtgctataccaaaacctctatatttatttacaaattagctacaaaaattagcta

SEQ ID NO: 927287 - DNA, 610 bp, Homo sapiens
tatagcatttatgtttctgatcccaaacagcaaacatactatcccttctctcatatgaaacacacaaaaaatgacagaaatgaacaaaaatggtaattatagaaattaaatacacaactaggaagacaactgaataggagtcatctgctgtgagattttttttttgtttttcattaatacagaaaaaattggaggggtatagaaagaggaggagtggtaactgaaggaaagtgtggaagaaaccacaattacaaagagaaagaagggactatgacttggaaggaaagaatctgtctagaaaaagctctaaatgttttttccccctgaataaatcttgacttaaatggtaaatstgatggattgctgaagtgagctaatgggtctgaaagcttaggaattagttgaagggttgcaattaacagttgaccctgcccactatttaccccaaacttaaccctcaatcttgaccagcagcatctgtcaactcccagacagaaaataaaaaagtcacagatttactgaaaataactaagggtttccctactgtgtacttgatgtgctataccaaaacctctatatttatttacaaattagctacaaaaattagcta

SEQ ID NO: 927288 - DNA, 671 bp, Homo sapiens
agaccagccttaaatgtctctaaccagtgagggatagccagaccctcttcttgctcattgaccttgatggatgcacattggaagtggaacgcctcctgacccgttcctagcttaggcttggttgcagaagactcctagttcccttattatagctggtgtcctttccagaaaggattgtaatctcctttaatagtttaccaaacttagactcaaatttacagacgaatatgcaagcacagttccagctttctcaaccaggaagtcttactttcccttaatggatcaagtccacgttctatttattatcctagcttgcaacgttaagtgtgacttattcaacaaacgtgtattaagctctttgtatggatcacagacaattgctggtgccatgaataygaaaatgtgaagtggccgggcgcggtggctcaggcctgtaatcccagcactttgggaggctgaggcgggtggatcacctgaggtcaggagttcgagaccaacctggccaacatggtgaaaccccgtctctactaaaaatacaaaaattagccaggtgtggggtgggtgcctctaatcccagctactcgggaggctgagacaggagaatcgcttgaacccggggggcagaggttgcaggttgcagagagccgagattgtgccattgcactccagcc

SEQ ID NO: 927289 - DNA, 578 bp, Homo sapiens
gcatgtgcaaaagagtcattaaggatgactccagagttttagcctgagcaactggaaggagaattgtcattagctgatgcagggaagactaagggaggaacaagttggggaagatcagagtttaattgtagacttgttaggcttgagacacctagtagatattcaggacaggtgcagtggctcatgcctgtaatcccagcactttggcagactgaggtgaaaaaaatcactggatcccaggagttaaaaagcagcctgggcaataaggtgagaccccccatctctacmaaaaaaatacaaaaattatccaggcatagtggtacatgtttgtaatcccacctactcaagaggctgaggtgggaggtggaggttgagcccaggaggcagaggttgcagtgagctgtaattgcaccactgtactccagcctgagtgacagagccagaccttatctcaaaaaaaaaaaaaaaaaaaaaaaaaaaaaaaagatgttcaagagggcagctgggtatacaaacctggaatccagtggggatgatatgatccaggttggaaaattaagtttgagagttaccaccta

SEQ ID NO: 927290 - DNA, 707 bp, Homo sapiens
ggtatatacatgtaaaacaggtgcagggtggggatcaatcagaggaaagtgtgccaaacaggaagacagtttcccaatccagtctgtggacttacccaggacttgtagctaggctttaaactgtctttggcttgaagtttgggtttcactggggatctgcccctgtctgcctagggtttgtctgcctcctgctgctatcaccttggcatcccaaagtactgtgatacagggcctgagccaccatgcctggccaacttttgctttaatggaaggaaaaaaatattcacaatgtgttttccagtaaaataatttttcctttttgtttttggtgtacaacataatcttttgatatatatataccttgtggaatggctaaatcaagctaattaacataaatattacctcacatacttatttttgcctgtggtagaatactcaacatttattctcttagcaattttcgtgtatataatctaytaaccataatcaccatagattttgaaattgcctttgcagaaattatagtagtaatggaagtctgacataactgactccatcttgcttctaccagactaagttgcttttggtcattccattttttttttttttctttttgagacagagtcttgctctgtcacccagtctggagtgcagtggcggaatctcagctcactgcaacctctgcctcccatgttcaagcgatctcc

SEQ ID NO: 927291 - DNA, 664 bp, Homo sapiens
ttaatgctgacactgattattctaattttatttatttatttatgagacagagtctcactctgtcacccaggctggagtgcagtggcataatctcggttcactgcaacctccacctcctgggttcaagcgattctcctgcctcagcctcccgagtaggggactacaggcgcctgccaccacgcccgtctaatttttgtatttttagtagagacagggtttcaccatattggccaggctggtctcaaactcctgaccttgtgatccgcctgcctcagcctcccaaagtgctgggattacaggggtgagctgccgtacccggcctctaatttttttcatgcttttggttttttaaaatgataagcctcaggaggcagcatgtttcttaattwaaaaaaaaaaaaccacttatacattaaaatgcactttaaaagatcgaaggtgaccgtatagaaataattaaaatgcacgtaaatataattataatgttttaattgttttgtctgctggtatatatctaaaatttttatgtttttctagatagtaagttatattcaactattattttgtgattgtcacattttaaaaatagtgacagtaatagctaaatttattggacatcttctgaattgctgaatgattttcaagcaatatttatgaaaattca

SEQ ID NO: 927292 - DNA, 484 bp, Homo sapiens
ggcgcctgcctgtagtcccagctactcaggaggctgaggcaggagactcacttgaacttgagaggcggaggtcgcagtgagccgaggtcacgccaccatactccagcctaggcgacggctgtaggtgattaaatgagatagatacgtttgttaaaaasaaaactctcagttatttatattgatacatttatatacttacatatgtatatctggacatcacatctcataattggagaacaggtatctaaaaagttgtttaactgactgttaagaaatgtagtctgttgtctgtttcctaggtaagccacttttcttttcccccagcattggaattcttctcttttctcctcctctgcacttccttcctttctgtcttcaccttgagcccatgcttcgctgtggaactccacttaggaggtacttctgacaaaaaaagaggtctgcactgggaacttcgtgtctggttgttgacaggcatttctgt

SEQ ID NO: 927293 - DNA, 610 bp, Homo sapiens
accaatatcagaaatgaaatagaaaatatcaccatagagcctgcacccatcaaaaggataataaaggctactgtgaacaactctacacatataaatttgacaactggaatgaaataaaccaattcttcaaatgtggacacactaccacaattcatccaagatgaaatagaccatttgaagagccttataactttgaaggaaactcaatttgtaattttaaaacttccaaaaaaagacrtttagaggctcagatgatttcactgaagaactatacctaatgtttaaagaaatactaacacaattctacctattttttaaatagaaaataggagggaacacatcccaattcactttttgaagctagtattatctaatatcaaaaccagagaaaaataatacaaaaaaagaagaaactacaggccagtatcccctatgagtatagagacaaacatctctaataaaatattagcaaacagaattcagcaatatataaaaagaattatatactgttctattaccaaatgtgatttattccagggatgcaaggctagtatgatattcaaaaatccattaatataatctaacatattaacaggctaaagaagataaa

SEQ ID NO: 927294 - DNA, 605 bp, Homo sapiens
aatagtaaacaggcatatgaagaggtgctcaacatcactgatcatcagagaaatgctggtcaaacctgcaatgagatataatctcactccagttaaaatggcttttcttcaaaagacaggcaataacaaatgctggtgaggatgtggagaaaaggaaacccttgtrtactgctggtagaaatgtaaattggtaaaaccactaggcagaagagtttggaggttttttaaaaaactaaaaattgagctactgtgtgatccagcagttccgctgctgggtatatacccctgaaaaaggaattcaatatactgaagagatatctgtactcctgtgtttttgtagcactgtttacagtaggtaagatttggaggcaacctaagtgtccatcaacagatgaatggataaagaaaatatggtacatatatacaatggagtactattcagtcataaaaagaatgagatccagtcatttgcaataacgtggagggaagtggagattattaagtaaaataagccatgcacagaaagagaaacatcagatgttctcacttgcttgtgagatctaaagtcaaaacaattgaactcatggacatagagagtagaagga

SEQ ID NO: 927295 - DNA, 556 bp, Homo sapiens
ttaaaaacttaacaatgcaacagatgttggcaaggctgtggagaaaaaggaatgtttatacactgttggtgagaatgtaaattagttcagccactgtggaaaacggtttggaaatttctcaaagaacttaaaacagaactacaatttgagccagcaatcccattactggctatccaaaagaagatgaattgttttaccaaaaaaaaaaaaaagatttaytcatatgttcattgcagcactattcacaataacagagacatggaatcaacctagttgcccatcatggtgaattggataaagaaaatgtggtacatatacactatggaatgctatgcagccagaaaaatgaataaaatcatgtcctttgtagcaacagcaacatgggtggagctggaggccattatcctaagtgaactaatgtggaaacataataccaaatactgcatgttctctcttgtaagtgggagataaacaatgggtacttatggacataaaggtggtcataaatatacacctggaactaactattgggtgctatgctgagtatctggggtac

SEQ ID NO: 927296 - DNA, 511 bp, Homo sapiens
atttctcattgaaataataacgagagtaagattcagtaaaatgccacaatatttctcagcactgtcattaaatgacatgttgatatctaattgtaatcataggtgaaactttcctgttctctaatttatgtaataagattcaattttctttctgtatctttgattgtgtctatgagctgaaatctttctccctatgtatctttctctttctttcttcggttcaggtcttttgggggaaagagatgcttcatttagatttatttttttgagacaccagacaagctgctatcagtacatggrtgccaagatggtcctttaataaagaattgtggtttaagaatttcaaccaaaggattaatgtattaaactgaataatagcatccagacagtagcaaagatgatgatcagagttggtgaaagaaagattattgatcatctggctctatcagtcacaaacagggaagaagaaaacaaaaaggaggaaaaggagattaaagaaacaaaaaatagt

SEQ ID NO: 927297 - DNA, 555 bp, Homo sapiens
gattaaaaggaagaaaatgtgcaatcatctcaataaaataaatgcagataaataattccataaaatgaatatatttaattttaaaaccactcaataaatgcacacatgcacaaaactgtttataaaggaagagtaaaacaggcttttccttaacataatagagaatatctgcacaagtcccacaccgaataatatccttaatggtgaaatagtaaacacatttcttttaaagccaaggataaaatacaggtgcctgttatgaaccacttcctttaattaaccatggcattggaaactcttgccacttgtataatataggcaaagaaacaaatgtaaatkattggaaaggaagaaacaaagctatcatttttctcaggtgataggactatcttcataggaaacccaaaagaactacaaacagatcgttagaattaatatggcactttaactaggttgttgattataagatcaacatacaaaattaaactccatttctatacaccagcttcaaagtattagaaaatattttcaaaactaccacacactttataatag

SEQ ID NO: 927298 - DNA, 555 bp, Homo sapiens
gattaaaaggaagaaaatgtgcaatcatctcaataaaataaatgcagataaataattccataaaatgaatatatttaattttaaaaccactcaataaatgcacacatgcacaaaactgtttataaaggaagagtaaaacaggcttttccttaacataatagagaatatctgcacaagtcccacaccgaataatatccttaatggtgaaatagtaaacacatttcttttaaagccaaggataaaatacaggtgcctgttatgaaccacttcctttaattaaccatggcattggaaactcttgccacttgtataatataggcaaagaaacaaatgtaaatgattggaaaggaagaaacaaagctawcatttttctcaggtgataggactatcttcataggaaacccaaaagaactacaaacagatcgttagaattaatatggcactttaactaggttgttgattataagatcaacatacaaaattaaactccatttctatacaccagcttcaaagtattagaaaatattttcaaaactaccacacactttataatag

SEQ ID NO: 927299 - DNA, 599 bp, Homo sapiens
ccaaagttacgctgtcagaccgtccctctgaagtcaagccatttctctctgacattcagccagagtgcctgatgtccagctccttctttctgatggctgagtctggggtctttatagggacaggatggggtggagcagggccatgtgtagtttaggaaaaggcaacatttgagcaggaaaacatcgatagaagttctcactttgggtctcaggctttttggcttgagtcgggggggcttcaccggggacccccccgccaacccygtgtctgcctagaatttctcggcctcctgtagctatcatttcccccctctgaagatgcacatctaactgctgttaggatacagacaatgaccgatctaagctgcttcctgcagagagggggcattgttttggggagaagagcagtcagattcttcccagaggtctacctaagggtccccagcaaaagggagccatcatccagggctctgcttgccttgaccatttggagtttgatggtctctaggtgagaagaaacaagttctacaaggttaagtatgcatgaatcaaatatgtgtattatacaaaaaggggttaaaaggaaagaatctagtggc

SEQ ID NO: 927300 - DNA, 568 bp, Homo sapiens
tgcaaaggacattatttcattctttttggtggctgtgtagtattccatagtgtatatgtaatatattttctttacccagtccaccaattatggccacctaggttgattccatgtctttgctgttgtgaatagtgctgcaatgaacatgccagtgcatgtgtctttttggcagaacactttgggttttttgggaggtatatgcccagtaacgggattgctggattggatgatagttatgttttaagtcctttgacaaatctccaaactactttccactgtggctgaagtcatttacattcccaccaayaatgtataagtgtccccttttctctgcagcctctccagcatatattattatttgactttttaataacaggcattctgattggtgttagatggtatctcattgtggctttgatttgcatttctctgatgactagtgatgtgtagcatttttttttcatatgtttgttggttgcttgtgtgtcttctcttgagaagtgtctgttcatgtcctttgcccatttattaatggagtgatttgctttttgcttgttgatttaagttc

SEQ ID NO: 927301 - DNA, 629 bp, Homo sapiens
agttctatatcatgtatatgatttggaagtatttttttgtgggtttttttcccttttcttgttttttttttttttttttttttaatagaggcagggtctcgccacattgcgcagattggtctcgaactcctaggctcaaacaatcctcctaccttggcctcccaaagtgctgggactacaggcatgagccaccatgctcagccttggtagcatctttgatgcacaagtattttattttgatgaagtccaatttatctgtttgattttcaccccctttggttgcttatgcttttggtattgtatcaaaaaccattgccaggctgggcacaatggtgcatgcttataatcccagtgctttgggaggccaaagtggtaggatcacttgagctcagaagtttgagaccagcctgggcaacatagtaagaccrtgtccctacaaaaaaataattagccaggtatggtggcatacacctgtagtccccgctgcttgggaggctgaggcaggaggatcacttgagtctgggaggctgaggctgaagtgagctgtgatcaagccactgtactccagcctgggcaacaggctcaaaaaaccaaccaaccaatcaaccattgtgtaaagtagacacagt

SEQ ID NO: 927302 - DNA, 437 bp, Homo sapiens
agccaggcatggaagtaagtgctcaggaagtatctatcatattaaatggaccagaaacccatcacgaggctgtgttgtaagagagctcaactggaaatgcaaactccaggaggaccaataataataacatccaccttttggcagtacctcctacgtgctctattctrtgctacatatttcatgcatatattagctctaaaccagacaacaaccttataggggattttttttttttttgagacagagttttgttcttgtcacccaggctggagtgcggtggcaccatctctgctcactgcaacctctgccttcccgggttcaagcgattatcctgcctcagcctcccaagtagctgggattacaggtgcctgccaccatgcccaactaagttttgtatttttagtagagacggtgtttcaccacgttggccaggccgg

SEQ ID NO: 927303 - DNA, 585 bp, Homo sapiens
attttttgactttttaataatagccattctgactgatatgagatgacatctcactgcggtttcgtttgcatttctctaataatcagtgatattgagcttttgttcacatgcttgttggcagcaagtgtgtcttcttttgaaaagtgtctgttatgtgmttttcctactttttaatgaggtgttttgtttttttcttccaaatgtgtttaagttccttctacaagctggatattagacctttgtcagatgcacagtttgcaaaagtttttctcccattctgtaggttgtctattttattctcttgatagtttattttgctttgcagaagctcttaaatttaattagatcccatttgtcaatttttgcttttgttgtgattgcttttggtgtctttgtcatttgaaatacttgtccattcctacatccaggattgtattgcctaggttgtcttccagggtttttacagttttaggttttacatttaagtctttaatccgtcttgagttgatttttgcatatggtgtaaggaagggtccagcttcaatcttctgcatatggctagccagatttcaggttattaataga

SEQ ID NO: 927304 - DNA, 602 bp, Homo sapiens
tacaaatataagggaatcgctgaaagattaatattagatttctcagcagaaaccttacaggccaaaaaagaacgggataatgtattcatgttctgaaagaaaaagaaaagaacctgctagccaagaattctatacccatcaaggctatccattagaaataaaagataaataaagcctttctcaggcatgcaaacttgaggaaattcaaaatccctagactaaccctacaaaaatttttaagtgagttttacatctagaagaaaaaggataatatatactgtcatgaaaacatacaaaaatataatactcactaataaagctgttacacaaatgagaaagagaaaggaatcgaatctgataactatagaaatccatcaacccacaaaaataaattaaaagagagaaacaaaggctgtatgaaacaaccagamaacaattaacagaatgaaacatgtaactcttcaactatcaataaaaattttgaattcaaatggtttaaattcctccaattaaaaaatatagactggctgaattaataaaaatgaaataaaatacaacaagatgcaactgtatgctgcctataagaaattctcttcccaaaa

SEQ ID NO: 927305 - DNA, 765 bp, Homo sapiens
tggcggatgcatggctatgtcctgtgtggctcacttaccaggagcaagctgtctacccaggaatggcctctcccctccaccccgagtggtcagggccggcctctcactgagcccccaaagctgacagggtcccctggatcatcaggccttgactactcaacccagagactgctaccccaaagtggggcttctgggcctacggcccccctcaccaccccaactccgccatggcgggagctgccattagagatttgcagctctatcccctcagggctcccgttcttctaccacagccaccaggagccacgctgaaagccatcrtgtcccgagggtgacctgggctgcatgctctgcctggaccttcccaaaggcataagcctcagagctgaacaaacatggaatcaagatctgaaatgtggctgggcgcagtggctcacgcctgtaatcccagcacgtttggaggctgaggcgggcggatcacctgagggcaggagtttgagaccagcctgaccaacatggtgagaccctgtctctactaaaagtgcaaaaattagctgggtgtggtggtgcgcacctgtaatcccagctactcgggagggtgaggcacaagaatcccttgaacccagcacgtggaggttgcagtgagccgagattgcaccactgcactccagcctgggtgacagagggcgactccacctcaaaaaaaaaaaaaaaaaaaaaaaaaaagaaagatctgaaatgtaaatgccaccgttttatcagatt

SEQ ID NO: 927306 - DNA, 655 bp, Homo sapiens
aagtaaactgccacttccttactgatatggtttggccgtgtccccacccaaatctcaacttgaattgtacctctcagaattcccatgggttgtgggagggacccagggggaggtaattgaattatggggggctgatcttkcctgtgctattcttgtggtaatgaataagtctcataaaatctgatggttttatcaggggtttccatttttgcttcttgctcattttctcttgccaccaccatgtaagaagtgcctttcacctcccaccatgattctgaggcctccccagccatgtggaactgcaagtccaattgaacctctttttcttcccagtctcaggtatgtcttcatcagcagcgtgaaaatggactaatacacttaccctccccccaaatctctcataccaaccccaattctatcataggttttgtctaactccctcttactaagacaccctggtgtgtattctctctcactgcagtaattaataaacctggcttattcaaccacaagtgtgttcttggtggtctctgctggaagatgttggttcttgtccagggtcccacagttgaaggatgaagactggattcaaactcaggaagcaggcttttctgattccagaatccacatgggacctcctgtctaggagagtgga

SEQ ID NO: 927307 - DNA, 655 bp, Homo sapiens
aagtaaactgccacttccttactgatatggtttggccgtgtccccacccaaatctcaacttgaattgtacctctcagaattcccatgggttgtgggagggacccagggggaggtaattgaattatggggggctgatcttgcctgtgctattcttgtggtaatgaataagtctcataaaatctgatggttttatcaggggtttccatttttgcttcttgctcattttctcttgccaccaccatgtaagaagtgcctttcacctcccaccatgattctgaggcctccccagccatgtggaactgcaagtccaattgaacctctttttcttcccagtctcaggtatgtcttcatcagcagcgtgaaaatggactaatacacttaccctccccccaaatctctcataccaaccccaattctatcayaggttttgtctaactccctcttactaagacaccctggtgtgtattctctctcactgcagtaattaataaacctggcttattcaaccacaagtgtgttcttggtggtctctgctggaagatgttggttcttgtccagggtcccacagttgaaggatgaagactggattcaaactcaggaagcaggcttttctgattccagaatccacatgggacctcctgtctaggagagtgga

SEQ ID NO: 927308 - DNA, 622 bp, Homo sapiens
ctagatgcacaaagaactggtacaattcctactgatattattccaaaaaattgagaagaagggactcaactctagttcattctataaggccagcatcaccctgataccaaaacctggcagagacacaacaaaaaaggaaacttcaggccaataaccttgataaacatcaacaaaatactagcaaatcaaatccagcagcacatcaacaagcttatccaccaggatcaagtaggcttcatccctgggatgcaaggttgactcygcatatgcaaatcaataaatgctattcatcacaacaaaattaaagacaaaaagcacatgattatcttaatagatgacgaaaaggttttcaataaaattcaacatcccttcacgttaaaaactctcaataaactaggtattgcaggaacatacctcaaaatattagccacttatgacgaatccacagccaacatcatactgaatgggaaaaagctggaagcattccccttgaaaactggcacaagacaaagatgccctttctcaccactcctattcaacatagttttggaagttctggccagtgcaatcaggcaagagaaagaaataaaggggcatccaaataggaagagaggaagtcaaa

SEQ ID NO: 927309 - DNA, 692 bp, Homo sapiens
agcccctaacaagagagtcagcttgtcctttgaggttttgaagccaggctttgactttccctctctagctatggaagtcctagatggtgtcttcttccagtataaggctgttttgtctacattgaaaatctgttgtttagtgtagctactttcatcatttgtctagattgtctggataacttsctgcagcttctgtgtcagcacttgcttgtttgtagtgcacttttatgttatggagatagcttcttgtccttaaacctcatgaaccaatgctctgctagcttgctagcttttcttctgcagcttcttcacctgtctcagccttcatagaactgaagagattatttagggccttactctggattggcctttggtttaagggaacgttgtggctggcttgatcttctatccagaccactcaagctttcatattgttaatttgttaatagtaataaggctattgtgctttcttattatttatgtgctcactggaataacacttgtaatttcccgcaagaactgttcctttgcattcacaacttggctgtttgttgcaagaggcctagctttctgcctgtctcagcttttgacatgccttccttgctaaccttaattatttctagcttttgagttaaagtgagagatgtgtgattcttcctttcacttgaacacttagaagccatcatggggtt

SEQ ID NO: 927310 - DNA, 353 bp, Homo sapiens
ctacaatgtgccagacaccatactcctcaagactctgtaggcacagaaggaacagacaaaaatccctaccttcatagatattattctaggggtaacacaggtaaataaaacatttatataaatagttttcacacagtaacaaattctatagagaaaaataaaacagaagaaggaatagcaaatgagggagatgccctytaaaacatggtgctgagggaaggcctccctgagaagatatcatttaccccaaaaataaaaaagcaagtaatagaaataacagctaaaaggtgttctagacacttaaacctgccacaacattgagaactcagggttctgatgcaaaacctcgctgc

SEQ ID NO: 927311 - DNA, 353 bp, Homo sapiens
ctacaatgtgccagacaccatactcctcaagactctgtaggcacagaaggaacagacaaaaatccctaccttcatagatattattctaggggtaacacaggtaaataaaacatttatataaatagttttcacacagtaacaaattctatagagaaaaataaaacagaagaaggaatagcaaatgagggagatgccctttwaaacatggtgctgagggaaggcctccctgagaagatatcatttaccccaaaaataaaaaagcaagtaatagaaataacagctaaaaggtgttctagacacttaaacctgccacaacattgagaactcagggttctgatgcaaaacctcgctgc

SEQ ID NO: 927312 - DNA, 575 bp, Homo sapiens
cattcagtaggttgagatcactctttatgtagcatatacaaaaaaaaagacatttttgtgaacattgaggactaaagtaaaacaccaaatatttcacggtaaaaactaaaaactgtctatctgtgaaaatgctttgtgaagwgtggatttatctcagagttaaacctttgttttgattcaacaggatgaaaacaccttttttgtagaatctatgaagggacatttcggagcctattgtgaactaaactgaaaaacctaatatcccagcataaaaactagaaagaagcaaaatgatttgtgatgtgtggattcatcttacagagataagcctttttgtatcagttaaaccttttttttattccccgcaagttggagtcctcccacctgaccatggggccgtgttgtggacagcttgtgcaatgaagggaatgcaaggatggagttggaagcacttcctgtgtcatctgcaccttttttggcagatgaaggtgcaggaccccatccacacctcagcagactgtatgctcacctgtatctgacctaattgctgctcacactcctagttctggaatgaa

SEQ ID NO: 927313 - DNA, 575 bp, Homo sapiens
cattcagtaggttgagatcactctttatgtagcatatacaaaaaaaaagacatttttgtgaacattgaggactaaagtaaaacaccaaatatttcacggtaaaaactaaaaactgtctatctgtgaaaatgctttgtgaagagtggatttatctcagagttaaacctttgttttgattcaacaggatgaaaacaccttttttgtagaatctatgaagggacatttcrgagcctattgtgaactaaactgaaaaacctaatatcccagcataaaaactagaaagaagcaaaatgatttgtgatgtgtggattcatcttacagagataagcctttttgtatcagttaaaccttttttttattccccgcaagttggagtcctcccacctgaccatggggccgtgttgtggacagcttgtgcaatgaagggaatgcaaggatggagttggaagcacttcctgtgtcatctgcaccttttttggcagatgaaggtgcaggaccccatccacacctcagcagactgtatgctcacctgtatctgacctaattgctgctcacactcctagttctggaatgaa

SEQ ID NO: 927314 - DNA, 596 bp, Homo sapiens
atacaattctgtttctttaggccgggcgcagtggttcacacctgtaatcccagcattttgggaggccgaggcaggcggatcacaaggtcaggagattgagaccatcgtggctaacacggtgaaaacccgtctctactaaaaatccaaaacattagctgggtgtgatgacacgcgtctataatcacagctacttgggaggctgaggcaggagaatcccttgagcccgggaggcggagcttgcagtgagcygagattgcgcgactgcactccagcctgggtgacagagagagactccgtctcaaaataataataataataatgaataaataaataaaataaaaaataaaaagatggaagaaactcagactttcaaaaattagggatcccatttttacctaagatattggctttactcttaggttcccttgattgacttagccaataattttttttctacctaagtacacaagaaaaatgaaatgaaggggtagagctcaagaatccctgtgcatttctaaaagccaaattttacaaccactgcaatattaccatttactaatattttctttctgtctcagccaaaggtaagaggtctc

SEQ ID NO: 927315 - DNA, 596 bp, Homo sapiens
atacaattctgtttctttaggccgggcgcagtggttcacacctgtaatcccagcattttgggaggccgaggcaggcggatcacaaggtcaggagattgagaccatcgtggctaacacggtgaaaacccgtctctactaaaaatccaaaacattagctgggtgtgatgacacgcgtctataatcacagctacttgggaggctgaggcaggagaatcccttgagcccgggaggcggagcttgcagtgagctgagattgcgcractgcactccagcctgggtgacagagagagactccgtctcaaaataataataataataatgaataaataaataaaataaaaaataaaaagatggaagaaactcagactttcaaaaattagggatcccatttttacctaagatattggctttactcttaggttcccttgattgacttagccaataattttttttctacctaagtacacaagaaaaatgaaatgaaggggtagagctcaagaatccctgtgcatttctaaaagccaaattttacaaccactgcaatattaccatttactaatattttctttctgtctcagccaaaggtaagaggtctc

SEQ ID NO: 927316 - DNA, 711 bp, Homo sapiens
  misc_feature 49, 437, 495, 608, 696: n = A,T,C or G
tccattcctgtctcaggcagggaagcttccttcttctccacgtttcccntcatgggtgggtggattgcctacaatgagcctgggcgaccgtgactggccttgtcttacaggacaggtggtgtcgcatttcctcagcacttcctgtctcattcttgtgggacatcctctcctccgctccagggtgcactgactcccttgatcttctggccgaaacgaatatcagggaaccaaagggactgggctggggctgggtgcagccgaagttgcgtcagggctaccggggcggtggagggttggggrtggggcgaattttgcagaaacctctttgctccctggtaggcactggaaaacgtggcttgggtcaggaacaggactcctaccccccaggtcccaggtgttctttgtttttccttggcattgagggaaagttccctcgntccccccttccaccggcacatgcctggacaccaccgtttgtttcacggtggccctgtntgcctccggtgacacacgttcacaccatccgctgtgggatatgccagtgccgcgtgtggtcacatggtctccccctcggattcgcccctgttcctgtttgctcgagtcctgtnaagagccgtcagctttccggagccccagggcttttagaagcggggcaggccactgctctttccaaggacgaggggcgcagtgggctgntggatcagtgaagtt

SEQ ID NO: 927317 - DNA, 583 bp, Homo sapiens
  misc_feature 314, 372, 485, 573: n = A,T,C or G
gcatttcctcagcacttcctgtctcattcttgtgggacatcctctcctccgctccagggtgcactgactcccttgatcttctggccgaaacgaatatcagggaaccaaagggactgggctggggctgggtgcagccgaagttgcgtcagggctaccggggcggtggagggttgggggtggggcgaattttgcagaaacctctttgctccctggtaggcactggaaaacgtggcttgggtcaggaacaggactcctaccccccaggtcccaggtgttctttgtttttccttggcattgagggaaagttccctcgntccccccttccaccggcacatgcctggacaccaccgtttgtttcacggtggccctgtntgcctccggtgacacacgttcacaccatccgctgtgggataygccagtgccgcgtgtggtcacatggtctccccctcggattcgcccctgttcctgtttgctcgagtcctgtnaagagccgtcagctttccggagccccagggcttttagaagcggggcaggccactgctctttccaaggacgaggggcgcagtgggctgntggatcagtg

SEQ ID NO: 927318 - DNA, 739 bp, Homo sapiens
cccgactcttgacctcactggatttcccagctaccttactgtaattctacacttgaaaactacaaaaattcattttgaatgtgctcaagatttttttcccactccagattgattcctaacgttctccaacttctttctggcactgagcatgctgtcatttactgtatcaaccaagttcctttctgtttggcttcagttcgggtttatgcaatgggagaygtattcgtttgctatcctgccataagagagtacaacagattgggtggcttaaataataaaagtttattttcttacaattttggaggctagaaatctgagatcaagttgttggcagggttgatgtttttctgaggcctgtctccttgccttgtcatgggatatcttctgtcttacatggtcttcctctgtgtgtgcctgtgtcctaatctcccctacttataagggcaccagccatattggattagggcccaccctaatggcctcatttccagttacttctttaaagactctatctccaaatacaagtactgagggttaggacctcagcatatgaattttgggggacacaagttagcacatcacaggaggtacatgtaaaagatcagagagacatgttgggtaattttccccttggctatgtattgtcttcccttagctgactttctctaactaagagcattcctcttgctgggtggccactctcctacagctactttttccaactaatggattctggtaa

SEQ ID NO: 927319 - DNA, 638 bp, Homo sapiens
atggacatgtagcttaaatgagtgatcctacctacattttaatccactgaggttctattgttatgcagccaagattactgcatatcctgagggaaacagtaggtattcaagtgttggggcacagaaacggataccccaaaacatggtgttttgacatgctaaactgaagaagaagcctcaagttctctgtgatcccctacctcctgtttttcagtgctctgtctctcccaaagcacaggattataatgttctctaaagatttttatctgcctgaaatctggacctaccaaagcagaatacaattacctttggttccacacctgagttttcattaactgaactcatatcacaggaagactgcagtctgtcaacaaacctggacagacttttgccacaaaccattgtctgctctgtgggyccaaaagactttgtcccaggcaattgtatgttcttcaagctcattgaattccaataaaaatcatttattacccccacctaaagtcattcacgcttccctatttctgtttcccctaagaatagggaacataaccatctgtacctcattgcctggtaggacaatttctctgtgattctcttctatgaatgttaatacatttatacgtgttttctcctattaa

SEQ ID NO: 927320 - DNA, 654 bp, Homo sapiens
gattcagaactttaggtgctgtgtgtggaacaaaaaaagaaacgtagcctcaaaccaaccaacaacaacaacaaaaaaatgtggcatccaatgatacatgtacactattgtcagtttaaaaacgtgtgtatacattgaatatagcagaggcctttttggctttgtttttcttttatatgtttgctcccagagctgttttttaaactgatgatgtctcttaacaccatcagttaagagacctcctgaacactggcgctgcctctgttactcgaaaatcccacacacactccaacctcatagccacctgacctgatccttttgctcaaaagagccttcatggaccaccttatataaaagcgaggctcaaccttgaccccagcrctccctatcccccttccctgctttattatttttgtagcacttatcattatttgacttactctatagtttacatatttgcttgttgtctattctttcccactagaaattaggcagagatttttttttactctctttactcctgcatccctaatccctttaacagtgcctaacatatactaggtagtcaataaatatttcttgaatgaataaataaatgaatcttaaaatcaatgatctatatgaattgagaggctaaaatcattctggagatac

SEQ ID NO: 927321 - DNA, 659 bp, Homo sapiens
aagacaaagtcctttcactcttccttcccttttacacaggcagaagagtctctccccatggtcaccatcaccagaggcccacagggagtgcttccaggcaattgccgatgttcacttaaggccaggccactgacgagtycactcagcttgttgagaatgctgccaggcctgggactcacccttcagggaagtgggctcccctctggcctggggtcagaaatgccatccaagggccaaggcctataatcagagatcccatgagcccacttgatgctctaacccctgtggttgagctggtacaaaagctgtaagacaaagtcccctttacttttatctctgctcttctaaagcaaaaagcatcaaaactaccacagctaggaatgtgcttggtatcacctgaagccagcaaggctctgagtcttagccaaggcccacagtgagctctgcctgggtattgctgctgattgtttagggtccaagggctctttaatgagcaggtgatgaatcctgccagaatttgctatttctctttaatgcagcaggttctcttttggcccagagtgtgtctagaaatgtcctggagctagggcctagaatgggttcctcatgactctgcctgaggtgactactatgactgagctggtatccaagttgcaaga

SEQ ID NO: 927322 - DNA, 757 bp, Homo sapiens
cagcttgattgctacctctggagatcctaaacagagggcctagttaagctatgcccagactcttgactcacaagaacactgagataataaatacatgtggctttccccacgagcggagcccgcagtgagccgagatcgtgacactgcactccagcctgggcaacagagcacaactccatctccaaaaaaaagaaaaaaaatgtggtttttaagctggtaattttgtggtaagttgttacacaaaaacagtgaacaggccaggcgcagtggctcacgcctgtaatcctagcactttgggaggcygaggcaggcagatcacgaggtcaggagttttgagaccaacctggccaatatggtgaaactccgtctctactaaaaatacaaaaaatagcagggtgtggtgatgcgcccctatagtcccaggtactcgggaggctgaggcaaaaaaattgcttgaacccaggaggcggaggttgcagtgagctgagattgtgcgtgtctggaaatggtgggttcttagtctcactgacttcaagaatgaacccacagacccttgcagtgagtgttacagttcttaaaagcagcgtctctggaatttgtttcttctgatgtttggatgtgttcggagtctcttccttctggtggcttcatggtctccttggcttaggagtgaagctgcaaaccttggtattgactgttacagctcataaatgcaatgcggacccaaagagcaagcagcagcaagatatattgcaaa

SEQ ID NO: 927323 - DNA, 585 bp, Homo sapiens
acgaggaaacattctaccctagaaccttggtagggagggtagctctgctcataccttgattccagaccagaaaaccgatttcagacttctgacctccagaacctaagaacaaatgttttaagccacaaaatttgtagtgaattgttacagcagacacagataaccagataaaacactggaccttgaagctctccattctggtccttgtctcctgtgatggacagtctccaagatgctcccccaccacctctgccaatgacctccagccctggtgtggtcccctccaacactcaacaaggttgactttgtaaccagtaagacaccgtggaagtgacaagagtgtgaattctgaatccaggtcatggaaggtgttacagtttctaccttgccctctcctggatcacttgttctgtgggaagccagatgccatgttgcaaggayccctagcagttccaaagagaggcctacatggagaacaactgaggtctcctatcaacagacatgtgagtgagccatcctggaggtggatcctccagactcaggtctcaggtgacaacagctatgctgacatcttcactgtaactt

SEQ ID NO: 927324 - DNA, 440 bp, Homo sapiens
agtcacccccagggaatcaagtgtgattgttacttagaaccaagcggatggcctggaaaataggaaacccttgttcttaggcataaacgtgcacatatattctgatagctaggagaaaaaaaaaactaaaaaatattygcaagaccctcttcaggattgaagcattgaagatctctcttaacaggtaaatattatacctgagtccccacagaagcacatcctaagacaaatattcaagtgtaaatttttacctagggttaatcctaggtgacactgatagaagggtagggaagcaagatagggaagaatgaaaacgtggtatcagagggatagtattaaaaagtcaccactggggcaactggagctcatccctctgaaaaactcaggaaaataaaaatagaatgtatgcttcagagtcttcctagaaaaattgagggggc

SEQ ID NO: 927325 - DNA, 554 bp, Homo sapiens
aaaagtgtataaagtaagaaagttacagtaagctaaggttaatttattattgaagaaagaatttttttatacatttaatgtaggctaagtgtacaatgtttgtacatctgaagttgtgtacagtaatgccctaggcttcacactcactcaccattcacctacgaccacttgcagggcagcttccagtcctgcaagcttcattygtagtaagtgtcctaaaaaagtgcaccattttattttattttatgctgtatttctactatacctttgtactagtcagggttctcttagagaaacagaactaataggatatgtgtgtgcatatgtgtgtatacgtgcgtgtgtatacgtgtgtgtgtatatatataaaggggagtttagcaagtattaacttacacaatcgcaaggtcccacaataggctgtctgcaagctgaggaaggagagccggtccaagtctccagactgaagaacctggagcccaatgttcaagggcaggaagcattcagtacaggagaaagatgtaggctgggaggctaggcccatgtctcctttt

SEQ ID NO: 927326 - DNA, 554 bp, Homo sapiens
aaaagtgtataaagtaagaaagttacagtaagctaaggttaatttattattgaagaaagaatttttttatacatttaatgtaggctaagtgtacaatgtttgtacatctgaagttgtgtacagtaatgccctaggcttcacactcactcaccattcacctacgaccacttgcagggcagcttccagtcctgcaagcttcattcgtagtaagtgtcctaaaaaagtgcaccattttattttattttatgctgtatttctactatacctttgtactagtcagggttctcttagagaaacagaactaataggatatgtgtgtgcatatgtgtgtatacgtgygtgtgtatacgtgtgtgtgtatatatataaaggggagtttagcaagtattaacttacacaatcgcaaggtcccacaataggctgtctgcaagctgaggaaggagagccggtccaagtctccagactgaagaacctggagcccaatgttcaagggcaggaagcattcagtacaggagaaagatgtaggctgggaggctaggcccatgtctcctttt

SEQ ID NO: 927327 - DNA, 595 bp, Homo sapiens
gttctaagattctatcccatgtcacaatgggattatcaaaaaatttgtgaagacattctgaagtccccatagattgtcttctgaaccctggctacaaacaccccctgggtgttttaataaaattaaataaaattagtaacaattaatgctagaacaatgttaccagcttaaaatgaaggcatcctccttgtacataatttttcagtctgttaaatagaaaacaaacacaagaaagaagaaaaaacatctggaggtgataagactgcagttttgtttttaataatttacaactgatgcagaagctgctttcttcttgtgtcaaaagttgtgttcctcgagatcatgtcctttgcagggacatggatgragctggaagccgttatcctcagcaaactaacacaggaacagaaaacctaacaccacatgttctcacttaaaaatgggagctgaacaataagaacacatggacatataaggaggaacaacacacactggggcctgttggtggaggggtagcaggtgagagagcatcaggaagaatagctaatggacactgggcttaactcctaggtggtgggatgatctgcacagcaaa

SEQ ID NO: 927328 - DNA, 593 bp, Homo sapiens
atgaagaccaaagcctagagaatgagcttgtttccctaagattatacaactgtaaaatagtcatttgaggttcaaactcatgaccttatgactctgaagcctggagttaaccttgatgctgttactctgcatgccacattttaagtcacctggatcttttatgaaaacaagtgagctgtatatcatggatgtcccccagttagatatccctttaagagaacctactgcaaagagactgwgtcccttcagccaaacctgttgcatcctcagatcttccccaggtggaggcgtaaacactcaggccacacttccccggggctgctctcagacgaatactgaatactgagcacggtcgggttcctagtacaggtccattcctgccctacagtggaagcctattccaacaggtgactttggctcaaaaatgctgtcgtagtgcattcaggctgctctaacaaaaaatggcatagactgggtagcttataaacaacagatttttgtttctcactggtctggcagctaggaagtctgaaatcaaggtgctggcagattctgtttctggtgagggcccattttctggttcacaggcagtg

SEQ ID NO: 927329 - DNA, 642 bp, Homo sapiens
aagtattttatgtatcttaacagatttaaaatttgtgatataacatttaaatttttttcttttttttttttttcttttttgagatggagtcttgcactgtcaccaggctggagtgcagtggcaaatctcagctcactgcaacctctgtctcccgggttcaagcgattctccgacctcagcctcccgagtagctaggactataggcgtgcaccaccacgcccagctaatttttgtatttttagtagagatggcgtttcgccatgttggccagggtggtcttgatctcttgaccttgtgatccacccacctcggcctcccaaagtgctggaattacaggtgtgagccgctgcgaccggccacagatttaaaattttacctgcgtagggtacttaygagtggagcttgcaggactggaagttgctctgggtgagtcagtgagtggtgagtgaatgtgaaggcctaggaccttactgtacattgttatagactttataaacagcatatacttaggctacattaagtttattaaaattttttccttcagtaataaattaaggttagcttactataactttttaatttcatcagcttttaaattttcttaacttttgactcttttgtagtaatagctcaaaacacaaa

SEQ ID NO: 927330 - DNA, 649 bp, Homo sapiens
ctggaaaatcgggtcactcccaccctaatactgtgctcttccaatgggcttaacaaacggcacaccaggagattatatcccacacctggctcagagggtcctgcgcccgcggagcctctccctcattgctagcacagcagactgagatcaaactgcaaggcggcagcgaggctgggggaggggtgcccgccattgctcaggcctcagtaggtaaacaaagcgacagggaagctcgaactgggaggagcccaccacagctcaaggaggcctgcctgcctctgtaggctccacctctgggggcagggcacagacaaacaaaagacagcaatarcctctgcagtcttaaatgtccctgtctgacagctttgaagagagtagtggttctcccagcacgcagcttgagatctgagaaccggcagaatgcctcctcaagtgggtccctgacccccgagtagcctaactgggaggcacctcccagtaggggcagactgacacctcacacggccgggtactcctctgagacaaaactttcagaggaacgatcaggcagcagcatttgcggttcaccaatatccactgttctgcagccaccgctgctcatacccaggcaaacagtggacctccagtaagctccaatagacctgcagct

SEQ ID NO: 927331 - DNA, 614 bp, Homo sapiens
tgcctgaagccaacaactctagagtctcattcaaggcccacagtatactacctgggtaacatttattcagggtccaagggttctctagtcaacttgtgatgggtcctgtcagaactaggtccttttcttctaaaaaacaggttattcttgccctgggtgtgtctggaaatatagtctgggagctagggtattgaaagggacactcaggactgattgatgccatatcatactgtggctgaactagtatccgagatgcaagacaaaggcctctttaatctttcctctcctttcctcgagaggaaggaagtggtcccttttggagaatgagctttatagcctaaaattgggagagaggtgacacaagcactcccttagccaccttggctggtatctcagtatattgtagtccctccaagttcactggctctgagcycagttcagcactaggacttgccaaggagttgcagtccttgaggccttaactgcctttcacatttatttaggggcctagagcactttatcccatagctgtggggcttaccagaactcaatttccaaacactgggatgggcaattcacctctgacttggacaggtttaaattctccctccacg

SEQ ID NO: 927332 - DNA, 678 bp, Homo sapiens
tcaggagtttgagaccggcctggccaacatggcaaaaccccgtctctactaaaaatacaaaaattagccaggcatggtggtgcacacctaaaatcccagctactctggaggctgagacaggacaatcgcttgattgggggaggtggaggctacagtgagccgagacatgagtcactgcactccagcctggacgacagagctgagactccatctcaaaaaaaaaaaaaagcccagagttcaaggctgcagtgcccaatgattaagcctctgaatagccactgcattccakcctgggagcaaagtgagactgtctctaaaaaaagaaaaaatatatatatagtcttcttctgttttgttttgtttgtttaattcaaagttacatcacagttgtcctcgactacagaaacagatccagctacaatgtttaattcttctccattacttaaattaaatgctgccaccattgagtatggcattgtataatcatattccttcagcggttaaaatagaaaaaaaaatgcagatagagatgtgtataattggcatgcatagaaatacagaaccagttacatgacaaaagtaaacaaaactctaaaccttcatattttaaaaacaagattttccatttaacaagaattacattcattaaactggagagtatctcctatagagaaaact

SEQ ID NO: 927333 - DNA, 789 bp, Homo sapiens
gatcccaacaagtttctcatctccatctgtgatcatgtcagcctggatttcattttccatatcatcatcatgattttggtcaaagtcattaaacaagtctctagggagttccaaactttccacagtttcctgcctccttctgagccctgcaaactgttgcaacctctgtctattacccagtttcaaagttgcttccacattttcaggtatctttttagcagtgttgcaatctactagtaccaatttactgtattagtctgttttcatgctgctaataaagatatacccaagatttggcaatttacaaaagaaagrggtttaacggacttactgttccacagggctggggaagcctcacaatcttggcagaaggcaagaaggagcaagtcatgtcttacatggatggcaataggcaaagagagataacttgtgcagggaaatgcccatttttaaaaccatcgaatcccgtaaaatttattcactgtcatgaaaaaagcatgggaaaacccactcccatgattcagttatctcccaccacatcacttccagaaacatgggaattatgggagctacaagataagatttgggtgaggacacagagctaaatcataccactgggctttctttgttgagaggtttctggttactatttcaatttcatcttttcttgttggtcaggctttctatttcttcttgattttgtttaagcaggttgtatgtttttaagaatttattcccgaggagccaagatggccgaataggaacagctccggtctacagctcccagca

SEQ ID NO: 927334 - DNA, 584 bp, Homo sapiens
acctgttccaattagtgagattaaaatagtatcctgctgactatctgaagccaagttcaggctttctggatgatcacaacatcttgacaaagacagagaaaagggacttttggccccaacacagaattgaacacactggagtaaatatatttaggtgctgaagcacagctttcactaaaggcattctttatttttggacaagtgcttatactgaaatttctgtggaaggctgcagctcaagacaccatttaatttccttccattacaacaagcctacatacacatcttaattaggttcaactttactttagaaaaaacatgtaactcaaatttcttctccacccactawctgtccttgcctgaaattcccaaagaattcatattttctggatgttccactcttcggcctatcgtcatccattacctcagtttctcccaggtcatggtcgtcagaagactaaagaggaaataatacagagagaagcaagctcagctcatttccaagctccttcaagtatttccacctagatgagactgcctttgacttatcagattgggtttctgttcatcccagtaacaatcat

SEQ ID NO: 927335 - DNA, 634 bp, Homo sapiens
gttgctggatgcgaaccaaggtgtttgtaactaccaaatctttcatgatctttggtactgcttgcctctgtgacatctcaaagcgtccacatagggaaggaggcccaactaagtactatggggaaatttcacagggggaaaataatggtttccatagcttagaattttttcacaagggcactcaacaaacctgmaacaggtcactcatagttccaagtgggagactgttcaatgatgaagagttacttgactctcaggttgtaaatataacactcaaaacttgtgatttattgatctcacgcctggtgactattttatccttctgtaaatggaaccaaagtgctattaagtagtcttagtacatcaataatacatgtccctattaattatgtggttagtgaactttcagtgtgagacgtcatctgagtttatcaagtaacaattatgtagaacttaaaaagaaatccccatttcaattctttaagattatatactttatatcctttaacaacatctaaattcttcccaagttggataaacacattatcagattcattctctaaccacatttaactaatttacttccaaccccaccaccattaccttgcagaccacatagtcaaagaggtgttca

SEQ ID NO: 927336 - DNA, 555 bp, Homo sapiens
tttgtgaggaaggtgtcttgcttccccttcacctgccaccatgactgtacgttttctgtgaccttccccagccatgctgaactgtgagtcaattaaacctatttcctttataaattacccagtatcaggcagttctttataacagtatgaaaatgaactaacacatggagcatatcataatgttttatttttaccrtggagtaggaattatgagacaggtgagtcaggtcttatgaatgtattgcaggaaggtggagaaagagaagagaaatgagaaaacttttaaaacagagtagggtgtaactttgtttttgagacgaatctctctctgtcccttggctggagtgcagtggtgctatctcagctcactagaacctctgcctcctgggttcaagcagttctcctgcctcagcctccttagtagctgggactacgggtgtacaccaccatgcctggctaatttttgtatttttagtagagacggggtttcaccatatcggtcaggctggtctcaaactcctaaactcaggtgatccacccgcttcggcctcccaa

SEQ ID NO: 927337 - DNA, 555 bp, Homo sapiens
tttgtgaggaaggtgtcttgcttccccttcacctgccaccatgactgtacgttttctgtgaccttccccagccatgctgaactgtgagtcaattaaacctatttcctttataaattacccagtatcaggcagttctttataacagtatgaaaatgaactaacacatggagcatatcataatgttttatttttaccgtggagtaggaattatgagacaggtgagtcaggtcttatgaatgtattgcaggaaggtggagaaagagaagagaaatgagaaaacttttaaaacagagtagggtgtaactttgtttttgagacgaatctctctctgtcccttggctggagtgcagtggtgctatctcagctcactrgaacctctgcctcctgggttcaagcagttctcctgcctcagcctccttagtagctgggactacgggtgtacaccaccatgcctggctaatttttgtatttttagtagagacggggtttcaccatatcggtcaggctggtctcaaactcctaaactcaggtgatccacccgcttcggcctcccaa

SEQ ID NO: 927338 - DNA, 555 bp, Homo sapiens
tttgtgaggaaggtgtcttgcttccccttcacctgccaccatgactgtacgttttctgtgaccttccccagccatgctgaactgtgagtcaattaaacctatttcctttataaattacccagtatcaggcagttctttataacagtatgaaaatgaactaacacatggagcatatcataatgttttatttttaccgtggagtaggaattatgagacaggtgagtcaggtcttatgaatgtattgcaggaaggtggagaaagagaagagaaatgagaaaacttttaaaacagagtagggtgtaactttgtttttgagacgaatctctctctgtcccttggctggagtgcagtggtgctatctcagctcactasaacctctgcctcctgggttcaagcagttctcctgcctcagcctccttagtagctgggactacgggtgtacaccaccatgcctggctaatttttgtatttttagtagagacggggtttcaccatatcggtcaggctggtctcaaactcctaaactcaggtgatccacccgcttcggcctcccaa

SEQ ID NO: 927339 - DNA, 627 bp, Homo sapiens
agaggtagatgattcagggtgggacaggatccaaggctttgtaaccagagtggaactcttattcagagcttagtaagccaaggcaaaaggactctttgtgaaaggttcagtttataggatgatagccccatatgctctgtggcagctcctgggatggggcctcatcttcagccccggccctgattttgtaactggttatgtgcagatgtcaaagatggccccaagaccctgttccagcagcttaggtgatctgacatgtgggtcccaggcaggaggccactatgaactttataggctrcaaatgaacccatggtttgctttaaaggcccagcagagatttaagggtatggctgtaggaatagttactgctattgccctgccaccaggtgatccacttaatgcgtcagcctttgtatcccaagtcctccacctttctctgaccccttagactgctgggggccacagggtaaggcctggggctggattggacaggagcccttgagaggcttgtctgagtctgtgctccccaccttgagcacaggtcatggaaagtgacagaagcccttacctgcttcccccatggggagaatcggcttactccagcttgcggcacagggctgtccacca

SEQ ID NO: 927340 - DNA, 699 bp, Homo sapiens
gtgcaaagtatccccagagcataggatagcacacaccctccataggtatgtgctgtgattatgattgtccagcagagcccacctttaaacaagatacaatccttacaaatgccaagactgaggaggggttttcccaaaggatccactttgctacagtattgtgtgtttgtttggccatcagagaatcagaggagggaggtgtccagccagacacaagccatgaacactcgtgcctgcttccaagggctctggccacaargtggcaccatgcagcaacgcgtgtccctccagttgtcttctctcgggggtggttgaggggcagctctgctgcaagcaagcttattctgagagctcagcagatactgtgccaaaggccagatgcaggggctctttctcacctctcgccttttgccgagattttgcaatcatcgagattgctggtgcagccctcagacgcgatttctgcagccagcccttcatgctttctctgccttccctcctcagtgactctcttcttctccaaatcctggaaactcccacaaatgtcactttctctgggaagcctaccctaatcaccccagaatgcgttccctgaacaccgtgtgcttctagtattacacttacttatcaacaagtctttactgcgcgcctatattgatcagtgccaggcattgttctggggaaactgcagtagacagg

SEQ ID NO: 927341 - DNA, 699 bp, Homo sapiens
gtgcaaagtatccccagagcataggatagcacacaccctccataggtatgtgctgtgattatgattgtccagcagagcccacctttaaacaagatacaatccttacaaatgccaagactgaggaggggttttcccaaaggatccactttgctacagtattgtgtgtttgtttggccatcagagaatcagaggagggaggtgtccagccagacacaagccatgaacactcgtgcctgcttccaagggctctggccacaaggtggcaccatgcagcaacgcgtgtccctccagttgtcttctctcgggggtggttgaggggcagctctgctgcaagcaagcttattctgagagctcagcagatactgtgccaaaggccagatgcaggggctctttctcacctctcgccttttgccgakattttgcaatcatcgagattgctggtgcagccctcagacgcgatttctgcagccagcccttcatgctttctctgccttccctcctcagtgactctcttcttctccaaatcctggaaactcccacaaatgtcactttctctgggaagcctaccctaatcaccccagaatgcgttccctgaacaccgtgtgcttctagtattacacttacttatcaacaagtctttactgcgcgcctatattgatcagtgccaggcattgttctggggaaactgcagtagacagg

SEQ ID NO: 927342 - DNA, 699 bp, Homo sapiens
gtgcaaagtatccccagagcataggatagcacacaccctccataggtatgtgctgtgattatgattgtccagcagagcccacctttaaacaagatacaatccttacaaatgccaagactgaggaggggttttcccaaaggatccactttgctacagtattgtgtgtttgtttggccatcagagaatcagaggagggaggtgtccagccagacacaagccatgaacactcgtgcctgcttccaagggctctggccacaaggtggcaccatgcagcaacgcgtgtccctccagttgtcttctctcgggggtggttgaggggcagctctgctgcaagcaagcttattctgagagctcagcagatactgtgccaaaggccagatgcaggggctctttctcacctctcgccttttgccgagattttgcratcatcgagattgctggtgcagccctcagacgcgatttctgcagccagcccttcatgctttctctgccttccctcctcagtgactctcttcttctccaaatcctggaaactcccacaaatgtcactttctctgggaagcctaccctaatcaccccagaatgcgttccctgaacaccgtgtgcttctagtattacacttacttatcaacaagtctttactgcgcgcctatattgatcagtgccaggcattgttctggggaaactgcagtagacagg

SEQ ID NO: 927343 - DNA, 772 bp, Homo sapiens
tggggtctcttgctgcgctggggaagctttgtttttttgctctttgccgtaaatctttgggtccacactacctttatgagctgtagcactcaccgtgaaggtctgcagcttcactcctgaggtcagcaagaccacgagcccaccgggaggaatgaacaactccagacgagaggaacaaacaactccagacacgccgccttaagagcttgtaacactcaccacaaaggtttgcagcttcactcttgaagccagcgagaccatgagcctgccagaaggaagaaactctgaacacgtccgaacatcagaaggaataaactctggacacaccatctttaagaactgtaacactcactgcgaggatccgcagcttcattctggaagtcagtgagaccaagaacccaccaattccggacacacaatcatggcagaaggtgaaargtacatctcacatggggtcagacaagagaagagagcttgtgcagggagactcatctttataaaaccatcagatctcatgaaacttatccactaccgcaagaacagcaagggaaagacctgcccccatgattcaattacctcccatctgtcactcccgcaacaccttggacttcaagacaagattaggtagggacagagccaaaccatatcaacatcattaattatatagagaaatgtaaatcaaaccaccacaatgagataccatctcaaaccagtcagaacggctattactaaaaagtaaaaaaaaaaaaaaaaaaagaaagaaaaaaaacag

SEQ ID NO: 927344 - DNA, 565 bp, Homo sapiens
gtcatcatctcttgactccctgggtctgaccaaaatgacagaggctcctcacactaaagtgtactgggagaccacagcaaaaaagaggcaaaggacttctcccatttgactctaaccactttataaaaggtcacatttttgtcatagcagtagggagatgttagtgtggaaatctcaatgcagcttccattccatttcgtttttcaggccacagcttaaatgaccctttctaaatggtaaaccacattgaaaagctattaaagcttaatataggcatactctgtgacccagcatttttaattctgaatatatatatatgyatatatacatttatatgatatattcatatagcatatacataatatatataatagaaatccattcatatgtttaccaaaaggcatgtacaggaatgttcatagcagtactatttatttatttatttatttatttatagagacagagtcttcctctgttgcccaggctggagcacagtggcacaatcacagcttgctgcagtctcaaactcttgggctcaagcaatcctcctgcttcagtctcccaa

SEQ ID NO: 927345 - DNA, 565 bp, Homo sapiens
cttctctaatcagcagtgatgatgagcattttttcttgtgtctgttggtcgcataaatgtcttgttttgagaagtgtctgctcatatccttcgcccactttttgatggggttgttttttttttcctgtaaatttgtttaagttctttgtagattctggatattagccctttgtcaggtgagtggattkcaacaattttctcctattccgtagactgcctgttcactctgatgctagtttcttttgctgtgcagaagctctttagtttaattagatcccatttgtcaattttggcttttgttgccattgcttttggtgttttagtcatgaagtctttgcccatgcctatgtcctgagtggtattgcctaggttttcttctaaggcaaggcaaataatcgtatacatgtcattttgcacctgtatgaacacacctgtaagataaatttcttaaagtggaatgctagattagaggtatatggatctgtatttttttatccattgtgccacgttgccctccacaatatgtgtgtagtacataatttttaaatgactacatattattcta

SEQ ID NO: 927346 - DNA, 624 bp, Homo sapiens
gtgcagcacaccaatatggcacatgtatacatatgtgactaacctgcacgctgtgcacatgtaccttagaacttaaagtataattttaaaaaaaagtacctaatgtaaatgacgagctaacaggtacagtaacaccaacttggcacatgtatacatatgtgacaaacctgtacgttgtgcatatgtaccatagaacttaaagtataataaaaaataaaaagtaaataaacaaaagaaaataaacagaaacaaatgaattaaatgaatgatatcctctttggtaaagcacctgttaaatcttgcytgttgctctttttgttgggttatctctttttcttatttgtaagaaaataagagaattttatataaatgggtaggagtcctttgttaagcaggtgccattgcaaatattttctcctagacctggcttgccttttgacattccatgtggtttgtttgtttgataaacataagttctcaattttattaaactccaattcataagtatattcctttttggtaagtactttgttgtctttttaagaaatctttgcatactccaaggtatcagaaattttctgttttctcctaaagctttattgtcttaccattcacatttagatc

SEQ ID NO: 927347 - DNA, 607 bp, Homo sapiens
gcagatatctcttcagtatacggatttccttttttttgatatagatttagcggtgggattgctggattgtgtggtagctctatttttagtggttttctttctttttgtttgtttattttatttctttattcattttttttgagatggagtcttactctgtcacccaggctggagtgcagtggtatgatctcagctcactgcagcctccacctcctgggttcaagcgattctcctgcctcagcatcctgagtagctgggactacaggcaccygccgacacgcttggatgatttttgtaattttagtagagatggagtttcaccacgttggccaggctggtcttgaactcctgacctcagatgactcgcccacctcagcctcccaaagtgctgggattacaggcatgagccaccgcacctggcctattctacttttttttttctttttcttagggaaactccatgttgttcctcaaagtggctctattaatttacattaccaccaacagtgtacaagggttccatggggattacttcagattgagtggtcagagagggctcctttgagaagacttctgagaattggccatgggaaggtgtggggagaag

SEQ ID NO: 927348 - DNA, 722 bp, Homo sapiens
ggcgcctgtaatctcagctactcgggaggctgaggcaggagaattgcttgaacctgagaggcggaggttgcagtgagtcgagattgtaccactgcactccagccctgggcgacagagcaagactccatctaaaaaaaaaaaaaaaaaaaagtctcagggctgtctctgcactgctccaggttcctgaggacggcggttggggctgggggagtcttctgtccctggggtaggctgagaagcaagagctccttttcccaactctgcccaaagctggaaaggttgttagagctgctaagaaagctggcatctgcctctccttttgctcatcttcctttctggtttccatgggaatctgtggctcaggatgatcaggggttgacaggatggcgctgtggaaggagtctgtgtcaggcacagccatcccacrtgggaaggagccggctggtaagaaagtgagttccctgtccctgggagtgtgcaagcagggtaggggctgaatggctagagtgactccagaaaggggttcagatggggcagaggaagcagtctggaggccacttccctgagacaatcatgttttgtgtgattggctctgggggccccaccagccccaccttccagacgtccctgggcctcacaaagggggttgctgcaccctaggcactgcctctgatccagccccaactcctgtgctctgtgcctggcctatgctgaacacggac

SEQ ID NO: 927349 - DNA, 636 bp, Homo sapiens
tgagggtagacatgtagaagaacttcctggaagccaggtctgggaggtactagaatagggctcagctttgatgaatagacatgcattgggttaaagtgccctgcctggagatgggaggctggaaaaatggcctctagcagccttttagcagctttctttctgtcccatcccaataccatggatgagttgcaggtttggggcaggtttggggtgatcatggttgcctgagcccagagtgccttactggggagattgtgcccctcatcatctgttccaggccactcccctacctggcttcaatggccactgttcatcccttaggcaggaggatgggtaaaccagcccttgaggcccaaagtagcagggtgttagttgcaccagaaagagggaagcaggggacgtttgaagcctggagaagggagtctgatccagcctaaggggcatggaagacttcctggaggaggagatkccctaactgagtcctgatagccttgaatgtcctcttccctactctaaacccggccaagggcagcctctgctccaggaaatatggccaactcagaatgtgaccttcccatccctccagagcccattgtccctgaatctgcttgatggatgaaccaccggaggcccaga

SEQ ID NO: 927350 - DNA, 731 bp, Homo sapiens
gagccacgatcacaccactgcactccagcctggaccacagagcgagactctgtctcagaaaacaaaaacaaaaacaaaacttggattcagaaaaaggaacgacaatgtggggtgggtcttaatggagtttgcaaaaccaccagtgatgaacatggtctaatgctttgctacccaaagcgtggtccatgcaccagcaccagcagcatcacctgggagcatgtcagcaatgcagaatcccaaggcccagcccagacctatgactcaggctctgcattttaggaagatcccccagtggatttatgtgcacactggagtttgagaaacactggtacggtttgcttctaaagccccgtgtgactttttgtgacctacacaaatggccattttaaaggaaatttcaacttcaactcaaactatcacctgttctgcacaaaaaatgcttcagatccaggatatcacattcttcaatcaggctctggtcagattctatcaaagacarcccataggtatacaaatgaattgcgtttggttaatacagttaaattttttcccccaaatttgttatcaccatttaaaaactggaggtttcaggccgggcatggtggctcacacctgtaatcccagcactttgggaggccaaggaaggtggatcacttgaggtcagaagttgaagacgagcctggccaagatggtaaaaccctgtctctactaaaaatacaaaaattagctgg

SEQ ID NO: 927351 - DNA, 704 bp, Homo sapiens
gagggagagaaaactaggtaatcttcttcctttcctacatccttgtattcccgagtcctggcaaccacaacagagtgccacccagggtgtcaaagcagatttcacccatgttaacaggaggtacaagggtgagaatatctgctcttacccacatacaccccacctcccctgctgtcagtagcctttgaattccctagacctcatttatgccatggatactagcatgatctttatccatgaaacacaaagcttggcttaatcggcaggaattagtcatgctcacctgctctatgccttttaacttccattatcatctgcctctggatccctcagatctacttctctttcctagggctttcacctgaagcttggaattgagtttgggccaaaaatgtgttttgggggtgttgtatggactccttctcataagccaaatgctaaggtgaagctgtggaawtgagtcctcccccaacaagggagagaaaaggatctcttgtgacgtgcccagatatctggtggctatagtcatgttgttaagatttgcatgcgtggagcttgactttggttagctcccttggtcttactttcccaaaaaggaaacctccaggtaatgtgcaccctatttatatccataaactggcaagatttgcaggatagttgctcagaactagaatattgatccagatttttacattaacaatccc

SEQ ID NO: 927352 - DNA, 704 bp, Homo sapiens
gagggagagaaaactaggtaatcttcttcctttcctacatccttgtattcccgagtcctggcaaccacaacagagtgccacccagggtgtcaaagcagatttcacccatgttaacaggaggtacaagggtgagaatatctgctcttacccacatacaccccacctcccctgctgtcagtagcctttgaattccctagacctcatttatgccatggatactagcatgatctttatccatgaaacacaaagcttggcttaatcggcaggaattagtcatgctcacctgctctatgccttttaacttccattatcatctgcctctggatccctcagatctacttctctttcctagggctttcacctgaagcttggaattgagtttgggccaaaaatgtgttttgggggtgttgtatggactccttctcataagccaaatgctaaggtgaagctgtggaattgagtcctcccccaacaagggagagaaaaggatctcttgtgacgtgcccagatatctggtggctatagtcaygttgttaagatttgcatgcgtggagcttgactttggttagctcccttggtcttactttcccaaaaaggaaacctccaggtaatgtgcaccctatttatatccataaactggcaagatttgcaggatagttgctcagaactagaatattgatccagatttttacattaacaatccc

SEQ ID NO: 927353 - DNA, 630 bp, Homo sapiens
aggaagtgtagagattttttttggtaggattatgtgctttgtcttttttttattattatactttaagttctagggtacatgtgcacaatgtgcaggtttgttacatatgtatacatgtgccatgctggtgtgctgcacccattaactcgtcatttacattagatatatctcccaatgctatccctcccccttccccccaccccacgacaggccccagtaygtgatgttccctttttgtgtccaagtgttctcattgttcaattcccacctatgagtgagaacatgcggtgtttggtttttcgtccttgcaatagtttgctgagaatgatggtttccagcttcatccaggtgcctacaaaggacatgaactcatcattttttatggctgcatagtattccatggtgtatatgtgccacattttcttaatccagtctatcattgttggacatttgggttggttccaagtctttgctattgtgaatagtgccgcaataaacatacatgtgcatgtgtctttatagcagcatgatttataatcctttgggtatatacccagtaatgggatggctgggtcaaatggtatttctagttctagatccctgaggaatcgctacaccgtcttccacaat

SEQ ID NO: 927354 - DNA, 630 bp, Homo sapiens
aggaagtgtagagattttttttggtaggattatgtgctttgtcttttttttattattatactttaagttctagggtacatgtgcacaatgtgcaggtttgttacatatgtatacatgtgccatgctggtgtgctgcacccattaactcgtcatttacattagatatatctcccaatgctatccctcccccttccccccaccccacgacaggccccagtacgtgatgttccctttttgtgtccaagtgttctcattgttcaattcccacctatgagtgagaacatgcrgtgtttggtttttcgtccttgcaatagtttgctgagaatgatggtttccagcttcatccaggtgcctacaaaggacatgaactcatcattttttatggctgcatagtattccatggtgtatatgtgccacattttcttaatccagtctatcattgttggacatttgggttggttccaagtctttgctattgtgaatagtgccgcaataaacatacatgtgcatgtgtctttatagcagcatgatttataatcctttgggtatatacccagtaatgggatggctgggtcaaatggtatttctagttctagatccctgaggaatcgctacaccgtcttccacaat

SEQ ID NO: 927355 - DNA, 560 bp, Homo sapiens
aaaaaaaaaaaaatgaaaggtttctgctcaccacaaactagaagggaatgatggtggtcttgtttgggactctttacctgcagcaagaacctgggaaatgtgggggtgattttggtgtgtcatgtacagttgggctggggaaagcgaaaaaagtgaagaagaggaggtgaggagggggaggtcagcacaggaagaagggtcctggccacctttgacccatacktggggtaaaggacctgcatctggccaggctctgtggcttatgtctgtaatcccagcactttgggaggctgaggtgggaggatcacttgaagccaggagttcaagaccagcctgggcaacatagccagatcctccatctctacaaaaacaaacacaaaacaaaaacagaaaagggatctgcatctttacatggtgcaaataaagaaaactagaagatagggagttaacttgagacatactattatgtgctccttttctccccttgaaatgttgatgcaggaagtcagggtggtgaaaaataggcacaatgtcacactcagcttcacaagatttgaaag

SEQ ID NO: 927356 - DNA, 560 bp, Homo sapiens
aaaaaaaaaaaaatgaaaggtttctgctcaccacaaactagaagggaatgatggtggtcttgtttgggactctttacctgcagcaagaacctgggaaatgtgggggtgattttggtgtgtcatgtacagttgggctggggaaagcgaaaaaagtgaagaagaggaggtgaggagggggaggtcagcacaggaagaagggtcctggccacctttgacccatacttggggtaaaggacctgcatctggccaggctctgtggcttatgtctgtaatcccagcactttgggaggctgaggtgggaggatcacttgaagccaggagttcaagaccagcctgggcaacatagccagwtcctccatctctacaaaaacaaacacaaaacaaaaacagaaaagggatctgcatctttacatggtgcaaataaagaaaactagaagatagggagttaacttgagacatactattatgtgctccttttctccccttgaaatgttgatgcaggaagtcagggtggtgaaaaataggcacaatgtcacactcagcttcacaagatttgaaag

SEQ ID NO: 927357 - DNA, 564 bp, Homo sapiens
gagaacatttgagccagtgccagggacccgagatgggagtctactgtcatgtaagaggaacagcaaaggcggccaatgtggctggagccaagtcagagaaagagatgttagtagggatgaagctgaggggtgccacagatcatgtaggactttgagaggaatgaggggccacagggagactgggaaatacaagtgatgtcaactgatctgtgttgtgctgtgaaaaagttataaggcatggaaagggtggaggcaaggaaacggtctagtaggctacttcaataatctagttgagaagcaatggtggcttggaccaggatgatggtagtggagaagtcattagattgtagacmcatactgtggtggagtcaatagaatttcctcttagatcagatgtagtataagacagaaagaaaggagacaagaatgatgtcaagtggcctaagcaactggaaagatgaagttgccatcaacccagatggcgaaagttgtaggaaagaaggttttcaggagcaaggctggaattgagttctggacatgctacgttagatatctaagtggaga

SEQ ID NO: 927358 - DNA, 631 bp, Homo sapiens
taagagtgaattgatcctggattatgcagatggacccaatgtgattacaagagtccttaaagctggaagaggaatgagaagggagaactatagaaatggcagtgtaaggatgactaggttgagagttgccagctttgaggtgaaggaattggggccatgagccaatgaatgtgggtggcttctagagcttgtaccaagcaaagcaagggaatgaattctcccctagagctttcaaagggaacccagccctgctgacaccttcattttagccagtgaagcccattttggatttccgaccttcagaattgtaagattaaaaatttgttggmcagccatggtggttcacggctgtaaccctagcactttgggaggcggaggcgtgtggatcacttgagcccaggagttcaagaccagtctgggcaacaaggagaaaccctgtgtctacaaaaatacaaaaattagacaggcatgggggtgcatgcctgtagtctcagctacttaagaggctgaagtgggaggattacttgagcctgggaggtggaggttgcagtgagctgaggttgcaccactgcactgcagcctgggtgacagagcaagactctgtctcaaaacaatgacaacaaaaatatgt

SEQ ID NO: 927359 - DNA, 648 bp, Homo sapiens
cacagtgatgcaagggatggggtcccaaggcgttgggcagccccttcactggctggcattgagtgcctgaggcttttccatatgcagaggacaagctgtcgatggatctaccattctggggactggaggacagttgccttcttttcacagctccactacgcagtgccccagtggggactctgtgtgggggccacgccccacactttcctttcacactgtcctagcagagtttctccatgagggctccacccatgaagcagacttctgcctggacatccaggcatttccatacatcctctgaaatctaggcagaggttcccaaacctcagttcttgacttttgtgcacctgcaggtccaacaccatggggagaccagaaaggcttgcagcttgcaccctctgaaacaacaatctgagctgtaccttgaccccttttagttatggmtgggacacagggtgccaaaccctaaggctgcacagagcagcactggggccctgggcccagcccatgaaaccattttttccctgctaggttctgggtctgtgatgagaggggctgtcttgaaggtctctgacatgccctggagacacagacaccttccccattgtcttggtgattaacagtggggtgctaatgacttatgcaaat

SEQ ID NO: 927360 - DNA, 730 bp, Homo sapiens
caattggagtcaccacttggttaagcttatgataatccactgtcattctccaagatccatttgtcttctgcacaggccaaataggagagttgaatgggggtagagtgggaatccctatcactgcatctttcaagtccttgatggtagcactaatctccacaatccatccagggatacaatgttgtttttgatttactatctttccaggtagaggcagctctaatggcttcaatttgtcctttgccaccataatagccytcaccctaccagtcagagagccaatgtgggggttctgccagccactaagtatgtctatgccaattatgcattctgacactggggaagtgaccacaggatgagtctggggacccactggacccactataagttggacctgagctaaaatcattaattacctgacctccataagcccctactttaactgcagaaccacaatgacattttgggtaccctggaatcaatgtcagctcagagccagtgtccagtaatctccaaaatttctgatcatttccctatccctaatgcacagttaatctggtaaaagaccaaaggtcttattggggaagaatgggagaaagattaacagaataaactgtcagtgatttagtggaatctttcctccaggtgactcagcttcaccttcattcagtgggttctgggtctgtaaactagctcaagtctggaaattgattgagggactgtggttctc

SEQ ID NO: 927361 - DNA, 598 bp, Homo sapiens
atcccagcatttgggaggccaaggcgggcaggtcacttgagcccaggagtttgagaccagcctgggcaacatggcgaaaccccacctgtacaaaaaatacaaaagttagctgggtgtggtggtgtgtgcctgtagccccagctacttaggtggttgaggcaggaggaacgcttgaacctgggaggctaaagctgcagtgagctgagattgtgccaccgcatttcagcctgggcaatagagtgagaccctgtctcaaaaaatatatatatataattacttagaaattaaaaaacaaatgttcargatgagtgctcaatttacctttactaggtccttctctgtaaaatataatgattggagtcatagattgatttattcatttgttcattcatacctgaaataattgtcaatggctcaccaagtctcagttctgatgccaaggtgttagaaacacaaaatcaaaatagacttttgtcttgccttcagaaaatgtattttcatgtaagggagacagttaaggaaaccaaggtctatgaaagggctttgcctttttagatgatcagtggagggagtctaaaccagacaggaataatgcaaa

SEQ ID NO: 927362 - DNA, 598 bp, Homo sapiens
atcccagcatttgggaggccaaggcgggcaggtcacttgagcccaggagtttgagaccagcctgggcaacatggcgaaaccccacctgtacaaaaaatacaaaagttagctgggtgtggtggtgtgtgcctgtagccccagctacttaggtggttgaggcaggaggaacgcttgaacctgggaggctaaagctgcagtgagctgagattgtgccaccgcatttcagcctgggcaatagagtgagaccctgtctcaaaaaatatatatatataattacttagaaattaaaaaacaaatgttcaagatgagtgctcartttacctttactaggtccttctctgtaaaatataatgattggagtcatagattgatttattcatttgttcattcatacctgaaataattgtcaatggctcaccaagtctcagttctgatgccaaggtgttagaaacacaaaatcaaaatagacttttgtcttgccttcagaaaatgtattttcatgtaagggagacagttaaggaaaccaaggtctatgaaagggctttgcctttttagatgatcagtggagggagtctaaaccagacaggaataatgcaaa

SEQ ID NO: 927363 - DNA, 754 bp, Homo sapiens
tgcacccattctctcgacgcctaagcactccaattcacctgcaagtcttcgtggcctgacgtctccaaacccgccaccctttatggctcagcctggggtggcccctaacaaggagtcccaaatggggattgatgccacttcttcagtacaaagaaagattaaagcgacactgggtaaaaacactccatcccggccgggcgcggtggctcacgcctgtaatcccagcattttgggaggccgaggccggtggatcacctgaggtcaggagttcaagcccagcctggctaacatggtgaaaccccatctctactaaaaaatacaaaaaattagctgggcatggtggcggctactccagagggtgaggcaggagaatcgcttgaatacaggaggcggaggttgcagtgagccgagatcgtgccactgcactccagtctgggcaacagagcgagactctgtctcaaaaaaataaaaaataaaaaacaacactccatcccggcagccgttcctccacgtgcattcgcttacaaggtgcagatgtaatacctgcttttaaattcaattaagtcagaatcagttytgctcctagaatacattacccagttggagacagccgggggaagagggaaaaaaaaaaaaaagatggcaaacaaaaaaaaaaaaaaaaaaaccccacacacaaaacacaacgcagacctatttagagatttccctctaaatggattttaattctctcaatttatcagaggccagagga

SEQ ID NO: 927364 - DNA, 394 bp, Homo sapiens
gcccagaaggtttgctgtgagaacacctgtagtggaacatggccagggacgccctaccccatagggttcacttgctcccgtaatattttagccctaggggaattgtgggacctgaactcagcagggtggtttgacccatccagagcacccgttggtctactggcttctctcaggaccccagcctagccacgccttcttacagggtagcctcagawgccctgggggcatgcatgacagcttctgtgctggtagactatgcttgactggcagaaagctccagcagggtagcccccactgccacgcaccagcctacccactccctccccacactgaagctttccctgggcccatggcaaagccccacattgctttactggtgcatgaatgcacaggt

SEQ ID NO: 927365 - DNA, 610 bp, Homo sapiens
aaagagtacaaaagagaaaaattttaaagctgggtgtccagggaagacatcacatgtgtcagcaggttccatgatgccccgcaagcctcaaaaccagcaagtttttattagtgattttcaaaaggggagggagtgtacaaatagggtatgggtcacagagatcacatgcttcacaaggtaataaaatatcacaaggcaaatggaggcagggcgagatcacaggaccagggcaaaactaaaattgctaatgaagttttgggcacgcattgtcattgataacatcaggagaggagacagggtttgagagcagacarccagtctgaccaaaatttatgaggtgggaatttcctcgtcctaataagcctgggagtgctatgggaaactggggcttatttcattccttatctactataaaagacagacgtccccaaagcggccatttcagaggcctccccttaggaatgcattctctttctcagggattttccttgctgagaaaaagaattctgcgatatttctcctattcgcttttgaaagaagagaaatatggctctgttccacccggcccacgggcagccagactttaaggttatctcccttgttccctgaa

SEQ ID NO: 927366 - DNA, 708 bp, Homo sapiens
tgcctgaacatttttctttggtgtctccactgctaggtgagctttctggcagctctgtgactcttgagttcttctcttgaacaactccattcgcccctcccttccttatttgatggtgtggaatccactcccctgcctctccctgtcttccatacctcttgggacaaacaaaatttggccatgtagacaggtcccaattttgtaaataacttgaatccagtgtcttgtataagtcactttgtgtgttgtctgttgtgtctagcaagctatcagattggcttataaataaaagagttctcataaattaaacaaataacactagtctaaaattgttagtttaaaaaatgttgtgtttttaaattttaactttaatattttcaccttggtaaatgactggtgcttataggctttagaatggctaaagtggctttaaaatgcaagctttttatagtaaataatcttaaaattgtggtacgggttctcatctatagaatgccaaygtctggtgggcagttaagaatttcttactcctacctttatataaaatgtgccaaagaagatgtatgctttattgggaaataattgtttttgtctaacttggaagttattaaaagacagattcaaaatataaagaaattagtgagtagaaaagagagatgtgaagaaagttatagacagaagttttttttgcaaaaaattatataaaga

SEQ ID NO: 927367 - DNA, 652 bp, Homo sapiens
gattcagaactttaggtgctgtgtgtggaacaaaaaaagaaacgtagcctcaaaccaaccaacaacaacaacaaaaaaatgtggcatccaatgatacatgtacactattgtcagtttaaaaacgtgtgtatacattgaatatagcagaggcctttttggctttgtttttcttttatatgtttgctcccagagctgttttttaaactgatgatgtctcttaacaccatcagttaagagacctcctgaacactggcgctgcctctgttactcgaaaatcccacacacactccaacctcatagccacctgacctgatccttttgctcaaaagagccttcatggaccaccttatataaaagcgaggctcaaccttgaccccagcrctccctatcccccttccctgctttattatttttgtagcacttatcattatttgacttactctatagtttacatatttgcttgttgtctattctttcccactagaaattaggcagagattttttttttactctctttactcctgcatccctaatccctttaacagtgcctaacatatactaggtagtcaataaatatttcttgaatgaataaataaatgaatcttaaaatcaatgatctatatgaattgagaggctaaaatcattctggaga

SEQ ID NO: 927368 - DNA, 437 bp, Homo sapiens
gtgcgaaaacccaacctcaatcatcttggggtttcccagggatcttttccttggatccttagcccctgtcttcaccacaagcacccacccacactcggtggcacttgtagctgagaatagcaccacctctgcataagagaaattttagagaagacaccagatcctccttccggggsatgataggatgagggccaccagggcctgtccatccaggctaagctgagccagtgccctaggcaggcctgaagcctcaaaggacagaatgagagaatgagccctgacacatgaaagcccccaatggcccacaaggcttttcctttcctcgatgtctgatttttcacaactgtcctgcaaggctcagaggacagaaagtattatcttgtttgtttgtttcacagataaggaaacccagttcagaggggtaaagactcccccaa

SEQ ID NO: 927369 - DNA, 570 bp, Homo sapiens
gttagccatcaagttcccatgtgcagaagtgccttgctcagcaggggcaaaatcagcacgtctgtggcaacagcaacaatgaataatatatgatgttaaatcccaggggttcagcagtctccactgaggtcttatcaaattaaagcttcaaggggattcatatgaacatcccaggagactcaaggactcagtcgcttttcagagggtgggcagccaatgctagggaccagacagtaggcttttttctttggtttcttaccggaagcacactagggcggggctctgcggtgggttttccagaatgcagagaagctgggagcccctctcagcacttggtcagcctcttaggggactgagaactgtaacaactcctaccttttaaaacattgacgaggtcagggtgtttgacagcctamccaggcaaagaaaatatctgtgcaaggctagcattcttccagagctctggacagtaatcgtatgccagattttccatgcagtggattctagctgcaggaactatatggcaaggctggagtccaaggaacccatgattaaattctgttttcctgc

SEQ ID NO: 927370 - DNA, 566 bp, Homo sapiens
ccttgaagctgggagtggggtttagggacgcgggtctctgcgtgcatcctaagctctgagagcaaacctccctgcagggtcttgcttttaagtccaaagcctgagcccaccaaactctcctacttcttcctgttacaaattcctcttgtgcaataataatggcctgaaacgctgtaaaatatcctcatttcagccgcctcagttgaacttctcccctatgaggtaggaagaacagttgtttagaaacgaagaaactgaggccacacagctaatgagtggaggaagagagacacttgtgtacaccacatgccttgtrttgtacttctctcaccgtgtaacctcctcatgtcctctctccccagtacggctctcttagctcagtagaaagaagacattacactcatattacaccccaatcctggctagagtctccgcaccctcctcccccagggtccccagtcgtcttgctgacaactgcatcctgttccatcaccatcaaaaaaaaactccaggctgggtgcgggggctcacacctgtaatcccagcactttgggaggcagaggcag

SEQ ID NO: 927371 - DNA, 632 bp, Homo sapiens
agctactcgggaggctgaggcgggagaatcaattgaacccgagaggcagaggttgcagtgagccaagattataccactggactccagcctggatgacagagctagactctgcctcaaaaaaaaaaaaaaaaagcatattgttttaagacaccacatctgaaggggaggttccaagatggctgaataggaacagctccagtctacagctcccagcatgagcaacacagaagacgtgtgatttctgcatttccaactgaggtagcgggttcayctcactggggcttgtcggacagtgagtgcaggacagtgggtgcagcccacagatcgtgagccgaagcagggcgaggcatcgcctcacccaggaagtgcaaggggtcagggaattccctttcctagccaagggaagccatgacacatggcacctggaaaatcaggtcactcccaccctaatagtgcgcttttccaatggtcttagcaaatggcacaccaggagattatatcctgcgtgcggctcagagggtcccatgcccacagagccttgctcactgcaagcacagcagtctgagaccgaactgcaaggtgacagtgaggctgggggaggggcgcccgcaattgctgaggcttgagtaggt

SEQ ID NO: 927372 - DNA, 626 bp, Homo sapiens
agctactcgggaggctgaggcgggagaatcaattgaacccgagaggcagaggttgcagtgagccaagattataccactggactccagcctggatgacagagctagactctgcctcaaaaaaaaaaaaaaaaagcatattgttttaagacaccacatctgaaggggaggttccaagatggctgaataggaacagctccagtctacagctcccagcatgagcaacacagaagacgtgtgatttctgcatttccaactgaggtagcgggttcatctcactggggcttgtcggacagtgagtgcaggacagtgggtgcagcccacagatcgtgagccgaagcagggcgaggcatcgcctcacccaggaagtgcaaggggtcagggaattccctttcctagccaagggaagccrtgacacatggcacctggaaaatcaggtcactcccaccctaatagtgcgcttttccaatggtcttagcaaatggcacaccaggagattatatcctgcgtgcggctcagagggtcccatgcccacagagccttgctcactgcaagcacagcagtctgagaccgaactgcaaggtgacagtgaggctgggggaggggcgcccgcaattgctgaggcttga

SEQ ID NO: 927373 - DNA, 678 bp, Homo sapiens
gggtctgatcactttctgggaaattgtaattgtgcatgtgtatgtttagaaacaggaggccttccagtccagattctggtcttggtatttggaaggaccaggccttgattttgagcagaaataaccacgttcttctgagctcctggtgttttgaccccgtagcagccgcagcccaaggcccgcagcacctccttagaatcccagtttgctgccagcacctaattggtatgctaatgcccagagctgcctcaatttgtaattcttccctggaaatggtattcagatttctgcatcccctctctactaagagaaggacgctgggagatttttttttcccttcgtctggtcaaacaggtaaaataaacttaactctggtgacggcagacacatatcccctccctgaggccttctttagtctgaacggaaaagcggaagcatggccaagtgaaaatactgatctttccatttgccgacgaggagcaggggccgggggagaggccaggttccttttacaaactgttgttctmaattatcaatttccagccctttgtgcaaactcagggcgatgccgttccaacatctttacttagaacttggggggaggctcccctttgcttaagataaccccttttctttgtatttgaaaataaatgtaaagtttaccttgggaacaaatga

SEQ ID NO: 927374 - DNA, 745 bp, Homo sapiens
tcaattggcattactctgcaatgcacggacaacattactggcaaatgctgtagtttctatatctgaccctccaaacttcatgttgaaatttgatctgcaatgttggaggtcaggcctgccggcaggggtcatggtggcttggtgtcatccttgcagtattgagtgagttctccctctattagttccctcgagagttctttctagagatggtttcttagcaactttttctcttgcttcctctcttgcccacgtgatctctgcacagccagctctccttttccttcggccctgagtgaaagccacctgaagtcctcaccagaagcagacgttggcaccatgcttcttgcaaagcctgcagaaccatgagccaagtgtactagggttctctagagggacacgactaataggatagatgtatatctggaagggagtttattaaggagtattgactcayatgatcacaaggtgaagtcccaccataggccgtctggaagctgaggagccaggaagccagtctgagtcccaaaacctgaaaattagggaagccgacagtgcagccttcagtctgtggccaaaggcctgagagcccctggcaaactactagtgtaggtccaagagtccaaaagctgaagaacatgcagcctgatgtttaaggtcaggaagcatccagcatgggagaaagatgaggtagaagactcagcaagttggcttttcccaccttcttccatctgctttatcctagccg

SEQ ID NO: 927375 - DNA, 586 bp, Homo sapiens
atatttcttggaggctttgttggttactttttactttttttctctaatcttgtattctcactttatttcattaatttgatcttcgatcactgataccctttcttccacttgattgaattggctattgaagcttgtgcaagagtcacgaagttctcttgccatggttttcagctccatctggtcatataaggtcttctctagactgtttattctagttagccattcgtctaacgttttttcaaggtttttggtttccttgtgatgggttaggacatgytcctttagctctgagaagtttgttattactgaccttctgaagcctacttctgtcaactcgtcaaagtcattctccatccagctttgttcctttgctggcaaggagctgcaattctttggaggagaataggcactctggtttttagaatattcaggttttctgctctggtttctccccatctttgttgtttaatctacctttggtctttgatgttggtgacctacagatgtggttttgttgtagatgatctttttgttgatgttgatgctattcctttctgtttattagttttccttctaacagtcaagt

SEQ ID NO: 927376 - DNA, 616 bp, Homo sapiens
  misc_feature 1, 2, 3, 4, 5, 6, 7, 8, 9, 10, 11, 12, 13, 14, 15, 16, 17,18, 19, 20, 21, 22, 23, 24, 25, 26, 27, 28, 29, 30, 31,32, 33, 34, 35: n = A,T,C or G
nnnnnnnnnnnnnnnnnnnnnnnnnnnnnnnnnnnggctctgatcaaaactgatagaccattagcacactatagataagttttgctttggggtaggagattgacttaaggactgctcacatccttttttaaatcaacaattctcaagctcccatgatgattcattaactattttcagatgctgctttccaaaatactatgggtctatataaaaactaaaattatgttatctgaacattcattttggccaaataagttagaaaagaagtgttctttcttcatttgattgcttcagttgcactgaacagtataatgatcactatcaaatctggacaggattaatctggagsataacttttgcctttcagataagatctgccatagtttaaaaatagcccagatgaacaaaggaaattacaatttcaattcaaaggagaactgacacgaacaagtaccagagtgttgatggaagagtgtagacaatcattgtctaaaggcaaatacttcagtcagagagaacttcaaggacaaacttcttttctctttacagtatgagaatgaaatctgaacttttctgtcagtgacaaggttaaggcagtacaccacccacatagaaa

SEQ ID NO: 927377 - DNA, 616 bp, Homo sapiens
  misc_feature 1, 2, 3, 4, 5, 6, 7, 8, 9, 10, 11, 12, 13, 14, 15, 16, 17,18, 19, 20, 21, 22, 23, 24, 25, 26, 27, 28, 29, 30, 31,32, 33, 34, 35: n = A,T,C or G
nnnnnnnnnnnnnnnnnnnnnnnnnnnnnnnnnnnggctctgatcaaaactgatagaccattagcacactatagataagttttgctttggggtaggagattgacttaaggactgctcacatccttttttaaatcaacaattctcaagctcccatgatgattcattaactattttcagatgctgctttccaaaatactatgggtctatataaaaactaaaattatgttatctgaacattcattttggccaaataagttagaaaagaagtgttctttcttcatttgattgcttcagttgcactgaacagtataatgatcactatcaaatctggacaggattaatctggagcataacttttgcctttcasataagatctgccatagtttaaaaatagcccagatgaacaaaggaaattacaatttcaattcaaaggagaactgacacgaacaagtaccagagtgttgatggaagagtgtagacaatcattgtctaaaggcaaatacttcagtcagagagaacttcaaggacaaacttcttttctctttacagtatgagaatgaaatctgaacttttctgtcagtgacaaggttaaggcagtacaccacccacatagaaa

SEQ ID NO: 927378 - DNA, 612 bp, Homo sapiens
ctgttgggtgctgtggctcacacctgtcatcccagcactttgggaggccgaggggttggatcacctgaggctgggagtatgagaccaacctgacgaacatggagaaaccctgtctctactgaaaatacaaaattagccaggtgtggtggtacacacctgtaatcccagctacttaggaggctgaggcaggagaattgcttgaacccgggaggcagaggttgcagtgagccaagatcacgtcgctgcactccagcctgggcaacaagagcgaaactccattaaaaaaaaaaamaaacaaacaaacttcctccccctaaactgacttcttctgtcctaaatcttcttcattacattaaatggagctaccacccatccagtggattagatcaaatagttaagagtaatccttcatctcattcttttttccccactctatgtggtctatcaacaagccccttcatttgccatcatctccactaacatgatccttgcacaggctattgtcatctttcactgaactgctgtaacagcatcacaatttaattcctttcctctatttttgtcccttgcatttagttcaacgtacagaatccaagttatgtgtgtaaaagc

SEQ ID NO: 927379 - DNA, 646 bp, Homo sapiens
ctcactgtctggactactcataatgtcaatggcatactaggtgccaaaggaagtttatggctatcagacaactgcctacttagataccaggtgctactccttgagggaccggtgcttcaaatatgtatatgcgtggccctcaaccctgccacttttctcccagaygatggggagccaatcaagcctgactgccaacaaattatagtccagacttatgccccctgagatgatctcttcaaagtccccttagctaatcctgaccttaacctatataccgatggaagctcatttgtggagaataggatacgaagggtaggttatgccatagttagtgatgtaaccatacttgaaaataagcccttttccccagggaccagcgcccagttagcagaactagtggcacttacctgagccttagaactgggaaagggaaaaagaataaatgtgtatacagatagcaagtatgcttatctaatcctacatgcccatgctgcaatatggaaagaaagggggttcctaactgctgggaacccccattaaataccacaaggaaattatggagttattgcacagtgcaaaaacccaaggtggtggcagtcttccactgctgaagccatcaaaaagaggaaggagaggggagaacagc

SEQ ID NO: 927380 - DNA, 614 bp, Homo sapiens
aaaattagaactaataattccagcaagattgcagaattcaaagtcaatatccaaaatcaattggatgtctatacattagtaatgaaaagtctaaaaatgaaatgaagaaaacaattttatttataatagcacaaaaaacaatcacttataaataartgtaacaaaagttcaataattgtacattgaagactacaaattttgttgaaaaaagttacagaaaatctaaaaaaaatgaaaagaactggaagacaatattgttaagatggcaatactctccaatttggtacacggattcaatgcaatgtctaccaaaaaaatcaattacctttttctaaaaaaattgacaagctgatcctaaaatatacatgagaatgtaatggctccagaatagtcaaagtaacacttaaaaagaatatcaaagttggaagattaatacttcctgataatgagatttattacagaactataataatacagtgtgtactacataagaacagacaaataaatagaattgagcatccagaaatatagcttacatttatgatcgtttgattttagatttgaattccaaaaatatttaatggggaaaaaacagtcttaaaaattgtgtgaaa

SEQ ID NO: 927381 - DNA, 614 bp, Homo sapiens
aaaattagaactaataattccagcaagattgcagaattcaaagtcaatatccaaaatcaattggatgtctatacattagtaatgaaaagtctaaaaatgaaatgaagaaaacaattttatttataatagcacaaaaaacaatcacttataaataagtgtaacaaaagttcaataattgtacattgaagactacaaattttgttgaaaaaagttacagaaaatctaaaaaaaatgaaaagaactggaagacaatattgttaagatggcaatactctccaatttggtacacggattcaatgcaatgtctaccaaaaaaatcaattacctttttctaaaaaaattgacaagctgatcctaaaatatayatgagaatgtaatggctccagaatagtcaaagtaacacttaaaaagaatatcaaagttggaagattaatacttcctgataatgagatttattacagaactataataatacagtgtgtactacataagaacagacaaataaatagaattgagcatccagaaatatagcttacatttatgatcgtttgattttagatttgaattccaaaaatatttaatggggaaaaaacagtcttaaaaattgtgtgaaa

SEQ ID NO: 927382 - DNA, 615 bp, Homo sapiens
aaaagtgtaactgaaacactgcactttactgttttatacttttgtacatatgagaaatcaagggattagtgcaaccagtagaaggcattgaaatgactgtcattaaccacacagtcctggaggcagagatgcagttacctaccctagcttttgatgggttctcttacctgtagtagccttatccctggtcatttggattttcartttgcttttttctttttttcccctccaaactccttttccttggccaagccttcatgcttccccctttccatattataatctcatttgattgctctgcagttgggaacggtgatcttcttgaatgatgtttcagtgtgcaaaaactatagagcctgtcagcaccaaagctgacagaagttataccttactcctttcctttcccctgaacaaacctgctaatcccactaattcaggaatttgagtagagatggggaacaagaacccagatgctgtcccctcaccccctctcctgtatttctcaggtccagttcaaatctaaaattctacttttagagttgaaacagagtaataacttatctaaccctcttttcctacaaaggagaaagataaaaggcacaaaggttaccgcca

SEQ ID NO: 927383 - DNA, 563 bp, Homo sapiens
gagctgcaaggactggctgaagggagaggaacactctgagactgtttgccttgtgtgttagtttactagagctgccttaagaaaagtggcacaagctgggtggcctaaaacaacaaaaacatgtcctctcacagtctggaggccagaagtccaacacccaggcattgatagggccgtgctcccgctgaggactctagaaaagaatctgctccaggtacacccagcttctggggggtggctagccatcctgggcgctccttggcctctcgacacattacttggatctctgcctctgtcatygtaccatgttctccctgtgtgactctacgtctctgcacccacatttccctcttctaatgaggacacagtcactgaattaggactcaccctaatccagcatcatctcctcttaacttcattacaactgcaagaatcccccaacccccaccccggccaaccccacttccaaataaggtcacattcacaggtgccaggcattaggacttgcacatatctctcagaggggacacagtttaatgcatgacaccttcaattcccaaggt

SEQ ID NO: 927384 - DNA, 609 bp, Homo sapiens
gagaaggaagaggagggcctggtccttgaaggtctgcaattcttgtggaactccaagtgcgcaggtttgtccaaacagccacatggaactatctcctgtacataggtgattattctaattcttccctttttttttctgtgtttcctgccaccacatgcattgactcaccccctgaatctcttgaatgcaccacttcctttattgtctrttaccacttttctataggaccttcatatccctagacttggaagttgcctttctcctggcacacagtgctctgcaatttcaacccatcctccaccgtagtgccagagaaatcgccataaagtacttcttgcaagtgccgtgctgccttgcttcaagtcattcctggcccctgctggagccaggtggagagttctagctccagagcctggtgtgtgaaactgaagaggaccctggccttgtggttggatactccagcatatctggacactggcgtaccatcctagccaaatcctgagtgtgtttattaacacagacttggttttgttttttctttgtttggtttgtcctctgtttggtttttcctcttgctgcttgctggtaatgacagtctgtcctgggggc

SEQ ID NO: 927385 - DNA, 451 bp, Homo sapiens
aaagttcaagatactttactgttatcaagggatgaaattattaaaatgtgaaagacttgtgaattattaaaatgtgaaaaaatatagtaaaaatcattgaaagacactaatatttataaagggaaagatatattacatttagaagggagaaaattaataacattaagaatttaagcccctccaaattaataggtaattgtaatacagttaccattaaaatcccaacagaatttttcatggaagctggcaaacaggtcctaaaatttataccaagggagaaagattccagaayggcaaacaaactccaggctcagtggttcacacctgtagtcccaacactttgggaggccaaggcaggaggacagcttgagaccaggaatctgagaccagcctggccaacatggcaaaacctcgtctctaccaaaaatatacacacacacacacacacaca

SEQ ID NO: 927386 - DNA, 611 bp, Homo sapiens
agagagtcagcctgttctttgaagctttgaagccaggcattgacttctcctctctagctatgaaaagtcctagatggcattttcttccaatagaaggccttttcatctacaatgaaaatctatcatttagcatagcaaggatcttagctggatcttctggataacttgctgcagcttccccatcagcactggctgcttcaccttgcacttytatgttatggagatggcttctttccttcaaactcatgaaccagcctctgctagcttcaaacttttcttctgcagtttcctcacctcttccagccatcccagaactgaaatgagttaaggccttgctgtgcattaggctttggcttaaggaaaggctgtggctgctttgatcttctatccagaccaaactttctccattgcagcagtaaggctgctttgctttctgatcattcatgtgttcgctgaagtagcacttttactaataatttccttccagaacttttcctttgcattcacaacttggctaactgtttggcacaagtggcctagcttttggcctatctcagctttcgacgtcttcctcactaagcttaatcacgtttagcttttgatttaaagtg

SEQ ID NO: 927387 - DNA, 464 bp, Homo sapiens
agtgaaaaccagccaggaagtgtccagcaactgatggatggatgaacagtgtgacaggtgcatacagtggaatattattggccataaaaaggaatggagtttagatatattctataacacggatgaatcttgaaaacagtaccctccatgaaagaagccattcacaaaagtccaaatgactccatttatatgacacggccagagtaggcaaatccacagagacagaaagcagagtagaggctgctgaaggctrggggaaggatgaatgggaagtgactgctaatggatacgggatttctattttggatgatgaaaatattctaaaattagactggggtgatggttccacaattctctgaaaatactaaaaaccatctaatcataccctttaaaagggtagattttatggtatgtaaattatacgtcaaggaagcagtaaaacaaacgtcatggtcaagatgaag

SEQ ID NO: 927388 - DNA, 464 bp, Homo sapiens
agtgaaaaccagccaggaagtgtccagcaactgatggatggatgaacagtgtgacaggtgcatacagtggaatattattggccataaaaaggaatggagtttagatatattctataacacggatgaatcttgaaaacagtaccctccatgaaagaagccattcacaaaagtccaaatgactccatttatatgacacggccagagtaggcaaatccacagagacagaaagcagagtagaggctgctgaaggctgggggaaggatgaatgggaagtgactgctaatggataygggatttctattttggatgatgaaaatattctaaaattagactggggtgatggttccacaattctctgaaaatactaaaaaccatctaatcataccctttaaaagggtagattttatggtatgtaaattatacgtcaaggaagcagtaaaacaaacgtcatggtcaagatgaag

SEQ ID NO: 927389 - DNA, 464 bp, Homo sapiens
agtgaaaaccagccaggaagtgtccagcaactgatggatggatgaacagtgtgacaggtgcatacagtggaatattattggccataaaaaggaatggagtttagatatattctataacacggatgaatcttgaaaacagtaccctccatgaaagaagccattcacaaaagtccaaatgactccatttatatgacacggccagagtaggcaaatccacagagacagaaagcagagtagaggctgctgaaggctgggggaaggatgaatgggaagtgactgctaatggatackggatttctattttggatgatgaaaatattctaaaattagactggggtgatggttccacaattctctgaaaatactaaaaaccatctaatcataccctttaaaagggtagattttatggtatgtaaattatacgtcaaggaagcagtaaaacaaacgtcatggtcaagatgaag

SEQ ID NO: 927390 - DNA, 564 bp, Homo sapiens
tgtttgggcttctattgaacccatcacccaaatagagaacatagcattcaataggtagggtttttttgtttgtttgtttgtttgttttgtttttttgaaatggagtctcgctctgtcactcaggctggagtgcagtggygcgatctcggctcactgcaagctccgcctcccgggttcacaccattctcctgcctcagcctcctgagtagctgggactacaggcgcccaccaccacgcccggctaattttgtttttgtatttttagtagagacggggtttcaccgtgttagccaggatggtctcgatctcctgaccttgtgatccacccgcctcggcctcccaaagaataggtagttttttaacacttctccccttcccgcctccccccttctagtagtcctcagtgtctattgttaccatctctatgaccctgtgtacccaacgtttagttcccacttgtcagcgagaacatgagacatttggttttctgtttccgggtcagctcactaagaataaaatcctccatctccatccatgttgctgtaaaggacatgatttcattca

SEQ ID NO: 927391 - DNA, 564 bp, Homo sapiens
tgtttgggcttctattgaacccatcacccaaatagagaacatagcattcaataggtagggtttttttgtttgtttgtttgtttgttttgtttttttgaaatggagtctcgctctgtcactcaggctggagtgcagtggcgcgatctcggctcactgcaagctccgcctcccgggttcacaccattctcctgcctcagcctcctgagtagctgggactacaggcgcccaccaccaygcccggctaattttgtttttgtatttttagtagagacggggtttcaccgtgttagccaggatggtctcgatctcctgaccttgtgatccacccgcctcggcctcccaaagaataggtagttttttaacacttctccccttcccgcctccccccttctagtagtcctcagtgtctattgttaccatctctatgaccctgtgtacccaacgtttagttcccacttgtcagcgagaacatgagacatttggttttctgtttccgggtcagctcactaagaataaaatcctccatctccatccatgttgctgtaaaggacatgatttcattca

SEQ ID NO: 927392 - DNA, 564 bp, Homo sapiens
tgtttgggcttctattgaacccatcacccaaatagagaacatagcattcaataggtagggtttttttgtttgtttgtttgtttgttttgtttttttgaaatggagtctcgctctgtcactcaggctggagtgcagtggcgcgatctcggctcactgcaagctccgcctcccgggttcacaccattctcctgcctcagcctcctgagtagctgggactacaggcgcccaccaccacgcccggctaattttgtttttgtatttttagtagagacggggtttcaccgtgttagccaggatggtctcgatctcctgaccttgtgatccacccgcctcggcctcccaaagaataggtagktttttaacacttctccccttcccgcctccccccttctagtagtcctcagtgtctattgttaccatctctatgaccctgtgtacccaacgtttagttcccacttgtcagcgagaacatgagacatttggttttctgtttccgggtcagctcactaagaataaaatcctccatctccatccatgttgctgtaaaggacatgatttcattca

SEQ ID NO: 927393 - DNA, 576 bp, Homo sapiens
cagaagacgggtgatttctgcatctccaactgaggtaccaggttcatctcactggggactgacagacagtgggtgcaggacagtgggtgccgtgcaccaaatgtgagcagaagcaggatgaggcatcgcctcacccaggaagctcaaggggtcagggaattccctttccaaagaaaagggtgacagacagcacctggaaaattgggccattcccaccctaatactgcgmttttccaatggtcttagcaaacggcacaccaggaaattatatctgcacctggcttggagggtcctacggccacagagcctcactcatggctagcacagcagtctgagatcaaactgcaaggcagcagcaaggctgggggaggggcacccgccattgccgaggcttgagtaggtaaacaaagcggccaggaagcttgaactggatgaagcccaccacagctcaaggtggcctgcctgcctctgtagactccacctctgcgggcagggcacagccaaacaaaaggcagcagaaacctctgcagacttaaatgtccctgtctgacagctttgaagagagcagtggttctc

SEQ ID NO: 927394 - DNA, 556 bp, Homo sapiens
tattccgccctcacccagccacccgagtaaatgagaatgatgactgactgagaccctgatggtggtggcttaggcaagatgaacgtctgaaatggaggcccagggctgccacgatggctctgtagtcatcagggagggagctccttttatcttgttacctactcccctcttgtgcccctttcttcccttgatctaaraaggttgctccggatctcgccatctggcctgcgttcaatcagcagaagcttcctggaggagcaggaggaggcactgtgctcgcatcacataccagtggccagaagttggcttcagggaagctcaggaaataggatgcgagaagccatgagacctccccaaactctgcagtaacagagtcaacaagacaatggcttaaagatggagagaccagttgatcggtcacacaagctgttccacgataattcttgtgtcagaaggggaggctgactaccaggaccactggccccacttccagcccctccattctgagtacacttcagagggctctggcagggtgagggggtcttggtggtgccac

SEQ ID NO: 927395 - DNA, 557 bp, Homo sapiens
aattttacagctgggccaccgggggtgacatcacatattggtaggaccgtgatgctcacctgagccgtaaaaccagcaggtttttattaaggatttcaaaaggggagggagtgtacgaacagggagtaggaacaaagatcatatgcttcaaagggcaaaaggcagaacaaagatcacatgcttctgaggaaacaggacaaagggcaaaaggcagaacaaagatcacatgcctctgaggaaacaggacaaagggcaaaaggcagaacaaagatcacatgcctctgaggaaacaggacaaagggcaaaaggcagaacaaagatcacatgcttctgaggaaacaggacaaggggcaaaaggcagaactcctgataagggtctatgttcagtggtgcacgtastgtcttgataaacaccttaacagaaaacagggtctaagagcagagaaccggtctgaccaaaaatttaccaggatggagtttcccaatcctaataaggctgagggtactgcaggagaccaggacgtatctcagtccttatcgctaccgcataggacaga

SEQ ID NO: 927396 - DNA, 445 bp, Homo sapiens
ttgtgtttactcaataccataaacgctaaatgacaccacagacccacacaaagtgccactagcgatgctggcagtgctcccaagaagcagagctcccaggagttgtgactttaggaaaagctaaacttgcgtgacacgccgcagcctgtgctctgctgtggatgcttttcaaaatcgataaatccagcagaagggmcatcacaaaaaaagaacaggacatccgtgaagccatcaccgcagctacagcaacaggcttgaaaatttttttgtgaaatacctttttatctcactgaaaacgcagctttaaaattaattcccaaacagcacggatatatgaaaatgtgtgggtgcaggattgctataagaaaggcaaataccaatagactctagtctgattccagaaaagtgaagccattatacaacaactgaaagtaaaaggaagggg

SEQ ID NO: 927397 - DNA, 616 bp, Homo sapiens
gccaccacccttagaggcggagaatggctacagtggactttgctgtatttccctcccctaggttagttaggccctcaagaccccaatagcttagactctggttaaactggttctcctgagggcggatttcttttttctttttttaagttctgggacacatgtgcagaacgtgcaggtttgttacctaggtgtacacgtgccatgctggtttgctgcccctctcaacctgtcatctaggttttaagccccggacgcattaggtgtttgttctcatgctcgccctccccttgcccccacccrccgacaggccccggtgtgtgatgttcccctccctgtgtccatgtgctttcattgttcaactcccacttatgagtgagaaaatggggtgtttggtttcctgttcctgtgttggtttgctgagaatgatggtttccagcttcatccctgtccctgcgaaggacatgaacccattcttttcctaaagagggcagagcactctggcgtatttcaaaatggtcccttctcccctgtctctactagagccctgagggggttttctctgattttcgctgtgagaacctggcagcattccaggaagtaaaattcacaagagcat

SEQ ID NO: 927398 - DNA, 619 bp, Homo sapiens
ttcctacaagcacacagaggtgaagcctggagaacaggcagggacaggcccagctggccatgtgctcagccacgcctacctcgcaaggtcattctgaggatgaaggcatcatggatccaaatgccaccttgacgctgaatgtmctacacaataaaagaaccactgtaaatcacactattgactcttgcttggttgatgttctttcctttacagtaaagtgaactcgtggacaaacatcgtgtccacagaccaccataaatgtagtttgttgttttaaataaaactgaaatcagacttccaaaaagaaacatctaaaaacttctcctctcccatcccaccagagccatggcccacaacacagcccgacgccccgtcacatgctctcacaggacaactgcccacaccagttaacctggtgtcacggtggaggcgaggttgcggtgagtggagatcacgccattgcactccagcctgggcgacagagcaagactccatctcaaaaaaataaataaataaaaaatcttgtggaaggaggtaccacatatgcggtctgttgtggaacaaaatgccgttacgtggggcatgactgtattctgtagggcacatttgcaaaacagct

SEQ ID NO: 927399 - DNA, 619 bp, Homo sapiens
ttcctacaagcacacagaggtgaagcctggagaacaggcagggacaggcccagctggccatgtgctcagccacgcctacctcgcaaggtcattctgaggatgaaggcatcatggatccaaatgccaccttgacgctgaatgtactacacaataaaagaaccactgtaaatcacactattgactcttgcttggttgatgttctttcctttacagtaaagtgaactcgtggacaaacatcgtgtccacagaccaccataaatgtagtttgttgttttaaataaaactgaaatcagacttccaaaaagaaacatctaaaaacttctcctctcccatcccaccagagccatggcccacaacacagcccgacgccccgtcacatgctctcacaggacaactgcccacaccagttaacctggtgtcacggtggaggcgaggttgyggtgagtggagatcacgccattgcactccagcctgggcgacagagcaagactccatctcaaaaaaataaataaataaaaaatcttgtggaaggaggtaccacatatgcggtctgttgtggaacaaaatgccgttacgtggggcatgactgtattctgtagggcacatttgcaaaacagct

SEQ ID NO: 927400 - DNA, 753 bp, Homo sapiens
ctcccaggtagcactggggcaagggtttccttctgccccagcagggctggccgtcagtcccctgcttggtagtggtgtgggggtgcagtgtggaggaaggcacgtgagtcctcactcctggccttggataccatgggtcctggcatagagcagctcactcccagggattgattagtcctccactgccctgggtgcatgcgtacacaattccctggccaagcctggctcgagcacaggaagctcatctgcgttttggctcaaggatgactgcctgctttctggaggggagggtctggaggtctttgctgcacagttcctgggtcgcacatccagcgttcatttaactgaaggcttgagccagtgaggggtgtttcctttttatccccatagcttttagctaaaacatccctcccgagttgaccccctggggtttcaaataacccatgtgtccctggttggggctggggagagtgagaagctgagatactgggcacagggttgtggcctccaccccagctctggtctgtgcagactcatggccaccaggaggcctgcagatccagccttcctgtcaacagcgacaggaaatctctakgttggtgagtgctggtgatgtgagcctacatcagggtgggtcctaagaaacatggcaaaccaggctgtctcattccactagactgccccctgccaccctggcacttcccagggcctggcagtatggtctgatgggcactatggtccaatatgcagcat

SEQ ID NO: 927401 - DNA, 750 bp, Homo sapiens
tggcatgcgcctataatcccagctactcaggaggctgagccaggagaatcgcttgaacccaggaggcagaggttgcagcgagccgagattgcaccactgcacgccagcctgggcaacagagcaagactccatctcacaaaataattaattaattaatgaaaataccaagagtcctacttaaattacgggttcattgcaacaaatgattcacattctccaagtgctttgtataaaatgtggcaaccggttatccaacaaagacatgaaaccttcaaaactgtctcaccacatggagaccaagcaccctgcattaaaagacaagcctttggagtttttcaaaagaaaaaaaatgaracactaagaacagaagcaattattgaaggccaccacttcatcaaatgtgtctgcacttgagacacattcttagtggctaaccacatcgctaaaactaagaagccctttactattggtgaagagttgatcctgcctgctgctgaggacatttgtcatgaacttttaggagaggctgcagttcaaaatgtggcacatgttcctctttcggctagtactataattagacaaataaataaaatagcagaagatattgaggtacaattgtaagagaggattgagtcactgtagtatgcaatccaggttgacaagtccagcaatgttgacaaggcaacagtgcttgcttttgtgcgatatattttcaggaggatgcacatgaggatatgttgtgtgcacctt

SEQ ID NO: 927402 - DNA, 750 bp, Homo sapiens
tggcatgcgcctataatcccagctactcaggaggctgagccaggagaatcgcttgaacccaggaggcagaggttgcagcgagccgagattgcaccactgcacgccagcctgggcaacagagcaagactccatctcacaaaataattaattaattaatgaaaataccaagagtcctacttaaattacgggttcattgcaacaaatgattcacattctccaagtgctttgtataaaatgtggcaaccggttatccaacaaagacatgaaaccttcaaaactgtctcaccacatggagaccaagcaccctgcattaaaagacaagcctttggagtttttcaaaagaaaaaaaatgagayactaagaacagaagcaattattgaaggccaccacttcatcaaatgtgtctgcacttgagacacattcttagtggctaaccacatcgctaaaactaagaagccctttactattggtgaagagttgatcctgcctgctgctgaggacatttgtcatgaacttttaggagaggctgcagttcaaaatgtggcacatgttcctctttcggctagtactataattagacaaataaataaaatagcagaagatattgaggtacaattgtaagagaggattgagtcactgtagtatgcaatccaggttgacaagtccagcaatgttgacaaggcaacagtgcttgcttttgtgcgatatattttcaggaggatgcacatgaggatatgttgtgtgcacctt

SEQ ID NO: 927403 - DNA, 619 bp, Homo sapiens
aaagagtacaaaagagaaaaattttaaagctgggtgtccagggaagacatcacatgtgtcagcaggttccatgatgccccgcaagcctcaaaaccagcaagtttttattagtgattttcaaaaggggagggagtgtacaaatagggtatgggtcacagagatcacatgcttcacaaggtaataaaatatcacaaggcaaatggaggcagggcgagatcacaggaccagggcaaaactaaaattgctaatgaagttttgggcacgcattgtcattgataacatcaggagaggagacagggtttgagagcagacarccagtctgaccaaaatttatgaggtgggaatttcctcgtcctaataagcctgggagtgctatgggaaactggggcttatttcattccttatctactataaaagacagacgtccccaaagcggccatttcagaggcctccccttaggaatgcattctctttctcagggattttccttgctgagaaaaagaattctgcgatatttctcctattcgcttttgaaagaagagaaatatggctctgttccacccggcccacgggcagccagactttaaggttatctcccttgttccctgaacattgctgt

SEQ ID NO: 927404 - DNA, 601 bp, Homo sapiens
aatctacaagtgtacctttttagcatattgagggctataatggaaaaggaaacgtatacatataaaaactataccgaagcattctgagaaacgttttgtgacttttgcattcaactcacagggttgaacatttcttttgatagagcagttccgaaacactctttttgtaggatctgcaagtggatgtcttgaccgctttgaggctttcgttggaaacgggaatatcttcacatgaaaactagamagaagcattttcagaaacttcattgtgatgggtgcattaaactcacagagttgaaccttgcttttgatagagcagttttgaaacactctttttgtggaatctgcaaatggatacttagagagcttcgagtccttcgttggaaaccggaaaatctttacatgaaaactagacagaagcattctaagaaacttctttgtggtgtgtgcattcaactcacagatttgaaccttacttttgatagagcagtttggaatccctctttttgttctatctgccaatgtatatttggagtgcttggaagccttcgttggaaatgggaatatcttcacttaaaaacaagacataagcattcttaga

SEQ ID NO: 927405 - DNA, 728 bp, Homo sapiens
tcaagctctgagcaggctcaaggtgatcaggagacctcagcttggatctgcagcctggtgtccagctctgctgagagaccctgggtgagggacatacccactacatgcctcagtttccccttctgtaaaatggggataatgacagtgccaacctcccagggctgctgtaaggattccatgaaatgctggatgtcacatgtgtggacagtgtctgcctgaatcaggctttgctgttctcgtgattattccaggcctgcagccccctcccatgtctgtctgctacggctctgacactgagaaygggcacttccctgctccctgctcggggacccggcagacactccccaactgcttgctctcaggggaggctgggtggggctcccacactggcctgctcagggacgaggggactgcacgagctggtgaggctgaggagcaggagagaatgcaggacatggcactggccggccatctggtcagcatgacaaggtgaaacaactcagaatctaccggacagctcgtgggtggccatctcctatctttgtgtgtctcggtgacaacaaaggctctatgaagagttagttattattacagattattacaaacagcggtgtatgttggaaaaaggtgctcccttgctccagaacacctggcatggtgtgtgctgtgtggcctggattttggtctgcgtccttggtccttgggcagtgtgtaatctgcacaactgc

SEQ ID NO: 927406 - DNA, 639 bp, Homo sapiens
ctctgtgggaggctgtcctttgtactataggatgctcagaggccaccctagcctcttcccgatggatgtcagtgacacctccagccccacagttgtaacacctcggaacgtctccagacattgctaaacatactgggatcaggggcagaattgtcctgggttggcagtgatggctgtagagtagaggttgccagtggggcaaggtggcccacgcctgtaatcctagcactttgggaggctgaggcaggaggatcacttgagtccaggagttcaagaccagcctgggcgacaaagcgagacccccttctttacagaataaaaaattaaaaaattcgttgggcatggtgctgcacgcctgtcgtcccagctactcgggaggctgaggcaggaggatcacttgagctgggaggtcaaggctgcagtgagctgtgatccygccagtgcattccagcctgggcaacagagcaagaccctgtctcaaaaaaatatatacataaataaaatagagtagaggttggctgactttcctgtagaaagcccgatggtaaatcctgcaagctttgcgggccgcagacgggttctgtggcctgttctcttttctcttctcttcagtcctttaaaaatgtaaacaccattctt

SEQ ID NO: 927407 - DNA, 647 bp, Homo sapiens
ttttgcatatatctgcctcgctggctaaagcaaggtcatgcacgggcttcctctctctaccagtcatttccccttctagtacattttgtccaaggcatggtctgtctgtaaccttgtctcattggtggtcagggagaattgggttgggtcagactaaatccaatcttataaaaccaaagactttgcttagttaattcagatcatcttagaagatacaaggctgctgttttttatatgcttgattgtaaagttcctggggttttgttcttttcttttctttttttttttttttttgagacagggtcttgctctgtcgccttggctggagtatagtggcgcgatctcagctcaccgcaggctcgactttgttcctgggatttctactttgtstttttccattctctatttctcaaggtcatggactgcgtgcttttaagtttttttcttgtgatccttttcattgcttaattcagtaatataggtggcatttagtaagcattgacaaaatgatgaaataagtaaggtcaaggatgggcctctttacagatgactttttttttcttttttaaaaaagcagaactggttcttcctaggtagaggaaagcagagctgctttgcattgctgtagggtgttggaggtgctgcag

SEQ ID NO: 927408 - DNA, 750 bp, Homo sapiens
gtaaaaggtagaaaaaggtgtgatgctctcttctttgattttcaggtagtctaataacaacaacaataataattaatatctatgaagtgtttgctataggacaggcctgttttcaagcactttacatgcatttttttttaaattcatacaacattcccatgaagtaggtatttttaatgtttccattttagatgagaaagctgaagttaaatcactgtcccaaggtcataaaactagcatgcaggctaggcttggtggctcatatctgtaattccagcactttgggaggccaaggcaggaggattgcttgaacctaggggttcaagaccagcttgggcaatatagtgaaatcttgtctctacaaaaataaaaattaaaaaattagccaggtgyagtggtgcatacctgtagttctagctactagggaggctaagttgggagaaggtgggagaatcacctgagcctgggaggtcaaggctgcagtgatcacgccactctggactctagcctgagcaacagaatgagaccctgtctcccctggcacggtggctcacacctgtaatcccaacactttgggaggctgaggcaggtggattgcttgaggtcaggagttcaagaccagcctgaccaacatggtgaaaccccgtttctactaaaaatacaaaaattagctgggcatagtggcaggtgcctgtaatcccagctactcaggaggctgaggcagaagaattgcttgaacccagtgagagg

SEQ ID NO: 927409 - DNA, 750 bp, Homo sapiens
gtaaaaggtagaaaaaggtgtgatgctctcttctttgattttcaggtagtctaataacaacaacaataataattaatatctatgaagtgtttgctataggacaggcctgttttcaagcactttacatgcatttttttttaaattcatacaacattcccatgaagtaggtatttttaatgtttccattttagatgagaaagctgaagttaaatcactgtcccaaggtcataaaactagcatgcaggctaggcttggtggctcatatctgtaattccagcactttgggaggccaaggcaggaggattgcttgaacctaggggttcaagaccagcttgggcaatatagtgaaatcttgtctctacaaaaataaaaattaaaaaattagccaggtgcagtggtgcatacctgtagttctagctactagggaggcyaagttgggagaaggtgggagaatcacctgagcctgggaggtcaaggctgcagtgatcacgccactctggactctagcctgagcaacagaatgagaccctgtctcccctggcacggtggctcacacctgtaatcccaacactttgggaggctgaggcaggtggattgcttgaggtcaggagttcaagaccagcctgaccaacatggtgaaaccccgtttctactaaaaatacaaaaattagctgggcatagtggcaggtgcctgtaatcccagctactcaggaggctgaggcagaagaattgcttgaacccagtgagagg

SEQ ID NO: 927410 - DNA, 587 bp, Homo sapiens
tttttttttttttttgagacaaagtcttgctttgtcacccaggctggagtgcagtggcatgatctcggttcactgaaacctccacctcccgggttcaagtgattctcctgcctcagcctcccgagtagctgagatcacaggcatgtgccaccacaccaggttaatttttgtatttttagtagagatggggtttcactatgttggtcaggctggtctcgaactcctgacctcaagtgatctgcccacctcggtctcccaaagtgctcggattacaggcgcgagacactatgccgaggcaagaagatcttttgagcatcacattcctcatttgtaaaatgtggatagtagtagwatctatccaaggattacattgagcaatggttatacagtgcttaggcacaggcaaataataagcatgtgctacatggtagctatttttattacaatatatagagagaaacccagttggaaaagattaagaatatcttcacagaaatgttggcatttcaggtggaccttaaagagtaggttatattttgacagcagaaattgagagtggagggacagtagtcctggtagaggaagga

SEQ ID NO: 927411 - DNA, 543 bp, Homo sapiens
tttaaaaaactgagaacaattctgtttcatctttccttccagtaaactatgagaatacaaacacaaacaatttcacttactgaagtcaattcatcggtacaaattccaactgtaactattgccattagtaccacagggatgacataatgataatatttggaccctcgtggaggaggtataccttaatttttactgcttctcaccttcctttgaaaattcatgattattttgatggcaattcaaacccctccttttaattacccaatgaaatgacaaaaggaatagaaaaggaactgcagttcacaacatagttataactagatggacagttcacaaatttactctgacctttgctgtgtagtaaagaaggatgktaccaggcaggtcggccatgtcagactcttgacacttccaagggcttaaacaatttggacctgaaaattatttacacacacatacacaccattgaatatatatggtctccttggttctgtgttatcagaataaaatttaaaattaagctgtttcaagctactcaaacaa

SEQ ID NO: 927412 - DNA, 698 bp, Homo sapiens
tggttctaccgtttagtagcagtgtgacaagtatactcatttgactttttttgcctcagtttcctaatctgcacagtggtaaagtagtgcctccctcatagcaatgctgattattaaatgagttaatgcatatttagttcttagaacactgcttggcccgtaataagtggtatatgagagttagttgttatttttattactatactataaaaaagaatcatcttggggcggttccaagatggccgaataggaacagctccagtctacrgctcccagcgtgagcgacacagaagatgggtgatttctgcatttccaactgaggtactgggttcatctcactggggcttgttggacagtgtttgcaggacagtgggtgcagcacaccgagcgtgagcggaagcagggcgaggcatcgcctcacccaggaagcgcaaggggtcagggaattccttttgctagccaagcaaagctgtgacagatggcacctggaaaatcgggtcactcccaccctaatactgcgcttttccaatggtcttagcaaactgcacaccaggagattgtatcccgtgcctggctcgcatggtcccacgcccacggaggctcgctcattgctagcacagcagtctgagatcgaactgcaaggcagcagcgaggctgggggaggggtgcccgccattgctgaggcttgagtaggtaaa

SEQ ID NO: 927413 - DNA, 700 bp, Homo sapiens
tggagtttgctggaggtccactccagaccctgtttccctgggtatcagcggcggagcctgcagaacagcagatattggtgaacagcaaatgttgctggctgattgttcctctggaagttttgcctcagaggagtacccagccatgtgaggtgtcagtctgcagctactggggggtgcctcccagttaggctatgtggggttcagggacccacttgaagaggcagyctgtctgttctgagatttcaagctgcgtgctgggagaaccactattttcttcaaagctgtcagacagagatatttaagtctgcataggtttctgctgccttttgtttggctatgccctgcccccacaggcagagtctacagaggcaggcaggcctccttgagctgcagtgggctccacccagctcgaacttcccagccactttgtttacctactcaagccgcagcaatgatgggctcccctcccccagcctcactgtcgccttgcagtttgatctcagactgctgtgctagcaaagagtgaggctccgtgggtgtaggccttccaaactaggtgtgtgatataatctcctggtgtcccatttcctaagaccgttggaaaagcacagtactagtgtgggagtgacctgattttccaggtgccatctgccagccctttctttgaataggaaagggaattcccggaccccttgtgctc

SEQ ID NO: 927414 - DNA, 716 bp, Homo sapiens
aaatgcctgaaaaggaattcaaaataataaacttaaggaaactcagcaagatacaagagaatgcaggcaatgcaacaaaatcagaaaaacactttatagcctgaactagaaattcagcagacgtagacatcatttaaaaaaaaagaaccaaacagaaagagtgtagctgaaaaattcagtgaatgaaatttaaaaatacaattgagagctttgacaataaactagatcaagcagaaaaaagaacttcygaacataaaaacaggtcttttgaaataacccagtcagacaaaagaaaaaagagaatgaaaagaaagccttcaggacatatggaataccattaagtgaacaaatattcacattatgagaattacaaaaggaaaggttattaaaaagcaaaaaaaaaaacctgtttaataaaacaatagctgaaaaattcccaaatcttgggagaaatatggacatccagatgcaagaaactcaaagattcccaagtaggttgggagagatacagacatccagatacaagaaactcaaagactctcttgtggattcaacttagaaaacttgtacattacagtcaaattgtcaaaagacaaacagagaactctaaaaacagcaatagcaaagtgtaaagtcatacataagttatcctatcagactaatagcagttatattagcagaaaccttacagggcagtcgagaatgaaatcatatat

SEQ ID NO: 927415 - DNA, 680 bp, Homo sapiens
ctgaaagaaaaaaaaagctgtcagacaaaaatactatacgcaccatagttatccttcagaaataaagaagaaataaagtccttcccagacaagcaaatactaagaaaattcatcaccactagaccagccctagaagaaatgctaaaagagtaacatttagaaatgaagagacgatatctaccaccatgaaacacacaaaactaaaaactcactggtaggtgtaatgcacaaatgacaaagggaaaggaatcaaactatcactacagaaaaccaccaaacctcaaagataagcaataagagaggaataaagaaatgactatacacaaaacaaccagaaaacaacaaaattacaggagtaagtcctcacctatcaataataaccttgaatgtaaatgacttaaattccccaatcaaaagatatagactggctgaatgaataaaaaataacaagacccaamtatatgttgcctacaagaaactcactttacctgtgaagacacagaaatagaaagtaaagaaatacaaacagatattccatgcaaatgaagagcaaaggtgagcagaagtagtgttactcatggtaaacaaaatatatcttatgtcaaataacataaaaataggctaggcatggtaacttatgcctgtaatctagcattttgggtggctgaggtggatagatc

SEQ ID NO: 927416 - DNA, 576 bp, Homo sapiens
aaatttgtattttttcctctcttggtggggtagaggtccacaaacaatatcaagtgttatagaaaataaacaagcaaagggctttctgtgcataacaagtgtgggatgataaaattggcaaggctgctctataggtgttgtccatttaccctggggcctatggatgtcatttacataactgagttttttcatagcttcaaaaatttctaagttgtaaaaccatacagtgaatttagaatggtaggcaagaccaccatcatttagcatggtagacaaggcaatatatcacaattgtattattgccatgttaaaagatttttgcagtaagaagctctgctctgtaattktggggagtgtaacttcctgtggggagatgttgggtgctgctgggatttggaactctctaaatggaacctgagaagagctggagaaggctgtgggggctctccttattctcccacagtggacttgctgtttgtcttcctctttccacctccaagttgactcttcccatcttttctgtgttctgtggtccttttttccttgtcagaactgctaagtgggtagaccgagcct

SEQ ID NO: 927417 - DNA, 685 bp, Homo sapiens
caaaagcaccaagttttatagtccagtttgaggacgtggtgtctgatttacgtagggctcacagattggtaagatcaggtatttcctttacatagcgtgtggggaaggctggtcaccccaccctaatcttcttatgcaaatgggctttctagttgatcagcaccatcttgtctgcttgttataatacacgtggctgacagagaagggaagatggagccaccattttgaaaatgtctagtccttagtttctgccggcattcatccatgcaagctcccagcttgcaggctgctctttgttagaaaatgatttggggctgcttttcattaacaaaaaaaaaaaaaagccttatcaaggactcccatgcccttgctatctgcctaagtaattccttcttaactcctatatcagtgggaggtgattaaatcatgtgggcagtttgccccatgctgttctcatgatagtgagtgagttctcatgagatctgatgggtttaaagtgttgcacttctcttctccccctttgctctctttttctctctcctgctgccacataagacatgccttgcttcccctttktcttctgacatgattgtaagtttcctgaggtctgccaagcctgctgaactgtgagtcaagaaaagaggtttaaacctcttttctttataaattacccagtcttaggtag

SEQ ID NO: 927418 - DNA, 702 bp, Homo sapiens
gttgcacttctcttctccccctttgctctctttttctctctcctgctgccacataagacatgccttgcttcccctttttcttctgacatgattgtaagtttcctgaggtctgccaagcctgctgaactgtgagtcaagaaaagaggtttaaacctcttttctttataaattacccagtcttaggtagttctttacagcagtgtgaaaatggactaatgcagaaaattggtactaggaatggggcactgctataaagatacctgaaaatgtggaagtgactttggaactgggtaatgggcagaggtttggagggctcagaagaatacagaaagaygttgtggaaagtttggaacttcctagagacttgttgaatggatttggccaaaatgctgatagtgatatggacaatgaagtccatgctgaggtggtcttagatggagatgaggaacttattgggaactggattaaaggtcactcttgctatgccttagcaaagagactgatggcattttgcctgtgccctagggatctgtgcaactttgaacttgagagagataatttaggatatctggaagaagaaatttttaagcagcaaagcattcaagatgtaacctggctgtttctgaaagcatataggcatatgtgttcacaaagtggtctgaaagtggaacttatttttaaaagggaagcagagcatacaag

SEQ ID NO: 927419 - DNA, 702 bp, Homo sapiens
gttgcacttctcttctccccctttgctctctttttctctctcctgctgccacataagacatgccttgcttcccctttttcttctgacatgattgtaagtttcctgaggtctgccaagcctgctgaactgtgagtcaagaaaagaggtttaaacctcttttctttataaattacccagtcttaggtagttctttacagcagtgtgaaaatggactaatgcagaaaattggtactaggaatggggcactgctataaagatacctgaaaatgtggaagtgactttggaactgggtaatgggcagaggtttggagggctcagaagaatacagaaagatgttktggaaagtttggaacttcctagagacttgttgaatggatttggccaaaatgctgatagtgatatggacaatgaagtccatgctgaggtggtcttagatggagatgaggaacttattgggaactggattaaaggtcactcttgctatgccttagcaaagagactgatggcattttgcctgtgccctagggatctgtgcaactttgaacttgagagagataatttaggatatctggaagaagaaatttttaagcagcaaagcattcaagatgtaacctggctgtttctgaaagcatataggcatatgtgttcacaaagtggtctgaaagtggaacttatttttaaaagggaagcagagcatacaag

SEQ ID NO: 927420 - DNA, 588 bp, Homo sapiens
attttcagaactatatctttacatgtacacattcacctattttatggactagttttcaaggattattttgggatgtggcttcaataaaattgtctattcttgtttaagtggtcctggtatactaataaaacttctggacattggtgatataatctcataaatattcgccaatttaaatttggattttaggactttggtgccaccatcacagtagccattctgaaccctttcgatcaccataggagaaaacaaggcatgtgctttaccatgttaattgtctgtttctggggtgttctttgccctagtggttagaatcatacatttctggaattaaggaccagattatctgggatgttcttgsaaccactggtttcggattttttatttctgtttctagattattcatagaaataggaagctctgtttttttgtttttttttctttcttaaaagaaaaactgagggttttttttttttggtagataaatccataaagcaaaagttcaaattgtgaccaggctgggcaaaatagcaagaccccatctctacaagaaatttaaaaatttagctgggcatggtagtatgtgcc

SEQ ID NO: 927421 - DNA, 650 bp, Homo sapiens
ggctctgcaggcgcaataggtttctctgtaatagtatccttcctccctggagggagaaatattgagagtaagactgtatttctaaatgctttacttacagatggaaagacccaggaaaaagaaaggatgaaagccgaggctgggaacaacaaatgctctacctcaacccccaaaaagttttctgtttgcttttgcttaagattctcaaataatcattagccatggattttgcctgtctaagacattttaggccatttaatattaattccttcatcaatcatatgaggtagatatttttattctacatttacatatacataaactggggcttagaggggttaaaagacttgcccaacatgtaacagaaagtagatagaggatttgaactgtcttkaaatttcaaatcatttgtttttctatatttcaccatagctgctgcacactcaactttctgctgaacatctctgcatgaatatatctaacttgctgtctttctcaccaacaccaaaccaatgccttgttctgtgtcatttacgttctttagcagtgcctttcagatccaatcattgacccacattccttacccatctttcactagaatatgttctcagcctccctgtctcatgaggtccggacagagtccatcatat

SEQ ID NO: 927422 - DNA, 702 bp, Homo sapiens
gctcttaaggtggcacgtctggagtttgctctgatgttcggatgtgtttggactttcttccttctagtgggttcgatggtctcgctggcttaggggtgaagctgcagaccctcgcggtgagtgctacagctcttaaggcggcgcgtctggagtttttagttccgcctgttgggttcgtggtctcgctgacttcaggagtgaagctgcacacctttgccgtcagtgttacagctcacaaaagcagtgggaaacccaaagaacgaacagcagcaacttattgcaaaamgtgaaagaaaaaaacttccacagtgtggaaaggaacccaagcgagttgccactgctaccttgggcagcctgcttttattctcttatctggccccaccctcatcctgctgattggtagagcccagtggtctgttttgacagggcgctgattggtgcgtttacaatccctgagctagacacaaaggttctccacgtccccatcagattaactagatgcagagtgttgacacaaaggttctccaaggccccaccagagcagctagacacagagtgtcgattggtgcactcacaaaccctgagctagacacacggtgctgattggtgtgtttacaaaccttgagctagatacagagtgcccattggtgtatttacaatccctgggctagacataaaggttctccacgtccccaccagact

SEQ ID NO: 927423 - DNA, 702 bp, Homo sapiens
gctcttaaggtggcacgtctggagtttgctctgatgttcggatgtgtttggactttcttccttctagtgggttcgatggtctcgctggcttaggggtgaagctgcagaccctcgcggtgagtgctacagctcttaaggcggcgcgtctggagtttttagttccgcctgttgggttcgtggtctcgctgacttcaggagtgaagctgcacacctttgccgtcagtgttacagctcacaaaagcagtgggaaacccaaagaacgaacagcagcaacttattgcaaaaagtgaaagaaaaaaacttccacagtgtggaaaggaacccaagcgagttgccactgctaccttgggcagcctgcttttattctcttatctggccccaccctcatcctgctgattggtagagcccagtggtctgttttgacagggcgctgattggtgcgtttacaatccctgagctagacacaaaggttctccacgtccccatcagattaactagatgcagagtgtygacacaaaggttctccaaggccccaccagagcagctagacacagagtgtcgattggtgcactcacaaaccctgagctagacacacggtgctgattggtgtgtttacaaaccttgagctagatacagagtgcccattggtgtatttacaatccctgggctagacataaaggttctccacgtccccaccagact

SEQ ID NO: 927424 - DNA, 583 bp, Homo sapiens
tcgaaacctctgggatacagcaaaggtggtgctaagaggaaagttcatagcattaaatgcctacatccaaaagtctgaaagaacagaaagagacaatataaggtcacaactaaaagagctagagaaacaagaacaaaccaaattcaaacccagcagaagaaaagaaataaccaagctcagatcagaactaaatgaaattgaaacaaacaacaacaacaaaaatacaaaagataaatgaaacgaaaagctggtgctttgaaaagwtaagtaaaattgatagaccattagcaagactaaccaagaaaagaagagagaagatccaaacaagtgctattagaaataagatgggagatattacaactgatagcacagaattacaaaaggtcattcaaagctactatgaacacctttatatgcagaaactagaaaacctagaggagatgaataaattcctagaaatgtacaaccctcctagattaaaccaagaacaaatggaaaatccgaacagactaacaacaagcagagagactgaaatggtaattaaaaagtcaccaccaacaacaaaaaagtccaggaccagaca

SEQ ID NO: 927425 - DNA, 459 bp, Homo sapiens
acgaatagttaaatggatgaatggatacttgaagaggctgacattagggattgatcactaaacaatttagtcacatcaatctatagtgaaacatatattctatgaacctcaatgaagaaaaaaagaattctcaatcatcttttgatgtcccattctaaaatatgaatggagagagaaagttcctcacacactttgaaaaaggctttgatatgaaattagaggctaataaatgggaaaacaatgaagatagaggaattagagactgtgcaggggaatgaaaacagaaaacaaaacaagaatatcactggtatattcagagaaktcaaagaatgtacaaaacaggacgatatacgtgcacacatggactctcctctctctctctctctctctctctctctcacacacacacacacacacacacacacacaccccttagaagaaaccattagaaaaggaaaa

SEQ ID NO: 927426 - DNA, 470 bp, Homo sapiens
aggtcatagaaacctatcgctatagtgacctatggtactatataatctgtatatatcactatatgtatatcactatatatactatatatatatcaccatagtgaccttgtactgtaggtttccatatactatattcactatagtactctrtgtacgtataatcctgcagtactaggtcatatctagcactaggtttatacgacctataaatataaataactcaatgtagaaaaactaaggttatgtctatgagcaccaggcactgttttaatcattttacacgagttaaatctctgagctcttataacaaacctatgaagtactgctatcatgcccagagtatacatgggagcttgagtacctttcccaaggttgctcggttgctccatgatggagtcagcactgaagatggtccttttatgctcatccacagggttacccatgtggaactagcgtaaagtgcccgtccc

SEQ ID NO: 927427 - DNA, 470 bp, Homo sapiens
aggtcatagaaacctatcgctatagtgacctatggtactatataatctgtatatatcactatatgtatatcactatatatactatatatatatcaccatagtgaccttgtactgtaggtttccatatactatattcactatagtactctgtgtaygtataatcctgcagtactaggtcatatctagcactaggtttatacgacctataaatataaataactcaatgtagaaaaactaaggttatgtctatgagcaccaggcactgttttaatcattttacacgagttaaatctctgagctcttataacaaacctatgaagtactgctatcatgcccagagtatacatgggagcttgagtacctttcccaaggttgctcggttgctccatgatggagtcagcactgaagatggtccttttatgctcatccacagggttacccatgtggaactagcgtaaagtgcccgtccc

SEQ ID NO: 927428 - DNA, 759 bp, Homo sapiens
ggaaattcatagaaataaatgactacttcaaaaatgtagaatgatttctaataaacaacctaatgtggcacttcaagaaactaaaaaagaataccacaaaactggtacaagaaagtagtaaagctcagagaagaaataaaggaaatatagactacaaaagtaatccaaaggcgcgataaaatgaagagtttttttttgaaaagataaaaatgwcaaacctttagcaagacctaaaaacgaggagagacttaaataaataaaattagaaattatagaagacattacaactgacatcacaaaaattacaaagaatcctgagactattattagcaactataccattgttgtttaagtattatgaactacacacgaagaaagttgttaacatagagaagctgataaattctcagatccaacctaccaaaagtatattatgaagaaacagaaaatcaaaacagactaataatgagtgaggaacttgaatcagtaataaagtctttcgtcaaagaaaaactcggaatctgatggtttcactgatgaattctaccaattaaaaggaagtaataacaattctcctcaaactattacagaaagttaaagagaaggaatgcctccaaactcatcttacaaagccagcattcccctgattacaaaaccagtgaaggacataacacaacaacaaaaattaaaagccaacatccctgatgaacatagatacaaaaattcttgacatgatactagcaaactgcattcaacaac

SEQ ID NO: 927429 - DNA, 759 bp, Homo sapiens
ggaaattcatagaaataaatgactacttcaaaaatgtagaatgatttctaataaacaacctaatgtggcacttcaagaaactaaaaaagaataccacaaaactggtacaagaaagtagtaaagctcagagaagaaataaaggaaatatagactacaaaagtaatccaaaggcgcgataaaatgaagagtttttttttgaaaagataaaaatgacaaacctttagcaagacctaaaaackaggagagacttaaataaataaaattagaaattatagaagacattacaactgacatcacaaaaattacaaagaatcctgagactattattagcaactataccattgttgtttaagtattatgaactacacacgaagaaagttgttaacatagagaagctgataaattctcagatccaacctaccaaaagtatattatgaagaaacagaaaatcaaaacagactaataatgagtgaggaacttgaatcagtaataaagtctttcgtcaaagaaaaactcggaatctgatggtttcactgatgaattctaccaattaaaaggaagtaataacaattctcctcaaactattacagaaagttaaagagaaggaatgcctccaaactcatcttacaaagccagcattcccctgattacaaaaccagtgaaggacataacacaacaacaaaaattaaaagccaacatccctgatgaacatagatacaaaaattcttgacatgatactagcaaactgcattcaacaac

SEQ ID NO: 927430 - DNA, 589 bp, Homo sapiens
tcaaattagcaacatcatacctagaggaactagagaagcaagccaaacccaatcccaaagctagcaatggaaaaaaaataaccaaaatcagagctgaactgataggaattgagatgcaaaaaaaacaaaagatcagtgattccaggagctgtttttttaaagaacaaataagatagaccactagctagattaataaagaataaaagatgatctgaataaacacaatcagaaatgrcaaagaggacattaccactgatgttacagaaatacaaaacatcctgagagactactacaaacacctctctgcacacaagctagaaaaccttagaagaaagggatacattcctagaaacctacaatgtcccaagagtgaaccaggaagaaactgaatccctgaacagaccaataatgagtcctgaagttgaaacagtaataaaaagcctaccagccagaaaaagcccaggaccagatgtaatcacagccaaattctaccagatagataaagaggagttggcaccatttctactgaaagtattccaaaaaattgaagaggaagtccttcctaattcattctatgaggccagcgtaa

SEQ ID NO: 927431 - DNA, 449 bp, Homo sapiens
tcacaatgcaggagacgaatgtgtggggtatgaggctggaggcagacaaattagttaggagactattgcaatattcccagggagagataacgagggattaaactaagaagagccattgggaatagcaaggagatgatgaggttatctaataaaaacccacagaaagtaacaaacataatggggaaagattagatgcattctgtttaaagttggaacaaggcatgggtgcctgctatgaggtatacttttcgatatagcacaggaattctgtccaattcagaaaattttraagaataaataaggtgtatacagattggaagcaataataaatatgtgattgtttgcagatatgatgagatacaggaacacacacgcaaacacacacacacgtaaaaatctatagacaaactattaaaattcaaaccaaatctatcaatatgctggataca

SEQ ID NO: 927432 - DNA, 640 bp, Homo sapiens
agagcctggacaggcgtgatcctgaggagatggggctgggcaagctagtgtgcgagagaccaaagggttagggcaggtgatgggtggctccttggtgtagacagcttcacatcccagacccagactgtgcaccgaggcaggtcttrctgtgctggttttgtggggaaccagcctggggtctctggttggccccagaaagagcttgccctggctggggcagtgtttgagggagaatgaacctctcagagcatgaatgcaagctgcagtgcagaagctgtgggtctgagtggcttgccctgagcccagaagggtgatgcctgggacagctatgcccgctgtctgccctctgccccgggtccacacccagcccagggcggcggctgttgtacaaggatgttgtgactcgctgagttctctgaaggtttgccagctcagacagaccaattagtgtggaggtggctgcttcctggagcttccagggtgggcggaggagcagtcttagggcttcttcccactgtatgtgtgtcccaagtccctttggcacggggcccagagcttggtagataagaggcactccacaaatatctatggaatgaatgaatgaaggggccttattcccccatctagaaagtgggactga

SEQ ID NO: 927433 - DNA, 653 bp, Homo sapiens
cgttttcccccaaggacggacatagaaaagagaatccctcctcctcaaggcgggttatagaaatcaaaaccccttttccccaaagctagccataaagcctacaaactctaactttccccaatttctgtgtaaaaactggccacaaataaattctcaggcctaggtggggcatggtggctcacacctataatcccagcactttgggaggccgagtcgggtgtatcatttgaggtcaggagttcaagaccagcatggccgacattatgaaaccccgtctctattaaaaatacaaaaattagccaggcagtagtggtgtacacttgtaatcccagctacttgggaggctgaggcaggagaatygcttcaacctggaagacggaggttacagtgagccgagaacgctccactgcacaccaatctgggcgagagagcgagactctgtctctaaaaaaaaaaaaacaaaaaaaattctcaggcctaccttgtttgattgtaggtcagacctccattccagaaagtcctgccccatacccacacccagaaggaagaaatgcatgctcagaggggccaggaagaaatccagagagacaggccttgctgggtgtccccactccgtctattcacattcgatcattgccctttttgtccagtca

SEQ ID NO: 927434 - DNA, 585 bp, Homo sapiens
catatctgagactgggatgaaaaagaagtttagtggacttacagttccacatggctggggaggcctcacaatcatggcagaagacaaggaggagcaagtctgtagaaagttctgaaatatctcacatttccctgtcttcttctgagccctccaaactgttccaacccccacctgttaaccagttccaaagttgcttccacattttcgggtatccacagcggcaccccactcctggtatcagtttactagtcagttttcacactgctgaaaaagatayacccaagactgggaagaaagaggtttaatggacttgcagttccacatggatggggaggcctcacaatcatggcggaaggcaaggagaagcaagtcatgtcttacatggatggcggcaggcaaaaagagaggcaaagagggcaggaaaactcccctttatagaaacatcagatctagtgagacttattcactatcacgagaacagcacaggaaagacctgcccccatgatttaattactcccacctcgtccctcccacaacacatgggaattcacgatgagatttgagtggggatacagccaaaccata

SEQ ID NO: 927435 - DNA, 673 bp, Homo sapiens
agcagtttgggatgctgaggtgggaagattgcatgagcccaggagttagagaccagcccgcacaacaaatcaaaaccctgtttctatgtctctacaaaaaaaaaaattagccagttgttgcagtgcacgcctttggtcccagctaattgggaggctgaggcaggaggactgcttgagcttgggagtttgaggctgcagtgaactgtgattgcaccactgcaatcatcctgggtgacagagtaagatctcatctcaaaaaaaaataaataaataaaattaaaaataaaaataggccgggtgcagtgactcatacctgtaatcccagcacttagggaggccaaggcaggcaggcaggagttcgagaccagcctggccaacatggtgaaacccygtctctaccaaaaatacaaaaaaaattagccaggcatggtggtgtgcgcctgtagtcccagctactcgggagactgaggcacaagaattgcttgaactctggaggtggaggttgcagtgagccaagattgtgccactgcactccaacctgggtgacagagcaagagtccatctcaaaaaactaaactaaactaaaaataaataaataaatatttacaataatatgttagagcattattacttattagtattatttggcagggttaagttcaccttagaataa

SEQ ID NO: 927436 - DNA, 753 bp, Homo sapiens
gtggtacagggaggcacagcccttcctccctctttactaggttggagaaggtagggttgcacatttttataacgtttttcacagtaagtttaaatagttacaaaatatataatgaccaggatgttgtgaaaattaacttttgtaatgcctgcaatggaacctacatgccataatgatttgatactcatcgttcattcaagtaacacataaactatttttttttgagatggagtctcgctctgtcgccaggctggagtgcagtggcgcaatctcggctcactgcaacctccgcctcccgggttcaatcgattctcctgcctcagcctyccaagtaattgggactgcaggtgcgcaccaccacgcccggctaattttttatttttagtagagacggggttttaccatgttggccaggatggtctccatctcttgacctcatgatctgcccgtcttggcctcccaaagtgctgggattacaggcgtgggccacacataaactttttaacttggacattttatagcacctttttctttttaaattttatttccacctgacttttccctacagagttttgtcctaatataatggtttcatgcttgaatgtcttttatcaatcacccttatcatacttcttggccacattagtctgtaaataaaagcacttttgaaatttttaaaattcaaaaaattgaaatgaaaatattttaattgtttgacattataaggctctaagtagtttaaaaatgttcctc

SEQ ID NO: 927437 - DNA, 637 bp, Homo sapiens
catccatcctcagactgcagacccaaggccctgggctctgtctctcctggcctctctgttgctccctggatgctggctgtgcagatcactgtccgcatgagtctccattcacagtggacctgtgtggaggctttaaaatatgtccacaccttctccgctcaaactgtgaagcctaatgcccccaccccttgagtgtacaccagacttagtaacctgcttctaataaatagaatcggccrggtgaggtggctcatacctgtaatcctagcactttgggaggcagagacaggtatatcacttgaggtcaggagttcgaaaccagcctggccaacatggtgaaaccctgtctctactaaaaatacaaaaaattagctgggcatggtggtgggcacctgtaatcccagctacttaggaggctgaggcaggagaatcacttgaacctgggaggtggaggttgtagtgagccgagattgcaccactgcactccagcctcggcaacagagcaagactctgtctcaaaataataataataataataataataataataataataaatagaatcatggcatatgatttccaaaatgaggcctgaaaaggcactgggacctcctcctctccttcaggtcacttgcac

SEQ ID NO: 927438 - DNA, 546 bp, Homo sapiens
ggaagcagtcatagtgattcgatgctatataaaggtgaatcaaaccaggctaattacagacaagatgatgagaagttttggtttctgaatatattttgaattgagagctaatggcatgccctgatgcgttgacaaaaattatgagaaaaagagaagtcatacatgacttgacttgaaggtttatgttctaagtagctggagaaaagaggtcaatcttcattgaacwgcagaaaactctagatgaaataagatttgaggacaatatggagagttcagtgttgaatatgttaagttttcaatccctgttacgatgttatactaagtagaaatatctaggagactattgcataagtagttgagagtttgtaagagagatctgggatgaagatatgaattacagagcctacagtccatattgatcactataagaatggatgatatctatacaggattgaatgtagtacagaaaaggtgaggataaaggaatgatttctagggtgcttcaacattaagcgtttgtggaaaagagaagaaacattcaaaggt

SEQ ID NO: 927439 - DNA, 566 bp, Homo sapiens
attccttactgactctacccccactagtttcataagtttagccaagttacttcatgtctcttttgtttgtttgtttttggttttggggggtttatttatttatttttttatgttctgggatacacgttcaggatgtgcaggtttgttacataagtaaatgtgtgccatggcggtttgctgcacctgtctacacatcacctaggtattaagcccggcatgcattagctctgttccctaatgctcccctatccctcctcaccctcccccaacagacactagaatgtgttattcccctccctgtgtccatgtgttctcgttgttcagctcccacttacaagtgagaacatgtggtgtttggttttctgttcctgtgtgagtttgctgaggataacggcttccagcttcatccatgtccctgcaaagggcrtgatctcttcccttttatggctgcatagtattccatggtgcatatgtaccacatttgctttatccagtctatcattgatgggcatttgaattgattccatgtctttgctatggtgaataatgctgcaatgaacatatga

SEQ ID NO: 927440 - DNA, 572 bp, Homo sapiens
agaacatctcactactgggagaacagtaccaagactttcatgagggacctacctccatgagccaaacacctcctaactagccccaacaccatcacattggggatcaaatttaaacgtaagtttagggaggataaaccaacagtatcaaagtaataacaaagacctcatcattaatgtataaaaacagaactgatttttatatgttgatttggtatcctgccactttcctaaattcattcactagttttcattttttaagtgcctttaaggttttctacatataaggtcatgtcatgtacaaaacgagacaattgtgcttcttcctttctgatgtgggtgccttttgtttactttttttcctaattgctctggctaagtcttctagtactatgttgaatacaagtggtgagaataggaaaattcaaaaatrtgtaaaaaataaataacacattcttgaaaccaataagtcataaaaaaatagagaaattaaaaaatatatcaggacaaatgaaaatgacaacgcatcacacaccaaacttatgagatgcagcaaaagcagtaataatttggaa

SEQ ID NO: 927441 - DNA, 565 bp, Homo sapiens
aactgactaatacagtaaattggtactggtagagttgggtgctgctgtaaagatacctgaaaatgtcaaagcaactttggaactgggtaacaggcagaggttggaacagttaggaggactcagaaagagacaagaaggtgtgggaaagtttagaactttctagagactgttcagtggctttgaccaaaatgctgatagtgatatggacaatgaagtcgaggctgaggtggtctcagatgggtatgaggaacttgttgggaaatggagcaaaagtcgcttttgctatgctttagcaaagagactggcagcattttgcttctgccccaaagatctatggaactttgaacttgaaggagatgatttagggcatctggcaaaagaaatttytaagttgcaaagcattcaagatgtgacttggatactattaaaagcatttagttttatacattgacaaagatatggcttggaattggaacttatgtttaaaagggaagcagagcataaaagtttggaaaatttgcagcctgatgatggattagaaaagaaaaacccattttctgaggaa

SEQ ID NO: 927442 - DNA, 576 bp, Homo sapiens
gttaccctgccaggttactatgcttttcccacgtttttttgcaatctgcagatcaggagattccctcatgtgcctataccaccagggtcctgggtttcaagcacaaaactgggcggccgtttgggcagacaccgagctagccatgggagattttgttcataccacagtggagcctggaaccccagggagatagaaccgttcactcccctggaaagggggctgaagccagggagtcaagtggtctcgctcagcggctcccactcccgcagagcccagcaagctaagaaccactgtcatgaaattctttttgccatcacagcaatctgaagttgacctgggatgatcaagcttggtgggggcagaggcatccgccattaatgaggmcttagtaggcagttttcccctaacagtgctaaggaggctgggagatctgggttgggcgcagcaaagcggctgtggccagactgcttctctagattcctcctcattgggcagggtatctctgaaggaaaggtaacaggcccagtcaggggcttacaaacaaaacccccatttccctgggacagagctcctggg

SEQ ID NO: 927443 - DNA, 704 bp, Homo sapiens
aaattacagaattaaggagaaaaattttgtgattctttcaatagttacagaaaaagcaactgataaaatttaatatgaacaattaaagtctcagtaaactatgaatcaaaaggaattgcctcaatatgataaaggtattcctacaamagctttaactaacttctgcaatggcaaattaataaatttgtttgcacgaaaatcatagagaagttaagaatgtctgcttttatctctttgttttaacattgtagtggaggttctagccgtgcaagaaagtgaaagaaaaaaataggcatatgattgagagaaaagaagtaaaactgcctccattccaagacaatatgattgtttatgtagaaaatcataaggaacctacaaagcaattgtaattaatttttaaatttaaatgattgtgggatatcagatcaaaataaaaatataacacctagtaaatataaaaaaattcaattgcatttccttctataaactggcaatcaaaattaagaaataactttacaaaacaataaagtttacaatagcaacaaaaaacatactttggaattgttattaatgtgcgagagctctacactgaatacattttaaaggaacaaagagaaattaagaaagacaaataaatgaagagataaactacatagattggaagactcagtattattaagatactgattatctctgcactacca

SEQ ID NO: 927444 - DNA, 595 bp, Homo sapiens
ctcttgctatttctaccacatcttcagttactttctccactgatgctttggacctcccaaagtcacgcaggagggttagaatcatcatcttctaaacgcctgttaatgttgatattttaacttcccccatggatcatggatttcttaatggcatctagaatggagaatcatttccagaaggttttcaatttatattgcccagattcataagaagaatctatctatattggctatagccttatgaaatgtatatttaaaataaccagacttgagagtaattactccttgatctaattgcaaaatggatgttgtgttagcgcatgaaacaacatgaatttccttggacatctccatcagagctcttgggtgaccacatgcattatcagtgatcagtaatattttgaaacggagcctttatttctgagtggtgagtctcartggcttgaaatattcagtaagccatgttgtaaatagatgtactgtcatccagacttcaatgatccatttgtagagcacaggcagagtagatttagcataactcttaatgttcctagggtttttggaatggtaactgagtattggctttaatttaaag

SEQ ID NO: 927445 - DNA, 561 bp, Homo sapiens
ggaggctgaggtgagagaactatttgagcccaagaggttgaggctacagtgagctgtgatggaaacatcacacttcagtatgggcaacaaaaaaacaaaacaaaacaacaaaaccaacccagtccttcctcacagatagttccagaagcacttccttaaagcacttaggatgccgcctagcacacaggtgctcacaaaacgacagtcaagacaaccggatttgagccaaccaaacggtcagccacctggtcttggagcgcgaggactgagacatacagcrgaaggtgtggaatgcggaccctggggccacaggtactcgaggaggctgcctggctcagctcctacaggtagctgggctggagccccgttgagtcccttcctgcctggtactggccaaggtggcttttctctcaaagccccttctcagactggacacggtggctcacatctgtaatcccagcactctaggagaccgaggcaggtggatcacctgaggtcatgagttcaagaccaagcctggccaacatggtgaaactccgtctctactaaaaatacaaaaat

SEQ ID NO: 927446 - DNA, 650 bp, Homo sapiens
gatccaggcatccttgcactctcgggggcccaggaagcccccctgcccctgcaggcttggaagtacctgctccccttgcctggcctatccctgtatccagtgcatgctctgattttggaacaaagttgaggccaagcctgggcactgtcacaacccagcagggtgtgggagtgcactcagggtggcgttgacacaccagccccctgccgcctcggccacctccagactttgagattgagggggttctgagggcatctaggcatgggcctgcaggcacccytcagcacaaacagcctgggcactgtggatgacatgattgatggtggcaggaggctgacaggattctgggcaggtccccggtgaagccccatcttcatgccagaaacgtcctggagcatgggaactcggctgtcagttctggatggagtctgcagcctggaatgagaacttatggtgctttttctgggcccacgtgtggccacccatggatcaataagcacacacttcctcccttctgaagcccataaaaaacccagactcagccagactcagagtcacacagatgttgggacaacctgcctgcagataggagctacccactctgggtctcctctcttctgagggctgcacttgacaggatgaactgcctg

SEQ ID NO: 927447 - DNA, 723 bp, Homo sapiens
tatgctaccttttgggttaaaaaaaaaaattggctgggggtagggggagaatatacacatctatttaaaagaatgcacaagaggctaggcacggtggctcacatctataatctcagcttgaggccaggagttagagaccagcctggccaacatggcaaaaccctgtctctactaaaaatacaaaaattagctgggcatggtggtgcrtgcctgtagtcccaactacttgggaggctgagggacaagaatcactttatctgggagatgaagtgagccgagatggtgccactgcactccagcctgggcgacagagcagactctgtctcaaaaaaaaaaaacaaaaaacaaaaaaacaaaaaacaagaatgtacaagaaaggtaacattctaaccccgggggggcctgggtgactggggacagggtgaaagggagatttcattttatagcctttggcacttttttgaattctgaatggtgtgaatggaatcacctattcaaaataatttttacaagccctatgatttcatattacttagaacaaagcaatttaaataaaaacattaagtggaaaataatacaaatgatccatggatctggcaaaaattatgttggtagagcatgagtgaatgacactggctatgtgaggtaagtgctattatcacaggccctgttttactgaggtctgcatctgatgttccaggggtctggagcctctgaagtcat

SEQ ID NO: 927448 - DNA, 731 bp, Homo sapiens
cactaggactgactaaaataccagtgacccatgctctaggtctcatgctaagtagagctggggccccggatgaaactggacccagtcctgacaccaaggaaggagtttccagtacagtggggtgggggcagtggggaggcagatgaagatgagaggctagtgtggtctgggcttcaacagggggctggtatgaggcactgtgagaaccctggagggaaagatttccagttttgcctgggtacaaaaaaagatgagttcccaggaggtgacattggagctrggctgtgaaggacacacagagagtctgccaagtgggaaagcagtggcaaggctacattccaggtggacagaacagtatgtgcaaggagaagaaatggggaccagtcagattaagaaacagcgtgctcagtgtggctcagtgctaggtgtagggggagggacatggcccctgctcctcagtaggcacaagacactgcgaccaatctcagattcatgctgccactctgctgcgcccactatagccggcttgatcattgctgggcttggaagcagacccacgtttaaatgcagcaagctgcctcctttcaccttggagttggatacaaggcagccctgctctgggccttggtttcctcacctagaaaacggggatgaaagttccttccttaaagggttgctgttacgttttctatcagtatccatcatgaagcctggcagaattccctccacaa

SEQ ID NO: 927449 - DNA, 731 bp, Homo sapiens
cactaggactgactaaaataccagtgacccatgctctaggtctcatgctaagtagagctggggccccggatgaaactggacccagtcctgacaccaaggaaggagtttccagtacagtggggtgggggcagtggggaggcagatgaagatgagaggctagtgtggtctgggcttcaacagggggctggtatgaggcactgtgagaaccctggagggaaagatttccagttttgcctgggtacaaaaaaagatgagttcccaggaggtgacattggagctgggctgtgaaggacacacagagagtctgccaagtgggaaagcagtggcaaggctacattccaggtggacagaacagtatgtgcaaggrgaagaaatggggaccagtcagattaagaaacagcgtgctcagtgtggctcagtgctaggtgtagggggagggacatggcccctgctcctcagtaggcacaagacactgcgaccaatctcagattcatgctgccactctgctgcgcccactatagccggcttgatcattgctgggcttggaagcagacccacgtttaaatgcagcaagctgcctcctttcaccttggagttggatacaaggcagccctgctctgggccttggtttcctcacctagaaaacggggatgaaagttccttccttaaagggttgctgttacgttttctatcagtatccatcatgaagcctggcagaattccctccacaa

SEQ ID NO: 927450 - DNA, 783 bp, Homo sapiens
cttaccagctgggacacttaggattagtcactctacctcactgagcctgtgttcttctctataaaatgggggttgatatactgtcctacccacccatggaaaatgctagataaactataaagtgaatgacagatatcagcagctattactattattattattattattatttaagacggagttttgcttgttgcccaggctggagtgcagtggcacaatctcggctcaccgcaacctctgcctcccgggttcaagcgattctggcttagccttcctgagtagctgggattacagacatgtgccaccatgctcggctaattttgtatttttagtagagatggggtttctccatgttagtcaggctggtcttgaactcmcgacctcaggtgatctgtctgcctccgcctcccaaactgttgggattacagacgtgagccaccattcctggcctaagcaactattattattattattattattattattattattattattagtccttggctctcagtactgttttgctgaaatgtcaacctttcgtggttcatcaagtcagttttcagtcccccaggaatactcctaggaatgctctctgtgcacttttgatgggaatttcagggtctgagaattttgtagtgttcagttgaggctaaaagggatactaggccagagacagatgattgtgagctatatggtatacagagggttgaagggggcagatagtgaaataatcgggtcttcctatgtgcccaaatgcccagggtacaaacaccttcccac

SEQ ID NO: 927451 - DNA, 492 bp, Homo sapiens
aaaacacaccaaaatatgaagaccaacaacactgtgaagaaattacatcaacttttgtgcaaaataaccagctagaatcataaaaacaggatcaaattcacacataacaatactaaccttaaatgtcaatgggctaagtgccccaattaaaagacacacacaggcaaattggataaaaagtcaagaccaatcagtgtgctaccttcaggagacccatctcacgtgcaaagacacacataggctcaaaataaagggatgaaggaaaatttaccaagcaaatggaaagcaaaraaagcaggggttgcaatcctagtctctgataaaaccaactttaaaccaacagaggtcaaaatggacaaagaagggcaccacataatggtgaagggatcaatgcaacaaaaagagctaactattctaaacatatatgcacccaatacaggtgcacccagactcataaagcaagctcttagagacctacaaagactcccacac

SEQ ID NO: 927452 - DNA, 583 bp, Homo sapiens
caccaaaatatgaagaccaacaacactgtgaagaaattacatcaacttttgtgcaaaataaccagctagaatcataaaaacaggatcaaattcacacataacaatactaaccttaaatgtcaatgggctaagtgccccaattaaaagacacacacaggcaaattggataaaaagtcaagaccaatcagtgtgctaccttcaggagacccatctcacgtgcaaagacacacataggctcaaaataaagggatgaaggaaaatttaccaagcaaatggaaagcaaagaaagcagggkttgcaatcctagtctctgataaaaccaactttaaaccaacagaggtcaaaatggacaaagaagggcaccacataatggtgaagggatcaatgcaacaaaaagagctaactattctaaacatatatgcacccaatacaggtgcacccagactcataaagcaagctcttagagacctacaaagactcccacacaataacagtgggagactttaacactccactgtcaatattagacaattcaacaagacagaaaatcaacaaggatattcaggacttgaactcagctctg

SEQ ID NO: 927453 - DNA, 595 bp, Homo sapiens
caccagccagcagcagcaacccgcttaagtcccctttcctgctttgaaaggtttgttctttccctcttcacaataaatcttgctgctgctcactctttgggtctgcaccaactttaagagctgttaacagtcaccacgagggtctgcagtttcattcctgaagtcagcgagatcacgaacccactgggaggaacaaataactctggacgcaccacctttaagagctgtaacactcaccgtgaggtccacagcttcattcttgaagtcagggagaccaagattccaccagaaggattaaattctggacacactaagatagggagraacttactagaacagccagggctctgttccagttcctcctaggaacaagttgctcttcaatgttttagtccagtgggtcatgttttccttcccctcgtataaaacctagggtgggatgatttccagggtcctgtagctgcagtgcaagtgcagtacattcaaacaagactccatccaacctgggcagctttcctgagccttgggggactggcatgccctgaatcttaggcttttattgtcacttgttgcctctcagttagataataaatct

SEQ ID NO: 927454 - DNA, 611 bp, Homo sapiens
gcctatgactgttgtccctgaaagcacacctgttctccccaatagtaggtctacagtgcagccactgctgctgccaccctcacccagagcattctgctgtgggccttgggctcaatctgctgctgcctaccacagccagtgcctatccacaccacttgggtgctggaggatgggcccaccaagccctgctttacattcttatgctgttcaagggcctggggacttccctgcccagtccactactgttgacacccgagtgttcctcttaagggactgagatcaggcccacccaacctgttrctaccatcacagttggcactaaactgcacatgcttctgtgggcctggaaactggcccaccttgctcattgcagccactgctaacactggcaaataccacttggttcccaaaggttagacaccccactgctattgccattgtccacaacatgcaggctgctagaggcctgataacccaccaccagcaaagcctatcaatgcctagaggctcaaaaattcatccctctgaaccatctaaaactggtgccagtgtattcagccctagggaccaaggacaggcatgctctgcctgctgctgccaccactggtccc

SEQ ID NO: 927455 - DNA, 492 bp, Homo sapiens
ttttgcaaagttagcagttgctgagtttataatatatattggatccttcacagatagtcttcaaatgatactatatttcttcttgcaaagtataagaatttcacattaaatagtttcatttctcaattcccacctttatgttattgttgtcattcattttacttttatgtagtacaaaaactgcaaaccattgttatttagtgtaaaattttgttatttactttgtaaaggaayttacataacaagaaaaccaataatatattttttctcgtttctatttccagtgttccttactccttttgcatttctatatttccattaggtatcttatttttctgcccaaaggacttcctttaatgtctcttgtaaggctggtttgttaaaaaataatttttttcagtgtttctaagtctgaaaaattcttgatttcatggtcttttttggaaacatatgttaactcttttaaaaattctatttgctagatatatggct

SEQ ID NO: 927456 - DNA, 720 bp, Homo sapiens
tttctgcatgcactgcaaatggctcacaaggcctttataccatgtattttgtgtgctaagctcacacttgatttcatttttctctttattactattaaagctttcattttctctttgttctacattcctcatctacttatttgaaattcaattttatctatttttatattgaatggatttagataatccacctcaaatcctttcttcaaaaaagaaggtataaataaataaacaggcaaataaacataatctccgtgtgagatggacttgaattccacacagtggtaagaatttgtcccaataactccaggaagcaaagaaaactacaggtgaattttaggcataggtggattttcttgcgtttttacggtggctcattttttgcaggttgagggtaggacattccagtcatggtctggagctgatttgttctagctcataagaggtgactgttacatttgcagaaattttgatagctcaaagtcagccacagtgggagtatttgtacaacagaagttgkcaacattaaaattaaatttatgtttttgagaactggtttactggcatgccactgagtttacccttcttcctgtcttctaaatttgaatttaaagtaataacattgtcttttgaggcttacattataggtcaatgtattatagattagaatagagggtgtcaaaattctgaccattgagacttaagtgaaggtaatagcat

SEQ ID NO: 927457 - DNA, 732 bp, Homo sapiens
tggcattttacagagtccacagggaattctgagagtaaattcagacataaattgatatgtgttcatttttcatgctgctaacacttagtgctcaaacagcagtttcttttttttttttttttttttttttttgagacggagtctcgctctgtcgcccaggctggagtgcagtggcgggatctcggctcactgcaagctccgcctcccgggttmacgccattctcctgcctcagcctcccaagtagctgggactacaggcgcccgccactacgcccggctaattttttgtatttttttagtagagacggggtttcaccgttttagccgggatggtctcgatctcctgacctcgtgatccgcccgcctcggcctcccaaagtgctgggattacaggcgtgagccaccgcgcccggccaaacagcagtttcttaaggcgtaagtacagtcaaggcccttggggtcagcctcttaacacctccacccccaggctgggaaagtgcacgcgggcctctgctctgtgatggggagcagatgcctgtgccatgtcagacagcgtgacatcacagcgtctgccctcagccactgtaccccatcgggggagacacctcgatggaagcgccatctctccggctcccacactcccaccaaagcccatttaaccagcatgttctcctgccctatttagtattagggctgggatgtcagagagatgttatgacatagtccttgttc

SEQ ID NO: 927458 - DNA, 606 bp, Homo sapiens
cagcccccactctgccagtgtgggtgtgtgaccaggctaggcaggaggagagggagggagaggacgagggtgatctaagcctgggccccagcccccttgcttgagtaggactttaacgagggtctcatggagagttccagatgcaagagacacagcaggggacaggagacaaggcccctgttcctgcgaggctcacgatctcattagaggacgcgcaagatgaacaagcagcaaactaatgagaagtaatcatttcacatggtcatgattgctgcgaagaaataaaaccagatgaggggctagaatgggccttgggtgggggctcaaggcagaacttgcaaagtcccagaggaggtgacagtgagcagaggcctgggtcctggggctctggcgggccctttccagcctcagctctgccccaggaactcagcccctctggccctggcacatccccatggattcytgaggccctgagggccacgttctctctgtccctcatcaccctgccttcctgcattgggggaaagaggctcaatagagaaatgagggccctgagttgaggccactgtggacgtggggcagagagacctgccgtggggagcagct

SEQ ID NO: 927459 - DNA, 606 bp, Homo sapiens
cagcccccactctgccagtgtgggtgtgtgaccaggctaggcaggaggagagggagggagaggacgagggtgatctaagcctgggccccagcccccttgcttgagtaggactttaacgagggtctcatggagagttccagatgcaagagacacagcaggggacaggagacaaggcccctgttcctgcgaggctcacgatctcattagaggacgcgcaagatgaacaagcagcaaactaatgagaagtaatcatttcacatggtcatgattgctgcgaagaaataaaaccagatgaggggctagaatgggccttgggtgggggctcaaggcagaacttgcaaagtcccagaggaggtgacagtgagcagaggcctgggtcctggggctctggcgggccctttccagcctcagctctgccccaggaactcagcccctctggccctggcacatccccatggattcctgaggccytgagggccacgttctctctgtccctcatcaccctgccttcctgcattgggggaaagaggctcaatagagaaatgagggccctgagttgaggccactgtggacgtggggcagagagacctgccgtggggagcagct

SEQ ID NO: 927460 - DNA, 732 bp, Homo sapiens
gcaatgaaagagtccagtacgttacccaggctggtctcaaactcctgacttcaagccatcctccgacctccacttcccaaaatgctaggactacaggagtaaggcagtgtgccaggttaacagaataacttaagcgcatctattttgttccagttttcggctatctaactccatttgtctcgattacacccacttattcggtttaaactatttacggtgccaaagacacatgaaacgtttcaaatactgycatacaacgaaggagacaatcacaggctttacagaggcaaactgaaactcagattatttgtggccccatatttctacatacactaaagtaacacaatttatgtcaaaatttgataattcttccaagcaaatcagacacgcgacacgtgctaactaaaagtgtgactttttaatcgcagtgtttaagtgtattgcctgtattctgaattatcaccacattcacagagaaaacccgctttaataaaaagtgcacatgaaaaccaatggcggcttagcaccatctcccacaactagtcggacacattaggcagttaaaggtagaatcctcaggaaaaatcaatgagtttaacgaaagtgagtctcttaatagcactgaggagttctttccccactgactcctcccgtaattcaacacccacacatagaaaacccatccccttttatagacaaaatcccaaaccttcgctttctattcttgccgag

SEQ ID NO: 927461 - DNA, 732 bp, Homo sapiens
gcaatgaaagagtccagtacgttacccaggctggtctcaaactcctgacttcaagccatcctccgacctccacttcccaaaatgctaggactacaggagtaaggcagtgtgccaggttaacagaataacttaagcgcatctattttgttccagttttcggctatctaactccatttgtctcgattacacccacttattcggtttaaactatttacggtgccaaagacacatgaaacgtttcaaatactgtcatacaacgaaggagacaatcacaggctttacagaggcaaactgaaactcagattatttgtggccccatatttctacatacactaaagtaacacaatttatgtcaaaatttgataattcttccaagcaaatcagacacgcgacacgtgctaacyaaaagtgtgactttttaatcgcagtgtttaagtgtattgcctgtattctgaattatcaccacattcacagagaaaacccgctttaataaaaagtgcacatgaaaaccaatggcggcttagcaccatctcccacaactagtcggacacattaggcagttaaaggtagaatcctcaggaaaaatcaatgagtttaacgaaagtgagtctcttaatagcactgaggagttctttccccactgactcctcccgtaattcaacacccacacatagaaaacccatccccttttatagacaaaatcccaaaccttcgctttctattcttgccgag

SEQ ID NO: 927462 - DNA, 732 bp, Homo sapiens
gcaatgaaagagtccagtacgttacccaggctggtctcaaactcctgacttcaagccatcctccgacctccacttcccaaaatgctaggactacaggagtaaggcagtgtgccaggttaacagaataacttaagcgcatctattttgttccagttttcggctatctaactccatttgtctcgattacacccacttattcggtttaaactatttacggtgccaaagacacatgaaacgtttcaaatactgtcatacaacgaaggagacaatcacaggctttacagaggcaaactgaaactcagattatttgtggccccatatttctacatacactaaagtaacacaatttatgtcaaaatttgataattcttccaagcaaatcagacacgcgacacgtgctaactaaaagtgtgactttttaatcgcagtgkttaagtgtattgcctgtattctgaattatcaccacattcacagagaaaacccgctttaataaaaagtgcacatgaaaaccaatggcggcttagcaccatctcccacaactagtcggacacattaggcagttaaaggtagaatcctcaggaaaaatcaatgagtttaacgaaagtgagtctcttaatagcactgaggagttctttccccactgactcctcccgtaattcaacacccacacatagaaaacccatccccttttatagacaaaatcccaaaccttcgctttctattcttgccgag

SEQ ID NO: 927463 - DNA, 738 bp, Homo sapiens
aaggacgccggaagccgtgcccggaaatcccgcctacctccagcggccaatcattgcgaaggcggtgggcgtcagccagttactgcaaaggctgtgggcgtgtcctgaggccgctccgccccagcaggcctgcggctccatcatctcgcggtaactcttccgagaccacgcttgtgccrcgtggcgggccgcggtggattaaggcacacgcgaactgtgagccctttgcaattgtgggcatggaagacctacaccctaactggcatcctgagtgtggcaagacattaactaacccacagggaacacatgaaacatctcacttcattaggcaggctaggctgatggtaccgaatattgcagatccagaggggagagagagggaccagcgctgctgcaggggcgagggcagcagcggtggcttggggggattggggcagggcgggtgcgtgggactaaagtcgactggtacgttgctgaggtggaattcatctgcaccagaagctgaaaccctgcaaggattctgtcaggtctaggcaaatacatactccgagttccatggttcctccctgaggatgctgtactcacaggggcattccaaaggacttctcatcctgtgccctgggcacacgggaggcctaccgccatggtcgccaatgcagtgatccgtgtgcactgctttgctggtgcagaggctctcacaagtgcagtggtggccgtgtgcctgctagcggggctctg

SEQ ID NO: 927464 - DNA, 609 bp, Homo sapiens
ctgcacctaagaccacggagaactctagcctggaagattgaaaaacttagttctatacactgttttgttactaacttgttgtgtcacctcaggcaagtcccagcttctctctgggccttcaactgcaaaatgagggaattctacctgaaagttcctttcaaccgggactgtccttgagttgggctgaaacaggagctcagggcaagtccacaatatctggtctctcatgagtagkgaccaggcatttgctgcttgcctgtgacaatctcaggtaattcagtgtaattgttgttagtgtccctttcgctctcaacactgtcttggtttggatgattctttttttttttttttttttggttatcctactgaagatacctgggacatgagggagatgcagccaggaggagaaagcacagagtgaattcagagggtccagagtgctgtctgtccctgtgtcttctgcaccctctccctggccctgtggcaccagatgagctccaatcctgcagattaagcatctccgcctgactcttctgtggcctttttgttccccggggtctgcagatggagggcacatagtacagccagcctttatgggggcagcaaaga

SEQ ID NO: 927465 - DNA, 586 bp, Homo sapiens
tttctccttggctctgaggccatgacagctagccagtctagtgtaggcccatttgaattctaaagtgtgtcagccctggccaccctacagcaggggatgaagagcaggctcttggcatggtcttcttcagacccctctcccttgccttgcatgcatgtcctcatggaaaaatgtgctgtgtgagcaggttaggggtgggtggggtgggagaaaatggaatattttctgaaagaagatccttttcagcaattgttttaaagttgagccaggcgtggtggctcacatctgcagtcccagcactttgggagcaggaagatcgcttgaggtcaagagtttgacaccagcctgggcaacatagcaagaccctgtttctaaagaaaaaaaaaagaagaagaaagaaagaaagaaagaragagagagagagaaagaaagaaagaaagaaagaaagaaagaaagagaaagaaagaaagaaagaaagaaagagaaagaaagaaagaaagaaagaaagaaagaaagaaagaaaacttagctgagcatggtggtatgtgcctatagtctctgctacttgggaggctgaggcaggagt

SEQ ID NO: 927466 - DNA, 608 bp, Homo sapiens
cgggtgaggcaatgccttgccctgcttcagctcatgctcagtatgctgcacccactgtcctcaacccactttccaacactccccagtgagatgaacctggtacctcagttggaaatgcagaaaacacccgtcttctgcgtggctcatgctgggagctgtagactggagctcttcctattcagccatcttggctccacccctcagtccaagttgttgtcaattcttaatccctgacactcatctgcaggaccactgagcggcttccacccttaaggggtacaaggtgcagaacaacatgctcccagagagctaaggcaccccgacactgagtcaggcatttaggatggcagcattttggtgaggaggcatcttctccgtagtctagccagacacatctcatcgcgcctctgattctgttttgataagtgtcttcctcagaartatgccctcaaaatcccttgtactaggaggcattgctgccttgattgctacacatctgcctgttgttgctttctcctttactctgctttttggcattgtgcgcctttctcttaactagtcactagttagtgggaaatcacacttctttccacagtaaaacaccacaa

SEQ ID NO: 927467 - DNA, 660 bp, Homo sapiens
tctgactcatggctcagtgtatcacaggggcttccagcacctggcaagaccccatggtcaccatctgtattagtcagtgttcttcagagaaacagaatcaatgggatatagagagatacatattagaagagatctattataagaattggctcatgcagttatggaggctaagaaacctcacaatctgctgtctgcaagctggaaaaccaggaaagttggtagtgtcattcagtcttagctgaatcccaaaaacctgagaaccaggaatgccgatttctgagggcaggaggagatggrtatcccagctcaagcagggaaagcaaattcacccttcctcctgactagtcaggtcctgtttagtcacgtcctcactagattggatgatgcccacctatattggtgaaaggaatcttctttactctgtctgctgattaaaatgttgatttcttccaatcaccctcacagatatatttagaaataatattttaccagctatctaggcatcccttagcccagtcaagttgaaacactgcacctaactatcacgcaatcatagtaagtatcatttagatgattgaatccctagaacagccctagaaggtagttcttaccacacagaagagggactgaggtttagcgatcttatagaactctcccttt

SEQ ID NO: 927468 - DNA, 541 bp, Homo sapiens
attattgtaatattacagctattatggattcggtttctaaataacatttgttgtttttccatatcataaaagtaatgaatctccattgtggaacatttggaaaaaacaaaacaagacacacatgtaagaaaaaatgacctattctcctgccacatggagataatcacagttattttgatatrtttcattatagattttttcatgatatgtgtacgtatgtatgggtatacactcttaagtgtgtgcttacacgtgctccaaatgtgtgtgtgtgcacatgtgcacaatccaatctacatcgtggggaatctacaaagttgtggtcacagtgtagagccagccccacaggcctccccagagacaaggccctggactgcccccaagtcctcccgaaagggacatctgtggtggtggtagggccaggatgccatgagcaaccacctggaggccccgagtactcagcgtgaaccaggtagtggaagggaaggggaagggcagagtgagaaccaggaggaatgcttgcttttctttccaagcacaa

SEQ ID NO: 927469 - DNA, 541 bp, Homo sapiens
attattgtaatattacagctattatggattcggtttctaaataacatttgttgtttttccatatcataaaagtaatgaatctccattgtggaacatttggaaaaaacaaaacaagacacacatgtaagaaaaaatgacctattctcctgccacatggagataatcacagttattttgatatgtttcattayagattttttcatgatatgtgtacgtatgtatgggtatacactcttaagtgtgtgcttacacgtgctccaaatgtgtgtgtgtgcacatgtgcacaatccaatctacatcgtggggaatctacaaagttgtggtcacagtgtagagccagccccacaggcctccccagagacaaggccctggactgcccccaagtcctcccgaaagggacatctgtggtggtggtagggccaggatgccatgagcaaccacctggaggccccgagtactcagcgtgaaccaggtagtggaagggaaggggaagggcagagtgagaaccaggaggaatgcttgcttttctttccaagcacaa

SEQ ID NO: 927470 - DNA, 765 bp, Homo sapiens
tgttggagtttgctggaggtccgctccagacctgtttgcctgggtatcaccagcggaggctgcagaacagcaaatattgcagaatggcaaatgttgctgcctgatccttcctctggaagctttgtcccagaggggcatctggctgtatgaggtgtcattcmgcccctactgggaagtgcctcccaattaggctactcaggggtcagggacccacttgaggaagcagtctgtccattctcagatctcaaactccatgctgggagaacactactctcttcaaagctgtcagatagggacgtttaagtctgcagaagtttctgctgccttttgttctgctatgccctacccccagaggtggagtttacagaggcaggcaggcctccttgagctgcggtgggctccatccagtttgagcttcctggccactttgtttacctactcaagcctcagcaatggtggacacccctaccccagcctcactgctgccttgcagttcaatctcagagtgctgtgctagcagtgatcggggctccatgggagtaggactccccgagacaggtatgggttacaatctcctggtgtgccatttgctacgaccattggaaaagcacagtattagggtgggagtgtctcaattttccaggtaccgtctgtcacagattcccttggctaggaaagggaattccctgactccttgcacttcccaggtaaagcaatgccctgccctgcttcagctcatgccttgtgggctgcacccactgttca

SEQ ID NO: 927471 - DNA, 765 bp, Homo sapiens
tgttggagtttgctggaggtccgctccagacctgtttgcctgggtatcaccagcggaggctgcagaacagcaaatattgcagaatggcaaatgttgctgcctgatccttcctctggaagctttgtcccagaggggcatctggctgtatgaggtgtcattcagyccctactgggaagtgcctcccaattaggctactcaggggtcagggacccacttgaggaagcagtctgtccattctcagatctcaaactccatgctgggagaacactactctcttcaaagctgtcagatagggacgtttaagtctgcagaagtttctgctgccttttgttctgctatgccctacccccagaggtggagtttacagaggcaggcaggcctccttgagctgcggtgggctccatccagtttgagcttcctggccactttgtttacctactcaagcctcagcaatggtggacacccctaccccagcctcactgctgccttgcagttcaatctcagagtgctgtgctagcagtgatcggggctccatgggagtaggactccccgagacaggtatgggttacaatctcctggtgtgccatttgctacgaccattggaaaagcacagtattagggtgggagtgtctcaattttccaggtaccgtctgtcacagattcccttggctaggaaagggaattccctgactccttgcacttcccaggtaaagcaatgccctgccctgcttcagctcatgccttgtgggctgcacccactgttca

SEQ ID NO: 927472 - DNA, 765 bp, Homo sapiens
tgttggagtttgctggaggtccgctccagacctgtttgcctgggtatcaccagcggaggctgcagaacagcaaatattgcagaatggcaaatgttgctgcctgatccttcctctggaagctttgtcccagaggggcatctggctgtatgaggtgtcattcagcccctactgggaagtgcctcccaattaggctactcaggggtcagggacccacytgaggaagcagtctgtccattctcagatctcaaactccatgctgggagaacactactctcttcaaagctgtcagatagggacgtttaagtctgcagaagtttctgctgccttttgttctgctatgccctacccccagaggtggagtttacagaggcaggcaggcctccttgagctgcggtgggctccatccagtttgagcttcctggccactttgtttacctactcaagcctcagcaatggtggacacccctaccccagcctcactgctgccttgcagttcaatctcagagtgctgtgctagcagtgatcggggctccatgggagtaggactccccgagacaggtatgggttacaatctcctggtgtgccatttgctacgaccattggaaaagcacagtattagggtgggagtgtctcaattttccaggtaccgtctgtcacagattcccttggctaggaaagggaattccctgactccttgcacttcccaggtaaagcaatgccctgccctgcttcagctcatgccttgtgggctgcacccactgttca

SEQ ID NO: 927473 - DNA, 650 bp, Homo sapiens
gagcttacatctccacttactgtcaataaagtggtagcatgcaatgttcacctttcatgagggatgagtcagtggggctaagcgggaagcagtttccataccacccatctgccttgaggcagcgtggtaagtgctccacttttgctggagtggtgtgggtaaggtccagtgggaagctgaacatacaaacacacccaccccttgtactacatgtcaaaaaagagatgcttgatgaaaaaaaawtatgaaaataggacctagactttcctaacataatagacaaaatgtccaagataaaattttaaaaattacctatcataggggaggagccaagatggccaaataggaacagctccggtctacagctcccagcgtgagcgacacagaagacgggtgatttctgcatttccatctgaggtaccgggttcatctcactagggagtgccagacagtgggcgcaggccagtgggtgcgcgcaccgtgcgcaagccaaagcagggcgaggcattccctcacctgggaagcgcaaggggtcagggagttccctttccgagtcaaagaaaggggtgacggacgcacctggaaaatcgggtcactcccacccgaatattgcgcttttcagaccggcttaaaaaacggcgcaccacgag

SEQ ID NO: 927474 - DNA, 537 bp, Homo sapiens
aggaaagcacatgtatgtgatggttaacattctcagagctccacttcccaaactttcttttctatatgtaaatccacatttgaaatacactcaatacatctgcaaaattatgatttctcactaatcctacttatgtacattttgtgcccaagtgaatttcctcaagttggagagactccccagatgaaatatgtaacataatttaaatcacttccaaatagcasaatatatattgtttgtgagaaagacagatttttctccaaagtaattttatttctgttactgaccaaaaaacaaacaccgtacactggagtcttactctaatgctttttttggggcccatctcattggccacctcatggataagataaactgatggtatttcaccacttaaactttgccagatgggattcagatatgccagccacattctaaacacttcactgtttgaaaggacaacaaatagtatttgctgctatgccacttattatctcagcataatactttttattaaaaaattgcacagcatttggcaaa

SEQ ID NO: 927475 - DNA, 537 bp, Homo sapiens
aggaaagcacatgtatgtgatggttaacattctcagagctccacttcccaaactttcttttctatatgtaaatccacatttgaaatacactcaatacatctgcaaaattatgatttctcactaatcctacttatgtacattttgtgcccaagtgaatttcctcaagttggagagactccccagatgaaatatgtaacataatttaaatcacttccaaatagcacaatatatattgtttgtgagaargacagatttttctccaaagtaattttatttctgttactgaccaaaaaacaaacaccgtacactggagtcttactctaatgctttttttggggcccatctcattggccacctcatggataagataaactgatggtatttcaccacttaaactttgccagatgggattcagatatgccagccacattctaaacacttcactgtttgaaaggacaacaaatagtatttgctgctatgccacttattatctcagcataatactttttattaaaaaattgcacagcatttggcaaa

SEQ ID NO: 927476 - DNA, 537 bp, Homo sapiens
aggaaagcacatgtatgtgatggttaacattctcagagctccacttcccaaactttcttttctatatgtaaatccacatttgaaatacactcaatacatctgcaaaattatgatttctcactaatcctacttatgtacattttgtgcccaagtgaatttcctcaagttggagagactccccagatgaaatatgtaacataatttaaatcacttccaaatagcacaatatatattgtttgtgagaaagacrgatttttctccaaagtaattttatttctgttactgaccaaaaaacaaacaccgtacactggagtcttactctaatgctttttttggggcccatctcattggccacctcatggataagataaactgatggtatttcaccacttaaactttgccagatgggattcagatatgccagccacattctaaacacttcactgtttgaaaggacaacaaatagtatttgctgctatgccacttattatctcagcataatactttttattaaaaaattgcacagcatttggcaaa

SEQ ID NO: 927477 - DNA, 581 bp, Homo sapiens
tgcccaaaccacagctgcagacccaggcctccctctccacagaatggggggggcaccctcctgggtgtagctatagccacccaaatcatccctgcagtcttgggtgcccaggaaggcccctctgcctccacaggctcagaagtgtctgttcctatggcctggtttctccctgctgtcagtgcccactccaattttagagcaaagtcagggccaagcccaggcgctgttacatcctgctgagacacacacacacgtggcrcagtgctgacacaccagccccctcccacctcagtcccctctagattttgggtaccaatgagcataggagggaaaccaagggggtactaagggaagttcagcactgggctgcaggttccccttggcacctacagactgggctccatgaaaggaagcaggaagcagacaagttcctggggagaagggagcaggtccctggcgaggcctcaacttcaggccagagagggccttaaggctggtgtgtgggctgctactcccatggacctgagtgtgaacttgtggtgccttttctgggcttgcctatggctgcccatggaccaatt

SEQ ID NO: 927478 - DNA, 592 bp, Homo sapiens
cggattcactcacacacccctctttgttccatacttgactctcccttggcaggtgtgagactgaggcctctagggtgagctgagcatagcttgataagctgagtgggcaaaacaagccttgcagatccaaggcaaaatgcagccaaaggcgcccctggcttcagaggcacctttctggccagaaaaactataccccaaggatcatgtaacactgtgactttattcctctcttttaatattatgttggctactctgtatttttttccttcccatataaattttgaatccgtttgtcaatgtacattaaataatttgctgggttttaattgagatttcattgaaactatagctcattttggaaataactgacatttttaacctttaaaactcaactataggaaaataaataataagaaaaagatcaaaccaattacactcaacaataagaaaatgaacaagttgaataaaaaatggrcaaaagacataaatgaaaaccttaccaaaaatggtatgtggcaaataagcacatgaaaacatgctctacatcatatatcattaaggatttgtaaattaaaacaacagttattagaat

SEQ ID NO: 927479 - DNA, 774 bp, Homo sapiens
aggtgtaacttccaaatcaatggaggcaaaaaatagaacataaaagatcaattcccaaaaattaaagattgttgagaaaaagcatcaaagggtagatgataacgtttaaaaacacttaacaatcaacactggggggaggagccaagatggccgaataggaacagctccagtctacagctcccagcgtgagcgacgcagaagacgggtgatttctgcatttccatctgaggtactgggttcatctcactggggagtgccasacagtgggcgcaggacagtgggtgcagcacactgtgcgccagccgaagcagggcgaggcattgcctcactcgggaagcgcaaggggtcagggagttccctttcctggtcaaggaaaggggtgacagacggcacctggaaaatcaggccactcccacccgaatactgcacttttccaatgggcttaggaaacggtgcaccaggagattatatcccgcacctggctcggaaggtcctacacccacggagtctcgctgattgctagcacagcagtctgagatcaaactgcaaggtggcagcaaggctgggggaggggcgcccgccattgcccaggctcgcttaggtaaacaaagcagccgggaagctcgaactgggtggagcccaccacagctcaaggaggcctgcctgcctctgtagtctccacctctgggggcagggcacagacaaacaaaaagacagcagtaacctctgcagactaaaatgtccctgtctgacagctttgaggagagcagcagt

SEQ ID NO: 927480 - DNA, 594 bp, Homo sapiens
tatttattcctgtccatattctgaattctatttctgtcatttcagccatctcagcctggttcagaacccttcctggagaggtggtgtggccatttgcaggaaagaaggcagtctggatgtttgagttgtcagaattctgctgattgtttcycctcttacgggcttatgttccttcaattttgaagttgctgacctttggatttttttcttttatcctacttgataaccttgggggttcgattatggtataaggtgcatttggccaactggcttcatttctggactattttaggggactgacactcagtttccaactcctggactgtgtactctaactctgggggacttgtcttcggccgcaactttgttctctggctcctcaaggtttggaatccattgtgccaggggtgctgaagtgctcctggaccactggtcactacactctaatgggtggtgtcagctacaatgttttatagtatggtgacaatgggatccatccttctttgcgcatggcagcagcggtggcagtggcagtgcagcagggtgcacacttattggttgcagcagggtgctagcaggtactggggtgcctgc

SEQ ID NO: 927481 - DNA, 482 bp, Homo sapiens
ctgcagagggttagctctgcacagaaacaccttgcaatagaatgcactctccttcgatcagacaccatgaaaaaggcgcatttcagtgaaaaagacaaaaagacaacaagaaaatagaataaaagacccagtgattagctgagatttgaatgaagagagacttaacaaaagctactatgatgtagaaataaaaaaggtcactttttttttttttgagacagaatcttgttctgtcacccaggckggagtgcagaggcatgatctcagctcactgcaagctccgcctcctgggttcatgccattctcctgcctcagcctcccgagtagctgggactacaggtgcccaccaccacgcccagctaattttttgtatttttagtagagatggggtttcaccatgttagccaggatggtctcgatctcctgacctcgtgatccacccgcctcggcctcccaaagtgctgggattacaggtgtgagcc

SEQ ID NO: 927482 - DNA, 482 bp, Homo sapiens
ctgcagagggttagctctgcacagaaacaccttgcaatagaatgcactctccttcgatcagacaccatgaaaaaggcgcatttcagtgaaaaagacaaaaagacaacaagaaaatagaataaaagacccagtgattagctgagatttgaatgaagagagacttaacaaaagctactatgatgtagaaataaaaaaggtcactttttttttttttgagacagaatcttgttctgtcacccaggcgggagtgcagwggcatgatctcagctcactgcaagctccgcctcctgggttcatgccattctcctgcctcagcctcccgagtagctgggactacaggtgcccaccaccacgcccagctaattttttgtatttttagtagagatggggtttcaccatgttagccaggatggtctcgatctcctgacctcgtgatccacccgcctcggcctcccaaagtgctgggattacaggtgtgagcc

SEQ ID NO: 927483 - DNA, 482 bp, Homo sapiens
ctgcagagggttagctctgcacagaaacaccttgcaatagaatgcactctccttcgatcagacaccatgaaaaaggcgcatttcagtgaaaaagacaaaaagacaacaagaaaatagaataaaagacccagtgattagctgagatttgaatgaagagagacttaacaaaagctactatgatgtagaaataaaaaaggtcactttttttttttttgagacagaatcttgttctgtcacccaggcgggagtgcagaggcrtgatctcagctcactgcaagctccgcctcctgggttcatgccattctcctgcctcagcctcccgagtagctgggactacaggtgcccaccaccacgcccagctaattttttgtatttttagtagagatggggtttcaccatgttagccaggatggtctcgatctcctgacctcgtgatccacccgcctcggcctcccaaagtgctgggattacaggtgtgagcc

SEQ ID NO: 927484 - DNA, 631 bp, Homo sapiens
ttcttatctccatatgagaccagcctcgattttactgtccatatctttatcagcattttggtcaaagccattcaacaagtctctagggggttccaaactcccacattttcctgtcttgttttgagccctccaaatcgttccaacctctgcctgttacccagttccaaagttgcttccacatttttgggtatcttttcagcagcaccccactcccaataccaatttaccgtattagtccattttcacactgccagtaaagacatacccaagactgggcaattcacaaaagaaagatgtttaatggactcacagttccacatggctagggaggcctcatagtcatagcagaaggcaaaaggcacgtctcacatggcagcagacaagagaagaagagaacttgtacaggaaaactctactttataaaaccatcaggtctcatgagatttattcactatcrtgagaatagcacaggaaagaccagcccccatgatttggctacctcctaccgggtccctcccacgtgtgggaattgtgggacctacaattcaagatgagatttgggtggggacacagccaaaccatatcagatcatgaaacctaaatgcttgtttgttggatgatccacccattt

SEQ ID NO: 927485 - DNA, 557 bp, Homo sapiens
cacattcaaaagctagcagaaggcaagaaataactaagatccgagcagaactgaaggagatagagacccaaaaaacccttcaaaaaatcaatgaatccaggagcgggttttttgaaaccatcaacaaaattgatagaccactagcaagactattaaagaatgaaaggaagaagaatcaagcagatgcaataaaaaatgataaaggggatatcaccactgatcccacagaagtacaaactaccatgagagaatactgtcaacacatytaggcaaacaaactcggaaatctagaagaaatgaataaattcctggacacatgcaacctccccagagtaaaccaggaagaagttgaatgcctgaatagaccaataacaggctctgaaattgaggcaataattaatagcctatcaagcaataaaactccaggaccagacggattcacagccgaattctaccagaagtacaaggaggagctggtaccattccttcggaaactattccaatcaacagaaaaagagggaatcctccctatctcattttatgaggccagcatcatc

SEQ ID NO: 927486 - DNA, 841 bp, Homo sapiens
ctatcagtggaaattttaaacaggagggatcacgatcctgacgcatccctctgacaaattgtaagcggcagttggaacatggcttcaccaatatgatctccaaggcaaagcatcatgaaagcgatggctaccaagaggtggcagtggtccagtcaaaggaaaaggaggccagtcaggagcccacatcatggcatcagtgttttgggacactcaaggcattttgcttgttgactttctgaaaggccaaacatctgcttattaggagagtgttctgagaagcttagataaagctttggtagaaacatgctgggaaagtctcactagatccttgttcaccacatcaatgctctgctcattccactcatcaaasaagggcaattttgtcagtttcaatgggcagtccttaggaattcaccttacgggctgctttcattccttctaaattctttttgtttcctaatgataaaaagtctccttgccttgcttggaaagatgagagaaagtctccttgccttgtttggacagatgagagatgagatcctcctcttctctcccaggacagaatggtgagacttgagtttcctttctcctcactcttctcctccttgagggagctgctgtgccggacagacctgcccccgtgtctagacactggtagactcgtttaagttcctcacaggcaatcctccatggggtcaaagtggaaggacttatttcttcagggctcagtaatccacatcctggcgcgcaccttcaccagcccagggcggggtagaggagggtgaaagggcgtggctcagagcccgcttcttccgctcgggcgtatcctgggaggaaccct

SEQ ID NO: 927487 - DNA, 777 bp, Homo sapiens
ttaattcttatgaaatgcctttctatatttccagggatacttctttccttgaagactcatattgttagaggtattcaagctttattcagcttgatgtttgaactttgtattttctactcttttacattctacctatatgtatctttatatttaatatatttagatatactggatctggaatttttatccagtttgactcgataagggattcgcttatttgatggaatgaacttattaatatgtttgratctaagtctgccatattgatgcttttttctatttgtctcttgccctttttccttctttatttcttcctttaaaataacattgaagaatattttcactgggtatagaattctaagttttattcaatcagcatgttaaatattttattccatcagcttctttttctatttttttctaataagaaatcagccgtcattcttatctttgttcctttggttgctcttataattttttcatcacttttggtttttaggagtttgagaataatatgctaaggtgtggtttctctcatatgtatctgcttgtggttttctgagattcttagatctattggttgatcattttattcaaatttggataaatttcagtcagtatttttaatatattttttctgcctcattatctcttttcttttcttttgagactttcattatatgtatgttagagctcttgatattggcccacagattatcaagactttgtttattgttttagttctttcttctgtcaatcgtttttactggagaattt

SEQ ID NO: 927488 - DNA, 618 bp, Homo sapiens
atgtattttaaaaattgttgtctttcttgagcaagcaaattgccttttgagctttcatacttgtcaactttagcctttgttttttaatcaccttgtttgaaagtactaagcatacagtgttataaacagtgcgggggctttgaagacagactgagatggagtatgcctcacccctcactattgcatttaattatatttagacaggttattttatgtgtctaagacaaccatcaaatgggaaaacacctaccccagagaattgttgtgagtgttaaataatatgtcctgtgtgcagaccttcatttctcactrtaccacctttcctatttcccatttaatctttggtacatatgcctagccatatatggtacactttctactttgcttgttaccttaaaaacaaactgctctgttgcatactgataagtaactgggattctgctaactctacttacgttatttccaatgttctttatctcttcagtccacactgtgaagattgatgttgactattattatcatatattgctaatttcaattagtttgaaagttacttgttccaacatcacacagctaatatgtaggaaggttggacaaggcctttctgacaccaaagct

SEQ ID NO: 927489 - DNA, 624 bp, Homo sapiens
aataatgactgaaaaaaaaaaaaaaaaaagaatgttttctattcttatggctccagcttccaattctgtatgaaagatttctaaatctacattttctgttgtggcttctgaatgctcattctgtgattccagttgccaccagatatgtcctttgcatctacaaaatttactaaaaaataaactcattttttccattaaaaaaaamaaacaaacaaacagtgatttgactcctgtcacatatgtctgaagagcaaagggctacattgaaagaaactgtctagagactaagtgtttcaaattctcttgaaaattcaaacaatcctgcaaaggacaggcatggtagaaaaagaaatctcaggtgaatagtttctggagaatctattagtttgtagaagaaaaagatgccaaatgtgaaataaaaaccattagttgaaccagaaacattaaatgagtgtgttttgtggggacgtgctgctatgaacattactgtaaaatttcagaaaaccattcaattatgcctgacagcttttaaagaccctgaatctttagttcaatcaaagtgtatttatttattatgaaataaactgttgacgtctcattgaaaaacaaacaaaaaaaaagaaa

SEQ ID NO: 927490 - DNA, 548 bp, Homo sapiens
taccctgcagggacccgatggacagtctgcattgagagggtacttttcaggggtgtaggcagagccctgggcagggggactgccttcattgatgcctctttgaagcatggcaaattcagagacagtctgggagccccactggacagtcwgccccttgagggcaggcctgtgtccagcatttatctctctactcccagcccagcccccagagcatctgtgctcctcctcatcctgagcctggacctgtgcaaggtcgtggctgggaggggactcactccacagcccttagtgccctctccccacctccctgaggccagcagtcctgcctgcaatccttgtctccagtggccgggaactggacccaccgtttcctctggttttaggtctgtgttcaggacatcctgcagcagcagctggccagcgaggtgctccgtgtgctccacaaggagccgggccacctctatgtttgcagggctgtgtgcatggcctgggatgtggcccacaccctagcagctggtggctgcctagctgaacttgaatgaggagca

SEQ ID NO: 927491 - DNA, 548 bp, Homo sapiens
taccctgcagggacccgatggacagtctgcattgagagggtacttttcaggggtgtaggcagagccctgggcagggggactgccttcattgatgcctctttgaagcatggcaaattcagagacagtctgggagccccactggacagtctgccccttgagggcaggcctgtgtccagcatttatstctctactcccagcccagcccccagagcatctgtgctcctcctcatcctgagcctggacctgtgcaaggtcgtggctgggaggggactcactccacagcccttagtgccctctccccacctccctgaggccagcagtcctgcctgcaatccttgtctccagtggccgggaactggacccaccgtttcctctggttttaggtctgtgttcaggacatcctgcagcagcagctggccagcgaggtgctccgtgtgctccacaaggagccgggccacctctatgtttgcagggctgtgtgcatggcctgggatgtggcccacaccctagcagctggtggctgcctagctgaacttgaatgaggagca

SEQ ID NO: 927492 - DNA, 548 bp, Homo sapiens
taccctgcagggacccgatggacagtctgcattgagagggtacttttcaggggtgtaggcagagccctgggcagggggactgccttcattgatgcctctttgaagcatggcaaattcagagacagtctgggagccccactggacagtctgccccttgagggcaggcctgtgtccagcatttatctctctactcccagcccagcccccagagcatctgtgctcctcctcwtcctgagcctggacctgtgcaaggtcgtggctgggaggggactcactccacagcccttagtgccctctccccacctccctgaggccagcagtcctgcctgcaatccttgtctccagtggccgggaactggacccaccgtttcctctggttttaggtctgtgttcaggacatcctgcagcagcagctggccagcgaggtgctccgtgtgctccacaaggagccgggccacctctatgtttgcagggctgtgtgcatggcctgggatgtggcccacaccctagcagctggtggctgcctagctgaacttgaatgaggagca

SEQ ID NO: 927493 - DNA, 548 bp, Homo sapiens
taccctgcagggacccgatggacagtctgcattgagagggtacttttcaggggtgtaggcagagccctgggcagggggactgccttcattgatgcctctttgaagcatggcaaattcagagacagtctgggagccccactggacagtctgccccttgagggcaggcctgtgtccagcatttatctctctactcccagcccagcccccagagcatctgtgctcctcctcatcctgagcctggacctgtgcaaggtcgtggctgggaggggactcactccacagcccttagtgccctctccccamctccctgaggccagcagtcctgcctgcaatccttgtctccagtggccgggaactggacccaccgtttcctctggttttaggtctgtgttcaggacatcctgcagcagcagctggccagcgaggtgctccgtgtgctccacaaggagccgggccacctctatgtttgcagggctgtgtgcatggcctgggatgtggcccacaccctagcagctggtggctgcctagctgaacttgaatgaggagca

SEQ ID NO: 927494 - DNA, 785 bp, Homo sapiens
gggggatgagatgggaggatcccttgagcccaggaagtcgaggctgcagtgagctatgatcgtaccactgcactccagcctgggtgaaagaaaaaagtccctgtctctaaagaaaaaaataaattaattaaatgaataaatggagaagattgcatttgaaatatcactgcatgtatttttttcctttggagaccttcagcttcattcctgtggccctttggaaattcctgccccaaggaagggagagacagaaagctcctgagaggagagggccctctgaggtatgatctgtctccgtgcaacaggatgggagtgggaagccctcctggtgctgggaggtgggggaaacasagggagagggaaagaggaaggggtggaagatcagaggcatgggtctgattcccccggttggaggattcagggggatcagggcctccctgcccttggcatctcctgggggcactgcaggctctcagagaagtccgacagcaggatggcaatggcggaggaggtcatcaagaatctaggtggcggagctgaggttgagctggcatctacgaggcccagagggtcttaagagaggtccgctgggactgaggcagagaggcttccgagagagagccatgagtccagaggctcttctgtgggccccgcagacttcagcaggcagccacccgtggtccctcactaaaccaggagagagctgcacacctctgtgccacccagtcaggatgcctcggcaggggtcagccaggcctgcgtgagggtcgggggccctcccagcc

SEQ ID NO: 927495 - DNA, 785 bp, Homo sapiens
gggggatgagatgggaggatcccttgagcccaggaagtcgaggctgcagtgagctatgatcgtaccactgcactccagcctgggtgaaagaaaaaagtccctgtctctaaagaaaaaaataaattaattaaatgaataaatggagaagattgcatttgaaatatcactgcatgtatttttttcctttggagaccttcagcttcattcctgtggccctttggaaattcctgccccaaggaagggagagacagaaagctcctgagaggagagggccctctgaggtatgatctgtctccgtgcaacaggatgggagtgggaagccctcctggtgctgggaggtgggggaaacacagggagagggaaagaggaaggggtggaagatcagaggcatggktctgattcccccggttggaggattcagggggatcagggcctccctgcccttggcatctcctgggggcactgcaggctctcagagaagtccgacagcaggatggcaatggcggaggaggtcatcaagaatctaggtggcggagctgaggttgagctggcatctacgaggcccagagggtcttaagagaggtccgctgggactgaggcagagaggcttccgagagagagccatgagtccagaggctcttctgtgggccccgcagacttcagcaggcagccacccgtggtccctcactaaaccaggagagagctgcacacctctgtgccacccagtcaggatgcctcggcaggggtcagccaggcctgcgtgagggtcgggggccctcccagcc

SEQ ID NO: 927496 - DNA, 715 bp, Homo sapiens
gttaaaatcaactcctcacctgttcgcgttttctcatgagcttattgcaattcggtcacatcttcaggctccacttctaattctagttttcttgcgagttctgccacatctgccgttcctttctccactgaaggcttgaacccctcaaagtcatccagggtggttggaatcaatttcttccaaactcctgttratgttgatattctgacctcctcatgaatgttcttaatggtatctagaatggtaactcctttccacaacgctttccatttactttgcacagatccgtcagaagaatcactatctatgacagctttagccttacaaaatgtatttcttaactaataagacttgaaagtcaaaatcgctccttgaaccacgggcttcacaatgcatgctgtgttggcaggcgtgaaaacaacattcctctccttgtacatctccatcggagctcttgagtaaccaggtgtgttgtcaaaaagaaataatattttgaaagaattcttttttttctgagcagtaggtctccacagtgggcttcaaatattcagcaaatcatgctgtaaacagatgtcttccaggctttgctgttaagtgtacagagcacaggcagagtagattgaacataattcttaagggctgtagcatttctgggatggtaaacaaacaacggcttcactttaaagtcatcaccagctatgttagcccctaagaa

SEQ ID NO: 927497 - DNA, 636 bp, Homo sapiens
ctccagggttgtcactcaagtagcaagaagggcaaggaggcctgtttcctgcccttaccctgggagaacttggccggggctccacaaggccctgcaggggcagcaggagagcaaatccacgctccttttgaggaagtcaccaccatccctaggaagcagcagatgggggygcactggcagagccctcgcgtgctatagggcgaggccagcagatctgtactcagcctcagccccaggggagctgcaagatagactgagaccctcacaggtttggctctgtgtccccacccaaatctcatctggaattgtaattctcctgtgtcaagggaggaacctggtaggaggggattggatttggggacagtttcccccgtgctgctccccggatagtgaggtagttctcaggagagctgatggtttcaaaatgtggcacttactggttctccactcactccctcctgccatcttgtgaagaaggtgcctgcttccctttcaccttctgccgtgattgcaagtttcctgaagtgcaagtcaataaagcctgtttcctttataaattacccaatctcaggtatttctttatagcagtgtgaaaacaaacgaatacagtccccttccctgaggtgccttctcctt

SEQ ID NO: 927498 - DNA, 596 bp, Homo sapiens
aggtcggggcactctgggtcccagtttccggtgcagttgtaggtcaccatcacctaactgcaggtgcaataaagccctcgtgcctgctgctcgcagcccctgagagtccttcctcctggagaataaaacctttgagggctgcccttcctcactggattttggttgtttctaatgaactgagtcatcctgtctatcaccttcctgggctcatggctccactgaaygctgccccctcggttcgggaggaccagtggtgcccccatctcaccaggctcccaaggaagcttgtgaccttggcttgggcccaaagtagccgggtacccactggggctctgcttctcccttcactaagagaagaaagagaccaaagaatggtctgcacagagggcacctgtgcaaacacccagggaaccagggagttgagccgtcttcatttcctaacagatacattcccttctgtgcctccttaatgagggcatgaagcacagtatgcgtgtgtccagctgtgtgcaaaggcatgtgtgtgtgcatgtgtgttgtgggagcatgcagtaggcagcaaggaaagggcagctcctgctcaaagctgcaagtct

SEQ ID NO: 927499 - DNA, 724 bp, Homo sapiens
cgccactaggtgacaatgtaggtcttggttggtcaactgcaggctacggttgatttggttgggtcccagcggagccttagcgtcctctccggcaaaataacaaatgtccgtcgtgcagggcactttcttcgggaaggactcctgggagctcaggagtttgcatacgaagccgagggagcgaggggcttctgataatgatattcagcgtcgaacagagtcgctcatatgcagagccggagtctctcccagctttgatatatgagattattatggagagtaatgcaggccgagtgatgcttgctcggcaggctgtggatgtggattcctatgtggattgcgaggccgggcgcaacagggatgtcgcttcctagggacaaagaggggtgaggggagagacggccaggaaccaaggactgtcataggagtgccaggcatctctgtctgttctcagcaacaatggattggtccttttcccggaggtacaagggaggccagtggatgggtggattagcatttgtccygagtcctgtagtggaaggcagtgctcccccaggcagagccaacccttggtgagatggccatagggctgctactctggaccccttatatggaggagctcttcactccagggctttacaaagttgaccaaagaggaaaggaagactgggcgggcaccggaatgagatctcagtggagggtcctctgttggcagttgggggtggtg

SEQ ID NO: 927500 - DNA, 734 bp, Homo sapiens
atgaggaagtaagtgatcagtgaggtccttcttaccaatgtctcgaaagccgccctcagacccccggaaagctgtaccctttcccagctcacatgcccttccctcctctatctgcctggcttggctgcacttgcaggtgggtgggtggcggtgaagcttggggagaggctgcatgtgcccccgcactgcctgctgtcttggagtttgaggggagatagaaagrtggatggagaagttgtggtcactgggcttagttcaggccacccacaagaagacaagagagtgtggttggcacctgggcaggggaggcagctccccaaccctcactggaagtcaggtctgtccttggagagttcatcctccttccactcctcttctggtttcttgtctacccctgccacaaagaagtgctcaaaggaacagatgtcaattgtttatcttttttttttgtttgtttgttttttttaagacagggtcttgctttgttgcccaggctggagtgcctggcatgatcatagctcactgacacctcgaactcctgggctcaagcaatcctcttgcttcagcctctccagtagctgggactacaggtgcatgccaccacacctggctaattttattttctgtagagacagggtctggctgtgttacccaggctggtctcgagctcctggcttcaaatgatctccccacttcagcctcccaaagcccttggattacaggtgtgaaccacc

SEQ ID NO: 927501 - DNA, 450 bp, Homo sapiens
gaacaaattccctcagctttctgtgcctcagggtcaccaactgtaaaacagagacaataatactcacgtatggttgcatatgatatgtgtagaacattggctagtaagcacaataagtgctcaataaatgagagttatttgagaatggggataacggggtgttacagacttaacgcttgtgtccccctagaattcatatgttgargctcttaacccccagtgtgatggtatttggaggtgggactttgggaagtaattaggtttagttgaagccattggggtggggctgccataataggattagtccccttgtaagaagaggaagagagaccaaagctcactttctctccatcacgcaaggacacagtaagaaagcagctatctgcaagccaggaagaaccaaatctgtgggcatcttgatcttggacttcccactctttataactgtga

SEQ ID NO: 927502 - DNA, 450 bp, Homo sapiens
gaacaaattccctcagctttctgtgcctcagggtcaccaactgtaaaacagagacaataatactcacgtatggttgcatatgatatgtgtagaacattggctagtaagcacaataagtgctcaataaatgagagttatttgagaatggggataacggggtgttacagacttaacgcttgtgtccccctagaattcatatgttgaagctcttaacccccagtgtgatggtatttggaggtgggactttgrgaagtaattaggtttagttgaagccattggggtggggctgccataataggattagtccccttgtaagaagaggaagagagaccaaagctcactttctctccatcacgcaaggacacagtaagaaagcagctatctgcaagccaggaagaaccaaatctgtgggcatcttgatcttggacttcccactctttataactgtga

SEQ ID NO: 927503 - DNA, 589 bp, Homo sapiens
acctttcccaccacagctctggagggctactacaggcgtgagacgccacctctttctctctgaaactcgaagtctctaatgagtcattatggggtgtgcacatgaaaggccttgtgagtgccagtgagggtattgccaagaaccccatggstgtcaaaggactgtggaccctcttggggactagaaaaggccctcttcatggaaaggcagaactagagtgagtcttggaaggcttggtggtgggattgcagtactcagaggagaagttcaggtcctaacatcagagagaacggagcctgtttctgaaggtcagggggtggccaggggctatactctggggggctggtagcagaatcaactataatgatagctccatccttccaccaactcttttctctcttatctcctgtattagtccatttattttttcattgctataaaggaatacctgagactgggtaatttatacagaagagaggtttatttggctcacagttctgctggttgtacaagcatggccccagcatctgctcagctctggtgaggtctcaggaagcttttatccatggtgcaaggtgaagggggaaca

SEQ ID NO: 927504 - DNA, 589 bp, Homo sapiens
acctttcccaccacagctctggagggctactacaggcgtgagacgccacctctttctctctgaaactcgaagtctctaatgagtcattatggggtgtgcacatgaaaggccttgtgagtgccagtgagggtattgccaagaaccccatgggtgtcaaaggactgtggaccctcttggkgactagaaaaggccctcttcatggaaaggcagaactagagtgagtcttggaaggcttggtggtgggattgcagtactcagaggagaagttcaggtcctaacatcagagagaacggagcctgtttctgaaggtcagggggtggccaggggctatactctggggggctggtagcagaatcaactataatgatagctccatccttccaccaactcttttctctcttatctcctgtattagtccatttattttttcattgctataaaggaatacctgagactgggtaatttatacagaagagaggtttatttggctcacagttctgctggttgtacaagcatggccccagcatctgctcagctctggtgaggtctcaggaagcttttatccatggtgcaaggtgaagggggaaca

SEQ ID NO: 927505 - DNA, 474 bp, Homo sapiens
ggctctcctcctccctcctcagggctgggacctccaggtacttcttgtaaaggccacaggctctctcaaggatttgccccagggtctggggtctccgaatcccagagttctagatgatttagacccccagacacttcacctttctgtggcttagtcttcctctttgcatgaaagaccgaagaacctcaccccccaccctaaaacttatcaaagaaacgagagagaatgaagttaaacatggaaaaataccactcattccacaagcttttactaagcrcctagaagctgcctaacatgtgccagcagtagaaaaatacaggaaagttcaaggggttcacaacatgctaagcagatcaaatatctgcacagataataagaatatagtaatgaagaaagtctttcaatgtctcacttctttccctttttgacccacagtggccagacttcattcatctgttcatttattcattgatc

SEQ ID NO: 927506 - DNA, 736 bp, Homo sapiens
agtagggttgtatattgcaggaatttatccatctcctctaggttttctggtttgtgcacataaaggtgttcatagcagccttgaatgatcttttgtatttctgtggtataggctgtaatatcttccatttcttttctaattgaacttatttggatcttctctcttcttggttaatgtcattaamggtctatcaattttgtttatcttttcaaagaaccagctttttgtttcatttatcttttgtattttttttgtttcaatttcatgtagttgtgctctgatttttgttatttcttttcttccactgtgtttgggtttagtttgttcttgtttctatagttccttaaggtgaccttagattgcctatttgtgctctttcagactttttgatgtaggtgtttaatgctatgaactttcctcttagcaccacttttgctgtaatcccagacgatttcataggttgtgttactattatcattcagtgcaaaaaaggtttaatttctatcttcatttgattgttgactcaatgatcattcaggagcagattatttaatttccatgtatttgcatggttttgagggttcctttcggagtttctaattttatttcactgtggtctgagaaagcacttgatataattttgattttcttaaatttattgagacttgttttgtggccaatcatatggtctactttgaagaatgttccatgtgctgatgaatataatgtgtatatt

SEQ ID NO: 927507 - DNA, 577 bp, Homo sapiens
gattctagtttatcctttccagatttgaaacttctcttactttctcccactaataccatatatatggtcaatggctcatttcctcaaatccttgttagattataatatttaatttgatgaattcatttctcccatgagttaattaagctaatgaaattttctgtatgtattaactaacatgagaactctgggaactctagtgggtctggagggtcaatcctgtatcatggtgctgatcagttatgtggtttcatgatcacaaataacccttatcaagcatcttctgctggacactgtatgtggggcatkgtgccccaagcccaaaatcccagcatgttgggagcccaaagtgggaggatcacttgatccccaagagtttgagaccagcctgggcaacacagggaatccccatctctacagaaaatatcttataaaaattagccaggcatggtggcttgtgcttgtagccccagctaattgcaatactgaggcaggaggcttgcttgagcctgggagattgaggctgctgtgagccaggatcacaccactgcactccagcctgggtgacacagtgaga

SEQ ID NO: 927508 - DNA, 650 bp, Homo sapiens
ttttatttgctacaactaataacacatactattagtggcaaagtctatcagcaactaagaggagcaggtcatacaatacaggtacaatttgcagccagtgagaaaggagatagaggtgagaggaaccaaaaataattttgtatttactaaaacaaaccaaaaaatctctggtattgaatatatgaaaaggarttccaggacagtgaagagttctactcaaacacccatataacactaaatactgccaacaaaacagtaataaatttgaagtacattgccccagaattctagtatttagaactgtggcatgaacataaataaaatgggaactacgtggggtatagggagcagggaaacatatctaaaccattggttctcagacttcatactcctaagaatcatgaggaagttttttcttttgttttgttttgtttcattttgttttgtttgtttgtttagatggagtttcgctctgtcaccaggctggagtgcagtggcgcagtctcggctcactgtaacctccgcctcccaggttcaagcgattttcctgcctcatcctcccaagtagctgggattacaggtgccctccaccaagcccagctaatttttttgtatttttagtagagatgttgttttgctatgtttggcag

SEQ ID NO: 927509 - DNA, 560 bp, Homo sapiens
cagaagaatacaatattttgtataccgttcaaagacatacaaaaacctactaatatgctattggggttttatgtgtgtatagtgaaactataatgcagggcaagggaataacaaatacaaaattccatggtcactctgttggaaagtagaagaagaatgccattggagtcgcataggaaacttcaaagacattagtaatgttctgtttctaagctttgtttgtggtagagaatttattcatttcacttgtgatgttataaaatattcatacatatcaaagaatatgtaaagtrtatacattaaaaaggaaagaataaagaaattatagaaaaacataatttttaaaagaaagaaattaagatgtagcagtgaggcaaaagtgttgaagataaatgcagtgttggggctgggtgtggtggctcatacctatgatctcaagcactttgggaggtcaaggcaggataagttcaataccagcctgagcaacatagcaagaccccatctctacaaaaaaaaattaattaaaaaaaagaaaaaagataaatgcagtgatgaacatg

SEQ ID NO: 927510 - DNA, 794 bp, Homo sapiens
tgttggagtttgctggaggtccactccagaccatttgccttggtatcagcagcggaggctgcagaacagcggatattgatgagccgcaaatgttgctgcctgatcgttcctctggaagcttcgtctcagaggggtacctggctgtgtgaggtgtcagtctgcccctactggggggtacctcccagttaggctattcaggagtcagggacccacttraggaggcagtctgcccgttctcagatctcaaactccatgctgggagaaccacaactctcttcaaagctgtcagacagggacatttaagtctgcagaggtttctgctgccttttattcagttatgccctgcccccagaagtggagtccacagaggcaggcaggcctccttgagctgcggtaggctccacccagtttgagcttcctggccactttgtttacctactcaagccttagcaatgttgggcgcccctcccccagcctggctgccaacttgcagttcgatctcagactgctgtgctagcaatgagcaaggctccatgggcatgggaccctccgaggcatgcgtgggatataatctcctggtgtgccctttgctaagaccattggaaaagcgcagtattagggtaggagtgacccgattttccaggtgccttctgttacagcttcccttggctaggaaagggaattcccttaccccttgggcttcccgggtgaggcaatgcctcgccctgcttcggctcatgctcagtgggctgcacccactatcctgcatccgctgtctgacaagccccagtgag

SEQ ID NO: 927511 - DNA, 678 bp, Homo sapiens
gtaatcgtcttaagaaaatttcagtatcaatcatatgtgtaaaccaaaaataagattctaagctccccaaccaactgatgagcccccctcacagtcaagggcattccaaagtaaacctgaaaatctagttcaggacacgatgggaagagggggtcagacatgctctattataccctactccctttggaattcagggacaactgaccagcactaacattaaagcagagatcttaagactgaccaaacagactttttgtagcaataagatacatcacatgacagatagcaggatctggaataaatcaaagtattttaccctgaaatatatttctttgacatattttgaaatggccctgcaaggctgtccctcgrgaaaatctacattctgtagagagtccctttccctttccaggtcttttccgtgatataggagagaattaactaagagtcatgcacctttcaaggtctgataagagctctgaagcctactacttggagacttcatctgcatggtaaaaccttggtctccacaaccccataatttatttattatttattatttattatttacttttttgagacagagtcttgcactgtcgcccaggctggagtgcagtggtgcaatcttggcttgctgcaacctccatctcccgggttcaagcgattcttctgcctcag

SEQ ID NO: 927512 - DNA, 675 bp, Homo sapiens
tttgtatagttatgtttcctatattctctagcacagagttctgtggagcactgagcccagagtattgtgcccatagctctgacaacttgcaacttcaggtcttcgaataacatctttctttgacatcgcttgattataacctcaatgagaaaaaaaaaaaatcacttcccggcggggtccaatgcctgtgtggagtttgcatgttctctctagtctgcatgggttttctctgagtactgtggtttcctcccacatctcaaagttgtgcacgtcaggttcattggcaagtctacatggtcccaatgtgagtgagtgtgagtgtgccctgcaatggaatggcatcctggccaggttcttgcctcgctccctgagctgcctggatagactctggccacccatgaccctaaactggaatcactgggtagatagtcttacctgtwttattgaatctttcttaaacattgtatagttcacatgtattccaaggtttaatattagaagtgtcttggtctttatttagaagtttggtgatgttttgtgatcagaaatatgccataggaacttaactctttttttttttttttcctgaaactgagtctcactctgtcgcccaggctggagtgcagtggtgctatcttgggtcactgcaacttctgcctcctgggttcaagcagt

SEQ ID NO: 927513 - DNA, 640 bp, Homo sapiens
tactatctttcgtctccgtacatggggagaatacctgctaagccctgtggggttggaccctacagagataagcaacatgtctcctatagcagaccaaagagagaaaaaggaaatagggaaggtgaactaaaaatggaaactccattcccactaggaagagaagcagttctggcagacaaccctcatgggaaccacaatagctccgtcgatgaatggaaaacgaagcacttttaatgtgcatattagaggcctaaaaaaaccagagccaaacctcttaattactgtaaactatctaygatagaccaaaaaccagatgagaatcccacagcctttatggaaaggctgagagagacactaacaaaacacacctctttatcccctgatttagctgagggacagctcatcctgaaggacaagtttatcacacaggcatctccagatattagaaggaaactacagaagcaatctataggaccaaatagcacccaggaaaacctcctgaatatagccactttggtctttgataatagggatcaggaggaggcccaagaaaaagagaggaagcacaagagaaggacagaggctctagtggcagcattgcaagcttgcaaagtccaggatccccatggtgcatccacta

SEQ ID NO: 927514 - DNA, 622 bp, Homo sapiens
tgagtctggtggggacgtggagaacctttatgtctagctcagggattgtaaacacaccaatccacactctgtatctagctcaaggtttgtaaacacaccaatcagcaccctgtgtctagctcagggtttgtgagtgcaccaatcgacactctgtatctagctgctctggtggggccttggagaacctgtgtgtggaaactccgtatctaactaatctgatggggacgtggagaacctttgtatctagctcagggattgtaaacgcaccaatcagcgccctgtcaaaacaggcctctaggctctaccaatcarcaggatgtgggtggggccagataagagaataaaagcaggctgcccgagccagcagcggcaagccgttccggtccccttccattgtgtggaagctctgttctttggctttttgcaataaatcttgctgctgctcactgggtccacgctgctttttatgagctgtaacactcaccacaaaagtctgcagcttcactcctgaagccagtgagaccacgagcccagcgggaggaacaagcaactccagatgcgccgctttaagagctgtaacactcaccgcgaaagtctgcagcccaccagaaagaaaaaactc

SEQ ID NO: 927515 - DNA, 622 bp, Homo sapiens
tgagtctggtggggacgtggagaacctttatgtctagctcagggattgtaaacacaccaatccacactctgtatctagctcaaggtttgtaaacacaccaatcagcaccctgtgtctagctcagggtttgtgagtgcaccaatcgacactctgtatctagctgctctggtggggccttggagaacctgtgtgtggaaactccgtatctaactaatctgatggggacgtggagaacctttgtatctagctcagggattgtaaacgcaccaatcagcgccctgtcaaaacaggcctctaggctctaccaatcaacaggatgtgggtggggccagataagagaataaaagcaggctgcccgagccagcagcsgcaagccgttccggtccccttccattgtgtggaagctctgttctttggctttttgcaataaatcttgctgctgctcactgggtccacgctgctttttatgagctgtaacactcaccacaaaagtctgcagcttcactcctgaagccagtgagaccacgagcccagcgggaggaacaagcaactccagatgcgccgctttaagagctgtaacactcaccgcgaaagtctgcagcccaccagaaagaaaaaactc

SEQ ID NO: 927516 - DNA, 622 bp, Homo sapiens
tgagtctggtggggacgtggagaacctttatgtctagctcagggattgtaaacacaccaatccacactctgtatctagctcaaggtttgtaaacacaccaatcagcaccctgtgtctagctcagggtttgtgagtgcaccaatcgacactctgtatctagctgctctggtggggccttggagaacctgtgtgtggaaactccgtatctaactaatctgatggggacgtggagaacctttgtatctagctcagggattgtaaacgcaccaatcagcgccctgtcaaaacaggcctctaggctctaccaatcaacaggatgtgggtggggccagataagagaataaaagcaggctgcccgagccagcagcggcaagccgttccggtccccttccattgtgtggragctctgttctttggctttttgcaataaatcttgctgctgctcactgggtccacgctgctttttatgagctgtaacactcaccacaaaagtctgcagcttcactcctgaagccagtgagaccacgagcccagcgggaggaacaagcaactccagatgcgccgctttaagagctgtaacactcaccgcgaaagtctgcagcccaccagaaagaaaaaactc

SEQ ID NO: 927517 - DNA, 669 bp, Homo sapiens
tagtagacaagagagcctggacttaaacaacgtgcactctgcacatctgaatgagaaggacaatcgtttccttcatcctgaaacatcacaatggcagagggagcctttgggacatccaggttcccgccgtgggcaacgcccttgtgtgtcctttacagagcccattactgcctggcccgtggtgggaccaggagaccccggctcacctgtgtgctgatgacaacagccgcacccatcttgastggggtcttttcctctcagtctgaagttttttaggctttatgaagcctgtggtcacctaagcgccagggaagagaaggagaggcaaagctgtcatgaaaattaagacgagcagtaagaaaaggaatttggggttggcagtacatgaaacctgccatgctgaagcaatgcccagctatgcagaaaaacctgccaccgggtacccacccctggcacacctctttgcttctcagcaacttgtctgccccaccccaaacccacacctcccagccatggcctggagccctggccacacagacctgagaccatgcatctttttgacatatccttcacggttcccagggcgtcattactcaggcagcaactgtctcagaacctcagcgtgtgatcccggcccctgcagcagcccctctcccacccatgaggggc

SEQ ID NO: 927518 - DNA, 627 bp, Homo sapiens
ttcagatatctacatacagaagcatagttaacaaaaatactcatgttgtccagtcatgcaggcttctggtgtttttccatttcctggattctcaactttagccctcctgccatctcttcattcacttatgcaaaaaatgtatacattacactccaaatacctaatgtgtaattagattcccataaaacaaatctaaccaaaatatttgaaacatcagaggcttcatkttaatcaccttttatatataaaaatatttgccatgattattgagttacattttaacaaacctgcacgttgtgcacatgtaccctaaaacttaaagtacaataataataaaatttaaaaataaataaataaataatacttaagaaatatatttcttgattgttttgcttccacagtcagtttgacatgcagtgcatcgcattttgctaacatgaagcacctgtcctattgtcgatgtgtgacccctacagagagaagaattgagtccctgtggttgactctcattcttccaccttctgcttccagtaagctctgaagcaacaataatccaatattctgttcgagtgcgaatataccaggtccacataaagtgagttttctcaggtttcctcatcagaaacc

SEQ ID NO: 927519 - DNA, 605 bp, Homo sapiens
gcttttgccatgctgtgttgatttcccttcagcctgtactttcaggccttgttagcactctcaggggaaaactgcctagtcaagcctcagtaatggcggatgcccctccccccaccaagctagatcgtcccaggttgacttcagagtactgtgctggctgtgagaatttcaagccagtggttcttagcttgcttgtctccatgggagtgggaaccactgagcgagaccacttggctctctggcttcagccccctttccctctttccaggggagtgaayggttctgtcttggtggagttccaggcgccactgggaaacaacaagaaaacaactcttgcagctagcacagtgactgcccaaacagcctcccagttttgtgtttcaaacccaggtccctggtggtgtaggcacaagagggaatctcctgttctttggattgcaaacctgtggggaaagcatagtaaatgggctggatagcccagtctctcagggcttcccttggctagggaacggaggcccccactccttgcacttcccgggtaaggcaatgcccaacactgcttctgctcgccctccatggtctgcacccactgcctaaccagtccc

SEQ ID NO: 927520 - DNA, 565 bp, Homo sapiens
taaacttatcctttaagattagttagccttcaatagagtcaggtgacagagaggtatgcttcctcaatgcctccctttgtctctccagaaaggaagtaggattttcttcctttcctgtgttatagtagacatcattgaataatttataggcttcttcctagttttccttagtccttctaacacgcaagttagcaaatgtctgtggcaccaatctccatgttctgattctgcatccctctgagggtctacactgggaactgcctggtggcagaattgttctgwggggaactattctctttcctctgttgtcatcctatcattgacctgactgagataccagagattgacaaactctcgggctgcagttatggtggcacttctctcatatggggttagtgtctgatctagcagtaacattatatgtctccatgtcagatcaaaggattgtcctaacccttgtaaaacatcagtatagccatcagggttatctgagaatttacctaggtctattataatttgcttcaagtctgagaggaaaaaggcacatgcactctgactgggccga

SEQ ID NO: 927521 - DNA, 723 bp, Homo sapiens
cagtattagggtgggagtgacccgattttccaggttctgtctgtcacccctttctttgactaggaaagggaattccctgaccccttgcacttcccaggtgaggcaatgccttgccccgctttggctcatgctcggtgcgctgcactcactgtcccacatccactttccgacactccccagtgagatgaacctgstacctcagttggaaatgcagaaatcacccgtcttctgcgtcgctcacactgggagctgtagactgaagttgttcttattcggccatcttggctcttcatgtcaggaggttttttttttttttttttttttttttgagacagagtcttgctctgtcacccaggctggagtgcagtggtgcagtctcagctcactgcaatctctgcctcgcgggttcaggtaattcttctgcctcagcctcctgagtagctgggactacaggcgtgtgccaccacatgcagctaatttttgtatttgtagtagagacagggtttcaccatgttggccaggatggtattgaactcctgacctcaggtgatccacctgcctcagcctcccaaagtgctgggattacaggtgtgagctactgcacctggcccctattgatttttattttattgctctgtgatctgataatgtgtttggtatgatttcggattttttgaatttgatgagggttgtttcatggttggttgtgtgattgattttaga

SEQ ID NO: 927522 - DNA, 723 bp, Homo sapiens
cagtattagggtgggagtgacccgattttccaggttctgtctgtcacccctttctttgactaggaaagggaattccctgaccccttgcacttcccaggtgaggcaatgccttgccccgctttggctcatgctcggtgcgctgcactcactgtcccacatccactttccgacactccccagtgagatgaacctgctacctcagttggaaatgcagaaatcacccgtcttctgcgtcgctcacactgggagctgtagactgaagttgttcttattcggccatcttggctcttcatgtcaggaggttttttttttttttttttttttttttgagacagagtcttgctctgtcacccaggctggagtgcagtggtgcagtctcagctcactgcaatctctgcctcgcgggttcaggtaattcttctkcctcagcctcctgagtagctgggactacaggcgtgtgccaccacatgcagctaatttttgtatttgtagtagagacagggtttcaccatgttggccaggatggtattgaactcctgacctcaggtgatccacctgcctcagcctcccaaagtgctgggattacaggtgtgagctactgcacctggcccctattgatttttattttattgctctgtgatctgataatgtgtttggtatgatttcggattttttgaatttgatgagggttgtttcatggttggttgtgtgattgattttaga

SEQ ID NO: 927523 - DNA, 675 bp, Homo sapiens
gttcaaacatcttagccccagtgaagcaggccattaatttcaactaagaagaagggacaataagtaaaaggcactctaataaaatagacacagggtaaacgtaaaaccccaggtgacttatccccagcttttccatggctgtcaaaacttctcagctcaatggtctagcctctaaaccaaggtgagcgccatggggctttttggaccaagatccctgtgcctttggcttagctcacagccaacccccacttcccaggctctgcccrgaaaagatacaccagagtttggagcaggctcccaggttccccgagccagaggctgcacgaaggaagcatacctgttcctgcgacccatctgccagggccaagcttagccgggcgatgcctctgcgcgctgcgtcaccagctttagttccaaaagggtccttccaaacaggaccatgacgggcgtcaccagcgccgccaatcaaagaccgtccattcatccttactttttctcaatacatgacaaagggcaaaaatatgtgaatcagcatgacgtgtgccctagctctaatgaccacgcaaaaggcaagctgaggggggctggagcgcgcccactgggttcctggtgagggaagatgtggccccacatgggagaccgctaatgaagaaggaggactttgccttcaccaaa

SEQ ID NO: 927524 - DNA, 611 bp, Homo sapiens
tacattaatctgaaccaataacctgtgtggcccacaaagtataattctgctaaatgttttttaaaacacctttttttctaattaaaatctttacaagtgaatacaaaatacaaaagataaatgaaacaaaagttggttcttcgaaaagataaataaaatcaatagaccattaccaagattcaccaaggaaagaagagagaaaatcaaataacctcattaagaaacaaaatgggagatattacaactgacaccactgaaatgcaaaagatcgttcagggctactatgaacactttatacacataaactagaaaacctagaagaaatggataaattcctggaaaaatacaaccctcccagcttaaatcaggaagaattagataccctgaacagaccaataacaagcagcaagatcgagayggtaattagaagattgccaacagaaaaaagtccaggaccagatggattcacagcagaattctaccagacattcagagaagaattggtaccaatccttttgacattattccacaaaatagagaaagagggaacccttccaaattcattatatgaagccagcatcaccctaataccaaaaccaggaaaggacata

SEQ ID NO: 927525 - DNA, 675 bp, Homo sapiens
ggtgatgattgggtatcaattcttattatagatattaatattaatgcttgttggagttccattctttaaatatacatgatatatgtatatatttatacctcatatacatattgatgtgtttatatattcacacatatagacatataaactttgctaatattagcattgatttctatagtgctaaggaaaggtggtaatctttatcctcctcaaaccatcattcccatccaaaccttcatggttcctatttcaaaaagcatgacattattatcatcctaaaaawatattagctaaaatttactttttgatgattatatatcaggcattacattgatcaataacaatggcagtaacaaaagatagatcttaggtaatttcttgctcttaagagaccattttaagagaacgcatggttctgacagaagcatggaaaagtagaaaacacaactacgtgtagctcagaaaacatacacataccctagggtcctattggcatagaatagctttagagcaaaacacattcaaattttatattattgatttaatatctaaagtgtgtttatgcttgaaaaatatggaaaatataaaattcaagctctatttaaaaccatgtagttgtaagctaatcaattgcacaaagaaataccaggtcttaaaaacatgaaatccgtaagc

SEQ ID NO: 927526 - DNA, 675 bp, Homo sapiens
ggtgatgattgggtatcaattcttattatagatattaatattaatgcttgttggagttccattctttaaatatacatgatatatgtatatatttatacctcatatacatattgatgtgtttatatattcacacatatagacatataaactttgctaatattagcattgatttctatagtgctaaggaaaggtggtaatctttatcctcctcaaaccatcattcccatccaaaccttcatggttcctatttcaaaaagcatgacattattatcatcctaaaaatatattagctaaaatttactttttgatgattatatatcaggcattacattgatcaataacaatggcagtaacaaaagatagatcttaggyaatttcttgctcttaagagaccattttaagagaacgcatggttctgacagaagcatggaaaagtagaaaacacaactacgtgtagctcagaaaacatacacataccctagggtcctattggcatagaatagctttagagcaaaacacattcaaattttatattattgatttaatatctaaagtgtgtttatgcttgaaaaatatggaaaatataaaattcaagctctatttaaaaccatgtagttgtaagctaatcaattgcacaaagaaataccaggtcttaaaaacatgaaatccgtaagc

SEQ ID NO: 927527 - DNA, 605 bp, Homo sapiens
catcagttgtttatatggcgtaactctgtcttcaaccatagctgactggactagatatggtgttaaagtacatttggcctgaggacacctctgtattttgagtcctcatgtaaccaactgcaacctaacttagtacgtactaactgaaaacctatcttaggagttgttgttsttgttgttgttgttttaaacaaatagccaagtcttagccaatcatagcggctatgcttcagttagtcacaagtggccaactgattagaccatgttcaaatgaggcaaagcccgaaccgtaatcagtcaagctgtttctgtagttcacttccattttcatccataaacactgcctgccacattgtgaagaacagctctctgaaactcctctggttctgagggctgctcgatttgatggcagtggtggcccatctggagtggccactgccatgatgctggctgcagtcaggcccactaggcttgtcccactcattcagcctggcaggctgtgcttggttcatgctacctgagtacagtcggggctgcacactccatggaaccctgggagctgggaacaggtggaagccccacccgcttctgagttggcagggtaa

SEQ ID NO: 927528 - DNA, 716 bp, Homo sapiens
tgaagccgacctgatcttggtggataagctttttgatgtgctgctggatacagttttccagtattttattgaggattttcacatccatgttcatcaggaatattggtttaaaattctctttttttgttgtgtctctgccaggctttggtatcaggataatcctggcctcataaaatgagttacggaggattccttctttttctattggttayaatagtttcagaaggaatggtaccagttcctctttgtacctgtggtagaatttggctgcgaatcatctggtcctggtctttttttggttggtagattattacttattgcctcaatttcagagcctgttattgttctattcagagattcaacttcttcctggtttagtcttgggagggtgtatgtgtctagtaatttatccatttcttctagattttctagtttatttgtatagaggtgtttatagcattctctgatggtagttcgtatttctgtgggatcagtggcgatatcccctttatcattttttattgtgtctatttgattcttctctcttttcttctttatttgtcttgctagaagtctatcaattttgttgatcatctcaaaaaacaagctcctggattcattaattttttgaagggttttttgtgtctctaactccttcagttctgctctgatctttgttatttcttactttctgctagcttttgaatgtatttgct

SEQ ID NO: 927529 - DNA, 638 bp, Homo sapiens
ttcaacaaatgatgctgggaaagctggatgttcgcatgcaaaacaaaacaaacaaaaaaatgaagttgaatccttacctaacaccatatgcaaaacaaaatgaatcaaagttcaaaacataagacataagcctataaaactcttagaagaaaatctaggtcaaagtctttccaacactggatttggcagtaatgtcttgtatgtgacatcaaaagcacaagcaacaagaaaaaaatgtagagaaatgtggacttcataaaaattgaaaaacgtgcaccaaaaaaacactatcaacaaagtgaaaaggtaacccataaattggacaaaaattgcaaatcgtgtatctggtaagttacggaaatcaagaatatatagagatcttctaaaacccaataacaaaatccaattcaaatatgagcaaaatatttgaatggacatttctctaaagatatgcagatgatccataaraaaattgaaagatgttcaacctcatgatcattatataaatacaaatcaaaacgacaataaaatatcaacacacccattagaatagttattatcaaaaattaaaaaaacagaaaatgagtgttggcaaggatgttgtaaaaaactttgaaaacttgtgcactggaaataaa

SEQ ID NO: 927530 - DNA, 655 bp, Homo sapiens
acagagggagcatttagaacctctagccaaagagaaattgtccgtctccttgtttggaacttgagtttcagcaagcctcaccgccgtaggctaaggtgctctggcattccaattaaacttgcaaggcaggctgggcgcagtggctggcagggcgcagtagcttgtgcctgtaattccagcactttgggaggccaaggcgggtggatcacttgaggtcaggagtttgagaccagcatgccaacacggtgaaaccccatttctactaaaaacacacacaaaaaaattagctagacaaggtggcctgtgcctgtaatcccagctactagggaggctgaracagcagaattgcttgaacctgggaggcagaggttgcagtgagccaagattgtgccactgcagtccagtgactccatctcaaaaaagaaaaaaagaaagaaaggcagtctaggccacaagaactgcaactcctagacaagtcctagtgctgtgtggggctcagagccagtggatgtggggaacaagtaacctagtgagacaccagttgggagtgaccaaaggcgtacttttgtgccacccctctcccaactcctggcagtacagctcatagctccaaaagagattccttgcatctgcttgagaaaaggagaaggaagag

SEQ ID NO: 927531 - DNA, 655 bp, Homo sapiens
acagagggagcatttagaacctctagccaaagagaaattgtccgtctccttgtttggaacttgagtttcagcaagcctcaccgccgtaggctaaggtgctctggcattccaattaaacttgcaaggcaggctgggcgcagtggctggcagggcgcagtagcttgtgcctgtaattccagcactttgggaggccaaggcgggtggatcacttgaggtcaggagtttgagaccagcatgccaacacggtgaaaccccatttctactaaaaacacacacaaaaaaattagctagacaaggtggcctgtgcctgtaatcccagctactagggaggctgagacagcakaattgcttgaacctgggaggcagaggttgcagtgagccaagattgtgccactgcagtccagtgactccatctcaaaaaagaaaaaaagaaagaaaggcagtctaggccacaagaactgcaactcctagacaagtcctagtgctgtgtggggctcagagccagtggatgtggggaacaagtaacctagtgagacaccagttgggagtgaccaaaggcgtacttttgtgccacccctctcccaactcctggcagtacagctcatagctccaaaagagattccttgcatctgcttgagaaaaggagaaggaagag

SEQ ID NO: 927532 - DNA, 634 bp, Homo sapiens
taatcccagctactagggaggctgagacagcagaattgcttgaacctgggaggcagaggttgcagtgagccaagattgtgccactgcagtccagtgactccatctcaaaaaagaaaaaaagaaagaaaggcagtctaggccacaagaactgcaactcctagacaagtcctagtgctgtgtggggctcagagccagtggatgtggggaacaagtaacctagtgagacaccagttgggagtgaccaaaggcgtacttttgtgccacccctctcccaactcctggcagtacagctcatagctccaaaagagattccttgcatctgcttgagaaaaggagaaggaagagtaaatggatttttgtcttgcaacttggataccagctcagccacagyagaatgaggcactggactgagtcccaaagcacccatttcaggccctagctcctagacatttatagacataccgtggacaagaagaaaacccactaccttgaagggaaagaccacattctgacagaatttatcccttactgactaaagagcccttgggccctgaataatcagcagcattagtcagttagtacatgccatgggccttaggtgacactctgagaggtgcttacttcaggtgtcact

SEQ ID NO: 927533 - DNA, 632 bp, Homo sapiens
cgtctctactaaaaatacaaaaattatttgggtgtggtggcacacacctgtaatcccagctacttggggggctgaggcacaagaatcacttgaatgtgggaggcagaggttgcagtgagctgagattgtgccactgcacttcagcctgggcaacaagagtgaaattctgtctcaaaaaagaaaagaaaagaaaaagaaaaaagaaaaacccatgacatgcttttttatttgacgtggcgtgcccaccctgtccctgtattttccaccacccttagccccattccacagcagaggatgtgggaggwtgtgtgaggctgtgggcaggaagagggtatctcctcaaaaggtgtaatattggcttttagggaagatcaaaatggcaatgtcaaaatgtctcacactcaagcaaagcaagacgttctttccatcaaccatcatcacctgggcacctggagatccctggtgcacagaggggtatccaccatgaggcctgtcagatgcctccatttggaaagcaaaaggccggcgagtgggttgggtgggaggcagtgagatgtgagttttgagtggtgattcttctctacaggcccacagaacatacaggccatctgtcgggtcaagtcttgtttgca

SEQ ID NO: 927534 - DNA, 571 bp, Homo sapiens
caacttgagcaaagtttcaggatacaaaatcaatgtacaaaaatcactagcattcttatacaccaacaataatcaagccaagagcaaaatcagggacacgaacccattcacaattgccacaaaaagaataaaaatacctaggaatagagctaaccagggaggtgaaagatctctacaaggagaattagaamccactgctaaaagaaatcagagaagatacaaacaaatggaaaaacattccatgcttacgaatgggaagaatcagtatcattcaaatggccatattgcccaaagcaattcacagattcagtgctattcctatgaaactaccagtgacattcttcacagaactggaaaaactatcttaaaattcatatgaaaccagaaaaagtctgaatagccaagacaatcctaaggaaaaaaaaaacaaacccaaagctggaagcatcacattacctgacttcaaactatactacaaggctgtagtaaccaaaacagcatgatactggtacaaaaacagacacatagaccaatggactagaatagagaacccagaaataagcccacacac

SEQ ID NO: 927535 - DNA, 571 bp, Homo sapiens
caacttgagcaaagtttcaggatacaaaatcaatgtacaaaaatcactagcattcttatacaccaacaataatcaagccaagagcaaaatcagggacacgaacccattcacaattgccacaaaaagaataaaaatacctaggaatagagctaaccagggaggtgaaagatctctacaaggagaattagaaaccactgctaaaagaaatcagagaagatacaaacaaatggaaaaacattccatgcttaygaatgggaagaatcagtatcattcaaatggccatattgcccaaagcaattcacagattcagtgctattcctatgaaactaccagtgacattcttcacagaactggaaaaactatcttaaaattcatatgaaaccagaaaaagtctgaatagccaagacaatcctaaggaaaaaaaaaacaaacccaaagctggaagcatcacattacctgacttcaaactatactacaaggctgtagtaaccaaaacagcatgatactggtacaaaaacagacacatagaccaatggactagaatagagaacccagaaataagcccacacac

SEQ ID NO: 927536 - DNA, 563 bp, Homo sapiens
gcaaagtttcaggatacaaaatcaatgtacaaaaatcactagcattcttatacaccaacaataatcaagccaagagcaaaatcagggacacgaacccattcacaattgccacaaaaagaataaaaatacctaggaatagagctaaccagggaggtgaaagatctctacaaggagaattagaaaccactgctaaaagaaatcagagaagatacaaacaaatggaaaaacattccatgcttacgaatgggaagaatcagtatcattcaaatggccatattgcccaaagcaattcacagattcagtgctattcctatgaaactaccagtgacattcttcacagaactggaaaaactatcttaaaattcatatgaaaccaraaaaagtctgaatagccaagacaatcctaaggaaaaaaaaaacaaacccaaagctggaagcatcacattacctgacttcaaactatactacaaggctgtagtaaccaaaacagcatgatactggtacaaaaacagacacatagaccaatggactagaatagagaacccagaaataagcccacacac

SEQ ID NO: 927537 - DNA, 554 bp, Homo sapiens
gcttcagtgggtggaagccccatgccttggcagcttccatgtggtgttgagcctgcaggtgcacggaagtcaagaattaaggtttgggaacctccacctagatttcagaagatgtatgtaaatgcctggatgaccaggcaaaaatttgttgcatgggtggagccctcatgaaggacctctgctagggcagtgcagaagagaaatgtggggtcagagtccccatagagtccccactggggctccacckggagctgtgagaagagggccacagtcctccagaccccagaatggtagatccactgacagcttgcaccatgcacctggaaaggccacagacacacaacaccagcccatgaaagcagccaagaggagggctataccctgcagtcacacgggtggagctgcccaagaccagaggaacccacatcttgcatcagcatgacctggatgtgagacatagattcaaaggagatcattatggagctttaggatttgactgccctggcaaggtgcggtggctcatgcctgtaatcccagcactttgggaggctgag

SEQ ID NO: 927538 - DNA, 554 bp, Homo sapiens
gcttcagtgggtggaagccccatgccttggcagcttccatgtggtgttgagcctgcaggtgcacggaagtcaagaattaaggtttgggaacctccacctagatttcagaagatgtatgtaaatgcctggatgaccaggcaaaaatttgttgcatgggtggagccctcatgaaggacctctgctagggcagtgcagaagagaaatgtggggtcagagtccccatagagtccccactggggctccaccgggagctgtgagaagagggccacagtcctccagaccccagaatggtagatccactgacagcttgcaccatgcacctggaaaggccacagacacacaacaccagcccatgaaagcagccaagaggagggctataccctgcagtcacasgggtggagctgcccaagaccagaggaacccacatcttgcatcagcatgacctggatgtgagacatagattcaaaggagatcattatggagctttaggatttgactgccctggcaaggtgcggtggctcatgcctgtaatcccagcactttgggaggctgag

SEQ ID NO: 927539 - DNA, 589 bp, Homo sapiens
tgtgagaagagggccacagtcctccagaccccagaatggtagatccactgacagcttgcaccatgcacctggaaaggccacagacacacaacaccagcccatgaaagcagccaagaggagggctataccctgcagtcacacgggtggagctgcccaagaccagaggaacccacatcttgcatcagcatgacctggatgtgagacatagattcaaaggagatcattatggagctttaggatttgactgccctggcarggtgcggtggctcatgcctgtaatcccagcactttgggaggctgaggagggcggatcatgggctcaggagatcgagaccatcctggctaacacagtgaaaccccatctctactaaaaatacaaaaaatttgctaggcatggtggcatacacctgtagtcccagctacttgggaggctgaggcaggagaattgcttgaactagggaggtggaggttgcagtgagccaagatcatgccactgcactccagcctgggcgacagagcgagaatctgcctcaaaaaaaaaaattgactgcccccactggattttggacttgtgtgtgcctgtagccac

SEQ ID NO: 927540 - DNA, 565 bp, Homo sapiens
tgagggaggaggaacattctgtcattagtcagttacatctcagtctttgaatggatgggcctgtgtctgtgtcctgtgaccttcatgagttattctacttgtgtaactcctaacattaggtgagacaaagtgaatagattaattgagaggagtgtctttacccaaagctctggggaaggctctggtaacatcttttaccctggagaataggcctctgttattaaggaggctctggatgtatttcacagggatgagtcttctacttcccctgccatcaccaggagagtgggggatctttttttgttcttcactatgaaaacttagtccggttcctgaaaggtgayggttgagtaccccctaagactgtggtcctcagggtttctctttctcctgatagtctaccctcagcctccagcaagttgtcaaaattactgtgtaagtgtgcctatgagatttttggctcgatttgcttctgcgtcagaaaagcaggtctccactatgattctctagaatctcctttctctccacattgtagggtggtggcttgcctttcaaactcagttct

SEQ ID NO: 927541 - DNA, 582 bp, Homo sapiens
taagccaggtaacaggtaaggaagactaactgagaagccacttttcattccccattctccttctcccctcactaaacacacacacacaaatgggcgttagcctggttgtaaagtgaagtaagacagttgttaatgaactatagatttatgtttgtgtgattttttttattcctttgtcctaattttgctgtaggctgctttttttttggtcttaattatatttaattttacaagagaaaacaaagggtgatttttacagacctcaattatatctagtaggcttcttcatatcactgaggagtttgcaaaccatcatctttgttcacagaggcatttttaattcattttacttttttaaatttaacttttatttttaagttcaggggtacatgtgcaggtttyttatataaatttgtgacatgggggcttgttttatggattattttatcccccaggtattaagcctaatttccagtagttatttttcttgatcctctccctactcccaccctccacccttcaacagagcccagtgtgtattgctcccctctatgtgtctatgccttctcatcatttagctcc

SEQ ID NO: 927542 - DNA, 581 bp, Homo sapiens
atgtttataaactgtatactaaaaattacacagcattgatgagaggaattaaagatggcctaaatagataactattttgtaaagattgcaaaggatctagaataatagaaacaattttgaaaaagaacaatgttggaagacttacttcacttgaattcatgacataaagttacagtaatgaaaatatgatattggtgtatggatagcttcgattaagggaacagaatagagagcagaagtaaactcacaaatatatggacaattgatttttgacaacattgtcaaagtaayttcatagagaaaaaattcttgttaataaactgtgctagatcaattaaatatccttatgaagaaaataaatgaatcccaacctttattgcacactgtataaaaaataactggaaattgaatatggacctaaaaataagcaataacacaaaaaacttcaagataacttgattagcatatgtcttaaagaaaataaattgataattaattactttctcagaaggaaaactcctggttcagatggtttaattggtgaattctatcaaacaaattttaaggaagaagcagaagca

SEQ ID NO: 927543 - DNA, 702 bp, Homo sapiens
gtcccaggcttgcaattagggagagtgtgcaattccagccatactgctaaggtgctttccacaattatggctttggaggtccctactctcctcaagagcaagccctctagtctttggcttgagaataaaatgcctgcagagccacacttctgggtcatcaaagaatgactgactttatatgcacccagattaaaactggcatgatgttcttggtcccagttctgggaaaatgcctgcagcttttcccggtgtctttccctcacagcatctccaagactctccccaaattacctcaagggcttgggagaarcaaagtgctatccctaggcctgggttgcttggatctccaatagaatggtgagtcacagagggaggctctctgcctctctcacatactgaggcttcactcacttttatcacctagatgccaccacagggctaactgcccacatactcctccctgggatctgggatgtccttaatgattctggtggattcccatattccttcttgaattaaagctcacagagagatttggaatgagtagatggagcaagatgaccaaatcatccagcaatcatccctcccacaagaacaccaaattgaacagctatgcacacaaaaaagcaccttcataagaatcaaaacaccaggtgagcaatcacagtgcctggttttaacatcatattaaggaaagatgca

SEQ ID NO: 927544 - DNA, 529 bp, Homo sapiens
tttcaaataataagtacagtgagatacttatttgagagatgcaaactcaacaacagtttggtaagtactttctctattctaatttgaatacattctagtcaattgagatacacaaagcatcaattctccccattggatttggatcccataaaactacccatttccccaaatagatagtgttttaacttaacagacctcataaaaagcttgacactaaaatgagaatttataaattgtgatctgtagtaagttaaatggtgcccaaccctgcgaaaaacaaaaagtatgtccatgaactaatccctggaacatgtaaatgtgatcaaatagggaaaagatatctttgcagatataattgtaaagaatttcaagatgagatygttatggaatatctgagtgggctccaaatctaatggcaagtatctttattagagaaagacatacggggatttaaaacagaaaaggaagaggagacagccatgtgaaaatggagacagagattgaagttatgcagccacaggtcaaagaa

SEQ ID NO: 927545 - DNA, 750 bp, Homo sapiens
taatttataagaaaaagaggtttaattgactcacagttcagcatggctggggaggtctcaggaaaattgcaatcatggcagaaagggaaacaaacatgtccttcttcacagggtggcagggagaagaagaatgagaactgagcgaagggggaaaccccttataaaaccatcagatctcatgagagttcactcactatcatgagaacaatatgagaggaactgccccatgattcagttacccctgacaaggtccctcccatgaaacatggggattatgggaactacagttcaagatgagatttgggtggagatacaaycaaaccatatcattccacccctgacccctcccaaatctcatgtcctcacatttcaaaacacagtcatgcccttccaacagtcctccaaagtcttaactcattccagcattaacttaaaagtccaagtctctcatctgagacaaggcaagtcccttccacctataagcctgtaaagtcaaaagcaagttagttacttcctagatagaatgggggtacaggcattgggtaaatacacccattccaaattggagaaattggccaaaatgaagagactacaggccccatgcaagtctaaaatccatagggcagtcattaaaccttaaagttccaaaatgatctcctttgactccatgtctcacatccaggtcacaatgatgcaagaggtgggcttccatgaccttggacagctccacctctgcggctttggggggta

SEQ ID NO: 927546 - DNA, 629 bp, Homo sapiens
aagagtgcaaggtagattaatgcaaacaaaatggcagttaacatcccatagtgccaaatccacccttagacaagacagactttactgagagggacctctaacccactaaatcttaggaagattctaacctttgtaagttgggcctcgaaaccatatttggtcaagcatccttgtcttttattaagagggacttttaacccactctgtcttaggagagactctaactcccctaagttgggcctctaactcaatcccatcctttacctgggtatcctaccacttacccaaagttggccaattggtgctgcagtctatttcctttgggtcagggtctcttcagtatcacccctttgtggttccccaggatggtgttaccagaaagsggtcctgattcagacctcaagagagggttcttgaatctcacacaagaaagaattcagggcaagtccatatagtaaagtgaaagcaagtttattaggaaagtaaagaaataaagaatggctactccataggcagagcagccctttttagatttttttattttaaatttttgtaggtaaataattggtatatatatttatgaggtacatgagatattttgatataggcatgcaatgcataataatcat

SEQ ID NO: 927547 - DNA, 442 bp, Homo sapiens
actgtaaaatagaaacatttccatagaaagcttgaagagtaaactcaatcaagtagaaaaaagaatcaatgaatgtgacgagagtttcatttgaaattatctagtcagaggagtgaaaaagtgaaaagaatgaagaaagcctatgggacttataggctgccatcaaatgaaccagtgtacatattmtggaatacaaaaaggtgaagataaagaggaaagaaacagaaagcttatttaaagaaataatagctgaaagtttaccaaatctggggagagatatggacatctagatttatgatttacccaaaacacaccaaatacgttgaatctaaagaggtctacactgagacacattacatttaaattttcaaaagtcaaaaacaaacagaattttgaaggcagtaggataaattaacttattatacacaagggaactttcaaa

SEQ ID NO: 927548 - DNA, 600 bp, Homo sapiens
ttaaaatgaggctatactggattaaataggcactaaactcaatgactattacccctacaagaaggtcaggtcatgtaaagacacaggagtacagaggaacacagggagaatgccatgtgatgacagaaacagagattgaagtgatayaactgcaagccaaggaacactaaagattgacagtcaccaccagaaactagaagaggcaaagaagaattcttcctcagagcctccagaaggaaccaatctggctgaaaccttgattttagacttctagcctccacaactgtgagagaataaatttctgttgttttaagaccatccggtttatggtaatttgttaaggtcaccctaggaaactaacacaccctataacactggttctgagatagctgaagcagaaaaagagaaatgggaatccaatcagtagctgatttggctgtggagtaaacaaagtcccagcagtactgggaacaggttcagcaataattacaacctttatcagacagccaagatcccatttgaatcagaatatggtaactgtcacacaccccaagacaccccctacttttgaatcataaaggcgtatgtaattggagaggc

SEQ ID NO: 927549 - DNA, 571 bp, Homo sapiens
ctgatcctcaaagccctgccactgctttatcaactgtctataatattctaaattttttgttgtcatttcaacaatgttcaccacatcttcaccaggcatatattccatcttaagaaaccactttgtttgctcattcgttagaagtaactcctcatctgttaaagtttcatcatgacgttgcagcaatccagtcacatcttcgggctccacttctaattccagttatcttgctttttccaccacatctacagttactttctccactgaaacccctcaaagtcgtccatgaagcttggaattaacttcttccaaactcctgttaatgttgatattttggccacctcctgtgaatgaagtgctgatgaatcctttccagaagatattcaattrattttgctcagatccagcagaggaatcactatctacagcagctattgctttacaaaatatatttcttaaatatgaaaatttgaaagtcgaaattcttccttgatctatgggctgcataatagatgttgtgttagcaggcatgaaaacaacattcatcttgttgcacatttccactggatct

SEQ ID NO: 927550 - DNA, 747 bp, Homo sapiens
gagaaaaagaccaaactgtaaaatatttgaagaggtttattctgagtcagtatgagtgactcagataatatgagtcactacagccagggatgcagcctcaagaagtcctgagaacatgtgcctgaggtgactgggttacarcttgcttttatacatcttagggagacagaagttacaggcaaagacataaatcaacacatgtaaggtatatacattggttcaacctggaaaggtgggacatctcaaatggggcacatacaggtcatgagtggatttaaagattttctgattggcaattggttaaaaaagttaagctttgcctaaagagttgaagtcagcagaaagaaatccttgaattacaataagcagaggttgtgaaagccaaggttcttgttatgtagataaagcctctaaggtagcatacttcagagagaatagatggtaaatgtctctttttggaccttaaaaggtgtcagattcttagttaaatctcttcgggatgaggataagacccagaaagggaaggagattctctacagaacataaatttcccccacaagagatggcttggcaggaccattccaagataatgtcaaagaaatctgtttttcagtaaaatacttcgatttcctccagggccttttatctgtcatgtgatgctataccagagtcaggttggaatttgtcatcttattactacaaaatgtctgttttgtcagtcttacaacctttatcttcatgttaatg

SEQ ID NO: 927551 - DNA, 747 bp, Homo sapiens
gagaaaaagaccaaactgtaaaatatttgaagaggtttattctgagtcagtatgagtgactcagataatatgagtcactacagccagggatgcagcctcaagaagtcctgagaacatgtgcctgaggtgactgggttacagcttgcttttatacatcttagggagacagaagttacaggcaaagacataaatcaacacatgtaaggtatatacattggttcaacctggaaaggtgggacatctcaaatggggcacatacaggtcatgagtggatttaaagattttctgattggcaattggttaaaaaagttaagctttgcctaaagagttgaagtcagcagaaagaaatccttgaattacaataagcagaggttgtgaaagccaaggttcttgttatgtagataaagcctctaaggtagcatacttcagagagaatagatggtaaatgtctctttttggaccttaaaaggtgtcagattcttagttaamtctcttcgggatgaggataagacccagaaagggaaggagattctctacagaacataaatttcccccacaagagatggcttggcaggaccattccaagataatgtcaaagaaatctgtttttcagtaaaatacttcgatttcctccagggccttttatctgtcatgtgatgctataccagagtcaggttggaatttgtcatcttattactacaaaatgtctgttttgtcagtcttacaacctttatcttcatgttaatg

SEQ ID NO: 927552 - DNA, 582 bp, Homo sapiens
cctgccaataccttgtttttagccttgtgatatcctaagcagggggatcagttgagctatgctgtgacagaacctctgatctccagataacaagtgggtgtttttttaagctgctaaatttgtaataatttttttacagcagcaaactaataaaaactagtacawctcgcatcagttcccaaggagttaattgtttgaggtgatccttcatattgttcaatgtattgagacattcccgactaaaagttgtagtaccatgattaacataacagccataaaaaccaatgagatcatgtcctttgcagggacgtggatggagttggaagccattatcctcagcaaactcactcaggaacagaaaaccaaacgctgcatgttcccacttaccagcgggaactgaatgatgagaacacagggacacatgggagggaacaacacacactgggacctgttggggcaggagcgaagagagggagagcatgaggaagagctaatggatgctgggcttaatacctggatgatgagatgatctgtgcagcagaccaccatgcacatgttttcctgtgtaagaaacctgcacat

SEQ ID NO: 927553 - DNA, 582 bp, Homo sapiens
cctgccaataccttgtttttagccttgtgatatcctaagcagggggatcagttgagctatgctgtgacagaacctctgatctccagataacaagtgggtgtttttttaagctgctaaatttgtaataatttttttacagcagcaaactaataaaaactagtacaactcgcatcagttcccaaggagttaattgtttgaggtgatccttcatattgttcaatgtattgagacattccygactaaaagttgtagtaccatgattaacataacagccataaaaaccaatgagatcatgtcctttgcagggacgtggatggagttggaagccattatcctcagcaaactcactcaggaacagaaaaccaaacgctgcatgttcccacttaccagcgggaactgaatgatgagaacacagggacacatgggagggaacaacacacactgggacctgttggggcaggagcgaagagagggagagcatgaggaagagctaatggatgctgggcttaatacctggatgatgagatgatctgtgcagcagaccaccatgcacatgttttcctgtgtaagaaacctgcacat

SEQ ID NO: 927554 - DNA, 673 bp, Homo sapiens
cggacagctggacaatcagccagatcaagggtcagaatggaggagaatcacacagacagacagccacagttagacaaagacctggtcacccacacagccagccaggctaatgcagacagacagccacacacacagagaccaccagacacaggtgaatggaaacacagtcccaccgacaaagtccatagaacatacagaggccactgcacctggctccagactggtagagtactatggaagggccagccatattgtggagggagggggtggaatgttctggaattacatagtggtgatggttgcacggttttatgaatagaaaaaaaaagcacttcattgtacatttttaaagggtgaatttggtaggatgtggaagacatctcaatttttttctttttttgagtcagagtcttgctccgtcacccaggctagagtgcagtggcgtgatctcggctcactgcaacatctgcctcccgggttcaagcaatgctcttcctcaacctcccgagtagytgggattacaggcgcctgccaccacgcccagctaatttttgtattttttgtagagacgggtttcaccatcttggccaggctggtcttgaactcctgatctcgtgatccacctgcctcagcctcccaaagtgctgggattacaggcgtgagccaccacgcc

SEQ ID NO: 927555 - DNA, 732 bp, Homo sapiens
tttcagagatgccctgcccagagaggaggaatctagagaggcagtctggctacagtggctttgtcacactgtggtgggttctacccagttcatatttcccagtggctttgtttacactgtgaggggaaaaccacctactcacgcctcagtaatggtggakgcttctccccccaccaagctggagtgtcccaggtcaacttcagactgctgtactggcagcgagaatttcaagccagtggatcttagctttctggcctccatgggggtgggacctactgagcaagaccacttggttccctggcttcagccccctttccaggggagtgaatggttctgtatcactgggggttccaggcaccactgtgatacaaaaaaaaaaaaaaatcctcctgcagctagctcagtgtctgcccaaacggccacccagttttgtgcttgaaacccagggccctggtggtgtaggcacccgagggaatctcctggtcttcaggttgcaaaaaccatgggaaaagcatagtatctgggccagataccactgtccctcactgcacagtccctcatggcttcccttggctagaggagggagttccccagccccttgtgtttcccaggtgaggcaatgccccaccctgcttctgcttgccctctgtgggctacaaccactgtctaatcagtcctaatgagatgaaccaggtacctcagttggaaatgcagaaatcacctgccttctgc

SEQ ID NO: 927556 - DNA, 626 bp, Homo sapiens
aatctaagcttgatccatagatgatgccattaccccagaagccagtcctgggctctccaagaatttaaggtcacagttctcttcccaaccagcctacactgttctaaagcatgcaggaatgctacgaaccctggggctccccttctcccaggaagtcaggggattactccaagatgagggcctcaaagccttggcacagaggtgttttttgcagtacagaactaccaacaattgcctggaacttacttctctctctctctttttttttttttttttttttttgagacagggtctctgtcacccaggctggagtgaagtggcgcaatctcggctcactgctgcctcgacctccccagctcagatgatcttcccacctcagccccccaaggagctgggactataggcatgtgccaccatgcccagctatttttttgkatttttttgcagagatggggcttcactatgttgcccaggctggccttgaactcctggactcaagagatctgccctctgggccacggcacccagcccacactctttttctctcttttcaaaaaatccatacaaaacccaaatcatgaccaggtagcccaggaggtcttatttgcttagctctcagcttaccc

SEQ ID NO: 927557 - DNA, 558 bp, Homo sapiens
accaaaggtacaaagaggagctggtaccattccttctgaaactattccaaacagaaaaagaggaactcctccctaacttatttatgagtccagcattatcctgataccaaaacctggcagagatacaacgcgaaaaaagaaaatttccggccaatatccctgatgaacatcagtgtgaaaatcctcagtagaatactggcaaactaaatccagcagcacatcaaaaagcttatccaccatgaccaagtcggcttcttccctgggatgcaagtctgrttcaacatatgcaaatcaataaacataatccatcacataaacagaaccaaagacaaaaaccacatgattgtctcaatagatgcagaaaaggcctttgataaaattcaacatcccttcatgctaaaaactctcaataaaccaggtattgatggaacacatctcaaaaagaataacagctatttatgaccaacccacagccaatatcatactgaatggacaaaagctggaagcattccttttgtaaactggcacaagacaaggatgccctctctcaccactcct

SEQ ID NO: 927558 - DNA, 628 bp, Homo sapiens
ttctgggtaagctgagagctaagcaaataagacctcctgggctacctggtcatgatttgggttttgtatggattttttgaaaagagagaaaaagagtgtgggctgggtgccgtggcccagagggcagatctcttgagtccaggagttcaaggccagcctgggcaacatagtgaagccccatctctgcaaaaaaatmcaaaaaaatagctgggcatggtggcacatgcctatagtcccagctccttggggggctgaggtgggaagatcatctgagctggggaggtcgaggcagcagtgagccgagattgcgccacttcactccagcctgggtgacagagatcctgtctcaaaaaaaaaaaaaaaaaaaaaaagagagagagaagtaagttccaggcaattgttggtagttctgtactgcaaaaaacacctctgtgccaaggctttgaggccctcatcttggagtaatcccctgacttcctgggagaaggggagccccagggttcgtagcattcctgcatgctttagaacagtgtaggctggttgggaagagaactgtgaccttaaattcttggagagcccaggactggcttctggggtaatggcatcatctatggatcaagcttagatt

SEQ ID NO: 927559 - DNA, 612 bp, Homo sapiens
tagtgcttccttgaggagctcttttagggcaggcctggtggtgacaaaatctctcagcatttgcttgtctgtaaagtattttatttctccttcacttatgaagcttagtttggctggatatgaaattctaggttgaaaattgttttctttatgaatgttgaatgttggcccccactctcttctggcttgtagagtttctgcagagagatctgctgtaagtctgatggacttccctttgtgggtaacctgatctttctctctggctgcccttaacattttttccttcatttcaactttggtgaatctgacagttatgtgtcttggagttgctcttctcgaggagtatctttgtagcattctctgtatttcttgaatctgaatgttggcctgccttgctaggttggggaagttctcctggataatatcctgcagagtgttttccaacttggttccattctcmccgtcactttcaggtacaccaatcaaatgtagatttggtcttttcacatagtcccatatttcttggagtctttgttcatttctttttattattctttctctaaacttcccttcttgcttcatttcattcatttagtcttccatcactgatac

SEQ ID NO: 927560 - DNA, 653 bp, Homo sapiens
agaggtggaatctagagaggcagtagcccttgctgagctgtaatgtgctccacccagttcgagcttccctgccactttgtttacactgagcatagaactgcctactgaagcttcagcaatcgtggatgcccctttccctgccaagctccagcgtctcaggtcaatctcagactgctgcactagcagcgagcaaggctccgtgggtgtgggacccgccaagccaggtacgggagggaatctcctggtcttccggttgtgaagaacatgagaaaagtgccgtatttgggcagaastgcaccgttcccccagttacagtcactcatggcttcccttggctaggaaagggaaatcctctgatcccttgtgcttcccgggtgaggtgacaccccgccctgcttctgctcaccctccgtgggctgcacccactgtccaaccagacccaatgagatgaaccaggtacctcagttggaaatgcagaaatcacccgttttctgtgtcaatctcgctgggagccgtagactggagctgttcctattcggccatcttggagtttttgtttgtttttgtttttgtttttgacagagtctcactctgttgcccaggctggagtacagtggcacaatctcggctcaccataacctctgcctcccagg

SEQ ID NO: 927561 - DNA, 596 bp, Homo sapiens
tttttaggacatccctaaaggacagcggtggagggtaatcttcccagtgggcagagcttcaagcagtgcacctggttgtgcactttggatggaaggagaaatggccagatgtgtgagtatataccgattcatgggctgtagccaatggtttggctggatggtcagggacttggaagaaacatgattggaaaattggtgacaaagaaatttggggaggaggtatgtggattgacctgagtggtcaaaaactgtgaagatgtttgtatcccatgtgagtgctcaccaatgggtgacctcagcagaggaggcttttaataatcaactggataggatgacccattccgtggacaccactcagcctctttccccagccacccctgtcgttgctcaaagagtccatgaacaaagtggccatggtggcagggatataggttamacatgggctcagcaacatggacttctgctcaccaaggctgacctggctccagacactgctgagtgcccaatttgccagcagcagagaccaacactgagccctcgataaagcaccattcctcgggatgatcagccagctacctgattatattggacctctt

SEQ ID NO: 927562 - DNA, 644 bp, Homo sapiens
tcctcccctctctgcctccgccgtagctgggattgcaggcacaagccatgacgccccccttctcatcagctgtctgggtctttctcggggtcctgacaccaggccaagtgttctgcacacctgacctgctcaaaacaaaaccagttctgccacagtctgggaaaatgaggctcagagaggccttgcagctgtctgtgagcaggctggcatttggatccagtgactgggttctggagcccagtggctctgtggccctgcctctccagccttatgcttctttaaaactgcccatggcctctgaagttgaggatttaggggagcagggctgccagaggggtgaagaaggagatctttctgtgggtgggtgtcagaatgaccrggcctgacactggtccctgctcccctggaaggacagcccctctcggttatgtggggggtgggctgcctagggtgctctggggagaagggagggagagaatggggctggtcgggtggggtgtggattccaggcctgcttggtcaaaaagatacagtatttcctattcccccttacactgggcaggcaggtgtggcccaggcagctctgccaggtgtgcagcccctggagaatgaccctaaagtgcacctaggctgccccctggcgg

SEQ ID NO: 927563 - DNA, 571 bp, Homo sapiens
ggagtttgagaccaccctggccaacatggtgaaacctcgtctctactaaaaatacaaaaattagctgggcgtggtggcgcatgcctgtaatcccagctactcgggaggctgaagcaagagaattgcttgagcctgggagacagaggttgcagtgagcctagatcgtgctactgcactccagcctgtktgacagagcaagactatgtttcaaaaaaaaaagaaaaattagctaggtgtggtgacatgcacctgtagtcccagttactcaggaggctgaggtgagaggatcacttgagcccaggaagttgaggctatgatcgtgctactgcattccagcctgggtgacagccagattctgtctcaaaaatcaaaacacaacagggcacagtggctcactttggccttccaaagtgctgggattacaggtctgcaccaccatgcctggcctgagagtgcatgaattaaagtttctattctcttgctagtctgtcattgcttccctagtgtgtgggaaccatacttgtccccacttctcagtcagagagcagcctgccaacctccaagtctcttg

SEQ ID NO: 927564 - DNA, 681 bp, Homo sapiens
gctggtccagctcgcgctccagcgccagcatctgccgtcgcacctcctcgcaggttgcgctctggccgcccgcctcgggccaagcgccaccgttgccctgctgaagcatcaactgcctctgcaggcgcagcacttcccgctgggactcgcgctgcaggcggtctaagtctctgacgttgagccactgggtgcaggggccgccccttccagtatgcaggtcgctgcagggacccgaggcgacacgcgcctgcaggaggtggcactcctgccgcagctcttcgatctgcttgtccttggccagcggcgcgctcgcctgctccgacaggtcccgagcgcgctggcgggcaaagacttggcacagctccaggccggcgcaactctcgccgggtataggcgcgctcacggcccggaggttggtctcctgcagctygcgggcgcggtcagctaggcgccgcgcgagcccggtcagctccgcgcgctttaccttgagccgcttcaccttctcgtctgcctggtaggggcagcctgcacgccgcagctgcttgttctccgcttgcagggtataacagcggcgcgccagcacccacaacgccttggccagcagccagttcagctttatcagctcgtggtggcccaggcccgggggtgagggagtcaggacttcgcagggctggctctcag

SEQ ID NO: 927565 - DNA, 705 bp, Homo sapiens
gttctgagtgggggagtctctgaagagggaactcagctgggatactctaagcaggaggctcccagtggcaggaggcatctggcatctgggaaatggggtggagggttctcgccgccactggccctgccgattcaggcattcccaccgccctatcctcccacagatcctatagaccctagagatccccccatggactccacaggcctagcctgtccacttccaggatccccatggaccccttttttggaaacatacatagaatcacagccctgccttcaccgccagcagcacctccagcagcagggcctgcactcgagcccatcaccgtggcgtggtgcctcctccatgctctggtactttgtgttactgtggaccacatgcatctgggggtaggcacagatgtgggagatacccagctgcccccaccttgctctctctcatctccgtgggagcactccggccaccccaccttgtgcccaagtctacctccatagcctggcgctgcctgtccaggctgtgctcygagtctgctcgcctcgggccccccccccgcccccagctgatgtgcagccgcagtgcgcggtagacaggcaacagcagcccagcctcccaaatctccaggtggttctgaggatcagtgtccattcagagtagcaatgaaggggaggaggcacacgacaccctctctacctcaccacctgccca

SEQ ID NO: 927566 - DNA, 553 bp, Homo sapiens
tgctaaggaggaaatttatagctataaacacattaaaaaaagaaacacctcaattcaacaacataagtttacacattaagaaactagaaaaagaagaataaaactaaacccaaagttagcagaaggaaggaaacaatagagatcagggcagagataaatggaaaagagaatagaaaaacaataaaaaacaaaaccaaaagttggttcttcaaaaagattaataaaactgacaagactaaggaaaagggaaacaatctaaattacttaaaacagaaatgtatttgagaatatctttatatatttctgtctgtctgtctgtctgtctgtctgcctgtctatgtyttagagacaaggtctagctccattgccctggcaacaatcagatgcaaccacaatcagtggcacaatcggctcactgcagccttgaattcctgggctcgccactatgccagctctttttttttttttttttaagagacaggatcttgccatgttatccaggctgatcttgaactcctggcctcaaggaattttcccacctcggcctcccaaa

SEQ ID NO: 927567 - DNA, 683 bp, Homo sapiens
caacacggtgaaaccccgtctctactaaaaatacagaaattagcggggcgtggtggctggcacctgtagtcccagctactcaggaggctgaggcaggagaatcatttgaaccgaggaagcagaggttgcagtaagctgagatcgcgccactgcactccagcctggtgacagagtgagacaccgtcccaaaaaaaaaaaaaaaaaaaaaaagcaggacactgaactctgggagggcctcctggtgagaggtgagcacagaggggagagatggaggcaggagcatgggyttctggtggccccagcagaccctgtggcagcgtggccagggtcctctgcagggaggaatcttggccaggatgacgctgtagcaggcctcttcctgaggcctccagccagcccggccagggtcccagcgtccagtgacccctgtttcacagcagcagctggggccagccccaggctctcttccactcccagcttcttaaaactggaagtggagagagttgtttgataaaacactggggcaaaccacatcctctcttcaccaagggagagttcgaggggatgccggcagagggagctttagagtagagacccctacccaaccagtgaccgtcacgcacacagcagggcatgctatggagacccccagacagtcactcggggagacccagcaggtccag

SEQ ID NO: 927568 - DNA, 795 bp, Homo sapiens
tgggctttgaggggagccaagcttggccttgctgtggggtacagggagaggggggcatgccatctcctcctcttcctcacctgcccttctgcctgctccaggctgtggctcacactcaggcccctctgtgctctcctgctagagccctgctggcttccctgacctctggggcaagactcagccaacacaatctagagccaggggctggggacttctgtgcatgccccctgcagtacaatgcttccagctctttttgcccctccccagcagttgtggccttcccratgcgggaacagaggccctgcatacatgtcctgccctctctgggaagccgtgctgttgtgtgagctcaatacaatgtgttgggaagaaatggttaaaccggggtcctgcagggcactcaaggaccagccgctgtgaacatctgcacgggacagacagagtttggaagacaagtttgtgccaatagttagaaatgcagagagaggccgggcacagtggctcatgcctgtaatcctagcactttgggaggccgaggcgagaggatcacaaggtcaggagattgaggccatcctggctaacacggtgaaaccctgactctactaaaaatacaaaaaaattagccgggtgtggtggcgggcgcctgtagtcccagctactcgggaggctgaggcgacagagcaagactccatcgcaaaaaaaaaaaaaaagaaatggagagagagctgcccagtgaagtctggatttccatcttctcttgaaaagctcggcttgaattcccatgtggccacagcc

SEQ ID NO: 927569 - DNA, 795 bp, Homo sapiens
tgggctttgaggggagccaagcttggccttgctgtggggtacagggagaggggggcatgccatctcctcctcttcctcacctgcccttctgcctgctccaggctgtggctcacactcaggcccctctgtgctctcctgctagagccctgctggcttccctgacctctggggcaagactcagccaacacaatctagagccaggggctggggacttctgtgcatgccccctgcagtacaatgcttccagctctttttgcccctccccagcagttgtggccttcccaatgcgggaacaraggccctgcatacatgtcctgccctctctgggaagccgtgctgttgtgtgagctcaatacaatgtgttgggaagaaatggttaaaccggggtcctgcagggcactcaaggaccagccgctgtgaacatctgcacgggacagacagagtttggaagacaagtttgtgccaatagttagaaatgcagagagaggccgggcacagtggctcatgcctgtaatcctagcactttgggaggccgaggcgagaggatcacaaggtcaggagattgaggccatcctggctaacacggtgaaaccctgactctactaaaaatacaaaaaaattagccgggtgtggtggcgggcgcctgtagtcccagctactcgggaggctgaggcgacagagcaagactccatcgcaaaaaaaaaaaaaaagaaatggagagagagctgcccagtgaagtctggatttccatcttctcttgaaaagctcggcttgaattcccatgtggccacagcc

SEQ ID NO: 927570 - DNA, 795 bp, Homo sapiens
tgggctttgaggggagccaagcttggccttgctgtggggtacagggagaggggggcatgccatctcctcctcttcctcacctgcccttctgcctgctccaggctgtggctcacactcaggcccctctgtgctctcctgctagagccctgctggcttccctgacctctggggcaagactcagccaacacaatctagagccaggggctggggacttctgtgcatgccccctgcagtacaatgcttccagctctttttgcccctccccagcagttgtggccttcccaatgcgggaacagaggccctgcatacatgtcctgccctctctgggaagccgtgctgttgtgtgagctcaayacaatgtgttgggaagaaatggttaaaccggggtcctgcagggcactcaaggaccagccgctgtgaacatctgcacgggacagacagagtttggaagacaagtttgtgccaatagttagaaatgcagagagaggccgggcacagtggctcatgcctgtaatcctagcactttgggaggccgaggcgagaggatcacaaggtcaggagattgaggccatcctggctaacacggtgaaaccctgactctactaaaaatacaaaaaaattagccgggtgtggtggcgggcgcctgtagtcccagctactcgggaggctgaggcgacagagcaagactccatcgcaaaaaaaaaaaaaaagaaatggagagagagctgcccagtgaagtctggatttccatcttctcttgaaaagctcggcttgaattcccatgtggccacagcc

SEQ ID NO: 927571 - DNA, 688 bp, Homo sapiens
ctcagcctcttcccaggagcccctaagccatgggagagactgcctggaaggcacaaggcagccaggcaggaggcagccagtatccagaagtgccccaaggcccagcccctggacacaccaaccagccctgcacagtcacaagcccaggactttgttcatcctatccccatggcctggagtcctccctgaggaagccttggtagacaagagatagctccaaggggcgaaggctgcacctcgcccaccgccacagccctgtatgagatggcagcctacatgtgggcaggtctgatctcctcaatcttcccacaggcccagtgagcggggcgttatctctgcagtttcagataagaaattaaaggttcttgggggttaagcaacttgcccagggtcacaagagcatgtaggtagcagagtgaggacctaaagcctgactccagwgttgtagtctgatgacccccccgcccaacgcaggcagggccagggatgccactcacacatggcttccaactgccaagctgcttgggggagctagaggaggcaccgccctccatgcactggtgtgccaggagcagggactccagtctgcacctccaccctcactcccccaccccccagcaccacctgcctatccacagcagggccccacctgggtgtattctcccaaactcactgtgagggcatgggg

SEQ ID NO: 927572 - DNA, 791 bp, Homo sapiens
ttcccctgctagtgctggcaccaaggagggccccaggcctggcacagtctggctgacagttctgagacaggatattggagacaggcaggggaacattgctttaacaagcagaataacggccaggtgcggtctgtaatcccagcactccgggaggctgacatgggtggatcatgaggtcaggagatcaagaccatcctggctaacactgtgaaaccccatctctactaaaaatacaaaaaattagctgggtgtggtggcacgcgcctgtagttccgctactccggaggctgaggcagaattgcttgaccctgggaggcggagcttgcagtgagccgagatcgcgccactgcactccagcctgggtgacagagtgagactctgtctcaaaaaaaagaagcagaataacaatttaaggttgtgatagtgactacgaatgctgtgctcacctccaaactccatcccaacactaccctgccccctaagaggggcctgagcatggggtaaaaggctcgctgacagccasagagcaggagcccacgcaagaccaccagaggatgtgcagctgctgttcctagtaggtgaggaaaaagcaggaatctggcatccacacatgtcaggaggcaaaacaggccctgtgctggtttctgcagtcctctccagcccacttccctgctcttcttgctcactggccatgacccaagaaacagcagcagcaccaccagggatcttgttagacacgcagaggctcagactccatccagccctaaccaccagaaccctgggggctcaaa

SEQ ID NO: 927573 - DNA, 622 bp, Homo sapiens
gacactccagcctgggcaacagagggagactcggtctcaaaaaacaacaaaaaagataactaatatatgataatattttttaagtgtcatgtataatagtgaaagaaagcatatacaggcggtggctcacgcctgtaatcccagcactttgggaggctgaggcgggaggatcacctgaggtcaggagtttgagaccagcctggccaacatggtaaaaccccgtttctactgaaaatacaaaattagctgggcatggtggcgtatgcctgtaatcccagctacttgrgaggctgaggcaggagaattgcttgaactccagaggcggaggttgcagtgagctgagatcctgccattgcactccagcctgggcaacagagcaagactccgtatcaaaaaaaaaaaagaaaaaagcatatacaaatttctcacaatggggttaaatagtccacataatggaatgtagattaggccaggagtagtggctcatgcctgtaatcccaacactttgggaggccgaggcgggcagatcacctgaggtcgggagttcgagaccagcctgaccattatggtgaaaccccgtccctactaaaaatacgaaaagttagctgggcgtgattgcgca

SEQ ID NO: 927574 - DNA, 596 bp, Homo sapiens
aatccttaattaactcatccaaagcatcttccattgctgataagtcagaaagttcctcctgtagcttcttttgttggggaactgctccaaaattgctaagatcagatcctatccatctaatatggttcttggatttcttttcaacgaggtcgattccatctaagacatcggtgatgtcatacactctccgctttcggactcccagtttcgttgcaaccttgtttaagtcaagaatacccccgggagcagatttctcatggacacatattgtacattatcttctaaattaatccttatttttgatggcagcaggccctccacgttgatggggtctcctccgtcgggtgcaggaggagactgggtaatctcctcgccggccgctgctgactcatgctgcccggccgggcgtcctgctccyctcgcaccccacgagctctcccgccctctcgcgctcagctcgagcaccgccccccacgcgccgatttccaagggcccagcacctaaggggtccgcggcctcctccgaggcgtcgcccggctaggccgtccctcccgccagtaaacgcggcacggcctcacgtgcccgggagctcccga

SEQ ID NO: 927575 - DNA, 636 bp, Homo sapiens
ctgggcaagtggacctgagcaataccttcacccctctgagactcagtttccccacatgtaagcttcgcttggactctctcagtagcctttgggaaggggacggtgactccgagagcagggtgtgggtctctagagccaaacagggccccttttctcagttctaagagtctctgtttctttggataaactccactgttttgttgtttggttgttatttttacttatttcttcctatctatctatctatctatctatctatctatctatctatcatctatctatctatctatctatctatctatctatctatctatctatatctatttagagatggagttttgctctgttgccaggctggagtgcagtggtgcaatttcagttaactgcaacctccgcctcccaagttcaagcgattctcatgcctaagcctcccaagtagctgggattataggagtgcgccaccacgcccaacaaatttgtgtgtgtgtatrtgtgtgtgtgtgtgtgtgtgtgtgtgtgtgtgtgttttctgagacagagtatcgctctgttacccaggctggagggcagtggtgcaatcttggcttactgcagcctccacctcccaggttcaagtgattctcctgcctcagcctc

SEQ ID NO: 927576 - DNA, 553 bp, Homo sapiens; identical to SEQ ID NO: 922874

SEQ ID NO: 927577 - DNA, 573 bp, Homo sapiens
ctgctacctccatcttcaaggcccgcaaggttgggcccagtctttttcacacttttctcaagctctctgattctccggtttctgcctctttccacttaggacttgtgattatattgggctcaccaggttaatccaggataatttccctgtgttagcttcctccctaactttaaggacaattaattagcaacctccattccacctgcaaccttaattcccctttcccatgtaatccagcagattcacaggttccagagataatgaggatggggacatctttgggggaccattattttgcctaagccacttggcaatatcctggtctaagaaacactgggaactggggtgggtagggggatgggagaggaagttctttcatgctttctcattgctcctgaatggagaaaggcagggagactgggyaggggcatggcttgggtggggaccccagccctagagggaggggtggactaggatttatgtttgtgttgagacctgccctcaggagacagtgggatgcgcctgcagagtatcttggggctgctgaggctggggctgtggtgggaatcacca

SEQ ID NO: 927578 - DNA, 744 bp, Homo sapiens
gtgggtgcagcccatggagggcaagccaaagcagagtggggtgttgcctcacccgggaagcacaaggggtcaggggatttccctttcttagctaagagaagctgtgatggactgtacctggaaaaatgggacactcccacmcaaatactgcacttttcccatggtcttagcaaccggcagaccaggagattctctcccgtgcctgactggacgggtcccacacccacggagccttgctcactgctagtgcagcagtctgagatcgacctgcaaggctgcagcctggcggggggaggggcttctgtcattgctgaggcttgagtaggtaaacaaagtggctgggacgctcaaactgggcggagctcagcaaggcctactgcctctataaactccacctctgagggcagggcatagctgaacaaaaggcagcagaaacttttatagacttaaccgtccctgtctgacagctctgaagagagcagtggttctcccaccatggtgtttgagctctgagaacagacagattgcctcctcaagtgggtccctgacccctgtgtagcctaactgggagacacctcccagtaggggccgactgacacctcatacaggcaggtgcccctctggaatgaagcttccagaggaagaatcaggcagcaatatttgctgttctgcaatacttcctgttctgcagcttctgctggtgatacccaggcaaacagggtctggagtggacctccagaaaac

SEQ ID NO: 927579 - DNA, 571 bp, Homo sapiens
gacctggcttcttatttctttgagaaaaggaagcaatcaaaagagaaattctatcacccccaccttttcatctaccaatcagcttgcttttatggccatatacagtaccttccctctcatggctaggcttttatctaaaaccagcccccttcatttgcttattggatcttatcccctctctcctacttaaggacaccagtccaccaaatatcctytctattctgtagcatatattttctctgttcttaaatcatttatgacttccacattttcaaatccagtggtcagctctcagtcctcagactgaggatctaataggactaacagatcttactgaatctattctcaactcttaacagaactgaatcctcccccgaccctgaaacatggtcttcacttggtatcaatgaatcctctcttttggttcccctctcacttcaatagtccctcctactcattctcctttgctgggctctcgtcatcaatgagctctctttctcttttttcacttttttttccttttttttattttattttattattattatactttaagttttagggtacatgt

SEQ ID NO: 927580 - DNA, 727 bp, Homo sapiens
agccagaaccacgagcgcacctggtgcctgagctgtggctatcagtagcccctgaaaggcatttgaagcctctaattcatggaacttccctgagatagctagagcagtggtatccagacctgtgggtgtcaccaagcagcaaattttaaaattaaagatagagcgatagatagatagatagatagatagatagatagatagatagatagatagatagaaaatagagataggtaaatagataagttagagataaataggtagatarataagagagagagatacatggatagatagatgatagataaacagatagatagatagatacatagatagatagatagatagatagatgatagataagagatgatgatgatagatagatagatagatagatagatagatgatagataacagatgatagatgatagatgatagatagatagatagatagatagatagatagatagatagatgatagatagacagagatagaattgacatagagttgtcagcttttatttggccaaaacttaaaaacaaaacccaagtactacataaaatagagtaaaatagagaacttttcttcctttcataaaatagagaacttttcacaccaaaattctagaacaggcacaaatatgtctcagactaaatggtagctctttaaaaggaagaccttgggcctgtcgatgttcctcatgttgcagttgacctgcagctcctcata

SEQ ID NO: 927581 - DNA, 708 bp, Homo sapiens
catccactttcaattcctggggttacatgaggaaaatagggggtttttcccccaaaatggaatctatggtgcctcctctgtttttcccaaggagtcccaggctaccagaagttatcttagggcctctcatgtgtgcattaagagtggaaagacaaaaaaatggagaaaaataattcagtcgactgagaagaaaaaacctttttccagaaaaataagatccaagaagagaaaaacrtgaatgccttttaaatatacctataacttggctatccatttttaattaagctgagcactatttaagaaaatccttttaaatcttttgttactcgacttcagccatgcaaaacaattaagattttcagctttggaactttacaaaaagtaaccccacaggtgaaaccaacaagccttaattaggttataacttaacctccagtgtatgaggtattttcaaaggggtggtaagcagcttttgaaaccatcattgcaaaactgtgactgagacagtgaaagagatccaacccaagtaactccatcttgctccagcctgcaagctgtccttgcccatccctcggcatgggccgaaccaactttgggagaaccctggtttgcagtttatagtttaaaacaaagatgataacagccccttcctaaggtatacttccctcttgcctggggaccagacaagaaactagccacaagattaga

SEQ ID NO: 927582 - DNA, 628 bp, Homo sapiens
gtataaacactccctttttgctacatccttgccaaaatctgttttttgacttttttaataatagccattccgcctggtatgagatggtatctcattgtggccctaaaatctgcacttctctggtaattagtaatgttgaacatttctttcatgtttgttggcaaccccttgagatgtcttcttttgagaaatgttcactcatgacctttgcctgtttttaatggggttatctgttttttacttgttgagttccttatagattctggatatttagtcctttgtcagatacatagtttgcaaatactgtagattgtctgtttactctgttgattatttcttttgctgtgcaggagctttttagtttagttragtcccatttgtctatttttgtttttgttgcatttgcttttgagattagtcataaatctttgtctaggccaatgtccagaagtttttcctagggtttcttataggatttttattgtttcaggtcttacatttaagactcatttcatgagttctctatatattccagatattttttatcagatatatcattaggaagtattttctcttattctatgagttacctttttcactcttgttattgtcttttgatgcacaaaat

SEQ ID NO: 927583 - DNA, 599 bp, Homo sapiens
cagggtcattgcagatggcattagttaatatgaggtcatactgaagtaaggtgggcccctactccaatatgactggtgtcctataaaaagaggaaattggacatacacacacacacacacacacacacacacacacacacacacgcacacaggagaacactatgtgaaggttggatttatgctgccacaagtcaaggaatgccaaagactgccagcaagccagaagctaggaragacatgaaacacattcttgctgacatccttcagaagaaaccaaccctggtaacacctctggcctccagaactgagagataataaagttctgtttaagccacctggtatgttgtattttggcaggacaggtctatactggaggcattaccggcctactatactatggttgaaatctgcatttgctatactgtagtgagttgttacctagaggtgaggactggaagttccaacctcttagcccctgcctgacacccatcagtatttttaatggcctttgtattttcctttctctcctctcttcccctaggctgttgtaatgtgatatgaaggttaataggatcccattagcacttcctggtttgtct

SEQ ID NO: 927584 - DNA, 599 bp, Homo sapiens
cagggtcattgcagatggcattagttaatatgaggtcatactgaagtaaggtgggcccctactccaatatgactggtgtcctataaaaagaggaaattggacatacacacacacacacacacacacacacacacacacacacacgcacacaggagaacactatgtgaaggttggatttatgctgccacaagtcaaggaatgccaaagactgccagcaagccagaagctaggagagacatgaaacacattcttgctgacatccttcagaagaaaccaaccctggtaacacctctggcctccaraactgagagataataaagttctgtttaagccacctggtatgttgtattttggcaggacaggtctatactggaggcattaccggcctactatactatggttgaaatctgcatttgctatactgtagtgagttgttacctagaggtgaggactggaagttccaacctcttagcccctgcctgacacccatcagtatttttaatggcctttgtattttcctttctctcctctcttcccctaggctgttgtaatgtgatatgaaggttaataggatcccattagcacttcctggtttgtct

SEQ ID NO: 927585 - DNA, 599 bp, Homo sapiens
cagggtcattgcagatggcattagttaatatgaggtcatactgaagtaaggtgggcccctactccaatatgactggtgtcctataaaaagaggaaattggacatacacacacacacacacacacacacacacacacacacacacgcacacaggagaacactatgtgaaggttggatttatgctgccacaagtcaaggaatgccaaagactgccagcaagccagaagctaggagagacatgaaacacattcttgctgacatccttcagaagaaaccaaccctggtaacacctctggcctccagaactgaragataataaagttctgtttaagccacctggtatgttgtattttggcaggacaggtctatactggaggcattaccggcctactatactatggttgaaatctgcatttgctatactgtagtgagttgttacctagaggtgaggactggaagttccaacctcttagcccctgcctgacacccatcagtatttttaatggcctttgtattttcctttctctcctctcttcccctaggctgttgtaatgtgatatgaaggttaataggatcccattagcacttcctggtttgtct

SEQ ID NO: 927586 - DNA, 599 bp, Homo sapiens
cagggtcattgcagatggcattagttaatatgaggtcatactgaagtaaggtgggcccctactccaatatgactggtgtcctataaaaagaggaaattggacatacacacacacacacacacacacacacacacacacacacacgcacacaggagaacactatgtgaaggttggatttatgctgccacaagtcaaggaatgccaaagactgccagcaagccagaagctaggagagacatgaaacacattcttgctgacatccttcagaagaaaccaaccctggtaacacctctggcctccagaactgagarataataaagttctgtttaagccacctggtatgttgtattttggcaggacaggtctatactggaggcattaccggcctactatactatggttgaaatctgcatttgctatactgtagtgagttgttacctagaggtgaggactggaagttccaacctcttagcccctgcctgacacccatcagtatttttaatggcctttgtattttcctttctctcctctcttcccctaggctgttgtaatgtgatatgaaggttaataggatcccattagcacttcctggtttgtct

SEQ ID NO: 927587 - DNA, 826 bp, Homo sapiens
gaaaaatggtagtattccagtaaacaatggagagaggaacacatttcaaggaatatgggaatgtgtgtggaggcacaaaattgaaaataaatagacttcgcagatcagtaagagactgacctgggtagaaagtgttagtagaagaatagcagaaaataaaatcataaacaaggacaagaggacagaaaggtaatgtattttacattcctttaaaatctcctttgggaatgatttcaaacccaccccacccccaagagtcaaatccttcctaatgatttaaatccccattgctgccattttgtctttttcctgtggttacaatttttgaaattctatttgtttcttactctgatcttcttgcatccttgcattagggtattcttggtcctgactgggcccagcctctggttccgtaggaaaaagctggtgtttaagatagataccaactctccttttggatatggatgatgaaaattgtcccaccattgcacacaygggcaaaaaaaaatttttttttttttgagatgaagtttcgctcttgtcccccaggctggagtgcagtggcacaatctcggctcaccggccttctgggttcaagtgattctcctgcctcagcctcccgagtagctgggattacaggtgcgtaccaccacacccagctaattttttgtattttttaagtagagacggggtttcaccatgttggccaggctggtcttgaattcctgacctcaggtgatctgcccgcctcggcctctcaaagtgctgggattacaggcgtgagccaccgtgcccggcctacatgggcaaaagttttgtaggttgg

SEQ ID NO: 927588 - DNA, 710 bp, Homo sapiens
agctcaattctctgtgagagtatcacatgtgctccccactaatcacaagaaatgaatgacagcagtggttcccaaagcatgtccagcccactcccagcatcaatatcatcggaaacttgttagaatgtaaattatcaggcttcaccccagatctgctgaatcatgatggtgggaccccagcaatcaggtttaacatcattcaggtgattctaatgcatgctaaagcactggacaatagtatttccatcaacacaggaaacagtgattagcataattataatcarttgttaaaatagaaccttaaactgcatcccactaggactctgattaccatgtgtttccacagtaagccatccagtctttcatcatggcctggaaagtttccaggtccacatgtgggtctctcttctcaggatcaagcatgttccacaactgctcaaggccactgtcttcagaattttggctagttgtttgtctcaggaaattgattattttggccactccgactgagcctttggaaaaagaagagcagatcagttctgaaagacagaaaagttatatttttcacaagtgaagcacctatctctttaatgtttcctgatcctagaaacatgatatataaccctggcagtcctgcggagctggcatggtatattgtaaagaacactggccttgggctaaagtctaatggacctagtgtcaaatcttgg

SEQ ID NO: 927589 - DNA, 601 bp, Homo sapiens
tgtttgtttttttggctgcatagtattccatggtgtgtaggtaccacattttatttatccagtcttctgttcatggtcatttgggttgattccatgtcttttctactgtgaacagtgctgtgatgaacatataagtgcatatgtctttcaggtagaatgatttacattcctttgggtacatacccagtggacagattgctggctcaaatggtagctctaaattctytgaggaatctccacactgctgtccacagtggctgaactaatttatattcccaccagcaatgtgtaagtgttctcttttctcgataacctcaccgacatctgttggtttttgactttttaatagtacccattctgactggtgtgagatggtatctcattgcagttttgatttgcatttctctaataattagtaatgatgagtattttttcatatatttgttggctgcatgtatgtcttcttttgagaagtgtctgttcatgtcctttgcccactttttaatgaggttattttttgtttgttgaattgtttaagtttcttacagagtctggatgttagacttttgtcacatgcatggttgtgaatatcttctacctc

SEQ ID NO: 927590 - DNA, 591 bp, Homo sapiens
tcatcagcaggctgttgataccgcctctcttacaactccccctttacttcctctgctcactgttagtcgctagggactgaacttgcagttcctctttgctttttttttttgtttgttgttgttgttcctcctccatttttatttcatggtttgcagggcatctgaggagatgtcccctgaatctaatgtagccatgagccaccctacctgctcctccacatcctccagccgttggctggtttcttggagsctcttcctaaggatgccttcctggttgacagcatcttcctgtagttgtttaatggcttctagttgtttctgactggagttaaaaaaaaaaaaaaaaaaaaaagtccaaaccgcaagctgtcagtgacatttcaactaagagtcaccctgtgaaattatgacaaactcaaacttaacaccacttccttagagatcagaggaaaaagtgaaagtatttacatataaatgcttcacaaatataaaatcttaagcaaagcttattggtcgcttagcctgacaccctcactttacagataaggacttctagtttcatcttttacactggtgtgttcagttcccacc

SEQ ID NO: 927591 - DNA, 602 bp, Homo sapiens
gcaaattatgcaacctctctggatataaatatatgtcagattcttagcactacatctgacacagtagcctctagacaaatgacacctactgttatttaaccgggctgcttgtatgtctaagtaggacaatacagaagattcactcatttcgagatgacattagtgcagacctctctccaaatagttctttgtygctaaatagaagaatgttgccgggtgtggtggctcacgcctgtaatcccagcactttgggaggccgaggggggcggatcacgaggtcaggagatcgagaccatcctggttaacatggtgaaaccccgtctctactaaaaatacaaaaaattagctgggcgtggtggcgggcgcctgtagtcccagctactcgggaggctgaggcaggagaatggcctgaacccgggaggcagagcttgcagtgagcagagatcacgccactgcactccagcctgggtgacagagcgagacttcgtctcaaaaaaaagaagaatgttgacgctgccttttgtggagacggtatctgtgtaaggaagctgcgtgtccacttagcccccatcttttaccactatggggaagtgtgggttctc

SEQ ID NO: 927592 - DNA, 772 bp, Homo sapiens
actggcaaataattactctcagattttgtttgtctgaaaaaaaaaattcatttcaccctcattttagaaaggtattttcactagaaacagaattctggcttgacagattttttcccttcaattctttcatgatgttattccattgtctattgcttacatgatttctgataaaaaaaattgtgctaattcctatctttgtgcctctgctggaaatgtttctttttttctctggttaccttcaagattttccctttatgtatggttttagcagtttgactgtgatgtgcttggcttggtatttatactgcttagattctctgaacttcttggatctatggtttgttttctttcattaattttgaagcttacctcktcagatactctttctgtcctgtcctcccctttctatattttgtctggtactccaagtatatgtatgcaagaccatttgatggccccacatctttgggataatctgttcttttttccttactatttttctttgtggttgagtttggataatttctatcagcctatcttcaagttcactgattcttttctctattgtgtccagtctgctgataagcctggaaagaattctccattatgtatacactggattttctatttgaatcttttttagcgatttcatctctgatgaaatttcccatttattaatacatgttgtccaccttttacactaaaccatttaacacataagttatagttcttttaaagttgctgactgatagtttcaacatctcagtcattt

SEQ ID NO: 927593 - DNA, 472 bp, Homo sapiens
cctcttgacgttcagatgcttctcttctctccttctctgccatgctgctctgccacttctgctgcccttctgccagtggaacctggggtttttatgggtataggatgggggacagggcaggccagggtggttttggaaaaggcaacatttgggtgggaaaacaggaatgcatgttctcacttagggtggtggttgcaggcttgagggtgaagccctctctagggaccccacccttttctaccaagtatttccctgcctcctgttcatatcacaataaagatatagaacatttgcatcacccyaaaatgttcccttatgcctgtttgtattctatccctctctctttaccccttaaaaccagcagtctgctttctgtcatcatggattagttttgtctcatctaaaattcatacaaatggaataacgtattatgtactctgtgtctatcttctttcatgttgcataatgtttt

SEQ ID NO: 927594 - DNA, 472 bp, Homo sapiens
cctcttgacgttcagatgcttctcttctctccttctctgccatgctgctctgccacttctgctgcccttctgccagtggaacctggggtttttatgggtataggatgggggacagggcaggccagggtggttttggaaaaggcaacatttgggtgggaaaacaggaatgcatgttctcacttagggtggtggttgcaggcttgagggtgaagccctctctagggaccccacccttttctaccaagtatttccctgcctcctgttcatatcacaataaagatatagaacatttgcatcaccctaaaatgttcccttatgcctgtttgtrttctatccctctctctttaccccttaaaaccagcagtctgctttctgtcatcatggattagttttgtctcatctaaaattcatacaaatggaataacgtattatgtactctgtgtctatcttctttcatgttgcataatgtttt

SEQ ID NO: 927595 - DNA, 611 bp, Homo sapiens
ctttgtcaccaatcaagtggctatatgagttagtttggtcatctgggaagcagatgtcgagataaaattagaagtacaagaaatgtacagagggtaaaagataaagggaagagagataaatggaagaagatgtaggaaaagggagggaaaaccttcatgcttgtgatgatttgccacctatgaaaggagagggaaaggaggaatgcgtaagagcctcagaggactgtacagctagagaaagtctaggccggtttagtggacagctcagggcagagactacctgtaagaaaagtctccaactggaaagaagtggccaggtcctaaaacttccactgtgcttggtcatcaacttcccaggaagaatgtgtctctgacttgaatgctgcagcagatccctaaggcatctcagcaagtgaacccttcagggcaatttcttgcttgaaggaagatctgagaaacacacytacatggcgtccaaagtccaccccttgcaccatgcaggtccacttctccatgcatattcagactccatggttcccagtggcctcccttcctgatagaatgctcgaagaggatggttagcaggatgaacaaccactcttgtgtttgca

SEQ ID NO: 927596 - DNA, 635 bp, Homo sapiens
ttaatgaagccatctgggactggagtttctttgtgggaaggcttttgattaatgatttaatttcttaatgtctatgtatatactatttatgtattctcttccttctggagtcacttttggatgattagatgtttctagaaatttatctatgttatctaaatgtgtaaatttattactaaaakgttcttcatattatcctattaatatctctttcatatctttagaatctggagatatgtctccatttagttctagatatagtttgcttgggacttctttcttttgtcataactagtctaatctgaggaataatcaatttaagcagtctttttaaaatcaattttttatttttatgattctctttattatatatttttctgatatataataataatttctgactctatttttgattttgcctgttctgtttctaatgcatcaggattgctagttcattaatttccaacactttctgtctctgtctaaaatgttatacataaatatatttaaaactttatatatatgtatataaactgtgttcctgtgtggctttagctgccttccatgtgttttgttatgtgctaacattttcattatcattcagctttttctactttcttcttttacactaatat

SEQ ID NO: 927597 - DNA, 796 bp, Homo sapiens
tagtgtccactcatattgagcgtgtgtctgcctcttccagtccactgactcagatgttagtctcctttggcaacaccctcacagacacacccaagaccaatactttgcattcttcaatcccatcaagttgacacccaaaattaaccattacatctggcaagtggtttgtagattttctttaacttttcaaaaaaaccaaggttttgttttatttatctttttattgttttctttgtttcaattttatttctgttttcatctttattatttttcttctaataattttgtatgtggttttctattgctttttaaattctttaagatccatcattaggttgtttatttgaagmttttctacttttcagatgtagtcacttattagcataaacttgcctcttaatactgcttttactctatcccataggttctggtgtgttgggttttcattttcatttatttcaagaaatttttaaaatttctttttttttcattcacccactggccatccagcagcatattgtttaatttacatgtatttgtataatctctaaaattcctgttattattgctttctatttttactccatatggtcagaaaagatattttccataatttcaatttttataaattttttaagactgatgttgtggccaaatatatggtctatccttgagaatgatccatgtgctgagaagaatagaaatctattaggaccatttggtctatagtgcagatatgtcaaatgtttgtttgttgactttctgtctgggtgatctgtccagtgctgaagtgggg

SEQ ID NO: 927598 - DNA, 655 bp, Homo sapiens
tcagcagaaactctacaagccagaagagagtggggaccaatattcaacattcttaaagaaaagaattttcaacccagaatttcatatccagccaaactaagcttcataactgaaggagaaataaaatactttacagacaagcaaaggctgagagattttgtcaccaccaggcctgccctataagagctcctgaaggaagcactaaacatggaaaggaacaaccggccactgcaaaaacatgccaaatcrtaaagaccatcaaggctaggaagaaactacatcaactaacgagcaaaataactagctaacatcataatgacaggatcaaattcacacataacaatactaaccttaaatgtaaatggcctaatgctccaattaaaagacacagactggcaaattggataaagagtcaagacccatcagtgtgctgtattcaggaaacccatctcacgtgcagggacacacatacgctcaaaataaagggatggagaaagatctaccaagcaaatggaaaacaaaaaaaggcaggggttgcaatcctagtctctgataaaacagactttaaaccaacaaagatcaaaagagacaaagaaggccattacataatggtaaagggatcaattcaacaagaagagctaactatcctaaatat

SEQ ID NO: 927599 - DNA, 784 bp, Homo sapiens
ccatccggcctgggtaatcttttttcatttggtacagacgtctccctatgttgcccaggctggctggaactcctaagctcaagtgatccttcccactcagtcccccaaggtgctgggattacaggcatgagccgccacccccaaccacatttcttatttcattaatttctgcttatatctttattatttgctttcttctattttacttgaattttacttactgttaaccttttcctagtttcttgtaatggataaagcctttcttgttttctaacatatgtctttaatactataaatgtctttctaagtacagctttatctgaacacygcaaattttgtatttgctcaaatattaactctttctggcacttctattttttgtgtagatttgcatttccatcatgtatcattttctttctgcctgaaaaattgcttttaacatttcttgcagatcaggtctgctagtgatcaattcccttggctttctttcttttcttttagagatgaggtctcactatgttgcccaggttgactcatgttcctgggttcaagcgatcctcctgcctcagcctcctgagtagctgtgattacaggtacatgcaaccttgcctggcttttttttctttcctttgagaagggcctttatgttgccttcatttaaaaaaagatattttcttgttctttctttctttttttgagatggagtttcgctcttgttgcccaggctggaatgcaatgacgcgatctcagctcactgcaacctccgcctcctgagttcaagcta

SEQ ID NO: 927600 - DNA, 619 bp, Homo sapiens
tcatctgaggtcaggagttcgaaaccaacctgtccaacatggtaaaacccccatctccactaaaaatacaaaaattagtcagacatggtgttgggtgcctgtaatcccagctactcgggaggctgaggcaggagaactgcttcaaaccgggaggcggaggttgcagtgaactgaarttgtgccactgcactccgttctgggcaaaaagagcaaaactccatttcaaaaataaaaagaaacttgatcccacaaatgtaccctgtgaattaagaagcaagtataattactggcaattatagaaattatgaaataacagaaaggatggttcctattacgctactatccaagtcaaattctttcatagttcctgtatttcaaaataacccggccaggcctgcatttgtgtaaaacaaacaccttatttaataacagatagataattcattgcaaggagccaaacgtgtctatacatcaattatttcagtaactaatattcctttcaattcaatcaatctgaaggtgtgattagatgtgtggctttgctgacacagacagtaccctaggccggctcatcccagcaccagctcacaccgtgcacgcggggccacggcttccccag

SEQ ID NO: 927601 - DNA, 738 bp, Homo sapiens
tttgttgctggccatgaacaaaagatacttttgaagctcaatttcatctttaactccaagtgtactttaagaaatatctttcagtttctcttcctttccatctcaactgctatctcacctaggtttatacatcatcacacaaatctgtttatttcactaggtctgttcctaatatttgtgggatctgaactaagagtacaaagaaatccatttaccatttgtctaaatatttaaatgtaattaaatcaagctaacaaactactaaataaaatatatgctgtctttctaatttgaaatagatgattcataataatyagacagtccaagtttgaatttagagtttttggatttcttaaagttctgtagatactacaggaactagaggaacttgatactacaggaagagcttgttcctaaccttcatcctatggcctaccctctttctcctcccaacatcaactccaacatacaccaaagtgtcctgcatgggcgcttcagcctgcatgtccaagttcagccctttaattcctacagcagatggctatccattggctcctcttagggcacaggtatgtgtaacaggttaacatggtccacccttgggaggaaagatcttagataaaggcctatacagaccctgaaaatgtgcttggagtcatctcagcagagaattatggggtcctaaatacacaagggccagagtgtaggccctagatggacacaacctcttgccccttg

SEQ ID NO: 927602 - DNA, 589 bp, Homo sapiens
ctaatacttttagaggcccttaaaatcgcaaactatgctcaactcactctctacagttctcataactttcaaaatctattttcttcctcaaacctgatgcatatactttctgcccctccagctccttcagctatactcactctttgttgagtctcccataattaccattgttcctggcccagacttcaatccggcctcccacattattcctgataccacacctgacccccatgactgtatctctctgacctacctggcatttcaacttctgtcacaaccttccattgtmtttctaatgactttcctgctagcattacagatatatcacaaactttatcagtccttcgggcccaggtcggttccttagtcgcagttgtcctccaaaatcaccaaggccttgacctactcactgctgaaaaaggagaactctgcatatttttaaatgaagaatgttgtttttatctaaatcaatccagcctgctatatgacaacataaaaaagcttaaagttagggccccaaaactcgccagccaggcaaataattatgctggacctacctgggcactttttaactgggcgtcttggctcc

SEQ ID NO: 927603 - DNA, 593 bp, Homo sapiens
aaggagcaacgccgggaacacaacactcgtcagctctcagttcctgccctaggtgtggtcccctgcatgcagagggacagaatgggtgcttgagggaaccctaagcacccaccttggtgtgactccttcatgaggcccaccaccaaacagggaccctgcatgcttgaaggccagcagcaggcaccactctgacctcatgccctcagcacctccaaaagccctccaccctcttaagaagggcctagcctcatgaccctggtctgcctttgggccagatctccctgtgcaggggtggccaaggtccccacttgcccacacctcagaatttgcagcctaggaygcagccactcttttgtaaactgcaccctaaatcacacagcatttgtgtaaccacccattcaccccaaacttccagcttccttttacaaattactcttaaaacagtctgactttgggaggccgaggtgcgcggatcacgaggtcaagagatcaagaccatcctagcaaacatggtgaaaccccgtctctactaaaaatacaaaaattaggcatgttggcacatgcctgtagtcccagcaacttgggaggctgag

SEQ ID NO: 927604 - DNA, 544 bp, Homo sapiens
gctggaggtccactccagaccctgtttgcgtgggtatcaccagcggaggctgcagaatagcaaatattgtagagcggcaaatgttgctgcctgatccttcctctggaagtttcgtctcagaggggcacccagctttatgaagtgtcaatgtgcccctactgggaggtgtctcccagttaggctacctgggggtcagagacccacttgaggaggcagtctgtccattctcagatctcaaactccatgctgggagamccactactctcttcaaagctgtcagacaaggacgtttaagtctgcagaagttagtttctgctgcctttattcagctatgccctgcccccagaggtggagtctgcagaggcaggcaggcctccttgagctgcggtgggctccacccagttcgaactttcaggctgctttgtttaccttctcaagcctcagcaattgcgggtgcccctcccccaacctcactgctgccttgcagttcgatctcagactgctgtgctagcagtgagccaggctctgtgggcgtgggaccctc

SEQ ID NO: 927605 - DNA, 610 bp, Homo sapiens
ctcccccaacctcactgctgccttgcagttcgatctcagactgctgtgctagcagtgagccaggctctgtgggcgtgggaccctctgagccaaatgcgggatataatctcctggtgtgccatttgctaagaccattggaaaagcgcagtattagggtgggagtttcccgatttcccaggtaccgtctgtcacggtttcccatggctagaaaagggaattccctgaccccttgcacttccccggtgagacaacgccccgccctgcttcagctcacactccgtggactgcacccactgtccaacaagccccagtgagatgaacccagtacctcaattggaaatgcagaaatcacctgtcttatgcatcactcacgctgggagctgttgactrtagctgttcctatttggccatcttggaaccggacctagacagcaacttttattgaagcgacagtgtatagcagcagcagaggtactgttctttatggagcagggctagcctataggcagtgtgcctggagcaacagctcaggaacagttctgcagtcatatttatacccacttttaatttcaccttcattcttaatctcatggtaggtaagtaatcaaag

SEQ ID NO: 927606 - DNA, 561 bp, Homo sapiens
tttctattttcagttttttgaggaatctccatccttttctccatcgtgggtatactaattcacattcccactaacagtgtgtgagagtttccctgtctccatatcctggccatcaactgttgttacctgtctttttgataaaaatcattttaacttaggtgatatgatatctcattatagttttgatttgcatttttctgatgattagtgattttagcatttttttcttatagctgttggccatttatatttcttcttttaagaaatatctattcagatcttttgcccagtttttaattgacttacttatttataggctattgagttgtttgagctctgtacacattgtggttcttaatctcttatcagatggatggtttgccagtgttgtctcccattatgcaggttttctcttcactrtgttgattgtttatgttgctgagtagaagcttttagcttgacgagcaaccatttgtttatttttgttttggttgcctgtgattttaaagtcttacacaatgatctttgcccggaccaatgtcttgaagcatttcttcagtg

SEQ ID NO: 927607 - DNA, 706 bp, Homo sapiens
ctcttgttgcccaggctggagtgcagtggcacgatctcggctcactgcaacctcccccttcctgggttcaagcaattctcctgcctcagcctcctgagtagctgggattacaggcacccgccaccacgcccggctaatttttttatttttagtagagatggggattcaccatgttggccaggctgktctcaaactcctgatctcctgatctacccaccttggcctcccaaagtgctaggattacaggcatgagctaccgcatccagccacacttatgacttttataaagagaacaatctcatgttggcctcaaagcaagcaatgtctgaaagtgtctttgagagaagcatgattaggtagatgcagggagtatatagacatttctgtctgtgcttctgctgcctcttcccttcccctcgttgctcgtcgtgccatattctggccaggtcttaactgcctcaaaaggggcctattcttctcaccaaattttgggcttagcaaaatcttcaggtcacctagtctagcccctgatgggaaggctgaattctgtttatcctatttatctacattacttgtcacactacaggcactgaggaaatggtacaaacttactagaagttcaggaaattgtacttcatcttggttttaaggagtaattaatctcctaccatttggttccataaacgtgggtgtgacagaggagggg

SEQ ID NO: 927608 - DNA, 706 bp, Homo sapiens
ctcttgttgcccaggctggagtgcagtggcacgatctcggctcactgcaacctcccccttcctgggttcaagcaattctcctgcctcagcctcctgagtagctgggattacaggcacccgccaccacgcccggctaatttttttatttttagtagagatggggattcaccatgttggccaggctgttctcaaactcctgatctcctgatctacccaccttggcctcccaaagtgctaggattacaggcatgagctaccgcatccagccacacttatgacttttataaagagaacaatctcatgttggcctcaaagcaagcaatgtctgaaagtgtctttgagagaagcatgattaggtagatgcakggagtatatagacatttctgtctgtgcttctgctgcctcttcccttcccctcgttgctcgtcgtgccatattctggccaggtcttaactgcctcaaaaggggcctattcttctcaccaaattttgggcttagcaaaatcttcaggtcacctagtctagcccctgatgggaaggctgaattctgtttatcctatttatctacattacttgtcacactacaggcactgaggaaatggtacaaacttactagaagttcaggaaattgtacttcatcttggttttaaggagtaattaatctcctaccatttggttccataaacgtgggtgtgacagaggagggg

SEQ ID NO: 927609 - DNA, 706 bp, Homo sapiens
ctcttgttgcccaggctggagtgcagtggcacgatctcggctcactgcaacctcccccttcctgggttcaagcaattctcctgcctcagcctcctgagtagctgggattacaggcacccgccaccacgcccggctaatttttttatttttagtagagatggggattcaccatgttggccaggctgttctcaaactcctgatctcctgatctacccaccttggcctcccaaagtgctaggattacaggcatgagctaccgcatccagccacacttatgacttttataaagagaacaatctcatgttggcctcaaagcaagcaatgtctgaaagtgtctttgagagaagcatgattaggtagatgcagggagtatatagacatttctktctgtgcttctgctgcctcttcccttcccctcgttgctcgtcgtgccatattctggccaggtcttaactgcctcaaaaggggcctattcttctcaccaaattttgggcttagcaaaatcttcaggtcacctagtctagcccctgatgggaaggctgaattctgtttatcctatttatctacattacttgtcacactacaggcactgaggaaatggtacaaacttactagaagttcaggaaattgtacttcatcttggttttaaggagtaattaatctcctaccatttggttccataaacgtgggtgtgacagaggagggg

SEQ ID NO: 927610 - DNA, 609 bp, Homo sapiens
tgttggagtttgctggaggtccacttcagaccctgtttgcctgggtatcaccagaggaggctacagaacagctaatattgcagaacagcaaatgttgctgtctgatccttcctctggaagcttcatcccagaggggcacccacctgtatgaagtgtctgtcagcccttactgggaggtgtctcccagtttgggtacactgggatcagggacccacttaaggaggcagtctgttctcagagctcaaatgctgtgctgggagaaccactgctctcttcagagctgtcagacggggaygtttaagtctgtagaagtttctgctgccttttgttcagctatgccctgtccacagaggtggaatctatagaggcagcaggccttgctgagctgtggtgggctccgcccagttcaggcttcctggctgctttgtttacctgctcaagcctcagcaatggtgaacatccctccccctgccaggctgcagccttgcaaggcaatcccagactgctgcgctagcagtgagcaaggctacgtggtcatgggacccactgagccaggcacaggagagaatctcctggtctgccagttgctaagactgtgggaaaattgca

SEQ ID NO: 927611 - DNA, 609 bp, Homo sapiens
tgttggagtttgctggaggtccacttcagaccctgtttgcctgggtatcaccagaggaggctacagaacagctaatattgcagaacagcaaatgttgctgtctgatccttcctctggaagcttcatcccagaggggcacccacctgtatgaagtgtctgtcagcccttactgggaggtgtctcccagtttgggtacactgggatcagggacccacttaaggaggcagtctgttctcagagctcaaatgctgtgctgggagaaccactgctctcttcagagctgtcagacggggatgtttaagtctgtagaagtttctgctgccttttgttcagctatgccctgyccacagaggtggaatctatagaggcagcaggccttgctgagctgtggtgggctccgcccagttcaggcttcctggctgctttgtttacctgctcaagcctcagcaatggtgaacatccctccccctgccaggctgcagccttgcaaggcaatcccagactgctgcgctagcagtgagcaaggctacgtggtcatgggacccactgagccaggcacaggagagaatctcctggtctgccagttgctaagactgtgggaaaattgca

SEQ ID NO: 927612 - DNA, 759 bp, Homo sapiens
ccttcacttgtatcgctaatcgctaatatacaggcgtaccctgtcttgttgcacttcactgtattgtgcttcgtagatactgtgctttttttttttttttttttttttacaaattgaaaggatcaagcagcaatttccacttccaagtcttattatttaaaaactatatctcacaaggcaatagctgccatacatagtgattcctctaatggatctggacaaagtcaattgaaaaccttctggaaagaatttaccattctagatgcccttaaraacattcacgattcataggaggagatcaaatatcagtattaataggagtttggaatagattgattccagtcttcatggataaccttgaggggctcaagccttcagtggaggaagtaactgcagatgtggtagaaatagcaagagaactagaattagaagtggagcctgaagatgtgactgaattgctgcaatgtcatgatgaaacttgaatggatgagaagttgctttctatggatgaataatgaaagtggttccttaaaatggaatttacttctggtaaagatgcagtgatattgttgaaatgacaacaaaggttctagagtattacataaacttagttgataaagcagcggtaggatttactccaattttgaaagttctactatgagtaaaatgctaaccaacagcatcacatgctacagagaaatctttcatgaaaggaagagtcagttgatgcagcaattatattgccttaaaataagacaa

SEQ ID NO: 927613 - DNA, 675 bp, Homo sapiens
acacaattacatgtaaactgaataacctgctcctaaatgaattttgggaaagtaataaaattaaggcagaaagcaaggagttctttgagactaatgagaccaaagacaacataacagaatctctgggacacagctaaggcagtgttaatggggaaatttatagtagtaaatgtcsacatcaaaaagttagaaagatttcaagttcacaacctaacattacaactaaaagaactgcagaaccaagaacaaaaaaatttcgaatctagcagaagacaagaaataaccaatattatagctgagctacaggagtttgagacacacaaaaaacatacaaaagatcaacgaatccaggagctggttctttgaaaaaattaataaaatagactgctaacttgactaatacagaagaaaagagagaagattaaaataaatccaatcagaatcaataagggggatatcaccactgacacaacagaaatataacaaccatcagagaatataatgaacacctctatgtgcgtaaactagaaaatccagaagaaatggataaattcctggacacatattgttccaagactgaaccaagaagcagttgaattcctgaacagaccactagtgagctctgaaattgaggcagtaataaacagccaatcaaacaaaaaaaaagcacagaac

SEQ ID NO: 927614 - DNA, 463 bp, Homo sapiens
ggaattcagagatgacacaaacaactggaaaaacatttcatgctcatggatatgaagaatcagtataattaaaatcatcatactgctcaaagcaattcacagaatcaatgctattcctatccagctatcaatgacattcttcactgaaaaaaaaaaactatttcaaaattcatatggaacaaaaaaaagagctgaaatagccagggcaattctagcaaaactggagacatcatgttacctgatatctaactatactatagggctacaataaccaaagcagcatggtactgatataaaaagagacrcagacgaatgaaatagaatagagaacccaggaataagactgcacacctgcaactttctaatcttcaacaaacctgacaaagcaatggggtaaatgatttcctattcaataaatggtgcttggataactggctaaccatatgcagaagactgaactgga

SEQ ID NO: 927615 - DNA, 595 bp, Homo sapiens
ttcagagatgacacaaacaactggaaaaacatttcatgctcatggatatgaagaatcagtataattaaaatcatcatactgctcaaagcaattcacagaatcaatgctattcctatccagctatcaatgacattcttcactgaaaaaaaaaaactatttcaaaattcatatggaacaaaaaaaagagctgaaatagccagggcaattctagcaaaactggagacatcatgttacctgatatctaactatactatagggctacaataaccaaagcagcatggtactgatataaaaagagacgcagacgaatgaaatagaatagagaacccaggaataagactgcacacctgcaactttctaatcttcaacaaacctgacaaagcaatggggtaaatgatttcctattcaataaatggkgcttggataactggctaaccatatgcagaagactgaactggacccctccttacaccatatacaaaaatcaactcaagattaattaaagatgtaaatgtaaaaccccatactataaaaaccctggaagacaacctaggcaataccattcaggtcataggcatgggcaaagattttataa

SEQ ID NO: 927616 - DNA, 786 bp, Homo sapiens
gtgaaaatactagaatcatgtaattttgagtaaagcatcttgaagaggccaaatatttttaaagagcttaaatttggagagagaaaacccaagtattggagccatactgttttcaataatggctggactaatttacattcccaccaacagggttctcttttttgcacagctttgccagcatgctattttttgtctttttgataatagccattctaactggggtaagattctatctcttgtggttttgactgctggggtgaccagtgggaacgggatccccaaatggggggcaggagttggggggcacagtttgggccctggtgggggcctgataccatgcagtaagagtctgtcttcaggaccctatgatgctgtgcaagggtgcacgctgtggtgagggggctgaggcaattcctakgctcctgggtggggatggctaaaggagagagcctgtcctctgtgtttgccctgctggtaaggagggtgtagggttgctgtcaatgacagcagcctgaggcaggtggctctcagactctgcaaaatgcatgccttgtctcccattgtcccagagacagcttggaaggtgtgcagcactgcctattctccggcgtgttggacactgtgtggactggagtgggaatccaactgcactgctgggtgcaactggtgtcactgcagccctccatgtgtttacaggaggacatcagtgggggttccagggatgcggagatgaaggggctgtgcaccccaaggcattatgcagtcttgaaaggtccaggctttcaa

SEQ ID NO: 927617 - DNA, 623 bp, Homo sapiens; identical to SEQ ID NO: 924929

SEQ ID NO: 927618 - DNA, 623 bp, Homo sapiens; identical to SEQ ID NO: 924930

SEQ ID NO: 927619 - DNA, 565 bp, Homo sapiens
cgcaagcgccgcgcgcagccccggttcccgctcgcgcccctctccacacctccctgcaagctgagggagccggctcccgccttggccagcccagaaaggggctctcacagtgcagccgtgggctgaaggcctcctcaagtgccaccaaagtgggagcccaggcagaggaggcgccaagagcgagtgaggggtgtgaggagtgccascacgctgtcacctctcactataatttgttttcaccccatgccgaccaacctaagccctcactttatctttttgggtgccctcagaaaacttcccaattgtctttccaaatggataaatcctgaggtaaataattcctttttaagcttgtgatttcaaagatagtgtttttagtaaattaaaaccaaaggatagattcctaatgatacattaaattttgaaataaattgccaaggttattttacaggatataagtaatagaaaccataaaagttttcctttatccagaatatcttcataattaataaaaatttattttatgaagttggatatcactgatgacttacttttggtgtcctgg

SEQ ID NO: 927620 - DNA, 600 bp, Homo sapiens
actgacatattgtcttctaaagattttataggacagtgccaattgctcttcttcttaaagaagcattcactaaatgtgtaaatctaacatttttctttctgatatccatcatttctttgaactcttttatttttactaaatctgagctgtcttttgtgcacaatcagcttttacctacctggtaagtctctcccttggctaccacactacactcaaatatgtggttttgattcatgctccttagggtatgatattcctgaatctccactccaaatatgtattttagatttctttttcagaatgtctggtccttacctctgctcttactgctcgcattcttgactgaaccagccctgttgtatctccacatcaaatcctgccatttgttcacagttaattaagataattttaggaaaragaagtaacatttttcttgggtattcattaagtgccggaaaaaaaaacattgaattgtgtatttcataggcattatctcattgaatttccacaacctaggtattattatattcacttttcaaaatgcttaatagaatcacaaataaactaagtaactcatataaagtcatacagctggagaat

SEQ ID NO: 927621 - DNA, 596 bp, Homo sapiens
gcctcaaagtctcaactaattctagcataactcaaaagtctgaagttcagagtctcattcaaatcaaatatggatgagattcggttaagatgtgaacctgtgagatcaaacaagttatatacttccaaaacacaatggtaggacaggcattgaatagacattcctatgccaaaaaggagcaataggaaagaagaagggaataacagatctcaagtccaaaacccaacaaagcaaacaatattaaatcttgaggcttcagaataaactttcgactccatatcctgccttttagacacactgaggcagggctygggaccctaaagcccttggggtccccacacccacagcttttctgaacacagcccacacagtaactcacacaagttgaaattgggttcctgcacctctctcaggctggtgttgcacactggtggttcgacaattatgaggtcttgggtatgacactgacaaggttctcagaggcatccttagaaatctaggtagaggtaccaatgcttccatagttcttgatgtcttcatggctgcagagttagtagcacatggataccaccatgatttatggcctgtacctttca

SEQ ID NO: 927622 - DNA, 648 bp, Homo sapiens
ctcaggcccgttttcccccaaggacggacatagaaaagagaatccctcctcctcaaggcgggttatagaaatcaaaaccccttttccccaaagctagccataaagcctacaaactctaactttccccaatttctgtgtaaaaactggccacaaataaattctcaggcctaggtggggcatggtggctcacacctataatcccagcactttgggaggccgagtcgggtgtatcatttgaggtcaggagttcaagaccagcatggccgacattatgaaaccccgtctctattaaaaatacaaaaattagccaggcagtagtggtgtacacttgtaatcccagctacttgggaggctgaggcaggagaatygcttcaacctggaagacggaggttacagtgagccgagaacgctccactgcacaccaatctgggcgagagagcgagactctgtctctaaaaaaaaaaaaaacaaaaaaaattctcaggcctaccttgtttgattgtaggtcagacctccattccagaaagtcctgccccatacccacacccagaaggaagaaatgcatgctcagaggggccaggaagaaatccagagagacaggccttgctgggtgtccccactccgtctattcacattcgatcattgccc

SEQ ID NO: 927623 - DNA, 641 bp, Homo sapiens
ggagtcagtcccactttctagatgggggaataaggccccttcattcattcattccatagatatttgtggagtgcctcttatctaccacagctctgggccccgtgccaaagggacttgggacacacatacagtgggaagaagccctaagactgctcctccgcccaccctggaagctccaggaagcagccacctccacactaattggtctgtctgagctggcaaaccttcagagaactcagcgagtcacaacatccttgtacaacagccgccgccctgggctgggtgtggacccggggcagagggcagacagcgggcatagctgtcccaggcatcacccttctgggctcagggcaagccactcagacccacagcttctgcactgcagcttgcattcatgctctgagaggttcattctccctcaaacactgccccagccagggcaagctctttctggggccaaccagagaccccaggctggttccccacaaaaccagcacagyaagacctgcctcggtgcacagtctgggtctgggatgtgaagctgtctacaccaaggagccacccatcacctgccccaaccctttggtctctcgcacactagcttgcccagccccatctcctcaggatcatgcctgtccagg

SEQ ID NO: 927624 - DNA, 631 bp, Homo sapiens
atcaaaagccagctaattacttcctagatacaatgggggtacaggtattgggtaaatacagcccttccaaatgggagaaattggccaaaacaaaggaattacagggcccatgcacatccaaaatatagcatggcagtcaaattttaaagctctaaaataatctcctttgactccaggtctcacatccaggtcatggtgatgcaagaggtgggttcccatggtcttgggcagccctacctctgtggctttgcaggayacagcctccctcctggttactttcactggctggcattgagtgtctgcaggttttctaggtgcacagtgcaagctgtcagtggatctaccattctgggttctggaggatggtggccctcttctcacagctccactaggcagtgccccagtagggactgtgtgtggaggctccaaccccacatttcccttctgcattgccctagcagaggttctccatgagggccccacccctgcatcaaacttttgcctgggcatccaggtgtttctatacatcttctgaaatctaggcagaggttccccaacctcaattcttgacttctgtgcacccacaggctcaacaccacatggaagctgccaagacttggggcttccactc

SEQ ID NO: 927625 - DNA, 701 bp, Homo sapiens
tagcattgcctcaactgccaaacatgaaaacgggtgacactgcagatgattccagcccccagccttcaagccatgccaggtgacaggaagtagagcagagaccagttgtccccactgaacacgacacaaattgctgacttggaagaaaaataaatgttgtggttgttttaagcaactaagctctgggtgttttgttacaataacattasataaatggaacacctggtgactggacaatgacttcagagagcaggtatcttgctcctgtggcataggaagcaatttcatgtaaaattgttcttttctagtttaaaaggaagatggaccctaagctgtccaaaaacctatagagagttgcctcatggggacctacatacttgaataatgataagaaaagaaagtatagcgtaaagaaaatataaatatctaaggtgatgcatatgccagttaccttgatttgattatatcaatatatcaaattatcacatgtaccaccaaaatatgtacaactaccatgtatcaataaaaattaattaggaggggagccaagatggccgaataggaacagctccggtctacagctcccagcgtgagcgacgcagaagatgggtgatttctgcatttccatctgaggtaccgggttcatctcattagggagtggcagacagtgggtgcaggacagtgggcgcagcgcactgtgt

SEQ ID NO: 927626 - DNA, 506 bp, Homo sapiens
gtgctaagcccctcactgcccagagccgggggcgcggcggccaccgatcggagtgcagggcccgcccagcccacgctcacccggacatgcgagccatgcgggcagccccggttccgcctgcatctctccctccacacctccccgcaagcagagggagccggctccrgcctcagccagcccagagaggggctcccacagtggcgggctgaagggctcctcaagcacctccagagtgggtgggcacggaggccgaggaggtgccgaaagcgagcgagggctgcaaggggtgccagcaggccatcacctctcaatgctatggctaaaccaagaccagacccaattcctaatcttgggttctttgcactggttgaggatggcaaaataaatgatattcaggccagtactctttatctccaacccatggcaggcattactaatcaatcactgccctccttcgcactgtgcctagaggcaactttttagaagccctttcaacacagtgttcc

SEQ ID NO: 927627 - DNA, 506 bp, Homo sapiens
gtgctaagcccctcactgcccagagccgggggcgcggcggccaccgatcggagtgcagggcccgcccagcccacgctcacccggacatgcgagccatgcgggcagccccggttccgcctgcatctctccctccacacctccccgcaagcagagggagccggctccggcctcagccagcccagagaggggctcccacagtggcgggctgaagggctyctcaagcacctccagagtgggtgggcacggaggccgaggaggtgccgaaagcgagcgagggctgcaaggggtgccagcaggccatcacctctcaatgctatggctaaaccaagaccagacccaattcctaatcttgggttctttgcactggttgaggatggcaaaataaatgatattcaggccagtactctttatctccaacccatggcaggcattactaatcaatcactgccctccttcgcactgtgcctagaggcaactttttagaagccctttcaacacagtgttcc

SEQ ID NO: 927628 - DNA, 584 bp, Homo sapiens
ctaaagtttatatggaaaggcaaaagactcagaataataaacacaatatggaagaaaaataacagaggactgacactacccaacttaagacaatataaagctatagtaatcaagacagtgtggtactggtgaaagaattaacacatagatcaatggaaaagaatagaaagcccagaatagatacacacaaatacagtgaactgatttttgaccaagataaaaggcaattcaatgcagaaatgagagtgttttcaacaaatggtgctgkaataactgcatacccacatgcgacaaaaagtgaatatagtggcagatattatacttttcgcaaaaagtgatgcaaaatggatcaagagttaaatgtaaaatgtaaaacgataaaacttctagaagataacatagcagaaaatctaggtgaccttgggtttgatgatgagtttttagatacagtaccaaaaggataattcaggaaaacaaaaattgataagttgggcttctttaaaatttaaaacttctgttttatgaaagacacagttaaaagaatagaaagacaagccacaggctacaagaaaaaaaatctttgc

SEQ ID NO: 927629 - DNA, 584 bp, Homo sapiens
ctaaagtttatatggaaaggcaaaagactcagaataataaacacaatatggaagaaaaataacagaggactgacactacccaacttaagacaatataaagctatagtaatcaagacagtgtggtactggtgaaagaattaacacatagatcaatggaaaagaatagaaagcccagaatagatacacacaaatacagtgaactgatttttgaccaagataaaaggcaattcaatgcagaaatgagagtgttttcaacaaatggtgctggaataactgcatacccacatgcgacaaaaagtgaatmtagtggcagatattatacttttcgcaaaaagtgatgcaaaatggatcaagagttaaatgtaaaatgtaaaacgataaaacttctagaagataacatagcagaaaatctaggtgaccttgggtttgatgatgagtttttagatacagtaccaaaaggataattcaggaaaacaaaaattgataagttgggcttctttaaaatttaaaacttctgttttatgaaagacacagttaaaagaatagaaagacaagccacaggctacaagaaaaaaaatctttgc

SEQ ID NO: 927630 - DNA, 593 bp, Homo sapiens
ctgataaattgtagccattatatacaaagaaatcttcaaactcaacaacaagaaaacaagcaatccagtttacacatgtgtaagtgatctgaacagataccttatcaaagaagatatacagatggcaaaagatgcatatgaagagatgctggacattacatctcattaggaaatcacaaattaaaacaagatgttgttttacagtacaaacctattagaattactaaatccaaaacactgrcaatactgaatgctggcgaagaggtggaacaacagaaactgtcattcattgatgttaagaatgcaaaatggcacagccacttgggaaatcaacttggtagtgtcttagcaaggctaaacacagtcttactgtacaatctagtgatcatacttctaggtgtttactcaaatgaaatgaaaacttaggtgcacacagaaatctgcgcttgaatgtttacagcagctttattcataattgtgaaaaaccagaggcaaccaagatatccctcaatagatgaatggataaactgtgatattacagtttacaatggaatattattcagtgacaaatgaactatcaagccacaaaaaaa

SEQ ID NO: 927631 - DNA, 593 bp, Homo sapiens
ctgataaattgtagccattatatacaaagaaatcttcaaactcaacaacaagaaaacaagcaatccagtttacacatgtgtaagtgatctgaacagataccttatcaaagaagatatacagatggcaaaagatgcatatgaagagatgctggacattacatctcattaggaaatcacaaattaaaacaagatgttgttttacagtacaaacctattagaattactaaatccaaaacactggcaatactgaatgctggcgaagaggtggaacaacagaaactgtcattcattratgttaagaatgcaaaatggcacagccacttgggaaatcaacttggtagtgtcttagcaaggctaaacacagtcttactgtacaatctagtgatcatacttctaggtgtttactcaaatgaaatgaaaacttaggtgcacacagaaatctgcgcttgaatgtttacagcagctttattcataattgtgaaaaaccagaggcaaccaagatatccctcaatagatgaatggataaactgtgatattacagtttacaatggaatattattcagtgacaaatgaactatcaagccacaaaaaaa

SEQ ID NO: 927632 - DNA, 614 bp, Homo sapiens
tgtaggatgaaggcaaaagaggaattaggcatgagggttgaggtcacaatggaaagaatgagagctgaagttttattaactgagatggggaagactgtgtgaggagcaggtttgagggaatactcagcaggtcagttttgaacatgttaagtttgatttgtttgtgtgatatccaagatattcagtaggcagttggatatatgaattttctagggtccagaaaaaagattwtggcctgaagtgtacattttggcatacccagtgtatagatagtattcaaaaccgtgttactgcatgaggtcaccaaaagagagagagtttatgaaaaatagaataggttcaggggcttggccctggagtactacaatatttagaggtcaggaagatgagaagccatcaaggagaatgggaaagagtgtccagggatgtaggaggaaaacctgaagttgtgatttcttagaagccaagtgaaaacattattttcagatggatgaaatgataaactctgtaaaatgctgttgatccaataagctgaggaactgaacaacagccttagtaatgtgatggaaactggtgacttgatcatagcaattttggtggagtggaggggtaaa

SEQ ID NO: 927633 - DNA, 614 bp, Homo sapiens
tgtaggatgaaggcaaaagaggaattaggcatgagggttgaggtcacaatggaaagaatgagagctgaagttttattaactgagatggggaagactgtgtgaggagcaggtttgagggaatactcagcaggtcagttttgaacatgttaagtttgatttgtttgtgtgatatccaagatattcagtaggcagttggatatatgaattttctagggtccagaaaaaagattttggcctgaagtrtacattttggcatacccagtgtatagatagtattcaaaaccgtgttactgcatgaggtcaccaaaagagagagagtttatgaaaaatagaataggttcaggggcttggccctggagtactacaatatttagaggtcaggaagatgagaagccatcaaggagaatgggaaagagtgtccagggatgtaggaggaaaacctgaagttgtgatttcttagaagccaagtgaaaacattattttcagatggatgaaatgataaactctgtaaaatgctgttgatccaataagctgaggaactgaacaacagccttagtaatgtgatggaaactggtgacttgatcatagcaattttggtggagtggaggggtaaa

SEQ ID NO: 927634 - DNA, 608 bp, Homo sapiens
ataggattgtgcctcttctttgtaaaagatgattcaccattccagtcagtcaggatttatctggactctgattaaatcaatcagttaattccacaaattcctcccaggcttgggtcactcacaaattttatcaccatgccatcagcaccctgacgttaaggtactgaaaggaacaaagttagggatagagatacatggcatataagtacagacctctcttcagtctgcctgattctttcagtagtaagtcaggtttttatttcacctaactggattgccatcagtccatctccatcttgctcactaagagaggcagtaaagcacatttgctagctagagaagcagactttgaagctaggtcatctggattcaaatttcagctctcccatttactagctctgtgggcaagttccttaatctctttatgcccatgcttccacatctgtaaaawgggaatagtacctaataattggttaggagcattaagctagttggcctatgtaaaacatccaaaacagtacctggtatataataaatttgctataataatgactactgtaggtacctcctgccagcatccttctgatgctgcctgtctagtataggtc

SEQ ID NO: 927635 - DNA, 574 bp, Homo sapiens
tgattatttcatcacctggtttacctgtcatggatcttggtgacttctatagccatctaaacatccctggcctttcagtcccttggcctgctcactgtccagtactgtcctcctcctccttagctgctggcttccrttcagctttgcctacggtgtcattatgcccacaatcagcacctccaagccactcactgttacccattcactctccattcctctgctcatgcccacctccctctttacccagcatacgctcccacatccatcaatataatcactgccctgcatcattatcatcaactctgttgcccctgtctcattcttggcaaaattccaatcctgattaaatctaactctctgcctgctcttcacctacaatcatgtctggaaaaaatacacacccacattgatttgtctcactttaaattcatgaccacagaccgcaagtgagcccttggtgctgtcgggcaatgctcctacattcactcagttaattcactctcctgctctccaagaggactatcgcttactttctcctctctccttaaacccccgtacctgtgatgctctcctc

SEQ ID NO: 927636 - DNA, 536 bp, Homo sapiens
aaaccaagaagaagagagaaaaagccagggaagtgagaggagcagaagaagattgagccagagaaccatgggagaaagggacagagaagagaggagaggcagagattggaggagggggaggggaaggagaatccaccatgcatcaggtggggacttggccatgcactcagaacacccaggagaaggacagggcagcactctgcctggcctgtgagtaaagcacacctaggggttgcagttccatatgggtgttctgtgagagggaggagaargctggatgtgaggctgagaagagtcccagcttgttttgagggtgcattcctttcagagaggcaccccagtgtgatgactgacattccactgctgaatagaggagctccccagctagagtagagtagccacagctagaggttcagccagggcttgagtcctagagcgtgtcatacaggtggtgcctggatttccgcctgtgccaaggggcaaagctgacaatgggtgccttctgtgagccctctccatctctgcccttctccttc

SEQ ID NO: 927637 - DNA, 728 bp, Homo sapiens
catccaccaaagcccagtaacaggccaagagctgtctctcaaaaggagagtagttatctgcataagatgacagggccttgcccccaaattctagagacctctgctgtgattcacctatgggagcctgccaaaggctccaaacagcatccctatctgccactaacacctcaagcaccattggatttgcaggattatatggcccaagtggcagtgtagcttgcccatyagcctggacctgttgcagagccttctcctgttctggaccccacccaaaacaggcagcctttcaggtcactcgataaatgggctggagtaacacacccaaataaggaatgtattgcctccaaaatccaaataggcccactaggcattgtgcctctttcttgattgtaggagaggctaaatgcagcaacttaacctttaccttagaagggatatcttgacaggccccacaccacagtacccctagaaattttactgaggtagaaggtctctgaattttagtgggatttatttcccatactctggcatgcaaatgtcttgccaatacctttagtgtgtttgctacttcttgctcactggatccaatcagcataatgtcatcaatgtaatggaccagcgtgatatcttgaagaagcgaaaagcaatcaaggtgtcttcgaataagattatgacacaaagccagagttgatatgctcctgaggtaagacagtaaaagtatattgctg

SEQ ID NO: 927638 - DNA, 588 bp, Homo sapiens
atatctgtgaacaacatgggtttgaactttatgggtttatttttttattttatttatttatttattttgagatggagttccgctcttgttgcccaggctggagtgcagtggcgcgatctcggctcactgcaacccctgcctcccgggttcaagcgattctcctgcctcagcctcctgagtagctgggactacctgctcccgtcaccacacctggttaattttttttgtatttttagtatagacagggtttcaccatgttggccaggctggtcttgaactcctgatctcaggtgatccaccagccttggcttcccaaagtgctgggattacaggtgtgagctaccatgtccggacatataggtccrtgtatacacaggttttcttctgcctctgccactcccaagacagcaagaccatccctcctcgggctactcagcatgaagatgatgaggatgaagatcttatgacaatccatttgcacttaatgaatagtaaatatgttttccttataattttcttaatagcattttattttctctaacttactttattgtaaaaatagaacatatactacatataacatacaaa

SEQ ID NO: 927639 - DNA, 630 bp, Homo sapiens
ggcctctgagcccaagccaagccatcgcatcccctgtgacttgcacgtataagcccagatggcctgaagtaactgaagaatcacaaaagaagtgaatatgccctgccccaccttaactgatgacattccaccacaaaagaagtgtaaatggccggtccttgccttaagtgatgacattaccttgtgaaagtccttttcctggctcatcctggctcaaaaacacccccactgagcaccttgcgacccccactcctgcccgccagagaacaaaccccctttgactgtaattttcctttacctgcccaaatcctataaaacggccccacycttatctccctttgctgactctcttttcggactcagcccgcctgcacccaggtgaaataaacagccatgttgctcacacaaagcctgtttggtggtctcttcatacggacgcgcatgaaagggaccactggcctttcgtgagtagaggtatgacatgaaccttcggaagcctttggagtcagtcctctgactgctgcattgcgaatacacaggagtgggggccacagtgaaagtagagagccctagcatgagcccattgcaataacagagacaaaacgatggcagtgagtagtggggagacat

SEQ ID NO: 927640 - DNA, 630 bp, Homo sapiens
ggcctctgagcccaagccaagccatcgcatcccctgtgacttgcacgtataagcccagatggcctgaagtaactgaagaatcacaaaagaagtgaatatgccctgccccaccttaactgatgacattccaccacaaaagaagtgtaaatggccggtccttgccttaagtgatgacattaccttgtgaaagtccttttcctggctcatcctggctcaaaaacacccccactgagcaccttgcgacccccactcctgcccgccagagaacaaaccccctttgactgtaattttcctttacctgcccaaatcctataaaacggccccactcttatctccctttgctgaytctcttttcggactcagcccgcctgcacccaggtgaaataaacagccatgttgctcacacaaagcctgtttggtggtctcttcatacggacgcgcatgaaagggaccactggcctttcgtgagtagaggtatgacatgaaccttcggaagcctttggagtcagtcctctgactgctgcattgcgaatacacaggagtgggggccacagtgaaagtagagagccctagcatgagcccattgcaataacagagacaaaacgatggcagtgagtagtggggagacat

SEQ ID NO: 927641 - DNA, 670 bp, Homo sapiens
aactctgaggtcggtaggcggcatgtatcttccaagtgattcctaatgcctttgctgtcttctgtaccaagtcagccacaaatgctggcctgttatctgagccgattcataagggcagtccaaacctatgaataagatctcggagaagcacacgggttacctcgtaggccttttcacttcgtgttggataagcctctacccacccacagtaagtgcacacaagaaccagcaaatacttgttacctccacatttcagcatttctgtgaaatccacctgaagatcctcaaaaggagccgctccataagcttgtatgccaggtggaacactggggccttgcctcttattgtgctgtcggcaagtaatgcactgttgtgctactgctttggcaagggctggcaagagtgagatgtataagtaccggcctaacaatttttcaagtgactcttgtcctatatgagtggttttgtgcatggccaataygattatggctcctatcaactgcagcacagctactcttccacctggcagtctgatccatcctccttttattacttgcccctcttctgtgtggaagaagtctttttcttctttagaataggtaggtaccaggtcaggtgtttgagggagtaagggggctgctactgatgcccggtaagaggtagatgctgc

SEQ ID NO: 927642 - DNA, 612 bp, Homo sapiens
gtgttgctccccactatgtgtccatagattctcatcattcagctcccacttataagtgagaacatgtggtgtttggatggctaccggctccatctatgtacctaaaaaagaacatgatcttgttcctttttttggctgcatagtattccatggtgaatatgtaccactttttttwatctagtctatcactgataggcattaggttgattccatatctttgttattgtgaatagtgctgcaatgaacatatacgtgactgtatctttataatggaatgatttatattcctttgggtatatacctagtaatgagatttctctttggctgtgagtttgtcatccatggctcttattattttgagctatgttccttcaatacctagtttattgagagtttttaacatgaagagcttttctgcatctagtgagataattgtgtggtttttgtctttagttttgcttgtgtgatgaattacatttattgatttgtgaatgttgaaccaaccttgcatcatgaggataaagccaacgcgatcatggtggataagctttttggtgtgctgctgaattcaatttgccagtattttattgaggatttttgcatcgatgttcg

SEQ ID NO: 927643 - DNA, 586 bp, Homo sapiens
ccttcttttgagaagtgtctgttcatatcattcacccaaattttgatggtttttttcttgtaaatttgattaagttccttgtagattctggatattagacctttattacatgggtagattgcaaaaattttctcccattctgtaaatttcctgttcacgctaatgatagtttattttgctgatcacaagctctttagtttgattagatccccttcatcaattttggctttagttgcaattgcttttggtgttttatttaagaagtctttgcacatgcctgtgtcctgaatggtattgtctaggttttcttctagggtttttatcattttagatttttacatttaagtctttaatccatcttgagttaatttttgcataaggtgtaargaaggggtccagtttcagttttctgcatatggctagccagttttcccagcaccatttattaaatagggaatccctttcccattccttcttttggtcaggtttgtcaaagaccagatgattgtagatgtgtggtgttatttctgaggtctctgttctgttccattggtcagtatatctattttggtaatagtaacatgtt

SEQ ID NO: 927644 - DNA, 731 bp, Homo sapiens
tactagtgtcaaaatatcatcagttattataaaatcagttattataaaatcagttatataaaatcagttattgcacttataaaaatgcaaaatgctcaagaaagtctcagcaatagaatcaaacaagtagaaaaaagaaattcagagctccaagacaaggtctttgaattaacccaatccaacaaagacaaaaaatatataagaaaatatgaacaaagcctctaagaagtctgggattatgtgaaatgactaaatctaagaataattggcatttctgaggaagaagagaaatctaaaagtttgaaaagcttatttggaggaataattgaggaaaacttcaccagccttgctagagacctagacatccaaatacaagaagcacaaataacacctgggaaattcatcaccaaaagatcatcaactagacacactgtcatcaggtaatctaaagttaagaagaaggtaagaatcttaagagctgtgagacaaaaacaccaggtaacctataaaggaaaagctatcrgattaacagtatatttctcagcagaaaccctactagctaaaaaggattaaggccctatcttcagtctcctaaagcaaaacaattatctgccaataattttgtatcctgtgaaaataagattcataaatgaaggacagatacagactttttcagacaaacaaatgctgagagaatttgccactaccaagccagcactacaagaactgct

SEQ ID NO: 927645 - DNA, 504 bp, Homo sapiens
ggatgataggaaacatggtaagaccaatgaattccatgagcatgagcccactgttgcacttctttagccataaagtgagtgccttggtaagaagcaatgctgtgtggaatagcatgatggtggataagccattttgtgagtccacggatggtagtcttggcagaaacattgcatgcagaataggaaaacccatatctggagtaagagtctattccagtgaggacaaacctctgccctttccatgatggaagaggtccaatataatcaacctgycatcaggtggctggccgatcactccgaataatggtgccatatagagggctcagtgttggtgtttgctgcaggcaaattgggcactcagcagtggctatagccaggtcagccttggtgagtggaagttcatgttgctgagcccatgtgtaacctccatgcatgccaccatgtccagtttgttcatgggcccattggatgatgacaggggtggctggggaaagaggctgagtg

SEQ ID NO: 927646 - DNA, 640 bp, Homo sapiens
gcctgcatatcgcatatcgtgcagaaccatctgtgaaccaggtcctagtcttctcttcctctgttaactgattatagggaagttcccatgaggcgattggtgcaggctgggggtgagaagtcagggtggcagaaatagagaccatgggcatttgagccrcttcctcatgtaacttacttgtgccttcaggaccttctcgagccctatcatgtatataccacttccatttgatgatagaatgttgctgtgcatgacccactttatgactagatgggtcagaaagcaccaagttcatgacaggcacttcaggtcccatggtgacttgatgacccatagtcaaacgtacagtttccactaaagcccagtaacagaccaagagcagtctctcaaaaggaaaataattatctgcaaaagatgactaggccttgctccaaaatcctaagaggaccctgctgcagttctcctatgggagcctgtcaaaggctccaaacagcttccctatctaccactgacacatcaagcaccattggatctgcgaggtcacatggccccagtggcagagcagcttgcacagcagcctggacttgttggagagccttctcctgttctgtatccccctcaaaaacttgcagcctttcag

SEQ ID NO: 927647 - DNA, 582 bp, Homo sapiens
aggccctcactgtttcctaaagcagcacagggtttatctcctcatacaaacaaggaaaggctgatggcagcaatgttcggggaggggatgttgccactactggagatgggaaagctgttacttctggcagaaaaaatgttcattagagtttacaaactcagtgtcctcagcttcattagggtcctccaaacttccccattccaagttggaggaccccattcttttccagtcaatgcccacacttttacaatagacatctggcgaggctgtacatgcatctctcattgcaggtcaggcactcgcataataakagcttgtgtgtgttttttcccattttcagctctttctctacaggtgataagactctcactcagggcaatcttagcagatttgaaccttagtatctgcttctgaagctgggagacagaatccctcaattcatcattttcttttatcattttgtccactgaacttaggagcaaccaaccaggttcattatgttccttgggtctccacatatggtcaaaggtgtaatgtatagagacactaaactccttgcctctctcgatcagagaatcaggt

SEQ ID NO: 927648 - DNA, 582 bp, Homo sapiens
aggccctcactgtttcctaaagcagcacagggtttatctcctcatacaaacaaggaaaggctgatggcagcaatgttcggggaggggatgttgccactactggagatgggaaagctgttacttctggcagaaaaaatgttcattagagtttacaaactcagtgtcctcagcttcattagggtcctccaaacttccccattccaagttggaggaccccattcttttccagtcaatgcccacacttttacaatagacatctggcgaggctgtacatgcatctctcattgcaggtcaggcactcgcataataagagcttgtgtgtgttttttcccattttcagctctttctctacaggtgataagactctcactcagggcaatcttagcagatttgaaccttagtatctgcttctgaagctgggagacagaatccytcaattcatcattttcttttatcattttgtccactgaacttaggagcaaccaaccaggttcattatgttccttgggtctccacatatggtcaaaggtgtaatgtatagagacactaaactccttgcctctctcgatcagagaatcaggt

SEQ ID NO: 927649 - DNA, 658 bp, Homo sapiens
gcagaaggtgaaggagaaccaaccctagcactacatggtgagagagaaaggaagagagaagggaggaggtgcccgattatttttaacaatcagaattcacagggactggcagagtgagaacttactcattactactgggacagcaccaagaggttcatcagggatccaaccgccatgaccaaaacatctcccatcaggccccatctccaacgttggggwtcacatttcaacatgagatttggaggggacaaatatccaaactatgtcagaggggttcttgctaaactgacttagcagggttcttgttaaaactggattgtataagaaagtgcacagacaggcctagtagaagattcaaaggcctaactgaggtttgactaagcaaagagtctttgtcagggcagggaatgccctgagatcattgtacaggcctggtacctgtgaaaggagaaggagaaggaagggagacggggtagcaagagtctgagatagtggtaatactatgagaatatctaagcaagctgaatggggacctctagtgcagagagacatcccagagaggtgtcccatgttgagtgggactggccaggccctggtgccctttccaagctcagtcactgactgggcactgtctgggaagactggcctcagctcaact

SEQ ID NO: 927650 - DNA, 574 bp, Homo sapiens
agttctttatttggttttctttggttttaaaggcatggaatcctgctctgttgcccaggctggagtgtggtggtgccattatagctcactgcagcctccaactcctgggctcaaacgatcctcctgcctcagcctcctgagtagctgggactacaggcatgcaccaccacacctggctaatttttaaatttttcttagagatgggatcttgttatgttgtccaggctgatctcaagttcctgacctcaagtgatcttctcsccttggcctcccaaagagctgggattacaggtgtgagccaccacacttggcctgtccagcagttctattgaaatgacgtctccttgtcattgccatggccagagagtggactgtcaaactgacctatgtttgagttgttcctaggtcctttattttctagcaggatgcttacacttgcctgagccacaatttcctcatctgtaaaatggggaaaatcattcttaccttgtgagcttcctattagaatcataggggattatttccagtaagacacagtatgtgctatagagtaggcactccataaagacccctt

SEQ ID NO: 927651 - DNA, 641 bp, Homo sapiens
cagttttgcctcttcatgtggtttcctcaaacccaccccctgggaagtgcaatatgattctctcacacagcacatgggatgctaactggaatcacctctgccttgcacagttctccctcagttgctccaacagtgcctggtagtgtaaacaagactggcttaccagtgcagcattcaataccagtgcttacccagcagccattcaaccagtcctgctgatgccccaccatgtgccagccaccaaagcatctagtgccaagattacaactgtttccttctgctcctggttcttagagtttttttttwaaaaaaatatataaatgatctgcatttagtgatatatttatttttaatttttttatttccataggtttttgggggaacaagtggtattcggttacatgagcaagttcttcagtggtgatttgtgagattttggtgcacccaacacctgaacagtatacactgaacccaatttgagtcttttatccctcacccccaccaatgctttcccccgagtctccaaagtccattgtattattcttatgcctttgcatcctcatagcttagctcccacatatgactgagaacatacaatgtttggttttctattcctgagttacttcacttagaataatagt

SEQ ID NO: 927652 - DNA, 613 bp, Homo sapiens
gacacccaaagtggaggggctacttggtaatcctggctagaagtgaggttctgtcttccctctggctctcctctgatgctaccttggctgggaggggtagaaatttcttctttagtctctctatttgttcaccattgacaccatgaggtggcgtctcacctcctctgggctttgctgaaagtctcacactaggcctccactttcataaccacagcaggggagagggatggggagagatgccccgttactgacagatggggaagtcctgtatcttcacaaggtctccactgacactacctcagagggatgcttcatggccacttagcagggatgaaagttccagctccctacccaggcttctctgatctcacactgccaggtgggttggggcacctcatwacagtggtgagaatggcagtctaggctatccattcggtctttattgtcatgggcgggagtagggccacagttttttccacggtattctgctagagcagaggagttattgtctaaaagtgttcttactaggctgccctttttctggtcctttagctagtctgttccattgatttatctgttatccctttaccaataccacacagtcttaatgagt

SEQ ID NO: 927653 - DNA, 610 bp, Homo sapiens
ttgcaagagttttatggtttcaatctttgcatttaggtttatgatttgttttgagttaattaatttttgtatatggagcaaattaagaatttaagttctttttttaatataaaaaaacactattgttgaaaagtgtattctttcttcacaaaattgmatttgtatctctatggaaaatcaagtggccgtgcacatacatgtgggtctatttctgtactctttttttccttcaccaatagcaaactggcttgattactgtggttttatagtgctatgatgacctcgtattcacctcattagtgaggaaggcatccactgccctaaacagaatgagatggttgaacacatcgcaacactgggcagatagatgggcagcattttattacccacatctactcatggtcctgcgggaggacactgcacaccacacagggccacaccggggtgcacttgggaacagatgaacaagcaggggcagcaagagagaggcaggctttgaatatcaacagcacagggtgcccctggttactatgtgaggacgatactgccttgttttaatgatttgcggctggcagggaactgaagtctgtcagattgaggaccaggtggt

SEQ ID NO: 927654 - DNA, 610 bp, Homo sapiens
ttgcaagagttttatggtttcaatctttgcatttaggtttatgatttgttttgagttaattaatttttgtatatggagcaaattaagaatttaagttctttttttaatataaaaaaacactattgttgaaaagtgtattctttcttcacaaaattgaatttgtatctctatggaaaatcaagtggccgtgcacatacatgtgggyctatttctgtactctttttttccttcaccaatagcaaactggcttgattactgtggttttatagtgctatgatgacctcgtattcacctcattagtgaggaaggcatccactgccctaaacagaatgagatggttgaacacatcgcaacactgggcagatagatgggcagcattttattacccacatctactcatggtcctgcgggaggacactgcacaccacacagggccacaccggggtgcacttgggaacagatgaacaagcaggggcagcaagagagaggcaggctttgaatatcaacagcacagggtgcccctggttactatgtgaggacgatactgccttgttttaatgatttgcggctggcagggaactgaagtctgtcagattgaggaccaggtggt

SEQ ID NO: 927655 - DNA, 657 bp, Homo sapiens
tcattctgaatgtctgcagtagtattgaattggggagcagttagattccagggacatattcactcctgttttgttctccccccaatctcagcctttcggtgactgtttgggcaaagcctcccttgtggtagaagatgcctcacttctggggagaagaggctcctcatcttgcagacaagaagcagcacccactggttcttgctccaaaagccattaacattataaactggccaggtgcggtggctcaaacttgtaatcccagcaccttttgggaggttgaggcagaaggattgcttgagcccaggagtttgagtacagccttggcaacaaagtgagaccyaatctctacaaaaactagagaaaaaatagctgggtgtggtggcactcacatgtactaaggaggctggactgggaggatctcttgagcccaggtggttgaggctgcagtgagccaagatcacacctctgcacttgagcttgggtgacagagtaagaccctatctcaaaaaataaattataaactgattcacagtaactttggttttgtcactaatacgctgaatatttttgttacaactaatatgcaaaatgcaaactggctatcactaccattctgataatggaattagctctcctgcatacctgatgacctaatgc

SEQ ID NO: 927656 - DNA, 639 bp, Homo sapiens
tgaatgtctgcagtagtattgaattggggagcagttagattccagggacatattcactcctgttttgttctccccccaatctcagcctttcggtgactgtttgggcaaagcctcccttgtggtagaagatgcctcacttctggggagaagaggctcctcatcttgcagacaagaagcagcacccactggttcttgctccaaaagccattaacattataaactggccaggtgcggtggctcaaacttgtaatcccagcaccttttgggaggttgaggcagaaggattgcttgagcccaggagtttgagtacagccttggcaacaaagtgagacctaatctctacaaaaactagagaaaaaatagctgggtgtgktggcactcacatgtactaaggaggctggactgggaggatctcttgagcccaggtggttgaggctgcagtgagccaagatcacacctctgcacttgagcttgggtgacagagtaagaccctatctcaaaaaataaattataaactgattcacagtaactttggttttgtcactaatacgctgaatatttttgttacaactaatatgcaaaatgcaaactggctatcactaccattctgataatggaattagctctcctgcatacctg

SEQ ID NO: 927657 - DNA, 657 bp, Homo sapiens
tcattctgaatgtctgcagtagtattgaattggggagcagttagattccagggacatattcactcctgttttgttctccccccaatctcagcctttcggtgactgtttgggcaaagcctcccttgtggtagaagatgcctcacttctggggagaagaggctcctcatcttgcagacaagaagcagcacccactggttcttgctccaaaagccattaacattataaactggccaggtgcggtggctcaaacttgtaatcccagcaccttttgggaggttgaggcagaaggattgcttgagcccaggagtttgagtacagccttggcaacaaagtgagacctaatctctacaaaaactagagaaaaaatagctgggtgtggtggcactcacmtgtactaaggaggctggactgggaggatctcttgagcccaggtggttgaggctgcagtgagccaagatcacacctctgcacttgagcttgggtgacagagtaagaccctatctcaaaaaataaattataaactgattcacagtaactttggttttgtcactaatacgctgaatatttttgttacaactaatatgcaaaatgcaaactggctatcactaccattctgataatggaattagctctcctgcatacctgatgacctaatgc

SEQ ID NO: 927658 - DNA, 467 bp, Homo sapiens
ttcacagtaactttggttttgtcactaatacgctgaatatttttgttacaactaatatgcaaaatgcaaactggctatcactaccattctgataatggaattagctctcctgcatacctgatgacctaatgcttaacctaatcttcctctytcccactttgatttggaaacttgttacaatagagttctttacctcaaagtcttaaggaattcaagacaagactagagtatgttaagatactacaaaaaaatgtacatagcaagagctttcttgagtaagcaaattttatacatataaaaataatttacatgcaaatgactaagaggaaatgttaagtgactctggtgtaaataattagttttctgattctgccagagcatattaagaaaaattcactttggcaaaattatatggatttaaagaagtaacaagtgggtttctctaaagcacagtttggctttttact

SEQ ID NO: 927659 - DNA, 624 bp, Homo sapiens
caaagaggacctcttctaggacagtgccaagtggtaatgtgggattggaggccccacactgtgggggctgcctagtggagctgtgggagggggggctgctgccctccagatcaaagaatgatagagccaccagcagctcctgtcttcagtgtagaaaagctgtgggagcagagctgcccaaagccttggkagcccaccctatgcatcctggtaatgctctatgttcccaggatgtgggacatggtttcaaaggagattattttggaacatcgagatttaatgactgccctgctgggatttgaacttgtgtggggcctgtagtccctttcttttggccaatttatctcatttgtaatgggaatgtttaccaaagacctgtatcccagttttatcttagaagtcaataactggttttgattttacaggctcattggtggaagggacttgccttgtctcagaagaaactgcactttcgagtgatgccaaaacaggttgagacttttgggggactattgagaagggatgattgtattttgcaatgtgagaagaacatgagatttgaagggccagggatggaatgaaatagtttggatgttataccctttaagtctcatgttgaattgt

SEQ ID NO: 927660 - DNA, 624 bp, Homo sapiens
caaagaggacctcttctaggacagtgccaagtggtaatgtgggattggaggccccacactgtgggggctgcctagtggagctgtgggagggggggctgctgccctccagatcaaagaatgatagagccaccagcagctcctgtcttcagtgtagaaaagctgtgggagcagagctgcccaaagccttgggagcccaccctatgcatcctggtaatgctctatgttcccaggatgtgggacatggtttcaaaggagattattttggaacatcgagatttaatgactgccctgctgggatttgaacttgtgtggggcctgtagtycctttcttttggccaatttatctcatttgtaatgggaatgtttaccaaagacctgtatcccagttttatcttagaagtcaataactggttttgattttacaggctcattggtggaagggacttgccttgtctcagaagaaactgcactttcgagtgatgccaaaacaggttgagacttttgggggactattgagaagggatgattgtattttgcaatgtgagaagaacatgagatttgaagggccagggatggaatgaaatagtttggatgttataccctttaagtctcatgttgaattgt

SEQ ID NO: 927661 - DNA, 614 bp, Homo sapiens
tgctccatcccacatctgggaaaggtatggaggtctacatcaggtctatgtcaagacttatggcttaaaatgtctatccaaggaaaaaataaaactgaccagtaatcccaggagagaaacataccttggcaaattcgaagatatttctaattttatttaacaattttaaaattaatgtatcaaagattcacccaactcatgtcaaayaaaatatgtttgggttaattaatatatattttatatggacattcctttatttaaaacatccttttttcctagaatgatggattaggggctttcagtgtgcctcggccagttggaagtagaaaaataagcataaagataaactttgtgaacttcaattcaagaagaaaaataggaattcacaggaatagagaagaacattccagacactgtggagggggaggtgggaaggcagcctctgttataacatttggttcataaaagggagtgaaacaccagtacgagagaagagcagccagtctccctctgcaactcacctttccactggggatctgtgcaatccagattaagggagagcactctgtttctcccaagccttggagctagcacaaaagtggctgagatatggg

SEQ ID NO: 927662 - DNA, 614 bp, Homo sapiens
tgctccatcccacatctgggaaaggtatggaggtctacatcaggtctatgtcaagacttatggcttaaaatgtctatccaaggaaaaaataaaactgaccagtaatcccaggagagaaacataccttggcaaattcgaagatatttctaattttatttaacaattttaaaattaatgtatcaaagattcacccaactcatgtcaaacaaaatatgtttgggttaattaatatatattttatatggacattcctttatttaaamcatccttttttcctagaatgatggattaggggctttcagtgtgcctcggccagttggaagtagaaaaataagcataaagataaactttgtgaacttcaattcaagaagaaaaataggaattcacaggaatagagaagaacattccagacactgtggagggggaggtgggaaggcagcctctgttataacatttggttcataaaagggagtgaaacaccagtacgagagaagagcagccagtctccctctgcaactcacctttccactggggatctgtgcaatccagattaagggagagcactctgtttctcccaagccttggagctagcacaaaagtggctgagatatggg

SEQ ID NO: 927663 - DNA, 614 bp, Homo sapiens
tgctccatcccacatctgggaaaggtatggaggtctacatcaggtctatgtcaagacttatggcttaaaatgtctatccaaggaaaaaataaaactgaccagtaatcccaggagagaaacataccttggcaaattcgaagatatttctaattttatttaacaattttaaaattaatgtatcaaagattcacccaactcatgtcaaacaaaatatgtttgggttaattaatatatattttatatggacattcctttatttaaaacatccttttttcctagaatgatggattaggggctttcagtgtgcctcggccagttggaagtagaaaaataagcataaagataaactttgtgarcttcaattcaagaagaaaaataggaattcacaggaatagagaagaacattccagacactgtggagggggaggtgggaaggcagcctctgttataacatttggttcataaaagggagtgaaacaccagtacgagagaagagcagccagtctccctctgcaactcacctttccactggggatctgtgcaatccagattaagggagagcactctgtttctcccaagccttggagctagcacaaaagtggctgagatatggg

SEQ ID NO: 927664 - DNA, 703 bp, Homo sapiens
aaaatgactgactttgaacgttacgatttttctcctccttacgtgtacggtcctgtgatagacagaccaggggactcctcggctcatagtccgtgaggccagaagctgacgtcccaaatttctatttagaatgagtttaagcacgccagccaaacgctctgtcgtgaaactgtctgtcgggaaaacaagcgggggaaggggaaagggggggtccgggcgcggtaggctctcgcctgtcatccccgcacttttgggaggccgagggccggtggatccctctgtccaagccttggcaacacggtgaaacctcttctctcaaaaaaaaaaaaaaaaaaaaaaaaaaaaaaaaaaattttcccaaactctctgggttcataacctgggctcaaagttaataaatagataaataggccgggggsggggggtcacgcctgtcatcccagcacttttggaggccgacgtggacggatcacggggtcaggagatcaagaccatcctgggtaccacagtgaaaccccatctctactcaaaatacaaaaagttatccgggcacgggggcgggcgcctgtagtcccagctacttgggaggctgaggcaggagaatggcgtgaaccccggaggcggagcttgcagtgagccgagatcacaccgctgtactctaccctgtgcaccacagcgagagtctgtctctaaaataatatat

SEQ ID NO: 927665 - DNA, 736 bp, Homo sapiens
tgcccagctctttcagctgacggctccacatcttgggagtgggctctgatgcatgatgggtcacgggctcctcagttttctacagcccaaatactccccagctccggagccttctatcccaccaggagcacgtgtaacacaaatccttcccaaagatcatgcrgtacctgctgagtggacaacaccctcaactctttcccacaggccctgggtcccatgtggcagggaaacaggggaagatggagctcctcgagggcctgacaaggggctgagtcccagccagggcctcacccaagatgaggattctccatgggtttggagttgggtttccttttcatgtcctggaggagaaggcagaggtactaggatgggggctgagctccagctgagcatggttaagggaagtgtgtccaccaggcatctgtgcatgggggagttgttggggaagcactggccactgcccagtgttctgcccagggcagctcagggggccctgaacacctagggtccaggaagggctatatattgaggtttgttgagttggctcctctggtgttttgttgatggggtaaggaggcaaatggacaccccaggccagtgaccctcctgtcccacaagtgcccagctcccccaggaggacctggctcaccccaagcccacaggaagcacaggaaagtttctgcatggcacagaagccaggccctcctcaagagggggcatcacaaggcaggggcca

SEQ ID NO: 927666 - DNA, 736 bp, Homo sapiens
tgcccagctctttcagctgacggctccacatcttgggagtgggctctgatgcatgatgggtcacgggctcctcagttttctacagcccaaatactccccagctccggagccttctatcccaccaggagcacgtgtaacacaaatccttcccaaagatcatgcggtacctgctgagtggacaacaccctcaactctttcccacaggccctgggtcccatgtggcagggaaacaggggaagatggagctcctcgagggcctgacaaggggctgagtcccagccagggcctcacccaagatgaggattctccatgggtttggagttgggtttccttttcatgycctggaggagaaggcagaggtactaggatgggggctgagctccagctgagcatggttaagggaagtgtgtccaccaggcatctgtgcatgggggagttgttggggaagcactggccactgcccagtgttctgcccagggcagctcagggggccctgaacacctagggtccaggaagggctatatattgaggtttgttgagttggctcctctggtgttttgttgatggggtaaggaggcaaatggacaccccaggccagtgaccctcctgtcccacaagtgcccagctcccccaggaggacctggctcaccccaagcccacaggaagcacaggaaagtttctgcatggcacagaagccaggccctcctcaagagggggcatcacaaggcaggggcca

SEQ ID NO: 927667 - DNA, 736 bp, Homo sapiens
tgcccagctctttcagctgacggctccacatcttgggagtgggctctgatgcatgatgggtcacgggctcctcagttttctacagcccaaatactccccagctccggagccttctatcccaccaggagcacgtgtaacacaaatccttcccaaagatcatgcggtacctgctgagtggacaacaccctcaactctttcccacaggccctgggtcccatgtggcagggaaacaggggaagatggagctcctcgagggcctgacaaggggctgagtcccagccagggcctcacccaagatgaggattctccatgggtttggagttgggtttccttttcatgtcctggaggagaaggcagaggtactaggatgggggctgagctccagctgagcatggttaagggaagtgtgtccaccaggcatctgtgcatgggggagttgttggggaagcactggccactgcccagtgttctgcccagggcagctcagggggccctgaacacctagggtccaggaagggctatatattgaggtttgttgagttggctcctctggtgttttgttgatggkgtaaggaggcaaatggacaccccaggccagtgaccctcctgtcccacaagtgcccagctcccccaggaggacctggctcaccccaagcccacaggaagcacaggaaagtttctgcatggcacagaagccaggccctcctcaagagggggcatcacaaggcaggggcca

SEQ ID NO: 927668 - DNA, 667 bp, Homo sapiens
  misc_feature 577: n = A,T,C or G
tcttgctgcccaggctacagtgcaatggcctaggggactcaaggagtcaacctatggcagagaggacacgtcattctgagcgtaagggccgcagcgaaaggtggcagggcccgcgcttttaaaggctgaaatcccggcggctcaggcctgtcgtttccagcactttgggaggcccaggaaggcggatcatttgaggtcaggagttcgagaccagcgtggccaacgtggagaaaccccgtctctactgaaaataggaatatgagccggccgtcatggtgtgcgcctgtaatcccagctaccgaagaagaatcactggaacccgggaagcagaggtttcagtgagccgagagagcgccaccgcaccgcagcctgggtgacagagcgagagagactcagtccaaaaaaaaaaagaaagaaaagaagaagaagaaraaaaaagaacgggcccaaatactgcattgtcgctcaacgttctcccaaaaggccagaaaccccctgactcaggtcaaggaggtggtgtttcgttttctctctccctctctctctccctcctctctctctctctctctctcccccncccccctccccatctctctctctctctctctcctcttttctccccccgaacttttatttgtcgttcaagcatacatgagcaagattgtga

SEQ ID NO: 927669 - DNA, 680 bp, Homo sapiens
acaaagaaagattccacagaccagtctaaccaacaatacaattataaactagttgttcaaatatcaaaaaccaatttcaatgacaaatgaatggtatgaaaaccccgcaaatgtcaagtagaatatattatacttgaatgaaattatgagttgagagtaggaaatctatgtttaaccaagcaaattaaataatgtttatgaggaaattatctgctaatgttttattatttggcaagctattcagtggaacacaaagatattcttaatgaagtcgaaaatatattttaaaatgttactgaagtggattaaaaaataatgaggacatgaataacttttaaaagtattckgggataaagagagaaaaataaatttagatttcatacatacataaaatatattttaaaagttgtgttttctggttgctcaaataaaaggagcagatatttaaattccatgcctttcattttaaagtttaggaaatgcttatagctttccacactgacatttatactgacacagttaatctaatcgagtgataacaaaatcaaaacaagcagaattctcttgagcaatctattttcttgatttttaaaagtcaatgtactctcaaagaaacaaaactattattcgtggattctgttatttgaaaacatttactgatcatttaccttacaccaaat

SEQ ID NO: 927670 - DNA, 680 bp, Homo sapiens
acaaagaaagattccacagaccagtctaaccaacaatacaattataaactagttgttcaaatatcaaaaaccaatttcaatgacaaatgaatggtatgaaaaccccgcaaatgtcaagtagaatatattatacttgaatgaaattatgagttgagagtaggaaatctatgtttaaccaagcaaattaaataatgtttatgaggaaattatctgctaatgttttattatttggcaagctattcagtggaacacaaagatattcttaatgaagtcgaaaatatattttaaaatgttactgaagtggattaaaaaataatgaggacatgaataacttttaaaagtattctgsgataaagagagaaaaataaatttagatttcatacatacataaaatatattttaaaagttgtgttttctggttgctcaaataaaaggagcagatatttaaattccatgcctttcattttaaagtttaggaaatgcttatagctttccacactgacatttatactgacacagttaatctaatcgagtgataacaaaatcaaaacaagcagaattctcttgagcaatctattttcttgatttttaaaagtcaatgtactctcaaagaaacaaaactattattcgtggattctgttatttgaaaacatttactgatcatttaccttacaccaaat

SEQ ID NO: 927671 - DNA, 680 bp, Homo sapiens
acaaagaaagattccacagaccagtctaaccaacaatacaattataaactagttgttcaaatatcaaaaaccaatttcaatgacaaatgaatggtatgaaaaccccgcaaatgtcaagtagaatatattatacttgaatgaaattatgagttgagagtaggaaatctatgtttaaccaagcaaattaaataatgtttatgaggaaattatctgctaatgttttattatttggcaagctattcagtggaacacaaagatattcttaatgaagtcgaaaatatattttaaaatgttactgaagtggattaaaaaataatgaggacatgaataacttttaaaagtattctgggataaagagagaaaaataaatttagatttcatacatacataaaatatatttwaaaagttgtgttttctggttgctcaaataaaaggagcagatatttaaattccatgcctttcattttaaagtttaggaaatgcttatagctttccacactgacatttatactgacacagttaatctaatcgagtgataacaaaatcaaaacaagcagaattctcttgagcaatctattttcttgatttttaaaagtcaatgtactctcaaagaaacaaaactattattcgtggattctgttatttgaaaacatttactgatcatttaccttacaccaaat

SEQ ID NO: 927672 - DNA, 532 bp, Homo sapiens
tccacctgccgagggggattggctcctaaagtcctgtcagacccaacatcacaggattcatggcaagaaatggcaccagtgccccccaccctttcaccagggaggaaggcctcccactcctgagcccactgygcccgagcttccacaaggcctacatacccctaggccacccagagtagaaaaggaaggatctgagaccttgggagaaacccttcccttggcagcctgtttgaggcctagaactgggatacaaatgcccttaagagagcaatggtatactgggatagatgaggacgggcacatggtagaaaggtgtgcctttgtgtaccaacccgtcacctctgccaatctcctcatttggaaaaacaataccccatcctataccaaaaagcctcaagctataattgatttgctccaaactattatccagacccataaccccaactggactgattgccaccagttgttcatgtacctctttaacacagatgaaaggaggagagtgctccaagcagcaacttggaagaaaatg

SEQ ID NO: 927673 - DNA, 597 bp, Homo sapiens
tcaccttttgacacatacatctgatacatatacatctgatacattcttaatacatatgcaatatgtataaagagctcaaacaactcaatagtaagaaaacaataagctgattaaaaaatggacaagaacttaaatatacatttctcaaaagaagatatcagtattctaattttgtcagttttcttacttttgccagttaagttttatacttttaaatgtttacttattacaggttaatatccatttctttcacagacctccttttagcatttcctttaagataggtstggtgttgatgaattttctcagcttttgtttgcctgggaaagtgtttatcttttttttatgtttaaggatacatttcctggaaacagtattcttggttgtcagttatgtttcttaagtgctttgattatagcatcctactctctcttgggctgcagagtttctactgagaaatccactgaaagctgtattggcactccattgaatgtaacatgttctttttctcatgctccttgaagagtctttctttgtttcaatttttactaaagtgattatgatgtgccttgaggaattcctctttaagttgaattt

SEQ ID NO: 927674 - DNA, 547 bp, Homo sapiens
atctttgctgtgtgggtgacttagcggttccagcctttgggctttggaaagtccacgccaaccacgggcataagtggcaccccagcacagacctacaaagacatgggcagactactttttaaagtagtttccagatcccgttactcatcaccacgcacagcctcctaactggggtctccagcactgaggccttcatttgcccctataaaatctgtccacgtagttgccaagttgctactggctcaatatctctgtcaggtcctctctgycactgcttctgctgtggaaccgtccttggtaccctctggctaacaaaggagcacagacccttagtaccttatccacatctccaacaagctgaagttgactcaagaaaaggaggccactggatcgtccataattcccacactctgccactgttcatcaccagacagggaacacctggcttgggcccacagcacacaccctctatcttgggctgattgcactgagtaattgctggcctccatctctctgggatggcacccccacgagacaagaaaagtgg

SEQ ID NO: 927675 - DNA, 547 bp, Homo sapiens
atctttgctgtgtgggtgacttagcggttccagcctttgggctttggaaagtccacgccaaccacgggcataagtggcaccccagcacagacctacaaagacatgggcagactactttttaaagtagtttccagatcccgttactcatcaccacgcacagcctcctaactggggtctccagcactgaggccttcatttgcccctataaaatctgtccacgtagttgccaagttgctactggctcaatatctctgtcaggtcctctctgtcactgcttctgctgtggaaccgtccttggtaccctctggctaacaaaggagcacagacccttagtaccttatccacatctccaacaagctgaagttgactcaagaaaaggaggccactggatcgtccataattcccacactcygccactgttcatcaccagacagggaacacctggcttgggcccacagcacacaccctctatcttgggctgattgcactgagtaattgctggcctccatctctctgggatggcacccccacgagacaagaaaagtgg

SEQ ID NO: 927676 - DNA, 622 bp, Homo sapiens
cagaaattgacaagctgaccttaaaatgcatatggaaatacaagggacccagaaaagccaaaagaatcttaaatgaaaaaaacaaagttagtgggctcacacttcctgatttcaacctcagtataaagtttatagtaataaagagagtttgaataagaatagacacagctacatgtaccagaaaagtccaatgagaaaaaaaattatctcaaatatatagtactcccaacaattgtatagccacatgtaaaagaatgatatttgattccttcttcatatcacacacacactcatacacccacacatataactaaaaatayaccttaaacctaaacatagatggtagatgatgaaactcttaggataaaaaataggaagaaatcttcataactttgggttaagcaaagccttcttaaacatgacacaaaaaatacaaatgaaaaaagaaaaacagatgttagatctcatcaaaatgaaaaacttgtatgcttcaaaagacaaaaagtcaactgacagaatgggagacaatatttgcaaatcacttatgtgataatggacttgtatcttgaataaataatgaatgctttatacactcaacaataaaacaacaactaatccaatt

SEQ ID NO: 927677 - DNA, 532 bp, Homo sapiens
ccttcttaaacatgacacaaaaaatacaaatgaaaaaagaaaaacagatgttagatctcatcaaaatgaaaaacttgtatgcttcaaaagacaaaaagtcaactgacagaatgggagacaatatttgcaaatcacttatgtgataatggacttgtatcttgaataaataatgaatgctttatacactcaacaataaaacaacaactaatccaattaaataatgggcaaataatttgaataaatatttctccaaagaagatacacaaatgactgatgaacacataaaaaatgctcaacactattagacatcaaagtactgcaaatcataatcacacttgatattcattatgackactgcaacagtaagaagttttcacaaagatgtggaaagatttgaaccaatatatattgatggtggaaatgtaaaatggagcagcctctttgtaaaacagtctgtcagttttacaaaatgttaaacatagagttaccaagtgacccagcttttctactagtaaatatatacccaagagaa

SEQ ID NO: 927678 - DNA, 765 bp, Homo sapiens
acagctgagatcagctcaccaggagaacaaaccatcatagctacaaatgggaaggagcatttgaaaagcaacttggatgaattgctggagatggacagtagactttagtaagagtgagaaactctttcaacttgcggtcttaggagagctgcacatttttgtgtgctttacttctaggaacgtcaccacgttctcacagtgaagaattaagaaaaaaaaccctcatgtttctggcaggggaaagggaaaagtaagcgtttaaaaaataaactcagaattctcaattacaaagaacttactcagcaaataactttactagagccctatcaaatgctggagaagggcaattacccagctccttctcctctagccttagtgtctcacctaaggagttgggaagctgaggaaaacttgtgaaggtcacagacctgggacagaagcccactgataactgargtttggtcacagaattctaggatactttacattcccccaaaccttaccactaaatcactggcctcttgttactataaccagagtgtaataataatataatatattacatttgaaagagctgcaaggctcagcctctctttgaaaagtagtttttagggaaacccaaagacagcagaagagaaaaagacaaggacattagaggaaatggaagctgctgacacccatagctatggcaaacattaaacataatccaactccttgccaggttaacataaaaccacacacacactaaaggtcaatttacctcag

SEQ ID NO: 927679 - DNA, 582 bp, Homo sapiens
ttatagtgatagtgttttattcctcgttttctttccttagctttgcaacctccaattccacctcattcagatattttatcatctaatttctgagctcctttaaagatctaatcaaattcttcttaaattgttgtgtagcatgaaatacagtcagccctctatatccacctgcttgatatctcagattcaaccaatgtccaatcaaaaatatccakaaaaaaaattttaaaagataaatcataccagttttaaaaatacagtataacaactatgtatttacataacatttatgttggtattattaaaatctagagatgatttaaagtacttgggaggacatgagtaggttatatgcaaattctacattattttatatatgggacttgagcaggttataaaatacagtatttatgattgctttattttattacattttaatcaatttgtaattacatatttaatcattttattgttattgcatatttaatcaatgtgtgtatatatatctatatctgtcttagtccattttgtgctgctcataaaaatattgcatatttataaagcagataaatttatttggtg

SEQ ID NO: 927680 - DNA, 701 bp, Homo sapiens
aaatacatttctgtgatttaagtcactgtgggtctttattatggcaaccttatcaaactaatgcatattctttatatagagtgctggatattaaccacttatcagatacgcgatttgaaaatatattttttcattctgtaggatgtctcttcatctgttgattgtgtcccttgatgaacasaggtgttacattttgatgtactctaatgtgggtatcatttggctctgtgtccccacccaaatttcatgtggaattgtaatccccactgttggatgtggggcctggtgggaggtgattggatctggggtgggttgtaatggggtatcaccattagcaccctatcgctgtctcgtgatagagatctcctaagatctgggtgtttaaaagtgtgtggcacttcccctttagcttgctctctcctgcttcaccatgtgaatatgtgcctgcttcccctttgccttctcccaagatggtaagtttcctgaggcctccccaaccacgctttctgtacagcctgcagaactgtgagtcaattaaatctcttgtcttcataaattacccactctcaggtggttccttataccaatgcgagaatggactaatgcaaatgtgtctattttttctgtggttgcctgtacttcagtcttcctcttatgccacccaagctttgctgcagctaccggcttcagggaggtaagtt

SEQ ID NO: 927681 - DNA, 701 bp, Homo sapiens
aaatacatttctgtgatttaagtcactgtgggtctttattatggcaaccttatcaaactaatgcatattctttatatagagtgctggatattaaccacttatcagatacgcgatttgaaaatatattttttcattctgtaggatgtctcttcatctgttgattgtgtcccttgatgaacacaggtgttacattttgatgtactctaatgtgggtatcatttggctctgtgtccccacccaaatttcatgtkgaattgtaatccccactgttggatgtggggcctggtgggaggtgattggatctggggtgggttgtaatggggtatcaccattagcaccctatcgctgtctcgtgatagagatctcctaagatctgggtgtttaaaagtgtgtggcacttcccctttagcttgctctctcctgcttcaccatgtgaatatgtgcctgcttcccctttgccttctcccaagatggtaagtttcctgaggcctccccaaccacgctttctgtacagcctgcagaactgtgagtcaattaaatctcttgtcttcataaattacccactctcaggtggttccttataccaatgcgagaatggactaatgcaaatgtgtctattttttctgtggttgcctgtacttcagtcttcctcttatgccacccaagctttgctgcagctaccggcttcagggaggtaagtt

SEQ ID NO: 927682 - DNA, 621 bp, Homo sapiens
gctgaagaactggtttggggttgggagaaactcctgtacattttggtgcctagaggtgaaatattctgtgttgagtattgagtgagtgtgtaaaaataggaaaaaacagtttggttcttcctatcttttccataaaccacccccacacacagcttctgtgaagcttatgcactgttcaatctctctgttgctcctttttgtaggagacacttaaaggtctccaagckactctgctccgtttccctctctctccctctaagaccactcttgtactaacacttgatgatttcagtattcatgcagatgacacctcgagggtctttatctctcagtttcttgatcttctcatctccaattattttgtccaccctacctctgctctccccgaccttattctatggcattgccacttattgccctccttcacaatctgtgtttcacatatcctattttccaaacatcatcttttatctccccagcttactccccctgtactggaataccaatgattcttagcccacactaggatgtttatcactgccatcattgcgctgtccacttgtaccctaagctttcttattaggctctgtggtccattgttatcatcagtcctttgaagac

SEQ ID NO: 927683 - DNA, 621 bp, Homo sapiens
ggaacacactttgagaaccctagccctcagaaaatggtcaagcttgggcctggctttccagaactgctgttctcttacgttttctctctatctctatggcaatggccatggtttttcctttgttcattagcttcacgactgccgaaactcattccttttaagcctgtttgttcctccttcctggtcctctttcctaacctgcctggtttgagcacccaaaggacaaggactatgccaatgtggcttgkcatccttagtgtcaacaatgactggcagtcactaggagcttgaatactgtgagaataatggagctggatgtctggttctggtcctgctattgaacaggttcttttagcagtgagttaaataatctctgctcaatttttattatgggcaaatgaaagaaatggtgcttgacagcagatatgggttagagaattgagtacaaaaagtcttttaggaggaaggttaattcataaccagtcttcacaagctggaggcagtggctgagagagaacacacacagtggatgtggtggggcaaccgggagcacgggggtcctgtagagccgattctagggtaggagatgtccgagtttttattttttattttgattgaaga

SEQ ID NO: 927684 - DNA, 610 bp, Homo sapiens
ttagcttcaagggacacatggtatggctggagtcagatgactgttatgctgaagaagtcaacagtggtgactgatatctcaagaagtgggctaaaagtccacttctggttactctgctaggtatggtctaggaattcttcaaccatgagacarataggtcaactttcaccagcaaccccaagtctggtttgcagtattagactctgggttggacacagatttaggttcaatctgcagcttgattgtggtcactctctggaaaacacttaccatggacttctagatgagtgacccagttagatcagcatctggggttgtttctggtttgcagcccaaaagatattcagacagtctacattttccattgtagataaccaaacagatagaatatgtgccattatcccaaaccctgagttctgacctttgagaggagcaaccactcatgtcaggttctgtatggctggcacaggttaaacagccacagcggcccagtggacatcatgaggtttcaccttccctgactcatctatgaaccaggaccagtcatataggaaacactcagtaaattggggtgccccacacacccagcagcttgttcagaggaagaagg

SEQ ID NO: 927685 - DNA, 656 bp, Homo sapiens
agtggagatagggatgctatgtagcaagattgctgacctgcatgcatggcttaacacttgccttgcactgccttaaattgtgacaataatttggtattatattgccacagagtcagttttgtcagtcttatgatctctattttaacattagtgctgatgatttgttgtacctaaagagcaaacagaggtacaacagcaaacaggtgtgtaacwaggcctgtctgtctcctcctgttctgtgtgggagatgctgatgggagaagaaaagacacacacacaatacctttaagggtaaacaacttttttatcccatgtaaatggtattgcagatatctatatctatatctatatttttatctatctatatatatgtatgtatgtatctatctatctatatctatatctatgtatatgtactcaccagactatacagcattcatggccagatggggaagcaacagcctaggctccagagttggctactacacccaccagactatggaggattcacttttcagcttcaagatcaccgctggaagctcagggacttcccatattccaggatagaaactcctccagttctccctcttggcaattgaatggtcggggggaactgaccttagtgaaaattgggtatctaaattagtggaatttga

SEQ ID NO: 927686 - DNA, 669 bp, Homo sapiens
ggcagaaaatgaggggagtagtaaaattttaaaaacaatgttatgttcccctctgtttttgttattaaaaggaatagcctatcgaatgatggtcagcacctgcttctttgtgtctgaggccaagaatgcatttagcaactgggtagccaccgctgcaaaagaagtcaactgcagttagagctgccttttagtcgaattgccacaggctgcagggaatgggctcccttaaaaaattgtctctgccaacatttccaagtggttacatcactaccaagggggtcaggagaatagcacctgtaatcccacctggacttcttttaaccaaatcaaagagtctatttttgcccaagtctgacaaaaggagaaatccacttttgcaatgcatcaaaggcctttgtatcctacccaatatacttggaaagacatatacagggaacctaccataccggtagctgaactccatatggcaccgcaccccmgctttgtctggaggccttaaatggctcttttaatgttactctggggtttctcccaccagacaattgtcaacacatactccaaatcaacagcattgtccccaatgaaacacaacctctttcctaaatctagatgcttccaaacatcactggttacaaatgcgccagaatccctgatggggtgtaccctata

SEQ ID NO: 927687 - DNA, 669 bp, Homo sapiens
ggcagaaaatgaggggagtagtaaaattttaaaaacaatgttatgttcccctctgtttttgttattaaaaggaatagcctatcgaatgatggtcagcacctgcttctttgtgtctgaggccaagaatgcatttagcaactgggtagccaccgctgcaaaagaagtcaactgcagttagagctgccttttagtcgaattgccacaggctgcagggaatgggctcccttaaaaaattgtctctgccaacatttccaagtggttacatcactaccaagggggtcaggagaatagcacctgtaatcccacctggacttcttttaaccaaatcaaagagtctatttttgcccaagtctgacaaaaggagaaatccacttttgcaatgcatcaaaggcctttgtatcctacccaatatacttggaaagacatatacagggaacctaccataccggtagctgaactccatatggcaccgcacccccsctttgtctggaggccttaaatggctcttttaatgttactctggggtttctcccaccagacaattgtcaacacatactccaaatcaacagcattgtccccaatgaaacacaacctctttcctaaatctagatgcttccaaacatcactggttacaaatgcgccagaatccctgatggggtgtaccctata

SEQ ID NO: 927688 - DNA, 680 bp, Homo sapiens
gattgtccctcacataggattccagaacactgctgctgggttttcagagtttgtccctaccatagcattccagaacactgcgacgagggtctaaatatttgtcattcacatagaattccagaacactgctactgggttctgagtgtttgtccctcacaaaggattcctgaacaatgctgctgtggtctgaatgtttgtctctcatataggattccagaacactactgctgtggtctcaacgkttgaccctcagatatgattccagaatactcctgctgtgatcagggtgtttgtgtctcacatgggattccagaacaatccttctgtggtctgaatgtttctccctcacataggattccaaaacattcctgctgcagtctgagtgtttgtccctcaaacaggattgtagaacactgctactggggtctgaatgtttgtccctcacataggattccaaaaccctgacaggagggtctgaattattctccctctgataggattccagggcactcctgttgtggtctgaatgtttgtccctcacttaggattccagaacactgctgttaggttctgagtgtttgtccctcatgtgcgattccagaacaatgttacgtgggtctaaatatttgtccctcacataggattccagaacactgctaggagggtctgaatgtttctct

SEQ ID NO: 927689 - DNA, 680 bp, Homo sapiens
gattgtccctcacataggattccagaacactgctgctgggttttcagagtttgtccctaccatagcattccagaacactgcgacgagggtctaaatatttgtcattcacatagaattccagaacactgctactgggttctgagtgtttgtccctcacaaaggattcctgaacaatgctgctgtggtctgaatgtttgtctctcatataggattccagaacactactgctgtggtctcaacgtttgaccctcagatatgattccagaatactcctgctgtgatcagggtgtttgtgtctcacatgggattccagaacaatccttctgtggtctgaatgtttctccctcacataggattccaaaacattcctgctgcagtctgagtgtttgtccctyaaacaggattgtagaacactgctactggggtctgaatgtttgtccctcacataggattccaaaaccctgacaggagggtctgaattattctccctctgataggattccagggcactcctgttgtggtctgaatgtttgtccctcacttaggattccagaacactgctgttaggttctgagtgtttgtccctcatgtgcgattccagaacaatgttacgtgggtctaaatatttgtccctcacataggattccagaacactgctaggagggtctgaatgtttctct

SEQ ID NO: 927690 - DNA, 506 bp, Homo sapiens
gggtctgagaaggccaccgcagtcatttcttcccttctgtcagacataattcctcagtttagccttcccacctctatacagtctgataatagaccagcctttattagtcaaatcagccaagcagtttttcaggctcttagtaggtttcagtgaaacctttatatcccttacggtcctccgtcttcaagaaaartagaacggactaaaggtcttttaaaaacacagctcaccaagctcagccaccaacttaaaaaggactggacaatacttttaccactttcgcttctacaaggtacagcccatttaagctcctgtgtagatgctcctttttattaggccccagtctcatttgacaccagaccaactgagactgtgcccccaaaaaacttgtcatccctactatcttttgtctagtcatactcctattcaccgttctcaactactcatacgtgccctgctcttgtttacactgccggtttacactgtttctccaagccatcacagct

SEQ ID NO: 927691 - DNA, 609 bp, Homo sapiens
gctttagacaactgctctactccagcccaacaccacaggaagaaatgcaatcccccttaagacagcaaagcccaaatggggagcccagacttccagtcttaccaggtggtattgaggtaccatcacacctaactcaagatagtgtcaggaaaggacaaataatgaactggattttcatgccccaccatcctatagtgagcttcatacctcacagwgccaggaagaccacatagaaagccaggaattcctccctttccctgcagaaacaaggcataccttccctctctgctgaggtggttttagagaagacttagtggacagtcaatattttcaacatcacctagcagttctgaggccactctcaccatagtgtcagtggacatcatgcttacacctgggacatccagcaataaggcggagcctctcccctcacaggcctgtatagagagtggttaggaaacagacacaagataacaccttcccttgcctaagcagagcaatgtcagagaaaaccaaaaaagtttaaataagagccagagtctaataaaatagtatttatatgtctaggcttcaaccaagaaacattcatcatacaaagaaccagaaatc

SEQ ID NO: 927692 - DNA, 607 bp, Homo sapiens
gtggatagcactgtgtttaagaattatcaaatgtgcctgtttcaggctgtaaactccttagatctgatgtgtgacctaggcatctacattttttatatcaagcccaataggtggctttgatgctaatgaaaggaccatgattaggagcagagacttgagatttatacattcctgaactcaatctagtctttgacatttactagcatgttgcctagatttagttatttaaacattttaagctgattttagtggggataaatgaaagatctacttagcatatagtaaataatcagcaaatcackcaattataatctagtgggaatattttcacataaacaattatgtgatgacctccccagagttgactataatgccaagataaaagaaaaaataatcttccaacttgcaattatctacattataaataaatgcaaatgtaacaactttttcatccccttgtcattataaatccatactgaatggaggagtttgtatcaaaaatgtgcttctaaaattattttttaaactccttcataattttatatacttatgttgttttcattattttcttataaacacagagagagagagagagaaaagagaggaa

SEQ ID NO: 927693 - DNA, 778 bp, Homo sapiens
tgggcacacaattattctgcaatgggaatttcaatagggtgaataaaatgtttgaaaaggagacacagagctatgatgaaggagaggtagaaagacattctcccatagcaaaaccttaattaatgacaccatatcccccaagaaagatttagttgaaaaagtcrgtttatttctttcttttttttttgagtctcgttctgtcacccaggctggagtgcaatggcgtgatctcagctcactgcaacctccgcctccagtagctgggactacaggcgcccgccaccatgcccggctaattttttgtatttttagtagagacagggttttactgcgttggccaggatggtctcgatctcctaaccttgtgatccacccgcccgctgggattacaggcatgagccactgcgcccagactggcctgaaaacatcagtttcttatgactcggctagaatcctggaagggaaaactcttactgaaatgctcacctgcatgaaccgatcaataatggagacagtcatgtacatggtctcctgcaacaacctgaatttcatttgaacctgtactagccagtcaattaggatggctctcatgtttccagtgacttcccgacccagtaggtattttggtctgactgcttgctcttcctgcaaaagaaaatgctgattattcttagaaacatgactccatgtgacacatttatgtccagaaagatcagttagttcctacagtagcactggggcatttataatctatatcagttcttaattcaattattca

SEQ ID NO: 927694 - DNA, 778 bp, Homo sapiens
tgggcacacaattattctgcaatgggaatttcaatagggtgaataaaatgtttgaaaaggagacacagagctatgatgaaggagaggtagaaagacattctcccatagcaaaaccttaattaatgacaccatatcccccaagaaagatttagttgaaaaagtcggtttatttctttcttttttttttgagtctcgytctgtcacccaggctggagtgcaatggcgtgatctcagctcactgcaacctccgcctccagtagctgggactacaggcgcccgccaccatgcccggctaattttttgtatttttagtagagacagggttttactgcgttggccaggatggtctcgatctcctaaccttgtgatccacccgcccgctgggattacaggcatgagccactgcgcccagactggcctgaaaacatcagtttcttatgactcggctagaatcctggaagggaaaactcttactgaaatgctcacctgcatgaaccgatcaataatggagacagtcatgtacatggtctcctgcaacaacctgaatttcatttgaacctgtactagccagtcaattaggatggctctcatgtttccagtgacttcccgacccagtaggtattttggtctgactgcttgctcttcctgcaaaagaaaatgctgattattcttagaaacatgactccatgtgacacatttatgtccagaaagatcagttagttcctacagtagcactggggcatttataatctatatcagttcttaattcaattattca

SEQ ID NO: 927695 - DNA, 619 bp, Homo sapiens
ttactgcagaaattcaaaggatcattagaggctgttacgtgcaactatatgccagtaagttggaaaacctagatgaaatggataaattcctagatacatacaacctaccaagactgaactatgaagaaatctcaaacttgaagagaccaataacaagtaatgagattgaagccgtaataaaaastttcccagcaaagaaaaacctgggacccaatggcttgactgatgaattttaccaaacatttaaagaaggactaataccaatcttactcaagctattctgaaaaatagaggaggagaatacaagtccatactcatcctatgaggctggtattaccctgataccaacatcagacaaagatgcatcaaaaaaagaaaactacagtccaatatccttgatgaacattgatataaaaaccctcaacaaaataccagtaaattaaattcaacaactcatttaaaagatcatttatcatgaccaagtgggatttattctagagatgcaagcatgatccaacatatgcaaatcaatcgatgtgatatatcatatcaacagaattaaagataaaaaccatatgatcatttccattgatgctgaaaaagcatttgataaaatcta

SEQ ID NO: 927696 - DNA, 543 bp, Homo sapiens
caattcacaccaagaactatcagtgctctccatactattagaagtagggcccttagcatttttgggtctaatcatattaagcagccaactccagaaaccccaaaaccaactaaagaacttcatccttaatattctgttcctcaagaaccactcctggtaccaaaatctgtattagttggagttctctattagggacaacactaacggaatatatatatataaataaaatatatatataaaatattgatatatatgagaatatatatatttgtgtgtgtatatatgtgcacatgtatatgtgtgtgcatgtgtgtgtgtrtatatatatgtatatgagagttattaagtattaactcacacaatcacgaggtcccacaatagtcggtctgcaggctgaggagcaaggagagtcagtttgagttccaaaactgaagaactcacagtctgatgttcaagaacaggaagcatctggcacaggagaaagataagctgagaggctaggccagtctctcttttcatgtttttctgcctgcttatattcta

SEQ ID NO: 927697 - DNA, 579 bp, Homo sapiens
taatgctttatcttttccccactacactttaatcaatgagtcctatcctgaccatattatttcaaattgaatctacactcccctttatccactcctatcccctttattctcctttttatagcacttattaattttagcattatttataagtgaattatttttcatgtttattgttcatagtctrtattccacaccaccactaaatggaaggtactccagtactgtatttctgtctattatgtctactgatacattgtaaggtcctagaatggtacctggcacatagaaggcacttaataaatacctgttcataaactgaatacaggcatattttgaagatattgagggttcagttccagactactgcaataaagtagatattgcaataaagtgattcacacaaattttttttatttcccagtgcctataaaggttatgtttacactatattgtagtctattaagtgcaattgcattataactttaaaaataatatataccttaattaaaaatacattaaaaatgataacaatcatctgaaccttcagcaagtcatgttctttttgctggtcgagggttt

SEQ ID NO: 927698 - DNA, 587 bp, Homo sapiens
ggtgcacaggcagagaactggctgtggctgggaacatgaatggtttgtctgcattcatggaagagacaggagagtcagtggtcataaatgctgggatgggggcttctgggagtgtggggcgtgtatgaggacaaagtacccagacaaggagaaaagtcccagttctgagggatgaagcgggacccaggctgagccacagcagtagcaagggacaaaggaggtccaacaagggctaatgatgaaagaggagacagaaaagctggagagtttttattttacacttttttgcatttttyggtgctgatcatgaattttttgtgtttttcaatgctgatcatgaatttttttttaataacaaaaaagaactataaaataagctctgattttaaaagttgtggcagacggtctctagaatggcacccagtagtcctgtctcctgacactcgtgcccttgtgcaatcccgtgctccttgagtgtgggtaaggcctgtgacttccaaggaaatgtgatgagacatcccttccaagaccgggttctgaaaaggctgtgctgtctgccttgctggcggtcttggagcccttgccct

SEQ ID NO: 927699 - DNA, 587 bp, Homo sapiens
ggtgcacaggcagagaactggctgtggctgggaacatgaatggtttgtctgcattcatggaagagacaggagagtcagtggtcataaatgctgggatgggggcttctgggagtgtggggcgtgtatgaggacaaagtacccagacaaggagaaaagtcccagttctgagggatgaagcgggacccaggctgagccacagcagtagcaagggacaaaggaggtccaacaagggctaatgatgaaagaggagacagaaaagctggagagtttttattttacacttttttgcattttttrgtgctgatcatgaattttttgtgtttttcaatgctgatcatgaatttttttttaataacaaaaaagaactataaaataagctctgattttaaaagttgtggcagacggtctctagaatggcacccagtagtcctgtctcctgacactcgtgcccttgtgcaatcccgtgctccttgagtgtgggtaaggcctgtgacttccaaggaaatgtgatgagacatcccttccaagaccgggttctgaaaaggctgtgctgtctgccttgctggcggtcttggagcccttgccct

SEQ ID NO: 927700 - DNA, 825 bp, Homo sapiens
aggatacctgaaaatgtggaagcagctttggaactgggtaaggagcagaggttagaagagtttggagagctcagaagaagacatgaagatgagagacagtttggaacctcttagagaatggttaaatgattgtgaccaaaatgctgatagtgatatggacagtgaagtctaggctgccaaagtctcaggtggaaatgagaaacttattgggaactggaacaaagatcacatgtgttaagccttagtaaagaattcggttgcatcgtggtcatgccataggggtctgtggaagcttgagcttaatttgctagagatatttgcataactaaaaggaagccaagtgctactatccaagacaatgggaaaagacctcaaaggcatttcagagacyttcacggcagcccctcccatcacaggccccgagacctagaagggaagattggtttcagggcccaagtccagggccttcctgccctgtgcagcctcaggacattgcttcctgcatccaggctgctccagctctagctggggctcaaaggtgtccaggtatagcccaagctgctactttggagaatgcaagctgtaaacctttgtggcttccccatggtgttaagcctgaggtgcacagaatagtgcaacagtgaaagaggtttggcagtttctgcctagatttccgaagatgcatggaaaaggttggttatccaggcacgagcctgctgcaggggtggagccttcacagagaacctcgactagggcagtgtggggagaaaatgtggggttggagctcccacacagagtatctactggggaactgactagtgcagc

SEQ ID NO: 927701 - DNA, 825 bp, Homo sapiens
aggatacctgaaaatgtggaagcagctttggaactgggtaaggagcagaggttagaagagtttggagagctcagaagaagacatgaagatgagagacagtttggaacctcttagagaatggttaaatgattgtgaccaaaatgctgatagtgatatggacagtgaagtctaggctgccaaagtctcaggtggaaatgagaaacttattgggaactggaacaaagatcacatgtgttaagccttagtaaagaattcggttgcatcgtggtcatgccataggggtctgtggaagcttgagcttaatttgctagagatatttgcataactaaaaggaagccaagtgctactatccaagacaatgggaaaagacctcaaaggcatttcagagaccttcacggcagcccctcccatcacaggccccgagacctagaagggaagattggtttcagggcccaagtccagggccttcctgccctgtgcagcctcaggacattgcttcctgcatccaggctgctccagctctagctggggctcaaaggtgtccaggtatagcccaagctgctactttggagaatgcaagctgtaaacctttgtggcttccccatggtgttaagcctgaggtgcacagaatagtgcaacagtgaaagaggtttggcagtttctgcctagatttcmgaagatgcatggaaaaggttggttatccaggcacgagcctgctgcaggggtggagccttcacagagaacctcgactagggcagtgtggggagaaaatgtggggttggagctcccacacagagtatctactggggaactgactagtgcagc

SEQ ID NO: 927702 - DNA, 550 bp, Homo sapiens
ctcaaaatagataaataaataaatttaaaattaaaattttaaaaaaacaagtgtatcatatggaaactgtcctgcttttccagcacatgcaataaaggcagcagcaggtcttctcacttccatggcttcgaagggcacaccagcacaaacaacattccgagatgtctgcagcaaccgtattgtgacttgaaaaaatccacaatttctacaaacgacaaagccacacgccctgctgctatggctgtggctcatggcctaccctccagtgccaccgtgcagttagaggttggtaaaaatcaagatgtaactttcccctgccccaagttmatgggccacaggttaggagctcctgacctcttcacatgttgggaaatacatgtctggctgccgtcatattagcaagtggtggtggcgtgaccacggttccgcacaccttggtcctcagggggaagtccttcaccagctggaaatggaaagatggttccttggacaaagccttaatgtgccacactggggctttagtttggcatcttgaaaatggtgccctgtc

SEQ ID NO: 927703 - DNA, 597 bp, Homo sapiens
agctagggaagacaaagctcatgggggttttcttttaaatgtcctattgaaggataacacacaaagacaaagcacacaatcacactgccaccgttcaatggatcgtggcaaagtgaagacgtgcagagcaaacttccaggtcagacacaggacactgcgggatttgcatgcctttcccaggaaactatctccccacaaagcaaccgccgcagagattgtctttgcctgcctctaacgtcgcagaaacagaatcatacaggtgtgttatttcgtgtctggcttctttmtctcagcgttttctctgtgagattcagccatgttgctgcactgtagctatagcttttttatcctcatcccatagagtattccactggctgagtagctcacggtttacttacctattctacctggaagagaatgtgggtcattcccatttttgacaattatgcacagtgctgctgctctgaacgttcttttgttgaacacatgtacgcgctgctgctggcgcgtgctcaggagtggaaggcctggctcgtggtctgtgtatgtgcagcttgcaggacagtttttctaaagttgctgtgcaagttcacatcc

SEQ ID NO: 927704 - DNA, 597 bp, Homo sapiens
agctagggaagacaaagctcatgggggttttcttttaaatgtcctattgaaggataacacacaaagacaaagcacacaatcacactgccaccgttcaatggatcgtggcaaagtgaagacgtgcagagcaaacttccaggtcagacacaggacactgcgggatttgcatgcctttcccaggaaactatctccccacaaagcaaccgccgcagagattgtctttgcctgcctctaacgtcgcagaaacagaatcatacaggtgtgttatttcgtgtctggcttctttctctcagcgttttctctgtgagattcagccatgttgctgcactgtagctatagcttttttatcctcatcccatrgagtattccactggctgagtagctcacggtttacttacctattctacctggaagagaatgtgggtcattcccatttttgacaattatgcacagtgctgctgctctgaacgttcttttgttgaacacatgtacgcgctgctgctggcgcgtgctcaggagtggaaggcctggctcgtggtctgtgtatgtgcagcttgcaggacagtttttctaaagttgctgtgcaagttcacatcc

SEQ ID NO: 927705 - DNA, 604 bp, Homo sapiens
  misc_feature 595, 596, 597, 598, 599, 600, 601, 602, 603, 604: n = A,T,C or G
attttacttagcatcatgtcctcaaggttcatctgtgttgtagcatatgtcagaatttccttctttttaatactgagtaataataattcattgcatctatatactacattttgcttatctatgcatctgtccatggatgcttgagttgcttccatgttttagctattgtgaataacttgctataaacatgggtgtacaaatatctctttgagaccctgctttcaattttgggggtatacatccagatgtagacttgctggatcacatggtaattctatttttaatttttwaaggaattgtcatactgttttttacagtggctttacatttctaccaacagtatgcaagggttccaatttctctacatccttgctaacacttgttattttccagtttttgttaatagtcgttattctgataggtgtgagaaggaatctcattgtggttttgatttgcattttcctaataattagtgattctgagtggaaaaagcacaaactatttttcctctgctctcatactacaacaatcaacactgaaaacttctgtgaccaaatatgtgggggatttttcccaccaacaagctcgtaataannnnnnnnnn

SEQ ID NO: 927706 - DNA, 591 bp, Homo sapiens
gcttttggggtgagattatggggttttctagatatagaattatgtcatctgtgaacagagatagtttgacttcctcccttcctatttggatgccctttgtttctttctcttgcctgattgccctgactaggacttctaatactatgttgaacagaagtggtgagagggcatccttgtcttgtgccagctttcaaggggaatgtttccagcttttgcccattcaatataatgtcggctataggtttgcgatagayaacttatattttgaggtatgctcctttactaccaagttattgagagtatttaacatagggggatgttgaattttatcaaaagctttttctgcatctattgagataatcatgtagtttttgtctttagttctgtttatgattaatcacatttattgatttgcatatgttgaatcaaccttccatcccagggatgaagcctacttgatcatggtggattagctttttgttgtgctgctagattcagtttgcaagtattttgttgaggattttgcactgatgttcatcaaggatattggcgtgaagtctctgccaggttttgtatcaagatgatgctggc

SEQ ID NO: 927707 - DNA, 565 bp, Homo sapiens
aagatcacaccctttccttccctgtcctttccgtagggtctcttctctacagcaagatggaattatttgaaattcctttcatggtccttgcttctacttatctttagctcttcagaggtctgctctgtctagaatgcctttcctacttttttattacatctcaaccctggcaatacttgtccaagaagccttctcaaggctgaatatggggcttccaagttcatgaatttcaagaattcgtgggtttccaaacaccatgaattctcttttttatagacaacaaggagttcatcactgtacrcctaaattctactgtgggctagaagcttctgggggcaggaaccatgtcttcttttttttttgagatggaatttcactgttgttgcccaggctggagtacaatggtgcgaccatggctcactgcaacctccacctcgcaggctcaagcgattctcctctgtcagcctcccgagtagctgggattacaggtgcttgccaccacgctcggctaatttttgtaattttagtatagacaaggtttcaccatgttggctaggctggtctc

SEQ ID NO: 927708 - DNA, 630 bp, Homo sapiens
cggctttctttaaacacctaacttaagcggggggttttcacttgggtgctttgtaagttcatgatcctggtgatcacaaagacacatggatccatgaaattcatggtatatgagaaacaaccacagtatcttgtaaaaggagaaacagggcaggtcattttattcaggtttatggtaacacagcagcaagccttccttccaacccagctacagatggtagccctgaccatcttactggaggtgttgattccttgacctttacagaagttggggttccactcaagtgaaaaggctttctcctgtgagatgtagcttattactttggactcatttaagaaagagacttatattacctaaactctgcaaatagattctttcacaaaattttgcckgggcagtccctcttgctgctctcacatatgctgtttttttttgttgttgttgttgtttgtttgtttgtttgttttggtggttataggaatccttttaggcctgaaaaaaacttagatctagtactaaaatatacatattctggtggaactgtttattaggtgctagcctgatgtattctgtgctctggatcttaactatttcatataactttggaaaatgttcagctagaaactcttg

SEQ ID NO: 927709 - DNA, 580 bp, Homo sapiens
ttgtcataggtgtgtggtcttatttctgtgttatctattgtgttccgttagtttatgtgcctgttttttctaccaatgccatgttgttttggttactgtggccctgtagtatagtttgaagttgggtatcttgatgcctccagctttgttctctttattttkcattgccctggctatttgggctctttttgagtctatatacgttttccactagtttttttttttttttttgtcatgtgaagaatgtcattggtagtttggtagaaatagcattcaatctatgaattgctttgggcagtatggccattttaatgttattgattctttctatccataagcatgagatgtttttccatttgtttgtgtcttctctggtttctttgagtagtgttttgccattctcattattgagatctttcatctccctggttagctgtattcctagatattttattttttgtgtgacaattgtgaatgggattgccttcctgatcttgctctcagcttggctgttgttggtgtaaagggatgctagtgatttttgtacattgattttgtatcccaaaacattgctgaagta

SEQ ID NO: 927710 - DNA, 576 bp, Homo sapiens
ttgtcataggtgtgtggtcttatttctgtgttatctattgtgttccgttagtttatgtgcctgttttttctaccaatgccatgttgttttggttactgtggccctgtagtatagtttgaagttgggtatcttgatgcctccagctttgttctctttattttgcattgccctggctatttgggctctttttgagtctatatacgttttccactagtttttttttttttttttgtcatgtgaagaatgtcattggtagtttggtagaaatagcattsaatctatgaattgctttgggcagtatggccattttaatgttattgattctttctatccataagcatgagatgtttttccatttgtttgtgtcttctctggtttctttgagtagtgttttgccattctcattattgagatctttcatctccctggttagctgtattcctagatattttattttttgtgtgacaattgtgaatgggattgccttcctgatcttgctctcagcttggctgttgttggtgtaaagggatgctagtgatttttgtacattgattttgtatcccaaaacattgctga

SEQ ID NO: 927711 - DNA, 601 bp, Homo sapiens
gtttgtgaacaaagtttttcaaacatttgctcccctgacatttgacctttaggtcttaattaaaaaaaaaaaagttgaaaacctaagccatatgaattttgcatgcagtatgattaataggtaggtgtttccctaaaaaatcatttaaaaaagtgtgtgggaagaawacaagtcccaaaagatgctttgtgaaaaataaaaaaaaaaaaaaaaaaaaaaaaaaggttgggggagaactagttaattaatctagaaattgtagaatttcaaaagattcataatgcatattagcatttaaaaagctctggggaaggttaaagaaaaaaaaagctgttcaactttttttgtatgcagatttccaaaattctttatcatataagttctcacgttttaaagttatacttattaacattattagctagtgttgtttattgagtgcttattctttgcctaggatattgcagtacaaacattatcttgattaataatcttattatttagaaattatcatactcttctcatttgagaaattctcagcttacataaggaactgcctgaagtcacataagtggtaagtgatattgaatctaggactgttgaa

SEQ ID NO: 927712 - DNA, 601 bp, Homo sapiens
gtttgtgaacaaagtttttcaaacatttgctcccctgacatttgacctttaggtcttaattaaaaaaaaaaaagttgaaaacctaagccatatgaattttgcatgcagtatgattaataggtaggtgtttccctaaaaaatcatttaaaaaagtgtgtgggaagaaaacaagtcccaaaagatgctttgtgaaaaataaaaaaaaaaaaaaaaaaaaaaaaraggttgggggagaactagttaattaatctagaaattgtagaatttcaaaagattcataatgcatattagcatttaaaaagctctggggaaggttaaagaaaaaaaaagctgttcaactttttttgtatgcagatttccaaaattctttatcatataagttctcacgttttaaagttatacttattaacattattagctagtgttgtttattgagtgcttattctttgcctaggatattgcagtacaaacattatcttgattaataatcttattatttagaaattatcatactcttctcatttgagaaattctcagcttacataaggaactgcctgaagtcacataagtggtaagtgatattgaatctaggactgttgaa

SEQ ID NO: 927713 - DNA, 587 bp, Homo sapiens
ggctgaaagtaaagagatggaagaagatagcccatgtaaataaaaatcaaaagcagagcaagagtaactattcttatagtagataaaacagactttaaatcaaacttaaaaggagacaaagaaggtcaacatataataaaaaagagattaattcagtagtaggatttaacaattgtaaatatatatgcatccaacaccaaggcacygaaatatataaagcaaatattaataaatctaaagggagagagagagactgtaacacaataataatggaggaatttaacacctcactctcagtaattgacagatcattgagatggaaaatcaaccaagaaacagtgatgttaaactacactctagaccaaatgaatcaaactgacatttacagagtattttgtccaacagctacacaatgcacattcttctcatcagcacatggaacattttccagaataggatctatgtgaggccacaaaataagtctcaacaaattcaaaaaagtcaaaattgtatcaagtttctctctgaccacaatggaataaaactagaattcaataataagagaaacttagaaacaatacaaacac

SEQ ID NO: 927714 - DNA, 538 bp, Homo sapiens
gggaccagcctgatcaacatggagaaacccaacctctactaaaaatacaaaaaaattagctgggcgtggtggcgcatgcctgtaatcccagctactcgggaggctgaggcaggagaattgcttgaactcaggaggcagaggttgtggtgaggcgagatcttgccattgcactccagcctgggcaacaagagtgaaacttcatctcaaaaaaaaaaaaagttagaattaagattgcttgagtacgtatttaaatacatactcctcaacatagacatatttgacttattttagctcagttcacatactcttaaaattttagattktatagttcatgaattcattaattcattaaaaatatttacgttgaaggcaatgttgtatgcaactggggagaggggccaaaaagacacattagcaaggagcctgccctcaaaacacatatgtgaaagtagttatatattagcaaagtaatgactacattaggtaaaaagagattgaccaggtacggttctattgaattaggcaggtggagaaactc

SEQ ID NO: 927715 - DNA, 564 bp, Homo sapiens
cctaaattaactgctcagttacatagttaataaatagtgcagcaaacttttttttaattattatacttttaagttctagggtacatgtgcacaatgtgcaggcttgttacgtatatatacatgtgccatgttggtgtgctgtacccatttactcgtcatttacattaggtatatttcctaatgctttccctccccgctcctcctcccctatgacaggccccagtgtgtgrtgttccccttcctgtgtccaagtgttctcactgttcaattcccacctatgagtgagaacatgcggtgtttggtattttgtccctgcgatagtttgctgagaatgatggttttcagcttcatccatgtccctacaaaggacatgaactcatccttttttatggcaatatagtattccatggtgtatatgtgccacattttcttaatctagtctatcattgatggacatttgggaattccctgactccttgagtttcctggctgaggcaatgcctcaccctgcttcagctcatgctcggtgggctgcacccactgtcctgcacccactgtccgaca

SEQ ID NO: 927716 - DNA, 578 bp, Homo sapiens
ccactcctgggtatctactcacaggaaaataagtcattatatgaaaaagatacttgcacacatgtgtttatagcagcacaatttacaattgcaaatatatggaaccagcccaaatgcccatcaatcaatgagtggataaataaaattccacaccatggaatactactcagccaacaaaggaacaaaataatggtatttgcagcaacatggatggaattgaaggccattattctaagttaagtaactcggtaatggaaaaccaaacattgtatgttctcacaagtaggagctaagctatgagatgcaaaggcataagaatgatacaatggactttggggacttggggaaaaaggagtttattaagtattaactcacacaatcacaaggtcccacaatakgccgtctgcaagccgaggagcaaagaaagccaattcaagtcccaaaactgaagaacttggagtctgatgttcgaggacaggaagcattcagcacacgagaaagatgtatgctatgaggatagggcagtctaaccttttcacatttctctacctgctttatatcttggccatgttggcagc

SEQ ID NO: 927717 - DNA, 764 bp, Homo sapiens
agaaatcacccactttctgtgttgatctcactgggagctgcagatgggagctgttactatttggccatcttgccatctgctaaaaaattattttttggttactatgaggcttacataaaacatattgtagttataaatatctgttttaatttgaaaataagcttcttttcaatcacataaaaaactctacacttttaattctccccctccaaaaactttatcttattaatgtcacaatttacatctatttataytgtgtgtcatgtaatatattattgttgctatagtcttttaaaaatacttttgtcttttaacttgtatactatagttaaaagtggtttacacaccatccttacaatatcattacaggattacaatatcctgatgattattctgagtatgactatatacttgtatcagtgaacctaatactcccataggtttttacactaataattagcatcttttattataccttgaagaacttccttcagcactttttgtaaggaaggtctagtgatgtcaaacttcctcagcatttcttttagagacaatctttatctttcctccatttctgaagaacagctttgccaagcatagtattcttgtttgtcagttttttttttttttttcaccacattggatatagcagctcactctttcttggagtgcagtttctactgagaaatattctgatagtcttataaaaatgtccttgtgtgtcaagttgctttactcttcctgctttcaaaattctctctttt

SEQ ID NO: 927718 - DNA, 764 bp, Homo sapiens
agaaatcacccactttctgtgttgatctcactgggagctgcagatgggagctgttactatttggccatcttgccatctgctaaaaaattattttttggttactatgaggcttacataaaacatattgtagttataaatatctgttttaatttgaaaataagcttcttttcaatcacataaaaaactctacacttttaattctccccctccaaaaactttatcttattaatgtcacaatttacatctatttatattgtgtgtcatgtaatatawtattgttgctatagtcttttaaaaatacttttgtcttttaacttgtatactatagttaaaagtggtttacacaccatccttacaatatcattacaggattacaatatcctgatgattattctgagtatgactatatacttgtatcagtgaacctaatactcccataggtttttacactaataattagcatcttttattataccttgaagaacttccttcagcactttttgtaaggaaggtctagtgatgtcaaacttcctcagcatttcttttagagacaatctttatctttcctccatttctgaagaacagctttgccaagcatagtattcttgtttgtcagttttttttttttttttcaccacattggatatagcagctcactctttcttggagtgcagtttctactgagaaatattctgatagtcttataaaaatgtccttgtgtgtcaagttgctttactcttcctgctttcaaaattctctctttt

SEQ ID NO: 927719 - DNA, 764 bp, Homo sapiens
agaaatcacccactttctgtgttgatctcactgggagctgcagatgggagctgttactatttggccatcttgccatctgctaaaaaattattttttggttactatgaggcttacataaaacatattgtagttataaatatctgttttaatttgaaaataagcttcttttcaatcacataaaaaactctacacttttaattctccccctccaaaaactttatcttattaatgtcacaatttacatctatttatattgtgtgtcatgtaatatattattgttgctatagtcttttaaaaatacttttgtcttttaacttgtatactatagttaaaagtggtttacacaccatccttacaatatcattacaggattacaatatcctgatgattattctgagtatgactatatacttgtatcagtgaacytaatactcccataggtttttacactaataattagcatcttttattataccttgaagaacttccttcagcactttttgtaaggaaggtctagtgatgtcaaacttcctcagcatttcttttagagacaatctttatctttcctccatttctgaagaacagctttgccaagcatagtattcttgtttgtcagttttttttttttttttcaccacattggatatagcagctcactctttcttggagtgcagtttctactgagaaatattctgatagtcttataaaaatgtccttgtgtgtcaagttgctttactcttcctgctttcaaaattctctctttt

SEQ ID NO: 927720 - DNA, 674 bp, Homo sapiens
ctttacttatgcaaatgtctgcaacaggcttgaatttctttccagaaaataggtttttcttttctatcccatcttcaggctgcaaattttccaaacttttatgttctgcttcctcttgaatgctttgctgcttggaaacttcttctgccagataccctaaatcatctctctcaagttcctagttccacagatctctagtgaaggggcaaaattctaccagtctctttgctaaagcataacaagaatcacctttattccagttcccaataattttctcatctccatctgagatcacctcagcttggactttattgtccatatcactatcaacattttggtcaaagttattcaacaagattttaggaagttccraactttcccacgttttcctatcttcttctgagccctccaaactgttctaacctctccctgttacccagctccaaagtcacttctacattttcaggcatctttatagcagcaccccactctctgtggtaccaatttactgtattagtccattctcatgctgctataaagaaatacctgaggatgggcatgatggctcatgcctataatcccagcattttgggaggccgaggtgagtggattacttgaggccaggagtttgagaccagcctggtccaacatagccagtttctactaaaaacaca

SEQ ID NO: 927721 - DNA, 581 bp, Homo sapiens
ccatccctcttcactgggcggggcctccctgcatgaactccaacaactccagccaggggctcgagctggactctgatctcgctggaccagaacccttagaggtagggtggctgcagtctctgcagaccagcagacttagtctttcctcctgctagtcctgagraatctgtgtagcccagacgagcgggtttccacctagcaaatcacaacccctccaccaaggaacaaagtgcttcattaaatgggtcctactacccatgccacccaactgggtgagaccctctaacaggggctgtcagacatcctgtataggaatgttcttactggcatcaggtcagtgcccctcaaggtcagagatcccaggggcaggagtaggcacccatctttgctgttttctagcccccttgagtgacatctccaggtgcaggagtgaagcaaccagatgaatagggcctgaagtgaatccccagcaaactgcagcagccttgcagaagagggaactgaccattgagagaaaaacaaacaaacagaaagcaacagcaacatcatctacagaaaagtcctcacaaaaacctcatcca

SEQ ID NO: 927722 - DNA, 581 bp, Homo sapiens
ccatccctcttcactgggcggggcctccctgcatgaactccaacaactccagccaggggctcgagctggactctgatctcgctggaccagaacccttagaggtagggtggctgcagtctctgcagaccagcagacttagtctttcctcctgctagtcctgagaaatctgtgtagcccagacgagcgggtttccacctagcaaatcacaacccctccaccaaggaacaaagtgcttcattaaatgggtcctactacccatgccacccaactgggtgagaccctstaacaggggctgtcagacatcctgtataggaatgttcttactggcatcaggtcagtgcccctcaaggtcagagatcccaggggcaggagtaggcacccatctttgctgttttctagcccccttgagtgacatctccaggtgcaggagtgaagcaaccagatgaatagggcctgaagtgaatccccagcaaactgcagcagccttgcagaagagggaactgaccattgagagaaaaacaaacaaacagaaagcaacagcaacatcatctacagaaaagtcctcacaaaaacctcatcca

SEQ ID NO: 927723 - DNA, 581 bp, Homo sapiens
ccatccctcttcactgggcggggcctccctgcatgaactccaacaactccagccaggggctcgagctggactctgatctcgctggaccagaacccttagaggtagggtggctgcagtctctgcagaccagcagacttagtctttcctcctgctagtcctgagaaatctgtgtagcccagacgagcgggtttccacctagcaaatcacaacccctccaccaaggaacaaagtgcttcattaaatgggtcctactacccatgccacccaactgggtgagaccctctaacaggggctgtcagacatcctrtataggaatgttcttactggcatcaggtcagtgcccctcaaggtcagagatcccaggggcaggagtaggcacccatctttgctgttttctagcccccttgagtgacatctccaggtgcaggagtgaagcaaccagatgaatagggcctgaagtgaatccccagcaaactgcagcagccttgcagaagagggaactgaccattgagagaaaaacaaacaaacagaaagcaacagcaacatcatctacagaaaagtcctcacaaaaacctcatcca

SEQ ID NO: 927724 - DNA, 619 bp, Homo sapiens
agtggcaggcaagtgagcaaaccttcgtctttatttatagccacttcatcagtatttatagccactctccatcacttgcattactgcctgagctccacctcctgtaaaaccagcagtggcattaatttctcataggaacatgaaccctattgtgaactgtgcatacaacggatytaggttgcatgctccttatgagaatctaatgcctgataatctgtcactgtctcccatcacccccagatgggaccatctagttgcaaaaaaaaaaaaaaaaaaaaaaaaaaaaaaaaaaacaagctcagggcttccaccaattctacattatggtgagttgtataattattacattatatattaccatgtaataataatagaaataaagtgcacaataaatgtaatgctcttgaatcatccccaaaccaccccctccccaggccatggaaaaattgtcttccacaaaactggtgcctggtgccaaaaaggttggggattgctgtgttaatcaactatttgtgttgttggtagggcttccagtaaacagtaggctattagttaagttttaagggagtcaaaagttagatgtggatttttgagcatgtgggtgtcaatatcactaaca

SEQ ID NO: 927725 - DNA, 619 bp, Homo sapiens
agtggcaggcaagtgagcaaaccttcgtctttatttatagccacttcatcagtatttatagccactctccatcacttgcattactgcctgagctccacctcctgtaaaaccagcagtggcattaatttctcataggaacatgaaccctattgtgaactgtgcatacaacggatctaggttgcatgctccttatgagaatctaatgcctgataatctgtcactgtctcccatcmcccccagatgggaccatctagttgcaaaaaaaaaaaaaaaaaaaaaaaaaaaaaaaaaaacaagctcagggcttccaccaattctacattatggtgagttgtataattattacattatatattaccatgtaataataatagaaataaagtgcacaataaatgtaatgctcttgaatcatccccaaaccaccccctccccaggccatggaaaaattgtcttccacaaaactggtgcctggtgccaaaaaggttggggattgctgtgttaatcaactatttgtgttgttggtagggcttccagtaaacagtaggctattagttaagttttaagggagtcaaaagttagatgtggatttttgagcatgtgggtgtcaatatcactaaca

SEQ ID NO: 927726 - DNA, 610 bp, Homo sapiens
agagacaggaaaacatgacccctaagaaaaataaaaaccaatcaatttaaatctactcaaggtgaagcatggtggcccatgcctgtaatccagcactttgggacttgaggtcaggagttcgagaccagcttggccaacattatgaaatcccatctctactaaaaatacaaaaaaattagcagaacatggtgacccacctgtaatctcagctactagggaggctgaggcaggagaatctcttgtacctgggaggtggaggttacagtgaactaagattgtgccattgcactccagcctgggcaacagagctagactccatctcaaagaaaactatagactaatatctcttatcaatatggatgcaaaaatcctcagcaaaataccaggaaagtggccaggttgagtggctcacacctgtaatcccagtgctttgggaggctgaggctggaggattgcttgagcccaggggytcaagaccagcctgggcaacagatcttgtgtctagaaaaaaaaaattttttttaattagttgggcatggcggccacacttgtagtcccagctacttgggaggctgaggcaggaaggatcgcttgagcccaggagttcaaa

SEQ ID NO: 927727 - DNA, 571 bp, Homo sapiens
agaattaatagattgaagctgatcagctagtaaatacatagaacaaaactcaacatccttccaatgaagttaccacaaattagaacctgcagcataatatctacaattttcagaaagccatcaaaatgactattccaagatatgctggacttaccagataaggactataaaatagctattgatattataaatttgttcaaagatttaagaaaaaataaaacaaaaaatatgacagatagggactctgcatacaagttaacatttaaaaaattaaaattctacatctacaaagcacaatagttgaattgaaaattttacccgataggcttaacagcagtttagataggacagaagaaagattagtgggttttgggatagggtaatagaaattaaaacagagaaagaaaartcactaaaaacaaaaaacatatgttcaatgtcatgtggtataacatacatgtgattggagtgccagaaaaagaggagagaaaaattggggtagaaaaagatatttgaaaagataatgcctgaaaaattttaaatttactgaaaaaaatattaacctagagat

SEQ ID NO: 927728 - DNA, 567 bp, Homo sapiens
atggttacacctgaaagacattctgctaagtaaaataagccagacacaaaaagaaaaatactgaatcatctcacttatatgtggaatataatttttttttaaaagtttgaatacacagaaatagaattaaaatggtggttaccgggaaccaacagtgggtgacagagcaggagcatcgacatcttggacaagcccatcattctaaagtttaccttaataaaaaaacacttaaatccaaagggcatcaacctaatggctaaggtcagcacgaccataaaccacaaataacatctttaactagaaacattccaaactcctccccgaccagagacatactagccctgagataaccccmctctgggcaggaaagatgtctgccccaaaataacttccccacctcacagaaagattccagccccaccataaacttctccacacacataaacattccaagcttgtgataagtcccctcaccctgaaaccaatatatattcttagtctgtaagagaaagcactcctgaccgaaattggccagaggcacctctcacgttttatctaaagaaaacc

SEQ ID NO: 927729 - DNA, 567 bp, Homo sapiens
atggttacacctgaaagacattctgctaagtaaaataagccagacacaaaaagaaaaatactgaatcatctcacttatatgtggaatataatttttttttaaaagtttgaatacacagaaatagaattaaaatggtggttaccgggaaccaacagtgggtgacagagcaggagcatcgacatcttggacaagcccatcattctaaagtttaccttaataaaaaaacacttaaatccaaagggcatcaacctaatggctaaggtcagcacgaccataaaccacaaataacatctttaactagaaacattccaaactcctccccgaccagagacatactagccctgagataaccccactcygggcaggaaagatgtctgccccaaaataacttccccacctcacagaaagattccagccccaccataaacttctccacacacataaacattccaagcttgtgataagtcccctcaccctgaaaccaatatatattcttagtctgtaagagaaagcactcctgaccgaaattggccagaggcacctctcacgttttatctaaagaaaacc

SEQ ID NO: 927730 - DNA, 582 bp, Homo sapiens
tgcccccagaggtggagtctacagaggcaggcaggcctccttgagttgcgatgggctccacccagttcgagcttcctggcggctttgtttacctactcaagcttcagcaatggtgggcgcccctccccgagcctcgctgcygccctgcagatccatctcagactgctgtgctagcaatgagcaaggctctgtgggcatgagaccctccaagccacgtgcgagatataatttcctgttgtgctgtttgctaagaccattggaaaagcgcagtattagggtggggagtgacctgattttcccggtgccatctgtcacccattcccttggctaggaaggagaattctctgaccccttgcacttcccaggtgaggcgatgccttgccctgctttggctcacgctcggtgggctgcacacactgtcctgtccccactgtctgacaagctccagtgagatgaaaccagtacctcagttggaaacgcagaaatcacctgtcttctgcctcgctcacgctgggagctgtagactggagctgttcctatttggccatcttagaaccaccccttccaagatgaataattttt

SEQ ID NO: 927731 - DNA, 634 bp, Homo sapiens
taggatctaactaaactaaagaagttcttgcgataattttttacttaaattctattatgtttgatataatatagttatccctgctgtcttttggttaccatctaccagggatatcttaaccacttctttcaccaggtgtgtccttaaatctaaagtgagttttttgtaggcagcaagtatttgtatgtttattttattatactttaagttctggggtacatttgcagaacgtgcagktttgttacataggtatacatgtgccatggtggtttgctgcacccatcaacctgtcacctacattaggtatttctcctaatgctatccctcccctagccccccacccaccaacaggccctggtgtgtgatgttcccctccctgtgtccatgtgttctcatcagctcccacttatgagtaagaatgcagtgtttggttttctgttcttgtgttagtttgctgagaatgatggtttccagcttcatccatgtctctgcaaatgacataaactcatccattttttatgtctgcatagtatttcatggtgtatatgtgccacattttctttatccagtctttcattggtgaacatttgtgttggttccaagtctttgctattgtgaatagtgccacaataat

SEQ ID NO: 927732 - DNA, 594 bp, Homo sapiens
tagtctctttgggctacaaccaggaatgcagagggtttcttggctctacgtctgcgacttctctatccccagcccagccctccaggctgacatctctgactgctgacctgacatcaaatagcaatacagtggctgaattttaaaaaaccctgaccatgcctggtaccatgtcagatcctctacatgtattatttcatttaatcatcacaacaacctttgaaagaggcatgcagccaaccacccatcatttacagatgaggaaacaggctcagagaaataaggtgactcactgcctgtcaaccagctagtgagtaacggagcmtggatttgacccactgtctggctggctctagagtccatgtatttttgtcaccctactgtgcttctgctccttcctggtcaagagggagtggattttttgttcttgtttggtagatttttttttttcaaattcttcttcaccaatggcatctttctctgacctctagcctctttccgtacccaaaggcctggcttggagtcagaaggttctcagtagaccttgaaattagtctgcacaaatgtgcatgaggacgctgactgagcaggagcagc

SEQ ID NO: 927733 - DNA, 593 bp, Homo sapiens
aaacaactaaagtgctagataaaaatctgctgcaaatatcattttaaaaacaaaacattgctaatccatacaaaaacttttacacaaatgttcatagcaggattatttatcataggcaaatgtgagaacaacccaaatgtctctcaacagacgataaacaaaatgtggtatattcatgcagtggaatacgattcagcagctaaaatgaatgaagtagtgacacacggattgatgaaccttgaaaacagtcttctaagtgaaagaaactggtcataaagtgctgcatattatatgatttaacttatataaaatgtctaggataggcaaatctacaaggagagaaaataaagtagtggttgcctgaggctgagggaagtgaggtgttactgctagtgactacagggtttctttggggagwgacagaaatgctctaaaattaaattctagtgagttttgcacaactctgtgaatatactaaaaacttgatgccttctctgatgaattctacccaacatttaaaaaagagttaataccaatccttcacaaactcttccaaaaaatgaataaggtgggaacatttcccaactcatccc

SEQ ID NO: 927734 - DNA, 668 bp, Homo sapiens
gaaacaaaaacacgatctgatgtggggaaatgcatcaaagaagggccagacccctggagaggccagagtgcaggggaaggatgtggaggacctgtgtctgagcacgctgcctgcttcccctccagcttggctagcccagccagccaacaagcctgcctgcccccaagaaacctactcctggctaagacyacacttagggaattctgcccatgcaacaacaatacagcaaaaacttaccacccctaccttatgcgagagagcacttcttccaatgtgctctccccattatcccattcttccctcccacgccccatggggtaaagcaggcagacactgtcctccccccattatcccattcttccctcccacgccccatggggtaaagcaggcagacactctcctcccaccattatcccattcttccctcccacgccccatggggtaaagcaggcagacactctcctccccccattatcccattattccctcccacgccccatggggtaaagcaggcagacactgtcctccctttccagacgtggaagcagaggtggagccgtcatacaactggtctagagcagagccaagttcagaggcgtgatgtctctaggcttttctatgagagccttttgtgttataagggtcacctcaacttacaacaataatag

SEQ ID NO: 927735 - DNA, 584 bp, Homo sapiens
actttaagttgaagccagttctcatttgccattctaaaactcctaagacccttaagaattatcttaaattgactatctgtgctctctcaatggaacaacaaagtctcaatgacagcacatctgtttacagcatagcttactgaatatttcaagcctactgtcgagacttactgctcagaaaaggaaatttctttgaraatattactgctcattgacaatgcacctgaccacccaagagctctgttggaaacatacaaggagaggaatgttgttctcatgcctgctgacacaacatccattctgctgcccatggatcaagttctaattccaactttcaaatcttattatttaagaaattcattttgtaagcctatcactgccataggtagtgattattttgattgttctgagcaaagtaaattgaaaatcttttggaaagaattcaccattctaggtgccattaagaacattcatgattcatggaaggagttcaaaatatcaaaattaacaggagctggaataagttgattccattcaatcctcataaataactatgaggagctcaagacttcagtagatgtaag

SEQ ID NO: 927736 - DNA, 500 bp, Homo sapiens
agacattcaaagaagaattggtaccaatcctattgacactattgcaaaagatatagaaagagggaatcctccctaaatcattctatgaagccagtatcaccctaataccaaaaccaggaaaggacgtaacaaaaaagaaaactacagaccaatatccctgatgaacatacatgcaaaaatcctcaacaaaatactagctaagagaatccaacaatgtatcaaaaagataatccaccatgatcaagtgagtttcataccaagaatgcagggatgctttaacatatgcaactcaaaaatgtgatacaccacataaacagaattaaaaacaaaaacctcatgatcrtctcaatagatgcagaaaaagcatttgacaaaatccagcattcctttatgattaaaaccctcagcaaaatcagcatacaagggacttacctcaatgtaataaaaccatctatgacaagcccacagccaacattatatggaatggggaaaggatgaag

SEQ ID NO: 927737 - DNA, 587 bp, Homo sapiens
tcatagatcccttctcagaagtggttttttgtgtttttttgtgtgtgtggttttttgtgttttgttttgtttgagatggagtcttgctctgttgccaggctggagtgcagtggcagctcactgcaacctctgactccctagttcaaatgattctcctgccttagcctcccgagtagctgggattacaggcacgtgccaccacgcccagccaatttttgtatttttagtagagacagggtttcaccatgttggccaagatggtcttgatctcctgacctcatgatccgcccacctaggccttccaaagtgctrggattacaggcgtgagccactgcacccagccagaagtatttttaaatgtacaacataagacccatattataaagtaaaccaattatattgaaatgcagttagcaaaatattttttaaaaggaagatggagacatcataaatacagtaataaaatgcttctgtatttacattttaaattatgagaaccagtagtttgtctaataattctgtaatttctaagttgtgttaaacataaataatacattgaaatatatgtaggtactgtaatataacag

SEQ ID NO: 927738 - DNA, 606 bp, Homo sapiens
tgcatgatttgaatctgaaaaaggatgtccttaatctaatagcctttaatttcaatgtggaagaccaaacagttagaacatgtacaatgacccaaaaccctgagctctcaccattaagtggagcacccacccctgcttcaggttctgtgtgcctggcaatgagggctatccacagtagcctatagaacaccataaggtggcagcttccttgacttgtcagtgagttagggctatgcatttaaaaaatattcagtgaactgaagacctcatagagccagcagtttttcttcaaacagtgaagggaggtgtattcattcattttcacactgctgataaagacatactcaagattgagaaatttacaaaagaaagaggtttaatggactyacagttccacatggctgagggggcctcacaatcatcacagaaggtaaaagccatgtctcacttggtggcacacaagaaaagagagaatgagagtaaagcaaaggggtttctctttatgaaaccatcagatctcatgagactcattcactaccacgaaaacagtatggggaaacccactcccatgattcaattatctcctagtgggtccctcccacaaca

SEQ ID NO: 927739 - DNA, 606 bp, Homo sapiens
tgcatgatttgaatctgaaaaaggatgtccttaatctaatagcctttaatttcaatgtggaagaccaaacagttagaacatgtacaatgacccaaaaccctgagctctcaccattaagtggagcacccacccctgcttcaggttctgtgtgcctggcaatgagggctatccacagtagcctatagaacaccataaggtggcagcttccttgacttgtcagtgagttagggctatgcatttaaaaaatattcagtgaactgaagacctcatagagccagcagtttttcttcaaacagtgaagggaggtgtattcattcattttcacactgctgataaagacatactcaagattgagaaatttacaaaagaaagaggtttaatggactcacagttccacatggctgagggggcctcacaatcatcacagaaggtaaaagccatgtctcacttggtggcamacaagaaaagagagaatgagagtaaagcaaaggggtttctctttatgaaaccatcagatctcatgagactcattcactaccacgaaaacagtatggggaaacccactcccatgattcaattatctcctagtgggtccctcccacaaca

SEQ ID NO: 927740 - DNA, 815 bp, Homo sapiens
aatgttccagctgccatatagaaatttttattttgggactcattgggtcacattttaatgatgtactgtaacaagaagaatttcaaaataatgttttttttattagttaaattcattttttaattatcattatactttaacttctgggatacatgtgcagaatgtgcaggtttgttacatagctatacatgtgccatggtggtttgctgcacctgtcaacccatcatctacattaggtatttctcctaatgctatcctgtcccctagtcccccaccccctgacaggccccaatgtgtgaagttcgcctccctgtgtccatgtgttctctttgttcaactcccacttatgagtgagaacatgtggtgtttggttttctgttcctctgttagtttgctgagaatgatggtttccagcttcatacatgtccctgcaaaggacatgaattcattcttttttatagctgcatagtattacatggtgtatatgtgccacattttctttatccagaccatcattgatgggcatttgggttggttccaagtctttgctattgtaaacagtgctgcaataaacatacgtgtgcaagtttctttgtagcagaatgatttataatcctttgggtrtatacccagtaatgggattgctgggtcaaatggtatttctggttttagatccttgaggaatctccacactgtcttccacaatggttgaactaatttacactcccaccaacagtgaaaaagtgttcctatttctccacatcctctccagcatttgttgtttcctgactttttaatgatcaccattctgactg

SEQ ID NO: 927741 - DNA, 637 bp, Homo sapiens
ggagtcggccaaggaacattgggtttgggctccaggggctttaggagcggcagcgatgtgagtcggatagtctgacctccagtgggggcccacacaggcaggacatggcttaggaggaatcttgggcaccgggcattctgaggcccaggggccaggcttttggcatttgaagcaaggtccacaaggatgttttgaaggagcccctgggagctgtggcttggatgttctgaagttcttgtatgctggagacatggttgtgggttgtcttacagcrgaggcaagtagctgtaactcagaaacacgttgctgtctggctacctcctctctattattgtacaccttgaaggtgaggttgattaattcctgttgtggcgtttgagggccggattccaatttttgaagttttctaatgtcaagagctgactgggtgataaaatgcatattgagaataagacggccttcctctggggtctaggacagtaaagcatctaagggttgttgccaaacgggccatgaactgcactgggtttttatatttgatgaaaaagagcctaaatgctaactgatttgggagaggtcggataaagaaaaaaggagcattaactttgactatgcctttaactccagccacctcttc

SEQ ID NO: 927742 - DNA, 560 bp, Homo sapiens
ggtcctggtcttcttttggtgggtaggctatttatcattacctcaatttcagaacttgttattgttatattgagggattcacttcctttctggttcagtcttgggagggtgtatgtgtccagggatttatccatttcttctagattttctagtttatgtgcacagagatgtttatastattctctaatggttggctgtatttctgtggagtaagtggtgatatcccccttatcatttctaattgtgtttatttgattcttctctcttttcttctttattagactagctagcagtctattttattaattttttcaaaaaaacacctcccggatttgttgatatttttgaagggtttttcatgtctctatctccttcagttcagctctgatcttggttatttcttgtcttctgctagctttggagtttgtttgctcttggttctctagttcttttagttgagatgttacgatggtaacaagatctttctagcttttgcatgtgggcatttcatgctataaatttcgctcttaacactgctttagtcgcaccccagaaattct

SEQ ID NO: 927743 - DNA, 630 bp, Homo sapiens
tttgaggtttctgacatggtgaatgaggtttttgtggggtctttgtcattgttgttgttttgtgtctgtttgtttgttttaacagtcagcccactctaccatagggctgctgtggtttgctgggggtccgctccataccccagttgcctcattctcccgtacctggaggtatcaccagcaaaggccatgaaacagcaaagatgacagccagatcctttctctggaagctytatcccagggggtactgacctgttgccagcctgcacgcacctataggagatgtctggaaacccccattgggaggtctcacccagtcagaaggaatgggatcagggacctgcccaaagaagcagtctggctgttttttggtagagcagttgtgctgcattaaggggcacacttcctcatccaaactgcctgcaatctccaaagctgacaggctggagtggctgagtccaccaaaccgcagagatgacatccacccctcctcacaggagctccatcccagggagagatcagagctctgtccatagaaccctagctggagtcgttgaagctcctgcagggagatcctgctcagtgaggagaaatggatccaggtgctgcttaaagcagtctggccacaatctg

SEQ ID NO: 927744 - DNA, 735 bp, Homo sapiens
ctaaaaggtttggtactccactccaaaaaaaattatatttttaaaatataggaaacgatgatatatggaggacctactatgtgccaggcaccacaccacatatgttacagacattacctcattcgatcttcacaatcagcccaatgtggtaggtattagcctcctcctccccatccttttatagcagaggaaacataagcacagcaatgttagagagcttgcgtaaggcctctcatccagcaattagtagagccagttttcatatccaggtctattgaattccccaaaatgctcttgcaattcatggagcaggcttgtatttgtcaggttcttaattccaagcaaagtaatgcagtctatccaatttaaacacaaagggatatgtcttataccattctgtgctgctgtaacacaataccacacactgggtaacttatgaggaacacaaatctattctctcacacttctggagcctatgacattcaagataataggcgccactgggtgagtctctgggtccatgatgatgcctcgtggctgcatcctccacagaaaaggaacgctgagtcctcatgtggcasaaatgcacgagagagagaacacactcctgcaagctcgtgttatggcgaagttaatccattcaccacggcacagccctcatgatttaaccacctctcattatgccccgcctcccaacactgtggcattggggattaagtttcaacatgaattttg

SEQ ID NO: 927745 - DNA, 627 bp, Homo sapiens
aacagtctacaggccctgcttccacagcacctcactggataagacccattggcttgaaattccagccagtcactggtagcagtgttgcacctcccagagacagagttctcaggggaaggagtggccaccatctttgcagtttgggtgatctaattgttccagccttctgggtttggaaagtccaagcctactgaggactgaagcgatccccagcacagcacaactgctctacagaaatgtgaccagactgcttttttaagcaggtccttggtcctattcctcctctctaggtggagcctctcaactggagtctccagccactcacactggtgttttctggccaacagagatttgaaacctctctgggacaaaactcccagagagagaggcaggccaccatctttgctgtttgggtgatttasccatttcattcttcaggctttggagagtccaagccagctgaggggagacatgataccctagcacagcacacctgctctatgaaaacatagtcagactactattactttttgaagaaggccctcaatcccattccttttcactggaaaggacctcccaactgaggtttacagccacctcctataggtgcattcgagccaacaatag

SEQ ID NO: 927746 - DNA, 627 bp, Homo sapiens
aacagtctacaggccctgcttccacagcacctcactggataagacccattggcttgaaattccagccagtcactggtagcagtgttgcacctcccagagacagagttctcaggggaaggagtggccaccatctttgcagtttgggtgatctaattgttccagccttctgggtttggaaagtccaagcctactgaggactgaagcgatccccagcacagcacaactgctctacagaaatgtgaccagactgcttttttaagcaggtccttggtcctattcctcctctctaggtggagcctctcaactggagtctccagccactcacactggtgttttctggccaacagagatttgaaacctctctgggacaaaactcccagagagagaggcaggccaccatctttgctgtttgggtgatttacccatttcattcttcaggctttggagagtccaagccarctgaggggagacatgataccctagcacagcacacctgctctatgaaaacatagtcagactactattactttttgaagaaggccctcaatcccattccttttcactggaaaggacctcccaactgaggtttacagccacctcctataggtgcattcgagccaacaatag

SEQ ID NO: 927747 - DNA, 459 bp, Homo sapiens
ccttttcactggaaaggacctcccaactgaggtttacagccacctcctataggtgcattcgagccaacaataggttcatgcctccctgggatagagatcccaaagggagagacagactaccatatttgctgttttgaagccttcactgttgatatctccaggtgttggaaaatctgaggtgactacaagactgcagtgggcccccasaatactttagaaaccctacgaaaaagtggtcagactgctacatgggtgatagttcccacatctccttattgggcaggtgctccaggccaccagcctccccctgtcagagctatgagccactatcagctctgcaagttactgggcacaacccacgaacaactgagagcctctctgtcactttctctgtattggaactgcccttgccacccttgaactattgaaaaaagagataccctatatgtgttacccaca

SEQ ID NO: 927748 - DNA, 459 bp, Homo sapiens
ccttttcactggaaaggacctcccaactgaggtttacagccacctcctataggtgcattcgagccaacaataggttcatgcctccctgggatagagatcccaaagggagagacagactaccatatttgctgttttgaagccttcactgttgatatctccaggtgttggaaaatctgaggtgactacaagactgcagtgggcccccacaatactttagaaaccctacgaaaaagtggtcagactgctacatgggtgatagttcccacatctccttattgggcaggtsctccaggccaccagcctccccctgtcagagctatgagccactatcagctctgcaagttactgggcacaacccacgaacaactgagagcctctctgtcactttctctgtattggaactgcccttgccacccttgaactattgaaaaaagagataccctatatgtgttacccaca

SEQ ID NO: 927749 - DNA, 459 bp, Homo sapiens
ccttttcactggaaaggacctcccaactgaggtttacagccacctcctataggtgcattcgagccaacaataggttcatgcctccctgggatagagatcccaaagggagagacagactaccatatttgctgttttgaagccttcactgttgatatctccaggtgttggaaaatctgaggtgactacaagactgcagtgggcccccacaatactttagaaaccctacgaaaaagtggtcagactgctacatgggtgatagttcccacatctccttattgggcaggtgctccaggccaccagcctccccctgycagagctatgagccactatcagctctgcaagttactgggcacaacccacgaacaactgagagcctctctgtcactttctctgtattggaactgcccttgccacccttgaactattgaaaaaagagataccctatatgtgttacccaca

SEQ ID NO: 927750 - DNA, 577 bp, Homo sapiens
taattcagtaatcctggggaagagttaagggctctgtattttcaacaggcatacaaaaattgttatgacgtactgtgggagacactttctactattgttataatatctatacctggtaacagaggctcaattaataggttaagagcagggagacatcaagaacttaaggaaaataggccctgtcactctactttcagaggatgaatcatgactggcctaaaccagggtaccatttagggtaagggtagctactataacagatggacccctaaaatctccttgaattaacaaaataaaaatttcacttactcttcacacagcaacaaaagcgggtacttgtcaggtaatgctcatgaacatcttatggctctccaccttctcccctggcctcagctttcttccagcttccatacacacacacacacacacacmcacacacacagtgagatacagagagagagggaacaaggaaaaaggggacacccactcattcactgcttcagcctggagaacccaataactaccatgcatattctattggcagcacctagtcacatggctctacctagattcaaga

SEQ ID NO: 927751 - DNA, 577 bp, Homo sapiens
taattcagtaatcctggggaagagttaagggctctgtattttcaacaggcatacaaaaattgttatgacgtactgtgggagacactttctactattgttataatatctatacctggtaacagaggctcaattaataggttaagagcagggagacatcaagaacttaaggaaaataggccctgtcactctactttcagaggatgaatcatgactggcctaaaccagggtaccatttagggtaagggtagctactataacagatggacccctaaaatctccttgaattaacaaaataaaaatttcacttactcttcacacagcaacaaaagcgggtacttgtcaggtaatgctcatgaacatcttatggctctccaccttctcccctggcctcagctttcttccagcttccatacacacacacacacacacacccwcacacacagtgagatacagagagagagggaacaaggaaaaaggggacacccactcattcactgcttcagcctggagaacccaataactaccatgcatattctattggcagcacctagtcacatggctctacctagattcaaga

SEQ ID NO: 927752 - DNA, 427 bp, Homo sapiens
tagtcatatttactcacaaagagatgatatgaaattggaacttatgtttaaaagggaagcagagtaggccagttctggtggctcacacctgtaatctcagcactttgggaggccaagacgggcagatcacctgaggtaaggagttcaagaccagcctggtcaacatggwgaaaccccatctctacttaaaaatacaaaaattagtcaggtgagatggcaggagcctgtaatcccagctacttaggaggctgaggcagaagaatcccttgaacctgggaggtggaggtgtggaggttgcagtaagctgagatcgcaccagtgcattccagcctggctgacagagcaaaactcagattccaaaaaaaaaggaagcagtgtataaaagtttgaaaaaatttctaagaaaaacccactttctggggagaaa

SEQ ID NO: 927753 - DNA, 575 bp, Homo sapiens
gcaatttacctttactgtcctacctcaggagtatatcaactctccagctttgtgtcataatctaattgagagagaacttgatcacttttcacttccacaagctatcacactggtccattacattgatgacattatgctgattagacctggtgagcaagtagcagcaaacatgctggacttactggcgagacatgtgtatgccagaggatgggaaataaatctgactaaaatttaaggaccttctacctcagtaaaatttctaggagtccagtggtgtggggcctgttgagatattccttctaaggtgaaggatgagttgttgcatttggcccctcatacaaccatgaaagaggcacaatgcctagtgggcctatttggattttggaggcaacacattcctcatttgggtgtgtcacatttatcgagtgacctgaaaggctgccagttttgagtggggtccagaacagaaggctctgcaacaggtcaggctgctgtgtaagcggctctgccacttggrccatatgacccagaagatccaatgttgcttgaagtgtcagtggcagatagagatgctg

SEQ ID NO: 927754 - DNA, 783 bp, Homo sapiens
aagtcctggtgcttggcagtctcatgcagggttcccagcttcctcccccttcagcccagtgtctgcatgctccctttttccactcttaatgatttccttctaaagatctccttagagtatactggacttcatgatggtctggtttcaccatgggagatgcttttccttgctgtgtctagctagccatcttggctcctctcacttttttgcatgtgtatttttatgtatatgtcttctacagagaaagcaccaaatttagatgacttcactgataagtcctaccaaatattcaagaaagaaatcctacactaacaaatcctaccaaatattcaagagaactattatataaaacctcctagagaatagaaaaacttagaaatattttcaatttattttataagggcagcataaacataatgctaaaagcaaacaggtatattaataggctgggcatggtggctcacacctgtaatcccagcactttgggaggccgagggggtggaacacaaggtcaggagatcgagaccatcctggctaacacggtgaaacccagtctctactaaaaaatacaaaaaattagctgggcgttgyggtgggcgcctgtagtcccagctactcgggaggctgaggcaggagaatggcgtgaacccgggagacggagcttgcagtgagccgagattgtgccactgcactccagcctgggtgacagagcgtgactctgtctcaaaaaaaaaaaaaagaaaaaaagaaaaaaagaataagttaatttcatttatatacaga

SEQ ID NO: 927755 - DNA, 602 bp, Homo sapiens
agccccaagagagtttttctgggttggcattttgcatggtagccaagacagtttagcatccagggttcacaccaagaatggtttatagataattttatcggtggctcatgcctgtaatcccatcactttgggaggctgaggcgggtagatcacttgaggtcaggagttgaagaccagcctggccaacatggtgaaatcccatctctactgaaaatacaaaaattagccgggcatgrtggcgcacccctgtaatcccagctactctggaggaggctgaggcaggagaatctctggaacctgggaggcggaggttgcagtgagctgacagcgagactcagtctaaaaaaaaaaaaaaagataattatttaaattatttagccaatcattttgaaacctctatatttttataattattatctatatgttatacagcatctctttccataattatttttgttaccttcagtgttttctgattatatttacaacaatattttaaaccaactttgcattttataactgattcaagtgctcattgctagtctttggagaccatgatttcccagtttgcaagttctttattttgattcatttttcaatca

SEQ ID NO: 927756 - DNA, 719 bp, Homo sapiens
gagagcgggcatcccacgcagcgtcacgtctgtctttactgtactttcctagtgtgatactgggggacgcagtctcagtgtctgcagagccgctgccttagccccgttcccttggaaacagagctgagtcggagctctcaggcctgcaggcttggggaggaggtggggagggaaggaccagcccagacgggggcacacccagcggccacagccccgcggcaaacccaccggcctccaggtcacatgtaggccctgcagtgcctgtcggggagccccctgggccagggtgatgcgagcctgacccccacagaggccaaggcggctgaggacaggaggggcccgggtgcgggagggcgcaggcagggcccctgtgagcttgggcagacacagggagggggtcccatccgcctgccttgtaaacctggaagttgcactgatgagaaacccttttcttccctgaacgtgagacttccagcgtcctgttmgctgcagcctcaggcctaagccgtctctaacccttccgcaggcatcgactacaagacgaccaccatcctgctggacgggcggcgggtgaagctgcagctctggtgagtctggaggaggtgcgagcgtcccgcacccccagggagtaacccccctggctggcatacaccccctgtcagcacagtgccccggggagcaccatcccccaccaccatcggcacagcgcccccgggaac

SEQ ID NO: 927757 - DNA, 719 bp, Homo sapiens
gagagcgggcatcccacgcagcgtcacgtctgtctttactgtactttcctagtgtgatactgggggacgcagtctcagtgtctgcagagccgctgccttagccccgttcccttggaaacagagctgagtcggagctctcaggcctgcaggcttggggaggaggtggggagggaaggaccagcccagacgggggcacacccagcggccacagccccgcggcaaacccaccggcctccaggtcacatgtaggccctgcagtgcctgtcggggagccccctgggccagggtgatgcgagcctgacccccacagaggccaaggcggctgaggacaggaggggcccgggtgcgggagggcgcaggcagggcccctgtgagcttgggcagacacagggagggggtcccatccgcctgccttgtaaacctggaagttgcactgatgagaaacccttttcttccctgaacgtgagacttccagcgtcctgttagctgcagcctcaggcmtaagccgtctctaacccttccgcaggcatcgactacaagacgaccaccatcctgctggacgggcggcgggtgaagctgcagctctggtgagtctggaggaggtgcgagcgtcccgcacccccagggagtaacccccctggctggcatacaccccctgtcagcacagtgccccggggagcaccatcccccaccaccatcggcacagcgcccccgggaac

SEQ ID NO: 927758 - DNA, 614 bp, Homo sapiens
tactcaacatcactaatcattagagaaacacaaatcacaatgagataaagaacaatgagatactacgtcatatacccattaagatggccactagaaaaaaaaaaaggaaaagaaagaaactacaagcattggcaaggatgtggggaaattgaacccttgtgcactgttggtgggaatgtaaaatggtacagacactgtggaaaaccgtataatgattcctcaaaaaagtgaaaataggctgggcatggtggcttacgcctataattccagcgctttgggaggcagaagcaggaggattgcttgagcccaggagttcgagaccagtcggggcaacatgacgaaaccccatctctacaaaaaatacaaaaattaactggatctggtggcatgcgcctgtagtcccagctactcaggaggctgaggcaagaggattgyttgagcctgggaggtcaaggctacagtgagctgtgatcatgccactgcactccagcctgggtgacaaagcaagacactgtctcaaaataaataaataaaaatagaattaccatatgattcagcaagtccatatctagagatatcctcaaaataattaaaagtagggtctcaaagagata

SEQ ID NO: 927759 - DNA, 831 bp, Homo sapiens
actgaatccaccaccaggaccttttgcttgtaactatctggtcttcctctctccattcttgttctcctccagtttattccctgcatagcagccagttggatcacatcaactttgctaattaaagtccttcagtgtcaaggcacctgcatgatcaggttcctgtctgcctcttgcttctcacattgaaactattctcaggcacactggtttcctccataggacgaagcttttgtctttctttcttttttttttttgagatggagtctctgtcacccaggctggagtgcagtggtggagtcttggctcactgcaacctccgcctcccaggttcaagcaattcttgcgccttagcctcccgagtagctgggattacaggcatgtgccaccacgcctggctaattttttgtatttttagtaggcacagggtttcactatgttggccaggctggtctcgaactcctgatctcaagtgatccacccgcttcggccttccaaagtgctgggattacaggcgtgagccaccgtgcccggctgaatcaagcttttttctgactcgacctttacacrtcctgttcttcagcctttacgtgaacaacttctacccattcttcaggtgtcagcttaagtatcagtttctcagtgagttattcatttcctcactccccaaactaatctatgatgtctccgtgattctttctcacagtactaggttcttttccttcattgtgcttgccacactttgtaatgatatatttatttattgcttgcttaatgtctgtctctcctctagattgcaaggcctttgaaggagcttacaggatttgtttactc

SEQ ID NO: 927760 - DNA, 831 bp, Homo sapiens
actgaatccaccaccaggaccttttgcttgtaactatctggtcttcctctctccattcttgttctcctccagtttattccctgcatagcagccagttggatcacatcaactttgctaattaaagtccttcagtgtcaaggcacctgcatgatcaggttcctgtctgcctcttgcttctcacattgaaactattctcaggcacactggtttcctccataggacgaagcttttgtctttctttcttttttttttttgagatggagtctctgtcacccaggctggagtgcagtggtggagtcttggctcactgcaacctccgcctcccaggttcaagcaattcttgcgccttagcctcccgagtagctgggattacaggcatgtgccaccacgcctggctaattttttgtatttttagtaggcacagggtttcactatgttggccaggctggtctcgaactcctgatctcaagtgatccacccgcttcggccttccaaagtgctgggattacaggcgtgagccaccgtgcccggctgaatcaagcttttttctgactcgacctttacacgtcctgttcttcagcctttaygtgaacaacttctacccattcttcaggtgtcagcttaagtatcagtttctcagtgagttattcatttcctcactccccaaactaatctatgatgtctccgtgattctttctcacagtactaggttcttttccttcattgtgcttgccacactttgtaatgatatatttatttattgcttgcttaatgtctgtctctcctctagattgcaaggcctttgaaggagcttacaggatttgtttactc

SEQ ID NO: 927761 - DNA, 634 bp, Homo sapiens
ataatatttctataacatagcacttttgctataaataattttggtactttatctcaccacttctgttcaaaattaaagtggaggtcctagtcagtaaaataaggcaagaaaacccgaatacaaggcataaaggaactctcttgcggcaagaagaaactctctttattcacagatgatataatcatgtatgcagaaagctgtaagggagaaaaaaactgatgaataagttagacaaagttgcagaaaacaaaggtattttatagartatttttttacagactagtaacacaattagagaatgacataaatgacaatttacaatcacattcaacagtgccaaagtacttacggatatttagtaaaatatataagactggtacaataaaatctacaaaatattgctgaaagaaattaagaccttcacaaatggagacatacaccatgcctatggattagaagactaaatattattgagatgtcaattcctttcaaattgatgtgtacatttgttacaatgtcaatcaaattcccagcaggctttttctgtagaaatcaacaaactatatctaaaatgttttggggaatacagagacctaaaatagctgaaataactttaatttgataaaagaggaaa

SEQ ID NO: 927762 - DNA, 591 bp, Homo sapiens
gagtggataatcatactttttgcaaattgtctaagacagtggtccccaacccttttggcacctaggaaatggtgctatggttttgccatgtccccacctaaatcttcttgaattgtagtttcccataatccccatgtgtcatgggaggggcccagtgggaggtaactgaatcatgggggcggttacccccatgctgttcttgtgatagtgagtgagttctcacaagatctgatggttttataaagggcttttccccctttactcagcaattctccttcctgccaccttgtgaagaaggtgcctttcttcctttttgctttctgccatgattgtaagtttcctgagccttycaagccatgcagaactgtgagtcaattaaacctcttctctatgaaaaacaaaacaaaacaaaacaaaaacaaaaaacaaaacaacaacaacaaaaactaagacacaaacacatacgttagcctagacccacatagggtcaagatcatcaaaatgtcactaggctgtaaagcgtttttcaggtttattataatcttataggaccactgttgtatttgccatctattgttgaccaaaaaacca

SEQ ID NO: 927763 - DNA, 576 bp, Homo sapiens
  misc_feature 192: n = A,T,C or G
gtttatttttttgctattgagttgtaggtgttccttatattttggataataactttttttaattttattattattatactttaagttttagggtacacgcgctcaacgtgcaggtttgttacatatgcacacatgtgccatgttggtgtgctgcacccatcaacgccgtcatttagcattaggtatatctcncaatgctatccctcccccaccccctaccccacaacagtacccagtgtgcaatgttccccttmctgtgtccatgtgttctcattgttcaattcccacctgtgagtgagaacatgctgtgttttgttttttatccttgcgatagtttgctgagaatgattgtttccagcttcatccatgtccctacaaatgacatgaactcatcattttttatggctgcatagtattccatggtgtatatgtgccacattttcttaatccagtctatcattgttggataataactctttatcaaatatatggtttgtaaatattttcttccattccataggttgccttttcattttgttgattgttttcttcaccacgaggaagctttatggtttg

SEQ ID NO: 927764 - DNA, 592 bp, Homo sapiens
gaaggctgagacaggagaattgcttgaacctgggggtggaggttgtagtgagccaagatcgtgccactgcactccagcctgggcaacagagcaagactctgtctcaaaaaacaaaaacgaaaacaaaaaaaccctaattttttggttttcatgacaatattgaactaaattgctcaacaaaaacatggatgacatagcagagcttggagtttacagttaaaatatttgaagttcctttacttggtaggatggaggatagaaatattgataatttattattcttgtatgtaagttccaaacagtagttggtttgtttatatcctgcagtaactacagcacctaaaatgatttctgccatgtattttgtttgttttgtttagtaatgactgtagcttcatacgtttttgttytgtttttcccttttttgtggataaacttttaaatttatactagttttaggttcgcaggactattacaaagatattacaaacagtttctatatatcccacactcagttcctctattattaacatcttaccttaacgtaatatatttgttacacataatgcgtaaatatggatacatcattatt

SEQ ID NO: 927765 - DNA, 592 bp, Homo sapiens
gaaggctgagacaggagaattgcttgaacctgggggtggaggttgtagtgagccaagatcgtgccactgcactccagcctgggcaacagagcaagactctgtctcaaaaaacaaaaacgaaaacaaaaaaaccctaattttttggttttcatgacaatattgaactaaattgctcaacaaaaacatggatgacatagcagagcttggagtttacagttaaaatatttgaagttcctttacttggtaggatggaggatagaaatattgataatttattattcttgtatgtaagttccaaacagtagttggtttgtttatatcctgcagtaactacagcacctaaaatgatttctgccatgtattttgtttgttttgtttagtaatgactgtagcttcatacgtttttgttctgtttttcccttttytgtggataaacttttaaatttatactagttttaggttcgcaggactattacaaagatattacaaacagtttctatatatcccacactcagttcctctattattaacatcttaccttaacgtaatatatttgttacacataatgcgtaaatatggatacatcattatt

SEQ ID NO: 927766 - DNA, 604 bp, Homo sapiens
cccaggatacacacaaatacaggcacacatttaattgaaccagattttattatcaacttccttcccatcccaggcccacagaacagaagcatcagcctagtggggagatcagaaagaaagactgagaagaaaacaactcaggagatgatcgggggtacagcacgtgcattagtgctcttgatcatctctttcacctaacttaatgcttagtaaargaaggaaggggctgggtgcggttgctcacgcctgtaatcccagcactttgggaggccaaggcgggcggatcactgaggtcaggagatcgagaccatcctggctaacatggtggaaccccgtcactactttaaatacaaaaaattagctgggcgtggtggtgggcgcctgtagtcccagctactcaggaggctgaggcaggagaatcgcttgaacccaggaggcagaggttgcagtgagctgagatcataccactgcactccagcctgggcaacagagcgagactccgtctcataaaaaataaagaaggaaggaagggaggaagagaggaaagtaaaggaacagaggaaataggaaatagagctgaaggagaaaggggaagaaagaagga

SEQ ID NO: 927767 - DNA, 569 bp, Homo sapiens
ccccaggatacacacaaatacaggcacacatttaattgaaccagattttattatcaacttccttcccatcccaggcccacagaacagaagcatcagcctagtggggagatcagaaagaaagactgagaagaaaacaactcaggagatgatcgggggtacagcacgtgcattagtgctcttgatcatctctttcacctaacttaatgcttagtaaaagaaggaaggggctgggtgcggttgctcacgcctgtaatcccagcactttgggaggccaaggcgggcggatcactgaggtcaggagatcgagaccatcctggstaacatggtggaaccccgtcactactttaaatacaaaaaattagctgggcgtggtggtgggcgcctgtagtcccagctactcaggaggctgaggcaggagaatcgcttgaacccaggaggcagaggttgcagtgagctgagatcataccactgcactccagcctgggcaacagagcgagactccgtctcataaaaaataaagaaggaaggaagggaggaagagaggaaagtaaaggaacagaggaaatagg

SEQ ID NO: 927768 - DNA, 569 bp, Homo sapiens
ccccaggatacacacaaatacaggcacacatttaattgaaccagattttattatcaacttccttcccatcccaggcccacagaacagaagcatcagcctagtggggagatcagaaagaaagactgagaagaaaacaactcaggagatgatcgggggtacagcacgtgcattagtgctcttgatcatctctttcacctaacttaatgcttagtaaaagaaggaaggggctgggtgcggttgctcacgcctgtaatcccagcactttgggaggccaaggcgggcggatcactgaggtcaggagatcgagaccatcctggctaacayggtggaaccccgtcactactttaaatacaaaaaattagctgggcgtggtggtgggcgcctgtagtcccagctactcaggaggctgaggcaggagaatcgcttgaacccaggaggcagaggttgcagtgagctgagatcataccactgcactccagcctgggcaacagagcgagactccgtctcataaaaaataaagaaggaaggaagggaggaagagaggaaagtaaaggaacagaggaaatagg

SEQ ID NO: 927769 - DNA, 569 bp, Homo sapiens
ccccaggatacacacaaatacaggcacacatttaattgaaccagattttattatcaacttccttcccatcccaggcccacagaacagaagcatcagcctagtggggagatcagaaagaaagactgagaagaaaacaactcaggagatgatcgggggtacagcacgtgcattagtgctcttgatcatctctttcacctaacttaatgcttagtaaaagaaggaaggggctgggtgcggttgctcacgcctgtaatcccagcactttgggaggccaaggcgggcggatcactgaggtcaggagatcgagaccatcctggctaacatggtgraaccccgtcactactttaaatacaaaaaattagctgggcgtggtggtgggcgcctgtagtcccagctactcaggaggctgaggcaggagaatcgcttgaacccaggaggcagaggttgcagtgagctgagatcataccactgcactccagcctgggcaacagagcgagactccgtctcataaaaaataaagaaggaaggaagggaggaagagaggaaagtaaaggaacagaggaaatagg

SEQ ID NO: 927770 - DNA, 609 bp, Homo sapiens
tattttaagtaggcttgacagattatcagaaattgacaagaaaaaatacacacgaagaagaaagtagaagaggattttttcttttcttttctttttgctttatcatagaatttcttgtcttggtgcttacaagctgtgtagcacaatgagaggagaatgtgatttctgcaaaacacttcaggaagcacaaagtatctgtaaatacccaggaataatgaccatgtcttttatttgtattatttttctaattcctccactctatagggcttgcccaaagtccttgattttagcccttgagtgttggttggctgacttagctttggattgtggtcccctgagatcgctggatctttttatgctttagagttatgccctrccatgtggatgcaagtggaggaaggacttctcagtgtgacccatgagaggagtggctctccctgggccccaggccccaggctgcatgcgtatgggagggaggaggagaagcaaggaaaggaggagagacagaagtatatactgagctggtagttgggggaagggttggcgggtggggagaagggaagagaggagtctgggccaaggccagaggtgtctccctggggagtcctc

SEQ ID NO: 927771 - DNA, 555 bp, Homo sapiens
gaactaccctgataccaaaaccagacaaggacacaacaacaacaaaaatctacaggttaatattcctgatgaacatagatgcaaacatcttcaacgaaatactagcaaaccaaatacaacagcacatcaaaaagattatacaccatgatcaagtaggatttatctcaggaatgcaaggatggttcaatgtgtgcaaatcaataaatgtgatacatcatatgaacagaatgcaagcaaaaaaaaaaaacacatgatctcgatagatgcagaaaaagcatttgataaaatacaacatcccttcaggataaaaattgtctgtaaattaggtatagaaggaamatacctcaacacaataaaggccaatatgacaaacccacagctaatatcatagtgaatggaaaatgttgaaaacttttcctcaaagaacttgaacaagagaaagatgcccattttcgccacccttattcaacatggcactggaagtcctagccagagaaattaggcaacagaaagaaatgaacagcatccaaattggaaagcaagagattaagttat

SEQ ID NO: 927772 - DNA, 649 bp, Homo sapiens
cattcccacgtactttgtccaaattctgcacaatagcttttccgcagggtctgttattaccaacaaagatgatgacggtgactaacgtcaccatgctctcccggaagccaggcctgggctcgaacattctgtgcagaatctcactgaatcctttcaacaaccctataaggcaggttctgttaccatccccctcttatagaggaggacccctgaggctcagagagggaatgygactcactccaagtcacacagtgaacaactgagctgaatcccaacccaggcctgtctgattccagagctgggatgtggaccggccatgaatcctcagcctggatgccagccccgagacgggggacccacacctgaactgtctgttcctgaactggaaacaagaatgaatgaatgaataaatgatagaataaatgggtggaggctcaagccaacggcactgatctcaaagcccagaagttctcggcggttagccctccacagaaagccttgaacaccacacagaagtgttcagcgacggacttttccttcctggagaggaggaatgagaagaaggcaaaagccaagagaaaaacaagaggcagaggaaagcagcctggagaatcttcccgtggagtgagcatgattgctttggatactt

SEQ ID NO: 927773 - DNA, 561 bp, Homo sapiens
agaggaaacactgagcgtaaaacattccctttttttaaattagccgggcgtagtggcgggcgcctgtagtcccagctacttgggaggctgaggcaggagaatggcgtgaacctgggaggcggagcttgcagtgagccgagatcccgccactgcactccagcctgggcgacagagcgagactccgtctcaaaaaaaaaaaaaaaaaaaaaaaaaaaaaaaaaaaaaaacctttcccttttttktaaacctaccactcacaccacatgcactgatcactctcatcactgctttggtaaagcatgtaggatgcagttcagtttcaatttggagctgttacctccccaggcaaagctgccacacagatgatccaggcttggtgtttttcctgagagccacctgccacacattttcataaggtgaccatgactatgcacatccaggctacttcctgactaggccctgttcaggaagcatcctgaggtgtccattcctcgtggagccaaatagttcccttggttgactcctgagtccccttggcaagccaagcagaattcaagcatt

SEQ ID NO: 927774 - DNA, 575 bp, Homo sapiens
  misc_feature 386: n = A,T,C or G
gcctcaatctagggtacctatcaagcaattcattgttttcctgtaatgtcaggacccttctctgtttcctggaagaactttcagcatcactagcagcactttttataggtctgaaggtgttattcaaggtttatggtattgcactagacatcatgaataatacaggagaaacatgagagaacactttttactgtgttaatttactggagagacaagctactcacaagaagatgattagcattatgtggcattttaagtgaatactcacaacacttgagttcactgcaagaacaacaggtggaggctaggaaattatcccagtagtacagtatgtactacagttaattttgtgcagttatgatttacttttgtatatttttgttttncttttctctaaacttcaattggctgcatgtatgctctgtgtktgcctacgtcttgataaattttaactttttataatagacgcatatatatctcattgtattaaatgatcactagtatctacatatgatttatgcattcatgacatcgttttcttagttttttaatatttcttgtgtagatgggtcacc

SEQ ID NO: 927775 - DNA, 692 bp, Homo sapiens
gtcgctagtggtctccactccatacctgctgccacccagctccacctgctgccactgtccagcgatacctttccttcatcattgtccacttcagctctccctgtctcttggctcacctttccccacctccaggaagctttcctaagtggaactacatcccaggaatgtgggcattactattatgctcttttacagatgttaaaactgaggcttagataggctaagtgacttttctaaggccacacagctagtaagtgggaggcccagtctgtctgaccccaaagcccaggctaggaaccattctgcatgcagacatcaggagctgaatgatgctggtcccagaatcacagtggtagagccaacagtgagcgggtggtccatgctctgggccccagcctgggcctccagggctccccagacccttgcctgggttgctggttatgttagcgctaaccactgtctcctgtgcaggggacactgttgttcacgtgtctgcctcccccttttgcctgaaagcccctggaggaaagaatccacatcatatgcagtcccatggyctccctgcccaccttcccatacgtggtgccttatatacagtaggtgctccatccacactgctcagaaaggggttcagtctgctccttctctggctgtgggagccaatgaaaaaggaggctggtggcctcttccct

SEQ ID NO: 927776 - DNA, 612 bp, Homo sapiens
ttgctttatgctgttgcatagatcctgtaagttttcttcactctttttcattcttttttttttttcctctgactgggttatttcaaaagacgtgtcttcaagttcagagattgtttcttgttcttaacctatctgttgttgaagctgccaattgtatttttatttcattcattgaattcttctgctccaagatttatatttggttctttttatgatgtcaatctctttgttgaatttcttgcttaggtcatgaattgtttttctgattttattgaattgcctactgtattcttttgtatctcagtgtatttccttaagatcattatgatgagttccttttcaagcaatttgtaaattttygttttttggagggtgggtcaattattggataattattgtgttccttttgtggtatcatatgtccttgctttttcatgttttctatgtccctgcattaatgtctgcacatctggtggagctgttacatcttctagactttacagagaaaactctcatgaggaaataatttcacctgccaatgggtctagggtgacagttgggaaggatgtagtggatctgtttctaagcgaatgcagtggcttagcttctgta

SEQ ID NO: 927777 - DNA, 712 bp, Homo sapiens
atgttggccaggctgatcttgaactcctgacctcaggtgatccaccctccttggcctcccaaagtgctgggaatacaggggtgagccactgtgtccagcctagagcccacagtcttaacacaacagttccctctaacaaagctccctgttgctgcrtgcaccaagtggcaaatttttaatattaatttatagtaatataaaaacatcgaaggctagtgcctctttacttgaaggcaagcttcacatcatgtgaagctacttagcatggcttcagggagaggggagctggtatcaaggctgggatagtctggtctgtggtcccagggggcggacgggcagtcacaggtgaaacatgtcaacccccaggcagtgcatgtgtagacagtaccagcccctctcttttattttctcagcctccttggctgctcaggcctctgtctcgagagtgactttgcttctctcttccctgatgttcatgggttaatttcattgttatccttgtcgaaggaagctgtagtttgccctcctttccaagatctttcatgccctgacagcaaccctaagcaacagaaactgtttccactccctttattattattattgttatttgaaacagagtctcactctactgcccaggctggagtgcaatggcacaatctcatctcactgcaacccctgcctcccggggtcaagtgattctcatgcttcagcc

SEQ ID NO: 927778 - DNA, 712 bp, Homo sapiens
atgttggccaggctgatcttgaactcctgacctcaggtgatccaccctccttggcctcccaaagtgctgggaatacaggggtgagccactgtgtccagcctagagcccacagtcttaacacaacagttccctctaacaaagctccctgttgctgcatgcaccaagtggcaaatttttaatattaatttatagtaatataaaaacatcgaaggctagtgcctctttacttgaaggcaagcttcacatcatgtgaagctacttagcatggcttcagggagaggggagctggtatcaaggctgggatagtctggtctgtggtcccagggggcggacgggcagtcacaggtgaaacatgtcaacccccaggcagtgcatgtgtagacagtaccagcccctctcttttattttctcagcctccttggctgctcaggcctctgtctcgagagtgactttgcttctctcttccctgatgttcatgggttaatttcattgttatccttgtcgaaggaagctgtagtttgccctcctttccaagatctttcatgccctgacagcaaccctaagcaacagaaacygtttccactccctttattattattattgttatttgaaacagagtctcactctactgcccaggctggagtgcaatggcacaatctcatctcactgcaacccctgcctcccggggtcaagtgattctcatgcttcagcc

SEQ ID NO: 927779 - DNA, 594 bp, Homo sapiens
ctttctttgtttacctactgtttctcgcagatgaaatcatgtataagcaaatgcaaaatgttatgctcagattgttccctaatatatcagttacactggaacaaattcacatcttccaaacaagcatcactgcagaaccaactgtgcagtgttgcgagaggggctgtgtggagaagctttctaaaggaggtttctggaggacattgtagggtaggactgaactgtaggatctcaagagcacccaatcgkggcacctgcctttgtttacctactgttagtaaaccaagtgtctgtgaatccatgtttccctgtcttacccaccactgttgctacatggaaggaactggaaaggcagctcattcttcagggctgtcgtgagccaccctgggctctgattaccgctctgttggatccatcagccaccaaagaaggctgaggctgcccaggggggcagtaggaaggggagccagctctcccttgacccagaactgagagagttgtacagaaacagatgcccagacattgttatttcagacctgtcacattaaaaaaatgtagtcattgacatgatgttgtcaattcaatcaccagctt

SEQ ID NO: 927780 - DNA, 688 bp, Homo sapiens
cacgtgggacctaaatatagaatttacaccaacacatgccactagatgaatacagttcattccttatattttgaaatgtaattttattttatattattttaaatttattggtaggatatattaagtgactggattctcctaatagcttaaaggttctggaataaccataggctataggcaagatgttccacaaatcaaccaccttttctttctctgccattatgttactaaggtgtgatttcaataagcgacaaaatgcaaatttgacttttccaatgcttttgttttttaggttaaagtttttctttaataaactcttttactgaagcataacaaacatagagaaaaaaagtttacaaattgtaattatgtataacttgatgaatttttttatgtatttttttgtttgttttgttttgagataggatctcaytctgtcatccaggctgaagtgtaatggtacaatcacagctcactacagcctcaacatcctgggctcaagtgatcttcctacctcagcctcccaagtagctggaaccataggcccaagctgccatgcctggctaattttttttttttttttttgtagagacttggtctccctatgttgccctagctggccttgaactactggtctcaagccatccttctgcctcagtctcccaaaatgctaggattacaagtgtga

SEQ ID NO: 927781 - DNA, 619 bp, Homo sapiens
gcccacaagtctctgagtccctaagccacctcctgcacagctccagggcccagcaggcaccagtaagcatggcctcctggaggcctcaactcttttttgtcctagtgtgcaggctttcaccattcctcccccgaaagctcaactagtttttcttctttctgggggctggagtagggctgcctttttgcctggactcatgggtaggctrgattgccatacccccaggagacaggcaccaggagcccaggaaagaggaaggaggaggcccttccccacagtgacctgctcgccattcacgtgcagcgacaggcccacctctcagaggaggatgctgaggcacaggcaggagcagtgtagagagacactgggaagaggcaccaatcacagctctgagctgtcctctggacctccaggggtggggaaggcgacccattggtgatgaagacagctcagcgggttgtggcagatgctcttcccaggactgggagacgacagtgactcaatgctgttcacttctagactgtgccttctgaaagtggcccttcagttaccctcacaattaccccacacctgtctgggatggccaggtaggccgagacaagcagagactcagggcgag

SEQ ID NO: 927782 - DNA, 669 bp, Homo sapiens
tgtcagggagatagggcttctgatttcagaggagaccagaggtgtgctcatgcagatgaaggtcctcatgggatggacatggaaggggcagctacaacctggggacaaatggtggtgggctgagcccctgggacttctggagtgagsaggcaagaacgtgaggaggagccaggcagggagccagaggcagagggtaaagagtaaagtagagcccaggaaaggggcagatccagcaagtagatgaaaatttcccctcacctgccccgttggcctctgtccctgcccacacgccctagtgccctcgccctgagtctctgcttgtctcggcctacctggccatcccagacaggtgtggggtaactgtgagggtaactgaagggccactttcagaaggcacagtctagaagtgaacagcattgagtcactgtcgtctcccagtcctgggaagagcctctgccacaacccgctgagctgtcttcatcaccaacgggtctccttcccccacccctggaggtccagaggacagctcagagctgtgattggtgcctcttcccagtgtctctctacactgctcctgcctgtgcctcagcatcctcctctgagaggtgggcctgtcgctgcacgtgaatggcgagcaggtcactgtggggaagggcctcctccttcctc

SEQ ID NO: 927783 - DNA, 717 bp, Homo sapiens; identical to SEQ ID NO: 921150

SEQ ID NO: 927784 - DNA, 717 bp, Homo sapiens; identical to SEQ ID NO: 921151

SEQ ID NO: 927785 - DNA, 647 bp, Homo sapiens
acttgcccactgtcatataaatcacccagttttagaactagagatggaatgtgtgcatgtgtctttatagtacaatgatttataatcctttgggtatatacccagtaatgagattgctgggtcaaatggtatttctggttctagatccttgaggacacaccacactgtcatccacaatggctgaactaatttacactcccaccaacagtgtaaaagcattcctatttctccacagcctcgccagcatctgttgtttctgaatggcaggatttttgtctggtagaagacaagaaggcataagagcagcagaatgttttaggatggtcaagcttgtggccctgcagagggcaaattagggaraggggaagaggaagaccagttagaaagcagttgcaataatgcaagcaggagctgccacaggcctagaccagcaaggacagtgggtgtggcagggaaggacagtggtgagagacctggtaagggaagagctgtgcagtggtcatggttgtaccactcctgttagcatggtctcaagtcaccttgtgttgactaatccaatttcatccttctggtccagtcagcccaggccttgcccgagtcctttgtgtcttgtctgtggcctccagactagctggtaggctggaggg

SEQ ID NO: 927786 - DNA, 647 bp, Homo sapiens
acttgcccactgtcatataaatcacccagttttagaactagagatggaatgtgtgcatgtgtctttatagtacaatgatttataatcctttgggtatatacccagtaatgagattgctgggtcaaatggtatttctggttctagatccttgaggacacaccacactgtcatccacaatggctgaactaatttacactcccaccaacagtgtaaaagcattcctatttctccacagcctcgccagcatctgttgtttctgaatggcaggatttttgtctggtagaagacaagaaggcataagagcagcagaatgttttaggatggtcaagcttgtggccctgcagagggcaaattagggagaggggaaraggaagaccagttagaaagcagttgcaataatgcaagcaggagctgccacaggcctagaccagcaaggacagtgggtgtggcagggaaggacagtggtgagagacctggtaagggaagagctgtgcagtggtcatggttgtaccactcctgttagcatggtctcaagtcaccttgtgttgactaatccaatttcatccttctggtccagtcagcccaggccttgcccgagtcctttgtgtcttgtctgtggcctccagactagctggtaggctggaggg

SEQ ID NO: 927787 - DNA, 599 bp, Homo sapiens
tgttacagcagccagaatagactaagacatggtcttaatacatcaattgataattcttgcctgaatcagtgattccattagagatcagggtggaattttgacctggcattcccactctgtggaactatggtttggtctgaaatatgcttttggtctctgagggcytgatctccctccaagttggaccatctggcttagacccaccatcaccaggcccaggggcagaggtggcctgagatgggaaggggttgggagacctggtgactggtacctgcttctgaaaggcagccaccttggtgtgtctatgcccctctctctatccaatgcccctgagggcctgggctctgtctgtgtggggttgtatcttcctgcagcagagctctgcctgtctgttggattagactctcctaaagcctgtcttgttccctggggcccgatcacaatgaaccagccatgcagagctgcatctggagatacagtcatgtaatgctggcatcaccaaccactggtaaggtgcccatcagataacaaacatcaggacacttaggaaagtttgggtggggtgcacatactccctccaccctggactccctcctgga

SEQ ID NO: 927788 - DNA, 646 bp, Homo sapiens
acttctacgttcagaaaacatcaatcaaatggtgtcatcgccgaccatggtgactcacgcctgtaatcccagtgctttgggaggccaaggcaggaggattgctcaaggccggaagttcaagaccagcctgagcaacacagcaagacctctgtctctacaaaaaaaaaaaamaaaaaaccgtaaaacaaaacaaaatgataccaccaaaaatgtcaaagatgtttgcctcatttcgtttcttctttgagggaggcaggtaatgtttttctcaatggcggcatagtacactatgggagaatggcacctgggagctggtgaggggaccaggaaggctggcctgttgcaggcagctctaagggattcagcaggaaggcctcactctgctggcgacactcgaatggctcctgtcacagaccttaccatttccacacatgctggcccaacttgcaacttccagcccctgtgtctctttctctgtccaccagatccctggccagaagtgcattgaattgccaaccctggggaaacagcttcaaccagtgatggatggagaggcagtgcatacattccccaggcccctcaccgccaaatgggctaacacagggcataagttctataccacctcccgccactccccagtggtggg

SEQ ID NO: 927789 - DNA, 732 bp, Homo sapiens
agggcagaagagcccctggagttctccttccatactggcttcctgggaaaagagcaggaaaggcaggagacctaaaataaaatcctatgtctcttcaactgactgaacagactccccctgggccaagggaaacctgaaacatgaaatttctggccatcgccaaaagggaggtcagacacacctccttatgccctttccctttttgagtttaggcacaactgacttcagcattagcattcaaatagaaatcattagactgacaaaacagactctttgggaataagatacccaattccaacctgactctgatatagcatcgcatgacagatagcagactctgaaggaaatcaaaatattgtatcccaaaatgtttctttgacatattttgaaatgaccctgcaaagctgtcttttctgaatctatgaagaacctccatgaatgcagccaggacttccctggatctagcacrgattcggtgggagacggacaccttttaagatctgaaaacaagacatctaccatctattccctctgaagcctgctatctgaaagcttaacctacgtaacaagatgttggtttccacaacgccccttatctttttttttttttttttttttttttttttttttttttttttcgggaaacacaatcttgctctgtcgcccaggctgcagtataatgatgtgatctcggctcaacacaacctctgcctcccaggttcaagcgattct

SEQ ID NO: 927790 - DNA, 623 bp, Homo sapiens
tttatcagctgaaaaaaagaattattaacattaaagtaaaaatggactcttttaaaaaaagataacagattccccttccttttctctctctccaatctttctgaattactttgtttttatcttttcctgtttgggtctttgatatttacatagccttttaaaattgattgatccttccttacctttagaagtagagagagagagagagagagagagtgtgtgtgtgtgtgtgtgtgtgtgtgtgtgtgtgtgtgtgcagcccctttaattttcttgcctattctatgttctgttcctgaatttgaaatggcaagccagacaggggcaatttgtgaatcagcccagaggaagaatatttcctgctgatatgatcacatctagttgttgttactctccattcctaaaaccagaaaagaacagataacaagacaagaaaatggaggcactcatacaccattttrtaaaagtcagtagacttgagaagatctactcacctcccggtgaagagcaattataagaggaagagtagaaaaaaaaagactatcatctatgtctgaaaatattacattttaaatatcattaagttaaaaacatatttctttatttagaaaaagttggactta

SEQ ID NO: 927791 - DNA, 619 bp, Homo sapiens
aaacaagcaaacaaatgcaagtcactcttttttttccagtctaggggaacctcactgctattagtgccctagctgaggactttacctgccttccctacatgaagcttttgcagtcagatccaggaaacaagagaaataggcagtgggtcccagtcagaatgaattcagaaagttgcccaggatatgaagtcagtactgggctgaatgctaagcttgcttgcatttgatcaatttgtcattttatctgtgacagacaacactagaaatagagatgatttccaagtgaagtcaatgattcttcaatcacaaatctgtctgagagtactgggagcttgaacaatgattctggtggcacatggggcaatagaagttgcgtcctgtcagcagctgcaacttgtgacacagagaggggcaggccacagcagaaggaccaattgcagtcaagggcaraggcctcagacatccccaaaacacacaaaagcaacaatagcaaaaaaaaactatgtattaaaatgttaagtgttttattataatactcttgtttcagtaatttaaaaatgcccaggaagcctggggccgcctctagccaggcagagagggcagcaaacacaaaggggca

SEQ ID NO: 927792 - DNA, 685 bp, Homo sapiens
cttcaagtcttttctcagtgcttatctgctgtgtcctatctccatcattagcaactatcaactgccatttctatctctttatagttccaattctttactcagattagctgtgtttttgtttgtttgtttgtttgagacagtctcgctctgtcacccaggctggagtgcagtggcgcgatctcggctcaccgtaacctctgcctgctgggttcaagtgattgtcatgcctcagccacccaagttgctgtgattacaggcgtgcaccaccatgcccagcttatttttctaattttagtagagatggggtttcaccatgttggccaagctgatctcgaactcctgacctcaagtgatccrcccgcctcggcctcccaaagtgctgggattacgggcttgatccaccgtatccagccccagattagctctttattggccctttacactgagagaaatcattcacccaagggtctctgcttagttttctaacagtttacatgttttcagcaatcatctctcagtttaccaatatcaaaatccaaacttttttcaccttgcagttctactttaagacacacgtgtctaaacacatagtgaatatttctacctggttgaattactggaccacccctaaaaccaaactcagtattttccccctaaaattcattcctcctcctggctttcataa

SEQ ID NO: 927793 - DNA, 622 bp, Homo sapiens
ttctcctgggctgcaaaacttgcagtcacgttcagcttggcaacctggaacagattcgcatgtgccattgccgggtaacccactctgttctcctgagattgtggtgcagtagggcccttgctgctccatctccaagcacatctctggcatccagagtaaccatttgcctagttgagtagcctgagccaccgcactcctcctggacataacgttatggtgaagcagagctctctctgctccatacccaggaagatccctaggcattcagagcacctccttgcctgcttctggagtttgagtcaccccacccctcctatgcagagatcttagtgcagggggtctctgctccatgctcyaggcatcttgagcacctactctcctggactagaagtttagaccatcccctatccctgtgcagagaacttggggctgaggaggtttcccagctacactactaggcacatctctgggcccttggtggccacccactgcattctccctcggcactagtgcctgtgtctgtcatcaggggacctgtaggtggacctgtcaggtctggccctgccattcctgccctctgccaaccccctgaccctggggctgggcagtgagctcagaccat

SEQ ID NO: 927794 - DNA, 584 bp, Homo sapiens
tcacagaaaaaacacatgtgttagataagctttgctcaggaagagtgacagtggccatggccatgagttcaatgttaatgaatcaacaacatgtattaaataaggtgtctttaaacagaaacatatgacaaggttatgtattgactggttgataaaatgtgacccgaggctcacaggaacctaacctcgtgtcttccctakgagcaatggttcagtgttcactaattcagtgttcacggcgacttcacagaacacaactgatacagataatgagaaccaactgtgtattgaacatatcaatgtctatgtctctgctcaaatatcaacagcaccctatgaaactcagtatcaaccctatactgagcttggacccagctatcaccatataaagtgctttctcccagtcctacccaggccagtcctggggtgagcctgatctgagacacgaaatttatccagaagtgaactaatctttgttctgtgctttccatggtttatctgaaaaacaggtatctctctttcttgcccacccgtggttcagaacccacatgtgctttttctgatactgacagggagcatctgat

SEQ ID NO: 927795 - DNA, 584 bp, Homo sapiens
tcacagaaaaaacacatgtgttagataagctttgctcaggaagagtgacagtggccatggccatgagttcaatgttaatgaatcaacaacatgtattaaataaggtgtctttaaacagaaacatatgacaaggttatgtattgactggttgataaaatgtgacccgaggctcacaggaacctaacctcgtgtcttccctatgagcaatggttcagtgttcactaattcagtgttcacggcgacttcacagaacacaactgatacagataatgagaaccaactgtrtattgaacatatcaatgtctatgtctctgctcaaatatcaacagcaccctatgaaactcagtatcaaccctatactgagcttggacccagctatcaccatataaagtgctttctcccagtcctacccaggccagtcctggggtgagcctgatctgagacacgaaatttatccagaagtgaactaatctttgttctgtgctttccatggtttatctgaaaaacaggtatctctctttcttgcccacccgtggttcagaacccacatgtgctttttctgatactgacagggagcatctgat

SEQ ID NO: 927796 - DNA, 548 bp, Homo sapiens
ttgtgactagtgatctcagtagttatacaatacaggggtaatattttaatatctacttttttctttggctgtttcaggtcatgggagataatctgctgctgtcatccgtctttcagttctctaagaagataagacaatctatagataagacagctggaaagatcaggtacatgtacatatagctttaactttaatatcacctcactttgctttttgctttttctcaaggttaaaaatgtgtcatcagaatgaatatgtttacctttggaaaaatttgtcccaaagtaaatatctatccagtactactttgtaactttaaatttattastaattcaaaacataaatagacttacagattttattcaacagtacttcagaaatccatgctgctattgcttatttctgattcctataattaaaatttaaaatgtaatgaaacagtatttgaacatggtttgtgaattgtaatattccacacaaatataattctatattgcttatatattgaaataatatattttatcagcatttgatgagtaccaagaagc

SEQ ID NO: 927797 - DNA, 577 bp, Homo sapiens
aaccactctttaaaacaacaatggatgtatacttctctggcctcagctcccgtggggaagctccagtgccagtccctgggtgcttcaccattttcagttagttcctaaaccttgtaaacagacccttcactaaattcttcctagttaaccctttgagaatgaaaccatttcctgccaggactctgacagatacaaagaacccacagccgactgctgggtgcgcggcagacctrgtgcatggctccacactgccatcttgggggctggcacaggctggcaggcactgagtctggggaagggagctggggctggaggtgtggaggggaagaccgtgcatagttgcttcctgatcagctctttatttgattgagagtgaggcagggaagattagagggaagcttacagtggaattcagggctgaggctgctattcttttgctccttgtaacttcctacagtgttgtcagcatccacatacttctctgtggggttggtctcagagccaggttaccttgtcttaggtccagtggcaccctgactggcttggtgtccttgaacaagttacctaacctctccat

SEQ ID NO: 927798 - DNA, 829 bp, Homo sapiens
ccatcattttggctctgctatgaggagaggaccaaaggcggaatttcttggaatatgaatatattccacgacatatgaggatataaaaaagaaaaatgatcctctaacattatgtgtgtgaaaaaagtatttaaaaatgtaaaaagaaaatcagtgtgtattttttagatttacatatttattgctttttagtcatcatttcttcttgcattctatatctatttgtgatcatttttctttgcatgaaagatgctctttagtgaatatgtcagccaaggtccaatcaggagaaagaaatcacacattaatttgtgcagggaaagtttaatacaaagaataattaactataatgggggaatgcagtaacaagggatttgcagtaagtagtaaagagaactttaakaggaatagcagctatagaaagcaatcaccactcctacaagctgagatagagcatccaaagaatgagctccgcagggctgagacccagaccttgttagaaaaaagcatgattatggctcactgaatggcagaaaaattgctgtggttctacactggaagaacttgctaaaaatatgtcctctaggttgccagggaaagctattattcatcaggagctattgccagaggtgctccaccatgaaaccaccaaagggagtagttggaggaagctgttgtctgctgggtgatgctgattgccatgcactggaggaggctggtgctgggcttactcacggagctttctgggaggtcaggaattggaatcagcacggaaaatccctatgtcctgcaatatccctccagtacattctattgaccataacatgat

SEQ ID NO: 927799 - DNA, 829 bp, Homo sapiens
ccatcattttggctctgctatgaggagaggaccaaaggcggaatttcttggaatatgaatatattccacgacatatgaggatataaaaaagaaaaatgatcctctaacattatgtgtgtgaaaaaagtatttaaaaatgtaaaaagaaaatcagtgtgtattttttagatttacatatttattgctttttagtcatcatttcttcttgcattctatatctatttgtgatcatttttctttgcatgaaagatgctctttagtgaatatgtcagccaaggtccaatcaggagaaagaaatcacacattaatttgtgcagggaaagtttaatacaaagaataattaactataatgggggaatgcagtaacaagggatttgcagtaagtagtaaagagaactttaagaggaatagcagctatagaaagcaatcaccactcctacaagctkagatagagcatccaaagaatgagctccgcagggctgagacccagaccttgttagaaaaaagcatgattatggctcactgaatggcagaaaaattgctgtggttctacactggaagaacttgctaaaaatatgtcctctaggttgccagggaaagctattattcatcaggagctattgccagaggtgctccaccatgaaaccaccaaagggagtagttggaggaagctgttgtctgctgggtgatgctgattgccatgcactggaggaggctggtgctgggcttactcacggagctttctgggaggtcaggaattggaatcagcacggaaaatccctatgtcctgcaatatccctccagtacattctattgaccataacatgat

SEQ ID NO: 927800 - DNA, 829 bp, Homo sapiens
ccatcattttggctctgctatgaggagaggaccaaaggcggaatttcttggaatatgaatatattccacgacatatgaggatataaaaaagaaaaatgatcctctaacattatgtgtgtgaaaaaagtatttaaaaatgtaaaaagaaaatcagtgtgtattttttagatttacatatttattgctttttagtcatcatttcttcttgcattctatatctatttgtgatcatttttctttgcatgaaagatgctctttagtgaatatgtcagccaaggtccaatcaggagaaagaaatcacacattaatttgtgcagggaaagtttaatacaaagaataattaactataatgggggaatgcagtaacaagggatttgcagtaagtagtaaagagaactttaagaggaatagcagctatagaaagcaatcaccactcctacaagctgagatagagcatccaaagaatgakctccgcagggctgagacccagaccttgttagaaaaaagcatgattatggctcactgaatggcagaaaaattgctgtggttctacactggaagaacttgctaaaaatatgtcctctaggttgccagggaaagctattattcatcaggagctattgccagaggtgctccaccatgaaaccaccaaagggagtagttggaggaagctgttgtctgctgggtgatgctgattgccatgcactggaggaggctggtgctgggcttactcacggagctttctgggaggtcaggaattggaatcagcacggaaaatccctatgtcctgcaatatccctccagtacattctattgaccataacatgat

SEQ ID NO: 927801 - DNA, 829 bp, Homo sapiens
ccatcattttggctctgctatgaggagaggaccaaaggcggaatttcttggaatatgaatatattccacgacatatgaggatataaaaaagaaaaatgatcctctaacattatgtgtgtgaaaaaagtatttaaaaatgtaaaaagaaaatcagtgtgtattttttagatttacatatttattgctttttagtcatcatttcttcttgcattctatatctatttgtgatcatttttctttgcatgaaagatgctctttagtgaatatgtcagccaaggtccaatcaggagaaagaaatcacacattaatttgtgcagggaaagtttaatacaaagaataattaactataatgggggaatgcagtaacaagggatttgcagtaagtagtaaagagaactttaagaggaatagcagctatagaaagcaatcaccactcctacaagctgagatagagcatccaaagaatgagctccgcagggctgagacccagaccttgttagaaaaaagcatgattatggctcactgaatggcagaaaaattgctgtggttctacactggaagaacttgctaaaaatatgtcctctaggttgccagggaaagctattattcatcaggagctatkgccagaggtgctccaccatgaaaccaccaaagggagtagttggaggaagctgttgtctgctgggtgatgctgattgccatgcactggaggaggctggtgctgggcttactcacggagctttctgggaggtcaggaattggaatcagcacggaaaatccctatgtcctgcaatatccctccagtacattctattgaccataacatgat

SEQ ID NO: 927802 - DNA, 561 bp, Homo sapiens
agagaaagagagagagacagaagggggaggtcccagtttcccttaaacaaccagatgtcacatggactgagcgagaactcatcaccaagaggatggtgtgctaaaccattcgtgaaggatccacccctgtgatccaatcatctcccaccaggccctacctccatctctgggaaacacatttcaacaaaggatttggagggaacaaacatccaaaccatatgagtgactattttcatccactgtgctgggtactcaatgggccttttcactctagaaatccatgtccttcagctccataatattttcttgaacttatgtttagtgtctgtctctctaccattttatcctttctacgtctagaattcctatttttcagtgactggattgtctgagttgaycttttaattttttaaatcttttctctccctcattttccatctccttatctttttgctttgctttctgggttatctattcaattttatcttccagcttttgtattgaatcgttcatttttcctaacaggtttctgttactttctaagagtgctttttgtgtgtt

SEQ ID NO: 927803 - DNA, 753 bp, Homo sapiens
cctttgccatattataaagtaacattcacaggttctggggattcagaagtagatatttttaggggctactattcagcctaccacagagacctaaattgattgctgcccaacaggttttccctgttactcaaattccccagcctttatgatgatttgctgtctttcatttaattattcccccaggtgcactgatttgagttcagagtagctcgtttgtaacatacactgccttcgttttgctgctctgccctattgtgccccctgccggcaggtgacactacagagcttgtacccgcacagccctcacctcatacatgcccattgtcaaatgaattgatggatagccctagccctggatggaatcccctgaaagmaacagaaagggggttgagcaagaagatcctccactgttttccaagcctctagctggggcagattgaggtctccctgggagatctcatcagcaacaaccacactcataaatcaaaaaggaactgagccacagtgctcctggagaatgaaagggaaaaaagaacattggttcatgtttgggctgattctaaactatatgggaatgaaagctttgggggtgatgaatttccctttaatgctgtcacatctgtagtcctggaggtttaacctctgatttttggctgtaaaaccaacattatttctgcaaagttgacaccagatgctgccagagagatatagctaaagtgataaaaatctatttaacagatttagtgaagcaaa

SEQ ID NO: 927804 - DNA, 610 bp, Homo sapiens
ctgattctcaatgtagaaacacggaaaattcctcaataaatgatgatatgtcttttttgtacatctgcattgttaaaaataaaatctcttgaaatctcggctctttgggcaactgcatatgcagtggtgacccataattgtttttgaaggatctyatcaaaagacgtaagttgtccatcacagtatttcagacgactgcagttataaagctgggtgcacacaactaccaactatagtgacaggtgtttgtacatttcactttttgacctatttctttatgaatatggttaatctgctcataactgctatacccttgtgactgtccctagaatacatgagcacttatgcttacaaaaatatgtaggttattgttgcctattttatcatacaaagtggcctatgaagtgctctgtcatttttaaatatgtttcccaaataaaaccccttttaaaatgtaaatcaatgtcttttaaatactttttaaaattattttttctggaattatatttttgggattttaatctttcaggattttaatgttcagaattatggcatttgggattttgtctttcaagattatggctccaacccacctccctgaagccatcag

SEQ ID NO: 927805 - DNA, 610 bp, Homo sapiens
ctgattctcaatgtagaaacacggaaaattcctcaataaatgatgatatgtcttttttgtacatctgcattgttaaaaataaaatctcttgaaatctcggctctttgggcaactgcatatgcagtggtgacccataattgtttttgaaggatcttatcaaaagacgtaagttgtccatcacagtatttcagacgactgcagttataaagctgggtgcacacaactaccaactatagtgacaggtgtttgtacatttcactttttgacctatttctttatgaatatggttaatctgctcataactkctatacccttgtgactgtccctagaatacatgagcacttatgcttacaaaaatatgtaggttattgttgcctattttatcatacaaagtggcctatgaagtgctctgtcatttttaaatatgtttcccaaataaaaccccttttaaaatgtaaatcaatgtcttttaaatactttttaaaattattttttctggaattatatttttgggattttaatctttcaggattttaatgttcagaattatggcatttgggattttgtctttcaagattatggctccaacccacctccctgaagccatcag

SEQ ID NO: 927806 - DNA, 551 bp, Homo sapiens
aaatccctggacctgtaaactttgaaccctcgttggcctttgttgcttgtgaccttgtttaaatgattaatgttcttttaacgactgcaggctttagaaggcagcatgcattcaccatgcgcagatcctttattcgaggcaaaatgaagttgttcaaacacaaaacygctgataatatgcactctagtacatagttgcatcatttttaaatttcagataccctactaaagaggaaggttttgtaggttatgtattcttcagatacatactttttattttaaaaagttgtaaagcgtccctcagctttttaatttctgaaaaaaattatgaacactatgttgacacaacttattcattatctctaaactcaaaatgaatggataattaggattactttatcatacttttttttttaagacagggtctcactctgttgcctaggctggagttcagtgacacgatcatggctcgctgcagccttgacctcccaggctcaagtgatcctcccacctccatctcccaagtagctgggactacaggctgtgccacca

SEQ ID NO: 927807 - DNA, 653 bp, Homo sapiens
ctgtcagacattcaaagtattggtaccaatcctgctgacactatttcaaaagagaaagagggaatcctcccttaatcattctgtgaagccagtatcatcctaataccaaaaccaggcaaggacataataacaacaacctacagaccaatatccctgatgaayatagatgcagaaatcctcaacaaaatactagcgatccaaatccaacagcaggctgtgcatggtggctcacacctgtaatcccagcaccttgagaggctaaggtggtggatcacctgaggtcaggagatcaagacaagcctggacaacatggcaacaccccatctctactgaaaatacaacaattagccaggcttggtggcaggcgcctgcagccccagctactcaggaggctgagacaggaattgcttgaacctgggaggtggaggttgcagtgagccaagatcacattactgcactctagcctgggcaacagagtaagattccatctcaaaaacaaacaaaaaaaacaaatccaacagcatatcaaaaagataatccaccatgatcaagtaggtttcatacaaggaatgcagagatggtttaacagacgtaagtcaataaatgtcatatatcatgtaaacagaatttaaaagaaaaatcacgtgatcatc

SEQ ID NO: 927808 - DNA, 586 bp, Homo sapiens
gtagaatattggtagttgtgtctagaaatttggcaggattcaagtattgagaaggacttgtacgttacgctacagagtttgaatgttatactataaaacaaaatggggaattaaccactgaaggattctgagtagaagaatgacataacaaaatttgcattttagaaaaataactctggcagtgttgtggagggtggaactgaaggatgtaaaagcagtcttcatttatgaagtcacatgttcattgagtttagcagataccaatcaaacacattaaaatcttgaaataccaacttttgaattagtgtgcaattgattgtgctgttcttctgtgtatattgactatattaaatactcaagaatctgattttcggtctsggctacacagtatctgaactcccttataaagttagtacctggcgtctttgcttctcaggtaggcagtgggcagtttttcttttcttttcttttcttttttttttttgagacggcgtcttgctctgtcgcccagactggagtgcagtggcacgatctcggctcactgcaagctccgcctcctgggtttgtgccattcttctgcctcagc

SEQ ID NO: 927809 - DNA, 553 bp, Homo sapiens
tgcagcctctgcctcctggtctcaagcgattctcttgcctcagcctcccaagtatctgtgactacaggcacgcaccaccatgcctggctaatttttgtatttttaatagagatggggttttactatgttggccaggctggtctcgaactcctgacctcgtgatctgcccacctcgggctcccaaagtgytgggattacaggtgtgagccaccaagcctggcctctttctttctttttttttagagacagtgtctcactgtcacccaggctggagtgcagtggcgcagccttagctcactgcaaccttgaactcctgggctcaagagatcttcctgcctcagtgtcccaggtagctaggactgcaggtgcctgccaccacgcctggctaagttgtttttgttttgttttggtagagacagagtctcactgtgttgcccaggctggtcttgaacttctggcctcaagcagtccgcctgcctagtagctagggctgcaggcacacaccaccatgcctggctaatttttatattttttgtagagaccagtgtctcac

SEQ ID NO: 927810 - DNA, 553 bp, Homo sapiens
tgcagcctctgcctcctggtctcaagcgattctcttgcctcagcctcccaagtatctgtgactacaggcacgcaccaccatgcctggctaatttttgtatttttaatagagatggggttttactatgttggccaggctggtctcgaactcctgacctcgtgatctgcccacctcgggctcccaaagtgttgggattacaggtgtgagccaccaagcctggcctctttctttctttttttttagagacagtgtctcactgtcacccaggctggagtgcagtggygcagccttagctcactgcaaccttgaactcctgggctcaagagatcttcctgcctcagtgtcccaggtagctaggactgcaggtgcctgccaccacgcctggctaagttgtttttgttttgttttggtagagacagagtctcactgtgttgcccaggctggtcttgaacttctggcctcaagcagtccgcctgcctagtagctagggctgcaggcacacaccaccatgcctggctaatttttatattttttgtagagaccagtgtctcac

SEQ ID NO: 927811 - DNA, 589 bp, Homo sapiens
tgctggaggtccactctagaccctgtttgcctgggtatcaccagcggaggctgcagaacagtaaatattgccacctgatccttcctctggaagcgttgtcccagaggggcaccccacctgtttgaggtgtctgttggcccctactgggaggtgtttcccagtcaggctacacaggggtcaaggacccacttgaggaggcagtctatctgttctcagagctcartcgccttgctgagagaaccactgctctcttcagggctgtcagacagggacatttaagtctgcagaagctgtctgctgccttttgttctactatgccctgccctcagcggtggaatctatagaagcaataggccttgttgagctgtggtgggctccgcccagtttgtgcttctgggcctctttgtttacactgtgagctactcaaacctcagcaatggcggacacccctgtccctgccaatctgcaacatcacaggtcaatttcagactgttgcgctagcagtgagcaaggctctgtgagcttgggacccactgagccaggcacaggagggtatctccttgtctgcaggttgcacagtatttggtca

SEQ ID NO: 927812 - DNA, 785 bp, Homo sapiens
ttagcctgttctcacactgctaataaagacatacccaagactgggtaatttataaaggaaagaggtttaattgactcacagtttgcagggatgaggagccttatgaaacatacaatcatggcagaaggggaagcaaacatgtccttcttcacatggcagcaggaaaaagtgccaagcaaagaggaaaaaggccgttataaaaccatcagatctcgtagtaattcactcactatcacgagagaagtatgggggaaccaccccatgattcaattacgtaccaccaggtccatactacaacacatgggaattatgggattacaattcaaaaygaaatttcggtggggacacaaagccaaactatatcattctgtccctggtcccttccaaatctcatgtcctcacatttcaaaacacaaccatgccttcccaacagttcccccaagtcttaactcattccagcattaacccagaagtccaagtctaaaatgtcatctgagacaagggcaagtccctttgacatatgagcctgtaaaaccaaatcaagctggttacttcttagatgcaatgggggtacaggcattgggtaaatacacccatttcaagtgggagaaattggccaaaacaaagaggctacaggcgccatgcaactcacaatccaatagggcagtcattaaaccttaaagcttcaaaatgatttcctttgattccgtgtctcacatccacatatcactctgatgcaagaagtgggctcccatgtccttgggaagctctgctcctgtggcttt

SEQ ID NO: 927813 - DNA, 785 bp, Homo sapiens
ttagcctgttctcacactgctaataaagacatacccaagactgggtaatttataaaggaaagaggtttaattgactcacagtttgcagggatgaggagccttatgaaacatacaatcatggcagaaggggaagcaaacatgtccttcttcacatggcagcaggaaaaagtgccaagcaaagaggaaaaaggccgttataaaaccatcagatctcgtagtaattcactcactatcacgagagaagtatgggggaaccaccccatgattcaattacgtaccaccaggtccatactacaacacatgggaattatgggattacaattcaaaatgaaatttcggtggggacacaaagccaaactatatcattctgtccctggtcccttccaaatctcatgtcctcacatttcaaaacacaaccatgccttcccaacagttcccccaagtcttaactcattccagcattaacccaraagtccaagtctaaaatgtcatctgagacaagggcaagtccctttgacatatgagcctgtaaaaccaaatcaagctggttacttcttagatgcaatgggggtacaggcattgggtaaatacacccatttcaagtgggagaaattggccaaaacaaagaggctacaggcgccatgcaactcacaatccaatagggcagtcattaaaccttaaagcttcaaaatgatttcctttgattccgtgtctcacatccacatatcactctgatgcaagaagtgggctcccatgtccttgggaagctctgctcctgtggcttt

SEQ ID NO: 927814 - DNA, 785 bp, Homo sapiens
ttagcctgttctcacactgctaataaagacatacccaagactgggtaatttataaaggaaagaggtttaattgactcacagtttgcagggatgaggagccttatgaaacatacaatcatggcagaaggggaagcaaacatgtccttcttcacatggcagcaggaaaaagtgccaagcaaagaggaaaaaggccgttataaaaccatcagatctcgtagtaattcactcactatcacgagagaagtatgggggaaccaccccatgattcaattacgtaccaccaggtccatactacaacacatgggaattatgggattacaattcaaaatgaaatttcggtggggacacaaagccaaactatatcattctgtccctggtcccttccaaatctcatgtcctcacatttcaaaacacaaccatgccttcccaacagttcccccaagtcttaactcattccagcattaacccagaagtccaagtctaaaatgtcatctgagacaagggcaagtccctttgacatatgagcctgtaaaaccaaatcaagctggttacttcttagatgcaatgggggtacaggcattgggtaaatacacccatttcaagtgggagaaattggccaaaacraagaggctacaggcgccatgcaactcacaatccaatagggcagtcattaaaccttaaagcttcaaaatgatttcctttgattccgtgtctcacatccacatatcactctgatgcaagaagtgggctcccatgtccttgggaagctctgctcctgtggcttt

SEQ ID NO: 927815 - DNA, 546 bp, Homo sapiens
aaccccataagcatactctgcacctacctagaaccaaagccaatgcacactactcaactgacatcctaggacacatctgcaaggaaaaaaaaataactttctctaaaaaagctaccccataaaaatgcaagaaacaactctctcaccagatgtgcagatatcaagatagggacacaagaaacaaaamagcaagaaaacataacaccctcaaagaagcacaataattctctgataactgacctcaaaaagcaaaagaaaatttaggaaatgcctgaaagggagtttaaaataataattttaaggaaattcaatgagacacaagagaatacgggaaatgaaatgaggaaaacaattcataatctgaatgagacagtcaacaaagggacagatattattataaggaactaaacagaattcttagagctgaagaattcaataaatgaaaggaacaatacaactcaatacaactaccacctacaacagcagactggatcaagcaaaaaaaaaggaatttttgaatttaaagacagatattttgagataacc

SEQ ID NO: 927816 - DNA, 627 bp, Homo sapiens
ctgtggagaaatccatgtggcaaggaattgagacctctgtctggtcaccagcataaacctgcctaccatgtgtgtcagccatcttaaaatcagattttctagcctcagtcaagtcttcagatgactgcagccctggctgacatctaactgcaaccttgtatgagactctgaggcagaacaacccaactaagccactcccaaattcttaactcacaaaaaagtatgtgagataataaatgattgttgttgtttcaagctgcgaagttttacataattatgcagtgattgataactaatattgaggaagtgataaacacataataaataaaataatttcagatgycaatagtgttatgaagaagataaaggagaacaatatgatagaggaatgggggaaaagctgctttgctaagactgggaacctctctgaggaagtaacacttgagttgagacaagactgagcataaagaagcaatcatggctgggtgcggtggctcattcctgtaatcctagcactttgggagaccgaggtgggagaattgcttgaggccaggagttcaagacctcaagaacaacttggccaacatagcgagaccctgtctcttaaaaaaaatcaatcatgaaaag

SEQ ID NO: 927817 - DNA, 604 bp, Homo sapiens
tgggctggcactgagtgtgacttttccagcacacagtgcaagcagtcggtggatctacgattctggggtctggaggatggtggccctcgtctcacagctccactaggcagtgcttcagtgtgggagcttcaaccctacatttcctctgcactgccctagcaaaggttctccatgagggctccttccctgcagcaaacttctgtctggacatcctggaatttccatacatcctctgacatctaggtgsagattcccaaacctcaattcttgacttctgtgtgcccacaggctcaataccacatggaagctgccaaggtttggggcttgcactctctgaaaccatggccggaactgtatcttggccccttttagccatggctggagcacctaggacacagggcacgaagtccctaggctgcacacagcaggggaccatgggaccatcccatgaaaccatttttatctcctaggcctcctggcctgtgatgggaggggctgctgtgaaagtccctgatatgccgtggaaacattttccccattgtcttggtgattaacatttggctcctcattacttatgcaaatttctgcagcatacttgaatttc

SEQ ID NO: 927818 - DNA, 604 bp, Homo sapiens
tgggctggcactgagtgtgacttttccagcacacagtgcaagcagtcggtggatctacgattctggggtctggaggatggtggccctcgtctcacagctccactaggcagtgcttcagtgtgggagcttcaaccctacatttcctctgcactgccctagcaaaggttctccatgagggctccttccctgcagcaaacttctgtctggacatcctggaatttccatacatcctctgacatctaggtgcagattcccaaacctcaattcttgacttctgtgtgcccacaggctcaataccacatggaagctgccaaggtttggggcttgcactctctgaaaccatggccrgaactgtatcttggccccttttagccatggctggagcacctaggacacagggcacgaagtccctaggctgcacacagcaggggaccatgggaccatcccatgaaaccatttttatctcctaggcctcctggcctgtgatgggaggggctgctgtgaaagtccctgatatgccgtggaaacattttccccattgtcttggtgattaacatttggctcctcattacttatgcaaatttctgcagcatacttgaatttc

SEQ ID NO: 927819 - DNA, 547 bp, Homo sapiens
ctgcttacaagaactcacctcacctgtaagaccacacatagactgaaagtgaagggatgaatataagctacacttatatcaaataaaattaactttaaatccaaaactgtagaaacaaaatattcatcattatataatgataaaggaattggttcagcaagaggatataacaatcataaatatttatgcacccaacatcagtgcacccaaatatataaagcaaatattagtagatctaaagagactacaatacaataataagaggagatgtcaggctgctgccatgttgtaggatgctgaaggctagtacgcattgaygtggtggttactctgagtctctagctggacttgaatgtctgtgttgccattcctcactgtgggttcatgatctacggggtggcaggcccaggccctatcatctgggagctggaacacaattctgactaggagccagaggaatggaagctaaaggaggtggagaggtaccggctcctccctgggccctcagcttgaagcagggcctcatgccctggcaccccaggccaca

SEQ ID NO: 927820 - DNA, 760 bp, Homo sapiens
acacaattacgaccttcggaaatgaagtagagatgccagaaacttccttggcagaatactgaaggagtcagaagtctcagagggattagcatgttagattgtagttattatgcaagatcagagaacctactagaagactacattcccatgggaagtccagaggccactcttttcaccgaggcaacacaacatgtaaaggtgaggaattcttagtgtcagtggggatggtaggaccctggaattgcagagaccagatgggtaacaatcaacagaggcagggtagatataaaaattatcacaaaatggccaggcgcggtggctcacgcctgtaatcccagcactttgggaggccaaggcggttggatcacgaggtcaggagatcgagaccatcctggctaacacggtgaaaccccatctctactaaaaatacaaaaaattagccggacatggtygcaggtgcctgtagtcccagctactcaggaggctgaggcaggagaatggcgtgaacctgggaggcggagcttgcagtgagctgagatcgcaccactgcactccaacctgggcaacagagtgagactccgtctaaaaataataataataataattaccacaaaaccaaagtggcagctaagtgctttgacccatagggtctatctatggcaatggctaatagaccatagtgtccctagagttaactaaattggcagatgactgtgtattacttgactgtaacaacagcaatccccaaaatcaagggctc

SEQ ID NO: 927821 - DNA, 760 bp, Homo sapiens
acacaattacgaccttcggaaatgaagtagagatgccagaaacttccttggcagaatactgaaggagtcagaagtctcagagggattagcatgttagattgtagttattatgcaagatcagagaacctactagaagactacattcccatgggaagtccagaggccactcttttcaccgaggcaacacaacatgtaaaggtgaggaattcttagtgtcagtggggatggtaggaccctggaattgcagagaccagatgggtaacaatcaacagaggcagggtagatataaaaattatcacaaaatggccaggcgcggtggctcacgcctgtaatcccagcactttgggaggccaaggcggttggatcacgaggtcaggagatcgagaccatcctggctaacacggtgaaaccccatctctactaaaaatacaaaaaattagccggacatggtcgcaggtgcctgtagtcccagctactcaggaggctgaggcaggagaatggcrtgaacctgggaggcggagcttgcagtgagctgagatcgcaccactgcactccaacctgggcaacagagtgagactccgtctaaaaataataataataataattaccacaaaaccaaagtggcagctaagtgctttgacccatagggtctatctatggcaatggctaatagaccatagtgtccctagagttaactaaattggcagatgactgtgtattacttgactgtaacaacagcaatccccaaaatcaagggctc

SEQ ID NO: 927822 - DNA, 649 bp, Homo sapiens
ggtacaagaaggaaaaaacattaatccaaaaacagcaagaaattaggggctaaaatgtgataaaaatggaaagcactaaaatagataatacaaataaatctaaaaaaattactattaataaaaattaaataaattctcaagttaaaaaacacaaaccattattttgtttagaaatacagaattttcctatattctatttgctgtggactcaactgaaagacaagcaaccatgcaattgaaagtgaaagcctagagaaagagatgccagcaaacattaacatctgaaatgcyggtgttgttctagtaatacagactttacctggacaaaatcaagaaaaaataggaaatctgaatttttctataactatcaaaggaattggatcatttttcaaacatttttacagagaaaacataaagcctaagaagctttatatgtaggcctaccaaccattcaaggaacgaaaaattccaataatacacaaaaactttaaaaataggaaaagagtgaagatggtctgattatttatttatttatttattgagacagagtctcactctgtcgcccaggctggagtgcagtggcgtgatcttggctcactgcaagctccacttcccgggttcacaccattctccttcctcagccttccga

SEQ ID NO: 927823 - DNA, 649 bp, Homo sapiens
ggtacaagaaggaaaaaacattaatccaaaaacagcaagaaattaggggctaaaatgtgataaaaatggaaagcactaaaatagataatacaaataaatctaaaaaaattactattaataaaaattaaataaattctcaagttaaaaaacacaaaccattattttgtttagaaatacagaattttcctatattctatttgctgtggactcaactgaaagacaagcaaccatgcaattgaaagtgaaagcctagagaaagagatgccagcaaacattaacatctgaaatgctggtgttgttctagtaatacagactttacctggacaaaatcaagaaaaaataggaaatctgaatttttctataactatcaaaggaattggatcatttttcaaacatttttacagagaaaacataaagcctaagaagctttatatgtaggcctaccaaccattcaaggaacraaaaattccaataatacacaaaaactttaaaaataggaaaagagtgaagatggtctgattatttatttatttatttattgagacagagtctcactctgtcgcccaggctggagtgcagtggcgtgatcttggctcactgcaagctccacttcccgggttcacaccattctccttcctcagccttccga

SEQ ID NO: 927824 - DNA, 581 bp, Homo sapiens
aatgcagtcataaaaaggaatgagatcatgtcctttgcagggacatggatgaagctggaagccatcatcctcagcaaactaacacaggaacagaaaaccaaacatcgcatgttctcactcataagtgggagttgaacaatgagaacacatgggcacagggaggggaacaacacacaccagggcctgtgggcggggccggrggggggcaggcacaagtggagggagagcatcaggacaaatagctaatgcatgaggggcttaaaacctagatgatgggttcataggttcagcaaaccaccatggcacacgtttacctgtgtaacaaacctgcatgttctgcacatgtatcccagaacttaaagtaaaataaaaatttaaaaaagtaagactcttctattaattaaagattatgtaactgtaagtatatcctctgaattttcactattggcttttaatgatgatcagatgacattgtaaatttgtcctgagtttcctgtcatatttgttatctcaaccaactctttgtcagacagttaattttttttatctcttctctgcatcctgagagcggaggtgaataa

SEQ ID NO: 927825 - DNA, 588 bp, Homo sapiens
gcacaccaggagattatatcccgtgcctggctcagagggtcctatgcccacggaacctcactcattactagcacagcagtctgagatcaaactgcaaggtggcagtgaggctgggggaggggtgcccgccattgctgaggcttgagtaggtaaacaaagtggctgggaagctcaaactgggtacagcccaccacagctcaagaaggcctgcctgcctctgtagactccacttctgggggcagggcatagccaaacaaaaggcagcagaaacctctgcagacttaaatgtccctgtctgacagctttgaagagagtagtggatctcccagcacgcagcttgagatatgagaayggacagactgcctcctcaagtgggtccctgacccctgagtagcctaactgggaggcaccccccagtaggggcagactgacacctcacacagccgggtactcctctgagacaaaacttccagaggaaagatcaggcagcaacatttgctgttcaccaatatccgctgttctgcagccaccgctgctgatacccaggcaaacagggtctggagtggacctccagcaaactccaacaga

SEQ ID NO: 927826 - DNA, 555 bp, Homo sapiens
gctctgtcccagggagatggaagctttatctataagtacctgactgaggctgctgcctttctttcagtgatgccctggcccagagagaaggaatgtagagaggcagtctggctacagcagctttgctgagctatggtgggctccacccagttcaaacttcccagcagctttgtttacactatgagtggaaaaccacctactcaagcttcagtaatggtggatgccccttccatcaagcttgagcataccaggttgtcttcagactgttgtgctggcagtgagaatttcaagccagtggatcttagcttgctgggctccatgggggtgggatcygctgagctaggccacttggctctctggcttcagcaccctttccagggcagtgaacgattctgtctcactggcattccaggcatcactgggatatgaaaaaaaaaaaaaaaaaaactcctgcagctagcttggcatctgcccaaacaactgccccattttgtgcttgaaacccagtgccctggtggtgtaggcacctgagggaatctccgggtctgcaggttg

SEQ ID NO: 927827 - DNA, 790 bp, Homo sapiens
aggcccatagatggctcacatcataagactctgtgaagtcagcccccagtactggcccagagctaggtagacttgctgggtggctagacccagaagagagatcacaatcactgcagctaggctcacaggaatgaacatccacaggaaaacgagaaaagtaccacatcaagggaataccccatgggacaaaagaatctgaacaacagctttcagccctggaccttttctatgacagagcctaacaaatgagaaggaaccacaagaccaacactggtaatatgacaaagcaaggctctttaacacccccaaaaaatcacactakctcaccagcaatggatccaagaagacatccctgatttacctgaaaaagaattcaggcggttagttattaacctaatcagggaggcaccacagaaaggcgcagcccactgcaaggaaattcaaaaagtgatacaagaagtgaagggagaaatattcaaggaaatagatagccaaagaaaaaacaatcaaaacttcaggaaacattggacatacttatagaaatgcaaatgctctggaaagtctcacaatagaattgaacccgtagaagaaagaaatccagagttcaaagacaaggtcttccaattaactcaatccaacaaagacaaagaaaaaaagaataagaaaatatgaactaagcctccaagaagtctgggattatgctgagcaaccaaacctaagaaaaatcagtgttcctgtgaaagaagataaatctaaaagtttggaaaacctatttgggggaataattgaa

SEQ ID NO: 927828 - DNA, 614 bp, Homo sapiens
agagtgtgcaaagattccaatttctctacatcctggctaacactcgttattttatgtgttttctgttgttgttttttgttttttggtaatagccatcctaagggatggctaagacgtatgaagtagtatctcataatagttttgatttgcattcccataatgataagcatcttctcaccagctacttagccattatatgtcttatttggggaaatatcaattcatgtcttttgcccatttttgaatcakattttggttgttgttgagttttagagagttctttatattctaggtattaatcccttgtcaaacataatttgcaaatattttcccccattctgtgggttacttttttactctgatgatattgtcttatatgagatgtgtcttagtctgtttttgatgctataacaaataccacagactgggtaatttataaataacagaaagttatttctcacaattctaaaagctgggaagtctaagataaaggaaccaggagattcagcgtctggtagaagaaggagaaaggatgaggatgctctcttcaaccttttatataagataattaatcccattaatgaaggaggagtactcatgacttaatcactgtc

SEQ ID NO: 927829 - DNA, 796 bp, Homo sapiens
cagtggctcacacatataatcccagcacattgggaggccaaggggggcagatcatgaggtcaagagatcaagcccatcccggccaacatggtgaaaccccctcttttctgaaaatacaaaattagctgggtgtggtggcacgcgccagtagtcccagttaatagggaggatgaggcaggagaatcgtttgaacctgggtggtggaggttgcagggagctgagatcgtgccactgcactccagcctgaccacagagcaagactctgtctcaaaaaaaaaaaaaaggaagttaacaagaatatacacaccctctaaaggaagcaaactgctcccgcagaacccaggagacaccccaaatactgtgagtacccaaaccgtggaattgggaaagggagaccctckgctcctgaacacacaccctgactgtggaaactgaaagagcactttgcaggaaaggtgtccaaccttacctggagctgagtcaatttatagagctgagcaaaatatatgggtatagaaagcactgggaaaggccctgggagctcactgtgtccccaagcaggccatttctgcctggcatcacagagaaccttcatgaggggtgtcaggggaaacaccacaggaagtaggaagtctccacttgaactctgtaataattagaattggataaaaaacctcctggttataactgggggaaaggtacaaatccagcttgcacactccacaggaaggggaagaacaaagcccttttctttcaaagctggaaagtgggtatcctggggtaagttcttaaactc

SEQ ID NO: 927830 - DNA, 796 bp, Homo sapiens
cagtggctcacacatataatcccagcacattgggaggccaaggggggcagatcatgaggtcaagagatcaagcccatcccggccaacatggtgaaaccccctcttttctgaaaatacaaaattagctgggtgtggtggcacgcgccagtagtcccagttaatagggaggatgaggcaggagaatcgtttgaacctgggtggtggaggttgcagggagctgagatcgtgccactgcactccagcctgaccacagagcaagactctgtctcaaaaaaaaaaaaaaggaagttaacaagaatatacacaccctctaaaggaagcaaactgctcccgcagaacccaggagacaccccaaatactgtgagtacccaaaccgtggaattgggaaagggagaccctctgctcctgaacacacaccctgactgtggaaactgaaagagcastttgcaggaaaggtgtccaaccttacctggagctgagtcaatttatagagctgagcaaaatatatgggtatagaaagcactgggaaaggccctgggagctcactgtgtccccaagcaggccatttctgcctggcatcacagagaaccttcatgaggggtgtcaggggaaacaccacaggaagtaggaagtctccacttgaactctgtaataattagaattggataaaaaacctcctggttataactgggggaaaggtacaaatccagcttgcacactccacaggaaggggaagaacaaagcccttttctttcaaagctggaaagtgggtatcctggggtaagttcttaaactc

SEQ ID NO: 927831 - DNA, 689 bp, Homo sapiens
gttagtttctatcaaaaaagatgtccccctatgtgcatcacctcctggtattcatacccttacatagcctgacattgtgtcagggtggccgggggtgaccaacaaaatccagtggaggccacagcatgtgacttctaaggctaagtcatagaagacgttcctcctcttcctcttcctcctcctcctccttcttcttcttcctcttgttcttctagacagggtctygctctgttgcccaggctggaatgcagtggtgcaaacacagctcactgcagcctcaacctctggaatgaagcaatcctctcatctcagcctcccaagtagctgaggctacacgcatggccaccagacacaggtaatttttatttttatttctgtagaggtggggtctctctatgttgcccaggctagtctcagatgcctgggctcaagcaattctcctgcctcagccttccaaagttctgggattataggtgtgagccactgtgcctggctatccttccttttggatcacttgggtcactcactgtagaggccacgagccaccctgcagtaagaacactcagaaaaccctaaagagaggtccatgtgattagaaactgatgcctcctgccaacagccagcatcacccagccatccttgtgagtcagccaaattggaaaaggaacctgcagccccagtgaagcctt

SEQ ID NO: 927832 - DNA, 634 bp, Homo sapiens
ttttcttgatcttgtaagttccctcttaccacagggcctttgcacacatttgtccttccaccaggatgtttctttctttccctgcttattcttcagtttttggctcaaacatcgtctcctcagggaaggtttttcagtagcctgagcagacagatcatcccttccaattttatgggctctctctgccatragactcttctgcatgacccttgtctctgttgcagtttagatttctttgtgtgattacctgataaatgcctgtatctcccactgacagtgttagcttctgcaggggaggagctgtgtctgctttgcttcccaaacctaagacaaggtgtgagccactgcgcccggccaggtttcaacttcttatggaacacattaaatgtgtacatgcttatccttcttcccaactctcctcctctgcaattgttaggggttgagttatatcccctcaaaattcatatgttgagggggttaagtgctctctttcaccctctgtcttcatgtatacatggatgatgaatgaatgaatgaatagatctcttatgaatgaatgaataaataagagcatgggtaataaacataggaggcaattctggatatggtaggaaacaaagccaggtcctgctgc

SEQ ID NO: 927833 - DNA, 604 bp, Homo sapiens
ggagggaccctgtgggaggtaattgaatcatggtggggagggggctcccatgctgttcttgtgacaatgaataagtgtcatgaaatctgatggttttataaaggggagttgccctacacaagttctctcttgcctgcagccatgtaagacatgcctttctcctcctttgccttctaccgtgattgtgagtcctcgtcagccatgtggaactgtgagtccattaaacctctttttctttatarattacccagtctcaggtatgtctttattagcagtgtgagaactgactaatgcacagagtcttgatctgttgcctgggctgaagtgcagtggtgcaatcacagctcactgcagcctcaaactcctgggctcaagcatatcctcctgcctcagcctcccgagtagttgggactacaggcacatgccaccatgcccagctaatttttttagaaatggggattttgctttgttgcccaggctggccttgaactcctggcttcaagcaatccttccacttttgtctcccaaactgttgggattacaggagtgagccaccacacctggtccatgtactcttctgatacttgcttctgatacttactgc

SEQ ID NO: 927834 - DNA, 568 bp, Homo sapiens
gagagaccccatctctaatgaataagtaaatgaataaaaattgcagtaattaagacaatgtgtatattagtctgttttcacattgctgataaagacatacctgagactcagcaatttacaaaagaaagaggtttaactggacttacagttccacatggctggggaagcctcatagtcatagcagaaggcaaggaggagaaagtcccatcttccatggatggcaacaagcaaagagagaatgaggaagaygcaaaagcagaaacccctaaaaaaaccatcagatctcgtgagactttttcaataccatgagaacagtatgggggaaaccacccccgtgattcaattatctcccactgggtccctcccacaacatgtgggaattatgggagtacaattcaagatgagctttgggtgaggacacagctaaacaatatcaatgtggtatcaatgtcatgagagacaaacagataaaatgggaaagaatacaggccacaaatagacccacacatatatggactgcttatttttgacaaaggtgcaaaaaaaattcagtggggaaagaatagct

SEQ ID NO: 927835 - DNA, 641 bp, Homo sapiens
tattttcctagatggtgctgatgcttgtagatgttccttggtgtctggcattgaacagttaggtatttattgtagtcctcactgtctgtgcttatttgtacccattcatcttggaaatgctttccagatatttgaaaggacttgtgtgttgtgatctaagctgtatctgctttagggggcaccccaagcccagtaacactggtttttgcaaacttgtagaggtactgccttgatggacttggacaagatctgggagaattccctgggttacaaggcagaggctcatgttcttttcctttactttctcctaaacatacagtctttctctcggttctgagccacctaaagctgggggttgagtgacacaagtacccctgtggccaccactgctgactgtattggatcagacttgaagctagtgtagcatttggtctcacccaagtcctgctgtactcaacctctggctgcagcctacgttcactcaaggtcctggggctctacarttaacaggtggtaaagccagccaggcctgtgtccttcccttcagggtggtgaggtcccccaggccctgggtgggtacagaagtactgtctgggagtcaaggactagagtcaaaaattttagacgtctaccaggtattc

SEQ ID NO: 927836 - DNA, 616 bp, Homo sapiens
aagtggccttgcagacagatctgctagtgtctctccctgcgttgtcctcaagatgaaggaaacactgagagatacctggtttttggtgtggtgtgctcgtcttctagaagagtggtttttttctgcagggggagttgattttggatgctagcaggtcttggcccacctccaaattcactggggattmaggatctacagaaaaataacacggaaccatgcagcccaagcatagccacacacacaggccaccaaaagttagtgaggctaaaaacaagaagcactgaagtgtgttagccctattcctttaagcagaccccacttacaggcacacacacacacacaaaatgccacacacactcgacgtcaaacactcgcaacacacccacggaaacacacagcatggcagatcccgaggttgcatggttctgcaggaggccccacctgagagacagcaaccccagggaacacaggcaggctgtacctagaaatcacattggcgtaagtttcaaaacccatacaacctctagggtggcctgaggaattctgcagatccttttggatccttagagattttgcagtttatttgtggggctgtggttgatgtttcttcaggctg

SEQ ID NO: 927837 - DNA, 616 bp, Homo sapiens
aagtggccttgcagacagatctgctagtgtctctccctgcgttgtcctcaagatgaaggaaacactgagagatacctggtttttggtgtggtgtgctcgtcttctagaagagtggtttttttctgcagggggagttgattttggatgctagcaggtcttggcccacctccaaattcactggggattcaggatctacmgaaaaataacacggaaccatgcagcccaagcatagccacacacacaggccaccaaaagttagtgaggctaaaaacaagaagcactgaagtgtgttagccctattcctttaagcagaccccacttacaggcacacacacacacacaaaatgccacacacactcgacgtcaaacactcgcaacacacccacggaaacacacagcatggcagatcccgaggttgcatggttctgcaggaggccccacctgagagacagcaaccccagggaacacaggcaggctgtacctagaaatcacattggcgtaagtttcaaaacccatacaacctctagggtggcctgaggaattctgcagatccttttggatccttagagattttgcagtttatttgtggggctgtggttgatgtttcttcaggctg

SEQ ID NO: 927838 - DNA, 616 bp, Homo sapiens
aagtggccttgcagacagatctgctagtgtctctccctgcgttgtcctcaagatgaaggaaacactgagagatacctggtttttggtgtggtgtgctcgtcttctagaagagtggtttttttctgcagggggagttgattttggatgctagcaggtcttggcccacctccaaattcactggggattcaggatctacagaaaaataacacggaaccatgcagcccaagcatagccacacacacaggccaccaaaagttagtgaggctaaaaacaagaagcactgaagtgtgttagccctattcctttaagcagaccccacttacaggcacacacacacacacaaaatgccacacacactcgacgtcaaacactcgcaacacamccacggaaacacacagcatggcagatcccgaggttgcatggttctgcaggaggccccacctgagagacagcaaccccagggaacacaggcaggctgtacctagaaatcacattggcgtaagtttcaaaacccatacaacctctagggtggcctgaggaattctgcagatccttttggatccttagagattttgcagtttatttgtggggctgtggttgatgtttcttcaggctg

SEQ ID NO: 927839 - DNA, 570 bp, Homo sapiens
agacatacttagcagctggcagaatccaccatttgctccctgacttgtagggtagagctactataatgggaaaggtcaaatggaggccaatagagctgcctatgcctagaaaaatagtaaatcaaaaacaatatcaattttttggagagattgtgaaggttagtgacaccatcaaggacttgaaaggcataggagtggtaattagcaacacatcctcctacaactctcccatttgtctgatgcagaagacacatggattttggagaataatagtggattatcgtaagcttaactgcatggtgactccaattgtacctgctgtaccagatgtggttttattgtttgagcaaattaatacatctcctggtacytggtatgcaataattcactgggaaaatacctttttcttcattcctgtccatacggctcaccagaagcaatttgccttcagctggcaaggccagtaatatgcctttgttatcctaccacaggggtatatcaactctttgtgtgtcataatcttatttagagagcccttgattgcttttggcttctgcaagatagcaccct

SEQ ID NO: 927840 - DNA, 570 bp, Homo sapiens
agacatacttagcagctggcagaatccaccatttgctccctgacttgtagggtagagctactataatgggaaaggtcaaatggaggccaatagagctgcctatgcctagaaaaatagtaaatcaaaaacaatatcaattttttggagagattgtgaaggttagtgacaccatcaaggacttgaaaggcataggagtggtaattagcaacacatcctcctacaactctcccatttgtctgatgcagaagacacatggattttggagaataatagtggattatcgtaagcttaactgcatggtgactccaattgtacctgctgtaccagatgtggttttattgtttgagcaaattaatacatctcctggtacctggtatgcaataattcactgggaaaatacctttttcttcattcctgtccatamggctcaccagaagcaatttgccttcagctggcaaggccagtaatatgcctttgttatcctaccacaggggtatatcaactctttgtgtgtcataatcttatttagagagcccttgattgcttttggcttctgcaagatagcaccct

SEQ ID NO: 927841 - DNA, 612 bp, Homo sapiens
attccaaatgagagaaattggccaaaacaaaagggctacaggccccatggaagtccaaaatctagtggggcagtcaaatattaaagttccaaaataatctcctttgactccatgtcttgcatccgggtcatgctaatgcaagatgtgggttcccatagactagggaagctctgtctctgtggctttgcaaggtacagcctccctcctgactgcttttacaggctggtattcattgtctgtggcttttccaggcacacagtgcaagctgttggtggatctactattctgggttttggaggacagtggccytcttctcacatctccactaggcagcgcccagtggggactctgtgtgggggctcccacctcacatttcctttccacattgccttagcagaggttcttcatgagtgccccacccctgcagcaaacttctgcctgaacatccaggcatttcaatacatcctctgaaacctaggcagaggttccccaacctcaattgttgacttctgtgcactaacaggctcaaccacatggaagctgccaaggcttgtggcttgcaccctctgaagccacagcctgagctgcacctttgccccttttagtcacggc

SEQ ID NO: 927842 - DNA, 583 bp, Homo sapiens
tctgtcatcaagttggaaagaaaattaaagttgattctgattatttgcagtagttctgtgaagtcactgcaaacacataactagtaatagtaaaccttgctcctatgggaaatacagggttaggttcctgcaagcctgtggtcagaacattttcattaatttatgaatacgtaaccttgttttatgtatgtttctgcttaaagaaccttatttaatatatattgttaattcattaacattaaactcactcatagccaacagcaatataactcttacctataaaaaaygtacctaacatatgcactttcctcataaggaatatcacagtcttcttgcccttgggaacactagatagcactattcttaggggacttttttttttttgacacagagtctcgctctgttgcccaggctggagtgcagtggcgcgatcttggctcactgcaacctccgcctcctgggtttaagcaattctcctacttcagcctcccaaatagctgggactacaggcgtgtgccaccacacccaactaatttttgtttttttttattagagacggggtttcgctatgttggtcaggctg

SEQ ID NO: 927843 - DNA, 562 bp, Homo sapiens
atctcggcttactgcagcctctgcctcctgggttcaagcaattctcctgccttagcctcctgggtagctgggaccacaggctcacgccaccatgtgtggataatttttgtatttttagtagagatggggtttcgccatgtttgccmggctggtctcgaactcctgtcctcaggtaatctgcccacctcggcctcccaaagtgctgcgattataggcatgagcctccgtgcttggccatgatattttcaaatataaaaattttaatgttttacaattagaatatttattttacttcatttttactagtaccgttgtaagctttttaaattcttgctaaatgacaatactgttttatcaggattttactttttatgtatgtatttttttctgagacaggttattgctctgttgcccaggctggactgcagtagcgtgattggctcctgcagccttgacctcctgggctcaagtgattctcctgcctcagcctcctgagtagctgggactacaggtgcatgccaccatacctaactaactgttacattttttgtagagatggggt

SEQ ID NO: 927844 - DNA, 597 bp, Homo sapiens
gtggctcatgcctgtcatcccagaactctgggaggctgaggcaggtggctcacctgaggtcaggagattgagaccagcctggccaacatggtgaaaccccgtctctactataaatacaaaaattagtcgggcatgatggcatgcacctgtaatcccagctacttgggagactgaggcaggagcatcacttgaacccaggaggcagaggttacagtgagccgagattgcgccactgcactctagcctgggtgacagagtgagactgtctcaaaaaataataataataaaataaacctgcttccttcatctctgccctagccaggyactggcctaagtgtttcgtggctattctaatattctaatcctcacaaccatcgctgaggttggtagtgctgttgtcctcatttccagggcataaactgagttgcagagatgctaagctattcggttaacagggaattaagtgatgtgttagatttgggggtggatgtgctggctcgtggggtagctgtgtacgttcctctttcgtaaatactgccggtcatcccggaagctcgtgcccttcagcaaatgctcgagtgccctttgtgtaccagg

SEQ ID NO: 927845 - DNA, 576 bp, Homo sapiens
ggggttgagttcttgatttgattctccgcttggttgctgttggtgtatagaactattgatttgtgtacattaatcttgtatctggacacttgaattattttatcagttctaggagctttctggaggagtccttagagctttcaaggtaaacattcatattgtcagcaaacagtgacagtttgactttcctgacttggatgccctttttatctttctctcgtctgattactctggctaggacttccagtactgtgttgaagaggagtagtgagagtgggcatccttgtctttgttatgcatgcatctaagtgaagagacaacctgaacaggctaagtgtgagcaacaaggctgtgtattcacttgggtgtgagcgggctgagtctgaaaagagagtcagygaagggtgatgggattggagctagtttttttttcttttttttattatactttaagttttagggtacatgtgcacaacatgcaggttagttacatatgtatacatgtggcatgttggtatgcacccattaactcatcatttaacattagatatatctcgtaatgctatccctcctccg

SEQ ID NO: 927846 - DNA, 606 bp, Homo sapiens
ctggacctgcttgtctgtgatagtaggttttatatatcaacatgcctgagccacggggttcccagattaagcattgtttctgagtgtgtctgggagggtgtttctggttgagattactgtttgaattcgtggacttagtaatgcagatttccctcccttctgtgagtggactcatctcatgagagtctgaatagaacaaaaaggtgtagagggagtcatttaccctgtttgctccccgcctgcctgttggagtggggacgcctatcttctcccgccctggaactgggatttgcacccttggctcctctggttctcaggcctttggacttggactggaaccaccccacaggcattcctgtttctccagcctgcagacggcagatygtgagactcctcagcctccacaatcatgtgagacaattctcatcataaacctctttctctgttctgagaactgcatcatcagtcgtgtgcaaatatcaagtgtatttacacaaaactagataatacagcctaccatacacctaggctatatggagagaagtggcataatcacagctcactgcagccttgaactacagggctcaagccatcctcccacctcag

SEQ ID NO: 927847 - DNA, 587 bp, Homo sapiens
aggttttatatatcaacatgcctgagccacggggttcccagattaagcattgtttctgagtgtgtctgggagggtgtttctggttgagattactgtttgaattcgtggacttagtaatgcagatttccctcccttctgtgagtggactcatctcatgagagtctgaatagaacaaaaaggtgtagagggagtcatttaccctgtttgctccccgcctgcctgttggagtggggacgcctatcttctcccgccctggaactgggatttgcacccttggctcctctggttctcaggcctttggacttggactggaaccaccccacaggcattcctgtttctccagcctgcagacggcagatcgtgagactcctcagcctccacaatcaygtgagacaattctcatcataaacctctttctctgttctgagaactgcatcatcagtcgtgtgcaaatatcaagtgtatttacacaaaactagataatacagcctaccatacacctaggctatatggagagaagtggcataatcacagctcactgcagccttgaactacagggctcaagccatcctcccacctcagcctcc

SEQ ID NO: 927848 - DNA, 587 bp, Homo sapiens
aggttttatatatcaacatgcctgagccacggggttcccagattaagcattgtttctgagtgtgtctgggagggtgtttctggttgagattactgtttgaattcgtggacttagtaatgcagatttccctcccttctgtgagtggactcatctcatgagagtctgaatagaacaaaaaggtgtagagggagtcatttaccctgtttgctccccgcctgcctgttggagtggggacgcctatcttctcccgccctggaactgggatttgcacccttggctcctctggttctcaggcctttggacttggactggaaccaccccacaggcattcctgtttctccagcctgcagacggcagatcgtgagactcctcagcctccacaatcatgtgagacaattctcatcataaayctctttctctgttctgagaactgcatcatcagtcgtgtgcaaatatcaagtgtatttacacaaaactagataatacagcctaccatacacctaggctatatggagagaagtggcataatcacagctcactgcagccttgaactacagggctcaagccatcctcccacctcagcctcc

SEQ ID NO: 927849 - DNA, 625 bp, Homo sapiens
ccttattttgctttccagttattatttgataccattcttttaggtgaaatggaaggaagactgaagaaaccagtatataaaagttgagctgaactactgtaggctttgcagtaaagcagacataggttgaagtcctaattttgttcttttaaaaatattctttatattctgttgctccacaggtgatttcagtgcatttaataactaaatgtacttaggcaaaatatttaattttctttggccttacctataaggcagagataatacccatctggcagaattatgagaattaggaatattttactggggcaaatgtagaagttaagtaatattatgtatttttacgactatatagtacatataatgattttaacawcatcttcctctcttaagaacttttatggataagacccacttctagcttaacaaattcatttctctcccaaactagagagttaatttttttcttatatatgattcttatgccctagcccttaactctttagtagagagtttgaagctcttgcttctccagatagcataaatgaaactatttctgccagcattgttagaataatgttaccttgggtgaaaacaaataggaagaagaaccatgtgtaaaaat

SEQ ID NO: 927850 - DNA, 433 bp, Homo sapiens
agaaaggacatccacaccaaaaacccatctgttcatcaccataatcaaagaccaaaagtagataaaaccacaaagatggggaaaaaacagaacagaaaaactggaaactctaaaaagcagagcgcctctcctcctccaaaggaatgcagttcctcaccagcaacggaacaaagctggaaagagaatgactttgacaagctgagagaagaaggcttcagacgatcaaactactccgagctacaggaggaaattcaaaccaaaggcaaakaagttgaaaactttgaaaaaaatttagaagaatgtataactagcataaccaatacagagaagtgcttaaaggggataatggagctgaaagccaaggctcgaaaactacatgaagaatgcagaagcctcaggagccgatgcgatcaactggaagaaagggtatcac

SEQ ID NO: 927851 - DNA, 450 bp, Homo sapiens
tctcctggtcctatccccaaaccgccactctaaagtccctcttaaagtaaataatctttgctggcagggctatgctgaacctccttaggcactctggttagatgtcctaggtcctcccaattcttagtcctttaatacctgtttttctyctggtcttattccgtttagtttttcaattcatacaaaaccgcatccaggccatcaccaataattctatacgacaaatatttcttctaacaaccccacaatatcaccccttaccacaaaatcttccttcagcttaatctctcccactctaggttcccacgccgcccctaatcccgcttgaagcagccctgagaaacatcgcccattatctctccataccaccccaaaaaaattttcaccgccccaacacttcgctattttatttttcttattaatagaagacaggaatgtcaggtgtctgag

SEQ ID NO: 927852 - DNA, 450 bp, Homo sapiens
tctcctggtcctatccccaaaccgccactctaaagtccctcttaaagtaaataatctttgctggcagggctatgctgaacctccttaggcactctggttagatgtcctaggtcctcccaattcttagtcctttaatacctgtttttcttctkgtcttattccgtttagtttttcaattcatacaaaaccgcatccaggccatcaccaataattctatacgacaaatatttcttctaacaaccccacaatatcaccccttaccacaaaatcttccttcagcttaatctctcccactctaggttcccacgccgcccctaatcccgcttgaagcagccctgagaaacatcgcccattatctctccataccaccccaaaaaaattttcaccgccccaacacttcgctattttatttttcttattaatagaagacaggaatgtcaggtgtctgag

SEQ ID NO: 927853 - DNA, 746 bp, Homo sapiens
agaatgtccaccagcagataagcctcttgggcatgttaaacaaaatttatgggtggccattgttttttgttttgttttgtttgagacagggtctcgctcagttgcccaggctggaatgcagtggcacttattgcaaccttgacctcctgggctcaagtcatctgagtagctgggaccacaggcatgcaccaccacatccagctagtttttaaattttgtgtagggacagggtcttgctctgttgcccaggctggagtgcaatggcacaaccayaactcactgcaactttgacctcctggcctcaagtgaccctcccacctcagccttccaaggaagtgggacgacagacatgtgtcaccaccaccatgcccagctaatttttaatttttttgtagagacagggtcttgctatgttgcccaggctggggttcagtggcatgatcatggttcactgctgtctcagactcctgggctcaggtgatcctcaggggccactgttttgaactgggctcctgcgctgggtcctagaagaccagacccaaccagaatggagtcactggtgctaatgaaaccaaggggttcactgatcaggtcagcctgccctgattgctttttgttattttgtttttcctttttccatgaagctgaaggctgtgcctctgaatgctgacgcccacccttcactggctctttatagataatattcacaggtcaccatgggactggtcgcttcaggaatgtggggc

SEQ ID NO: 927854 - DNA, 608 bp, Homo sapiens
cagctgctcaatacaagtatttctatgaattctgggagctgtcttagcaagttaatcaaactcaaggaggggtagtgggaaccccatttcatagctgttcagtcagaagtgtgggtggcttgggacttcccactggcatctgaagtggggcagtcttgtgggactgagctcttcatctatgaaatctgactctaactccacrtagaaagtatcagaattgaattgaagtgtggacagccagttgctgtctgctagagaattgcttggtgtatggcccccacacatctggtcacagagtgttctgtgctgtgagagtataataggagaaaaacagtgagtgtgttgttctctagaattggtgtcagaagtgggacttggccaggcaccatggctcatgtctgtaatcccagcactttgggaggtcaaggtgggaggactgtttgagcccaggagttcaagaccagcctgggcaacatagtgagaccctgtggaggcatgtgcctgtaatcccagctacttgcaaagctgcggtgggaggatcgcttgagcccagggggtggaggctacactgacctatgttcacatcactgcattccagcctaggcagc

SEQ ID NO: 927855 - DNA, 608 bp, Homo sapiens
cagctgctcaatacaagtatttctatgaattctgggagctgtcttagcaagttaatcaaactcaaggaggggtagtgggaaccccatttcatagctgttcagtcagaagtgtgggtggcttgggacttcccactggcatctgaagtggggcagtcttgtgggactgagctcttcatctatgaaatctgactctaactccacatagaaagtatcagaattgaattgaagtgtggacagccagttgctgtctgctagagaattgcttggtgtatggcccccacacatctggtcacagagtgttctgtgctgtgagagtataataggagaaaaacagtgagtgtgttgttctctagaattggtgtcagaagtgggacttggccaggcaccatggctcatgtctgtaatcccrgcactttgggaggtcaaggtgggaggactgtttgagcccaggagttcaagaccagcctgggcaacatagtgagaccctgtggaggcatgtgcctgtaatcccagctacttgcaaagctgcggtgggaggatcgcttgagcccagggggtggaggctacactgacctatgttcacatcactgcattccagcctaggcagc

SEQ ID NO: 927856 - DNA, 522 bp, Homo sapiens
ccaactctctaaatgacagttccttcatcaaaaaaatgagacaatgggaccagatccatttgaccagcacttctcaaactgtctgtggtgaaagaccaggagttttcagggggttttaaaaaatttccagtccgtcacaaaccatrtatttgtatgttacaataaaaatgaattagtagaagaatggaattttcaaaacatataaaatataagccaaaatgtcttattataagatgcaacaggcatgaaatagatctgtcaaactgccatgaacgtttctaaatgcttactcttcatttctgaccttatcgtggacaaggggatctcgagcagcatgtggagcagcccctgtggggaccccacttttatcactggccatgtgacatcccgagggcatgtcacactcctaagatgcccctctccttttgttgggaccctaggcagcaagcagggtccttctaccctccccatccccagaccctgtgggagcccattcagctctcactcactgagggaatgagg

SEQ ID NO: 927857 - DNA, 522 bp, Homo sapiens
ccaactctctaaatgacagttccttcatcaaaaaaatgagacaatgggaccagatccatttgaccagcacttctcaaactgtctgtggtgaaagaccaggagttttcagggggttttaaaaaatttccagtccgtcacaaaccatgtatttgtatgwtacaataaaaatgaattagtagaagaatggaattttcaaaacatataaaatataagccaaaatgtcttattataagatgcaacaggcatgaaatagatctgtcaaactgccatgaacgtttctaaatgcttactcttcatttctgaccttatcgtggacaaggggatctcgagcagcatgtggagcagcccctgtggggaccccacttttatcactggccatgtgacatcccgagggcatgtcacactcctaagatgcccctctccttttgttgggaccctaggcagcaagcagggtccttctaccctccccatccccagaccctgtgggagcccattcagctctcactcactgagggaatgagg

SEQ ID NO: 927858 - DNA, 590 bp, Homo sapiens
gagacagggtttcgccatgttggccaggctggtctcaaactcctgacctcaagtaatccacccgccttggcctcccaaagtgctgggattacaggcgtgagccactgtgcctggcctcattcatctttatgccctattatttgatgtttttcctgccttggcagcttccttctmaagaccacagagctcttaagagctttaccatgttctctcctagcagcattccttttgccctggcaagtcttatctcacttcatttgggctacaaatatgaaagcaccttagttggtttttttggggggggttttttgtttgtttgagatggagtcttgttctgttgccaggctggagtgcagtggtgcaatctcagctcactgcaacctccatgtcctgggttcaagtgactgtcctgcgtcaacctcctgagtagctgggactacaggtgcgtgccaccacacccagctaatttttttggtttttttttgtagagatggggtttcaccatgttggccaggatggtctcgatctcttgacctcgtcatctgcctgccttgtcctcccatagtagctgggattacaggcgtgagcca

SEQ ID NO: 927859 - DNA, 716 bp, Homo sapiens
tggcagcccctcccatcacaggcctggaggcctaggaggaaaacatggttttgtcggtcaggcccagggtccctgtgtgcagcctagggactttgtgccctgcatctcagccactccagccatggctgaaagaggccaacacagaactgaagtcatggcttcagagggtgtaagccccaagccttggcatcttccatgtggtattgagcctgcaagggcacagaagtcaagaattggggtttgkggacctctgcctagattttagaagatgtatggaaatgcctggatgcccaggcagaagtctgctgcaggggtggtgccctcatggagaacttctgctagggcagtgcaagagatgtggggtcagagcccccatacatagtccctactgggacactgctttgtggagctgtgaaaagagggccactgttctccagaccccagaatgctagatctactgacagcttgcaccatgcacctgtaaaagccacagacaatcaatgccagcccatgaaagcagccaggagggaggctataccctgcaaagccacaagggcagagctgcccaagaccatgggaacccacttcttgcatcagcatgacctatatgtgagacatggagtcaaaggagatcattttggagctttaagatttgattgccccactggatttcagacttgcctgggtcctgtaacccctttgttttggccaatttc

SEQ ID NO: 927860 - DNA, 597 bp, Homo sapiens
gtaagaatgacaattattaaaaattcaggaaataacagatgctggcgagattgcagagaaataggaacgcctttatactgttggtgggaatgtaaattagtttaactattgtggaagacagtgtggcaattcctcagagatttagaactggaaataccatttggccctgcaatctcattactgggtatatacccaaaggaatataaatcattttattatacagatacatgcacatgtattttcactgcagcactattcagaatagcaaagacaagggatcaaaccaaatgcccatcaataatagactggataaagaaaatrtggtacatacaaactgtggaatactatgcagccacaaaaaggaacaagatcatgtcctttgcagggtcatggatgaagctggaagccagtatcctcacccagcaaactaagtcaggaacaaaaaaccaacaccacatgttctcacttataagtgggagctgaacaataagaatacatagacatggtgggagaacaacacttactagggtctattgatggagggaggggtgggaagtgcattagggaaaagagctgatgcatgttaggcttaatacc

SEQ ID NO: 927861 - DNA, 495 bp, Homo sapiens
atttctccccagaaaatggggagaaattttctactacatcatcaggctacaaactttttaaacttttatgctttgcttcctcttgaacacttagaacacttagaaatttcttccaccagatgacctaaattatctctctcaagttcaaagttccacaaawctctagggcaggggaaaaatgctgccagtctctttgctaaaacataagaagagtcacctttgttccagttcccaagaagttcctcatctccgtctgagaccaccttaacctggacttcattgttcatatcactatcagtgttttggtcaaagccagtccacaagtctctaggaagttccaaactttcccacatcttcctgtcttctgaactttccaagtatctaggaagttccaaactttcccatattttcctatctttttctgattcctccaaattgtccaaccttcatctcttacctggttctaaagttgcttccacatttttgggtatcttt

SEQ ID NO: 927862 - DNA, 646 bp, Homo sapiens
agcacaaagactgttggcattttgtccctgtcctagagatttgtggaactttgaacttgagagagatgttttaaggtatctggcagaagaaatttctaagcagcaaagtattcaaaagatgatttcrgtgctgttaaaggcattcagttttaaaagtgaaacagagcataaaagtttggaaaatttgcagcctggctagtgatagaaacgaaaaacccattttctgagaagaaattcaggtctgctgcctgtatttgcatacgtaatgaggagccaaatgttaatccccaagacaacggggaaaatatctccagggcatgtcagaggtattcatggcagcccctcccatcacaggcctggaggcctaggaggaaaacatggttttgtcggtcaggcccagggtccctgtgtgcagcctagggactttgtgccctgcatctcagccactccagccatggctgaaagaggccaacacagaactgaagtcatggcttcagagggtgtaagccccaagccttggcatcttccatgtggtattgagcctgcaagggcacagaagtcaagaattggggtttgtggacctctgcctagattttagaagatgtatggaaatgcctggatgcccaggcagaagtctgctgcaggg

SEQ ID NO: 927863 - DNA, 563 bp, Homo sapiens
tttgtatttttagtagagattgggtttcaccataatggccaggctggtctcgaactcctgacctcgtgatctgcccgccttggcctcccaaaatgctgggattacaggtgtgagccaccgcgcctagccctctacttcagtttttaaatttatgtcttctaaattttagcaatgttaaatcaagtttagcctaaagctgcctccttacatactttaagttcagcctccaggtttctctgtacatggtgaactataacctaaagggagttagactctagcctactcttgagccagttactgagttgtggtcaaaggtggccaactgttcaaactgtgttaaaataaggcagatgccaagctgtwaccaattcggctatttctgtacctcactttcgttttctgtatgtcactttcctttttcagtccataaatcttcctgcacgtggctgtgctggagtctctgggcctactctggctcagaaggctgccgaattcttgaatggttctttgctcaattaaactctgttaaatttaatttggctaaagttttcttttaatagcaa

SEQ ID NO: 927864 - DNA, 715 bp, Homo sapiens
tctaaaacaaacccttacatttatggtcagtttttcaacatgggtgccaagacaattcaacggggaaagaatagtcttttcaacagatggtgctgggacaactggatacgcatatgaaaaagaatgaagttggactcctacctcacaccatattcaaaaattaaattgawtcatggatttaaatataagagctaaaactacaaaattcttagaagaaaacataagagtaaatcttcgtgagccgtgggttaagcaatggtttcttagaaatgacacaaaaagcacaagcaaccaaagaaaaaaataaattggacgtaatcaaaattaagaatttttgtgcttcgaaggcacaatcaagaaaatggaggacaaccaatagaatgggagaaagtatctgcaaatcctctatctgataaaggacttgaatccagactatataaagaaattttacaactcgacaatttaaaaaatccgatttaaaaatgggcataggacttgaatagacattcctccaaggaagatactatagacagctaataaacacatgaaaagatgttcaacataattagtcattagggaaatgccaatcaagataccacctcacaccgactaggatggctataatcaaaaagacggacaacaacaagcactgacaaaaatatggaaaaactagaatcctcacatattgctcatggaatgtaaaatagtgtgggca

SEQ ID NO: 927865 - DNA, 597 bp, Homo sapiens
agcttctaaaaagagagtcagcctgtcctttgaagctttaagccaggcattaacttcactctagctttgacagccctagatgacatcttcttccaatacaaggctgattcatccacattgaaaacctgttgtttggtatagccaccttcatcgatcatctttgctagatcttctggacaatttgctacagcttctacatcagcacttgctgcttcatcttgtgcttttatggaggtggcttcttycctcaaacttcatgaaccaacctctgctagcttcaaactttccttctgcagctttctcacctctctcatagttcaaagaattgaagagcattagggccttcttctagagtaggcttggctaaaggagacttgtggctggtttcatcttctatccagagaactgaaactttctccatataagcaataaggctctttcactttatcactcgtgtattcactggagtagcacttttaatttccttcaaaacctttacattcacaacttggctggttggtgcaagaagcctagctttcagcctgtctcaacttttgacatatgttcctcactgaacttcaatcatttctagcatta

SEQ ID NO: 927866 - DNA, 643 bp, Homo sapiens
tagtaagtgtatattttacaactagacaaaaacttttttttttttgagatggagtctcgctctgttgcccaggctggagtgcagatggcacgatcttggctcactgcaacctctgcctcccgggttcaagagattctcatgcctcagcctcccgacttgctgggattacaggtacatgccaccgcactcggctaattttggtatagactgaaacatttttaaatgtataaatttcacactgcagtgcaatacaaggcagagaagcacttcggtgcagtgggaactccgcgtgggggccacatccccgggtttcacctccagttctgctgccaagacatttaagaaagtcatttaaccattagagctcatttctccaccttaaacatgaagacgctaagtccacttatggctataaaatctggagtaatcgatttyttaaacccatatatctacccaccctaaacacactgttcttacacacattgccaaactctccggctcatcgtcacacagcaaagccaaagacctcaaacttttctgccaggtgacagccctgctggaggcttctggtcaccttgcacattcccgtgtgtcctctggacagaacaccacgcaagcctacacgccccacaatccaggggag

SEQ ID NO: 927867 - DNA, 574 bp, Homo sapiens
aaatgttggaaatgtgtgaaacaacagggactctcttacattgtttgcaggactatacaaaggtacaaccactttgaaaaacaggccatgtcttttttttttttttttttttttttgagacggagtctcgctctgytgccaggctggagtgcagtggcgcaatcctggctcccggcaacctctgcctcccgggttcaagcgattctcctgcctcagcctcctgagtagctgagattacaggcatgcaccaccatgcctggctaatttttgtatttttagtagagacggggtttcaccatgttggccaggatggtctcaatctcttgaccttgtgatccacccaccttggcctccaaagtgctgggattacaggtgtgagccaccacgccaaaacaggccatttcttaaaaagttaaatgtttgtcgatcatgtgatccaaaaattcaactcctatgaatttatcaaaaagaaattaaaatatataactaaagccttgtacacaaatgttcatggcagctaaaaactgaaaacagcccagatgtccatcaatagaagtatgataaactatggtga

SEQ ID NO: 927868 - DNA, 574 bp, Homo sapiens
aaatgttggaaatgtgtgaaacaacagggactctcttacattgtttgcaggactatacaaaggtacaaccactttgaaaaacaggccatgtcttttttttttttttttttttttttgagacggagtctcgctctgttgccaggctggagtgcagtggcgcaatcctggctcccggcaacctctgcctcccgggttcaagcgattctcctgcctcagcctcctgagtagctgagattacaggcatgcaccaccatgcctggctaatttttgtatttttagtagagacrgggtttcaccatgttggccaggatggtctcaatctcttgaccttgtgatccacccaccttggcctccaaagtgctgggattacaggtgtgagccaccacgccaaaacaggccatttcttaaaaagttaaatgtttgtcgatcatgtgatccaaaaattcaactcctatgaatttatcaaaaagaaattaaaatatataactaaagccttgtacacaaatgttcatggcagctaaaaactgaaaacagcccagatgtccatcaatagaagtatgataaactatggtga

SEQ ID NO: 927869 - DNA, 613 bp, Homo sapiens
tggtggcacaaaaatggtgtttatcctttattacattatatactgttttctgagtatagactctaggggaaatattaagccttgtacagtactttttgtcacaataatatgacattacatattatcttcagagaatttatttgrttagtttttatttgttttggtttatgggtatatgccataattctttgatgtgtttattattatagaagataactagctctaaatttatataagtatatataaattatatataatatatattcatatagaaacatatgtaatttttatatataaaaatgtaaatttttattatgtagtttattataactgtgatttgtctaaatggagcttacgtaagttaaacattgactataagaacttactagaaatacaaactatcatcaaagaatacgacaaacacctccatgcaaataagctaaaaaaatctagaataaatggataaattcctggacacatacaccctcccaagactaaaccaggaagaagtcaaatccatgaatagaccaataataagttctgaaattgaagcagcaattaatagcctaccaaccaaaaacaaagcccaggaccagacgaattcacagcagaa

SEQ ID NO: 927870 - DNA, 613 bp, Homo sapiens
tggtggcacaaaaatggtgtttatcctttattacattatatactgttttctgagtatagactctaggggaaatattaagccttgtacagtactttttgtcacaataatatgacattacatattatcttcagagaatttatttgattagtttttatttgttttggtttatgggtatatgccataattctttgatgtgtttattattatagaagataactagctctaaatttatataagtatatataaattatatataatatatattcatatagaaacatatgtaatttttatatataaaaatgtaaatttttattatgtagtttattataactgtgatttgtctaaayggagcttacgtaagttaaacattgactataagaacttactagaaatacaaactatcatcaaagaatacgacaaacacctccatgcaaataagctaaaaaaatctagaataaatggataaattcctggacacatacaccctcccaagactaaaccaggaagaagtcaaatccatgaatagaccaataataagttctgaaattgaagcagcaattaatagcctaccaaccaaaaacaaagcccaggaccagacgaattcacagcagaa

SEQ ID NO: 927871 - DNA, 613 bp, Homo sapiens
tggtggcacaaaaatggtgtttatcctttattacattatatactgttttctgagtatagactctaggggaaatattaagccttgtacagtactttttgtcacaataatatgacattacatattatcttcagagaatttatttgattagtttttatttgttttggtttatgggtatatgccataattctttgatgtgtttattattatagaagataactagctctaaatttatataagtatatataaattatatataatatatattcatatagaaacatatgtaatttttatatataaaaatgtaaatttttattatgtagtttattataactgtgatttgtctaaatggagcttaygtaagttaaacattgactataagaacttactagaaatacaaactatcatcaaagaatacgacaaacacctccatgcaaataagctaaaaaaatctagaataaatggataaattcctggacacatacaccctcccaagactaaaccaggaagaagtcaaatccatgaatagaccaataataagttctgaaattgaagcagcaattaatagcctaccaaccaaaaacaaagcccaggaccagacgaattcacagcagaa

SEQ ID NO: 927872 - DNA, 606 bp, Homo sapiens
ggtggctacacatgaaggaaggcactttgagaaagtgggatctagactcctaaaaagaagaggccatattttttcctttgtggaccctacacagggtagaagaatctacttttattattagatattttttctacctaatttaagttatactcagaagcacaaaagcttgtttctagtttttatatgacacttctaaacttaatgtttattctggcttttatataaatgtcctaagcttagcatttgttgagaattactaagagaagtagaattaccttctggggaaattgaaaaatgacctttctgggcaaaaaagcagaagataaaaggattaataaacaaaagtccccagttccccaattcctctgactaatgttacaatcggaaagaatttaattcrtaaggtcaggctcttcagagaagtaaagaccagtgggtgagaacaaggacacctgggagtctatgaaagtggattccagtctcactgtggcatgatttatcctgatcaaagagcagaagccatgaaaagctttgaaaaatgattcacagtgccgagaagaacatacctgtgaatattccagttaaggcagtgcattttaaccagct

SEQ ID NO: 927873 - DNA, 661 bp, Homo sapiens
acgtcatcattaattagagggtgaccctggggcgattcacaggtctgaacccaggaatctttctgagcaagtctgcacaacgctgccttgcacggcttccttcccaacttaccacgggaggccggcccagggggcgagggcaaccggggcgagtcccggtcccggagggcgatggcgcagaaggcggggaacgggttcgggatggcccgggcgcccccttgccgcccccttgccgcctgctcactggcctcygctttgaacttgggcaaggtcccagggagggtactggccgagggagtcctggggtgggcgctcggtcccctcttccgattgctccgtgcgccccagacagaaagctgggcaaaatggacaggggagggcgcctccgccaggcacccaacgccccctccctcgcagccagccctgcggggcgccgggagggacgagcttagcgggaggggccggggcctgggttgaggaacctgctcttccgagcgcgcagggccgcccggcagtccccggcttagccgcgaggggcagggggaagccggcggagcacggccggcggaaaggggatcggggaggaaagtcggggaggcgaggtgggggcggtgggctgagcgggaacttaaaagaccgcggtggagaagatggggcgttc

SEQ ID NO: 927874 - DNA, 568 bp, Homo sapiens
caaaacaaaactcaacaacaaaaagaccaaaaacccaatttaaaagtgggcaaagaactttcataggtagttctccaaaggaggtatacaaatggctaacaagcactcaatgtcattagtcgttagggaaatgcaaatcaaaaccacratgagataccacttcaaactcaacggaatggatatactaatagtaaggaaataggtatttgtattggagccctcatatggtgttttagctgggactataagttgtgggagccctttggagcacggtcgagctgctcctccaaaagttaaacatggaatcatcatttgatctaatgacccgactcctaggtgtctgctcagaggaactgagaacttatgttcaaacaaaaacttgtacaagaatgttcaccacagcacaacttatagtagcccaaagtaggaagaacccaaatatccatcagcgggtaaataaatggatgcacaaacttatctatgcatgcaatggaatattgttcagccacaaagaaaaaggaagcactgacaatgccaccgcaccatgaatgttgaaaacatgatgcat

SEQ ID NO: 927875 - DNA, 568 bp, Homo sapiens
caaaacaaaactcaacaacaaaaagaccaaaaacccaatttaaaagtgggcaaagaactttcataggtagttctccaaaggaggtatacaaatggctaacaagcactcaatgtcattagtcgttagggaaatgcaaatcaaaaccacgatgagataccacttcaaactcaacggaatggatatactaatagtaaggaaataggtatttgtattggagccctcatatggtgttttagctgggactataagttgtgggagccctttggagcacggtcgrgctgctcctccaaaagttaaacatggaatcatcatttgatctaatgacccgactcctaggtgtctgctcagaggaactgagaacttatgttcaaacaaaaacttgtacaagaatgttcaccacagcacaacttatagtagcccaaagtaggaagaacccaaatatccatcagcgggtaaataaatggatgcacaaacttatctatgcatgcaatggaatattgttcagccacaaagaaaaaggaagcactgacaatgccaccgcaccatgaatgttgaaaacatgatgcat

SEQ ID NO: 927876 - DNA, 650 bp, Homo sapiens
aaattcttaataaagagactcaaggaatgagcaacagaaggagaagacaagccagcaaagggctcctgcatccctgggttttaagtctgtttccccggctctaggtctcggagagctcttctgctgggttatgcacacagtcagacaccacgtcgcgatgtttctggaaacaagcgtccacggatgggatggtggttctgtagattatcatgaaggaacaaccgcaaaacagtacacaaaccaatgaaaggtggatgggaaacctgaaggcctcagaagcttaagggacacatcaactgagctcaacgtcactgtcacaggatcccgaagattcacataaactggaaatgaatatgcagatgtggagaggcagggagggccaggatctaacccctcacacagaactcagagaggcagagaggaccaaggcggagagtcccatcaccctgaaatgggggctggggatgcgcagggagscactgctcatggaaacagcattctttttggggggtaatgaaattgttctgcaatctatggtcatggttgcacaagttcatgaaagtactaaaaatcactcaattgtacagtttaaaagagtaaatgttatgcaaattgtttctcaagaaacctgttatttaaaaataaaacat

SEQ ID NO: 927877 - DNA, 615 bp, Homo sapiens
tgtcgactacataagtccctatttttccccctgtggaattttttttcccccagaaaatcaaaaaactttcctttgttccctctgaggtagacagccagcccccaccgtgccgactttgggcagtgtccttctgcagccgacactcttgtggaaacacttggctctttagtgtgtcttcccctcaaccatagcctgcacagatggcctctttagggaggccaggcagcttggctggctgtgcctccagaagacagattgtccagtcaaagggtgatggagaaagtgtggggcgcccatgactgctgagacagcggtggctgttacagagtccttccycaccctaaagactgaagggtggtcctgaacactggatgagatggtaacaacttacccaaggacatgcattgcttgggtctggtttattttctaaaaagaaaacataatatgtgtctgggacaggtgtccttgaatgttgtcccaccctccaagtccagcaagatttttccaaaggtcccgtgcacttgcagagagaaaacaggggcctcaggaacacccatcctgaaagcaggggcctcaggaacccccatccatgtctgatgaatctccaccagactt

SEQ ID NO: 927878 - DNA, 509 bp, Homo sapiens
gccgactttgggcagtgtccttctgcagccgacactcttgtggaaacacttggctctttagtgtgtcttcccctcaaccatagcctgcacagatggcctctttagggaggccaggcagcttggctggctgtgcctccagaagacagattgtccagtcaaagggtgatggagaaagtgtggggcgcccatgactgctgagacagcggtggctgttacagagtccttccccaccctaaagactgaagggtggtcctgaacactggatgagatggtaacaacttacccaaggacatgcattgcttgggtctggtttattttctaaaaagaaaacataatatgtgtctgggacaggtgtccttgaatgytgtcccaccctccaagtccagcaagatttttccaaaggtcccgtgcacttgcagagagaaaacaggggcctcaggaacacccatcctgaaagcaggggcctcaggaacccccatccatgtctgatgaatctccaccagacttgc

SEQ ID NO: 927879 - DNA, 771 bp, Homo sapiens
tgtgaaaggggttgagttcttgatttgattcttggcttggtcgctattggtgtatagcagagctactgatttgtttatattaattttgtaccgtgtaactttgctgaattgatttaccatttctaggagctttttggatgaggctttaagggttttctaggtatacaatcatgtcatcagcaaatagcgacactttgacttcctcattaccactttggatgycttttatttctttctcttgtctgattgctctggctaggactcccagagtactatgtcgaacagaagtgatgaaagtgggcatccttgtcctgctctggttctcagggggaatgctttcaagttttccctgttcaatataatgttggctgtgggtttgtcatagatggcttttattgccttaagatatgtcccttctatgccaattttgctgagggttttaatcataaaggatcctgaattttgtcaaatgctttttctgtgtctattaagatgaatatgtgacttttatttttaaatgctgttcatgttgtgtattacatattattgacttacgtatgttaaaccactccctgcattcttgatttgaaactcacttgatcatggtggattatctttttgatatgctgtgggattctgttagctagtacttagctagtattctgttagctagtattccctgttttggtcttagggtgatactggcttcacagaatgatttagggatgattacctctttctctctcttggaagagtgtcactaggattggt

SEQ ID NO: 927880 - DNA, 646 bp, Homo sapiens
atttcatcatgttggtgcaaaagtaactgcggtttttgccatgactttcggtggcaaagactgcagctacttttgcaccccaacttaatagaacagacacagagaagacaggtaaataagcagtgcagtttcttgggaaagctgattttaattgaaaaagcagaggaaaccccagacatagcacagttttaggctttagctctaccgttctcacaagccttctgtccatcagggccattagtgcctcagttctactggaagtagacctcaagctccttcccacccctacaagccacccatcagtgtgagctgagagatcagccagggrgtgtgggagcaagcctcttgttcccaagagaaattgttctaaatgttggttagtaagcaggagagtgaaaagacagaaggaaactgcatacaggggttgaacacctccagccaaagaaggtgaagtgtaaaagtatcttaccactggggaatgtacctgagccatgtggaaactagatatgttattgctggcaggtgcccaagttactggcagtgaatccgtatgagtctgcagcaacctcaattcttgcttccccggaagaaagaattcgactgaggggcataaagcagaagacaccaaggcaagttttagagcaga

SEQ ID NO: 927881 - DNA, 607 bp, Homo sapiens
gcctgcaggtgtccctaggcacgagcagcctgggcatcatcgatggtggcaggaggcagacaggctcctgggcaaaaaagggtgtgtccccaggagggcctgaaggctggggactgggttgccactcccgcagagtggagtccatttgtcctgccrttttctcacccacccatggctgcccatgaaccaatcagcatgttttttctcctctctgaggcccataagaaccccaggcttggtcgggtgcagtggctcacacctgtaaccccagaactttgggaagctgaggtggatggttcacgagatcaggagttcaagaccagcctggccaacatagtgagacccctactaacaatacaaaaattagctgggcctgatggtgtgcacctgtattcccagctacttgggaggctgaggcaggagaatcgcttgaaccggagaggcagaggttgtggtgagctgagatcatgccagtgcactccagtctgggcaacagagcaagtgagactccgtctcagaaacaaaaaaacaaaaaaacccaggcttagctgcagagaggaactaccctctccactgagagctgaacactcattgggacagccaactg

SEQ ID NO: 927882 - DNA, 637 bp, Homo sapiens
acatcacaattttaaattatttatattattgttaaagttttactgtatattatatgtaaatctaggcagaatatgcaaacagtacactgtcttttctttacagtggttactagatggacataaaatgctggaattgaaaatagttttatttttatacaacatttgctaaaaatatatattaaaaagtaaatgtgggccgtgcgcagtggctcacgcctataatctcagcactttgagaggccgaagagggtggatcacgaggtcaggagttcaagaccagcatgaccaacatggtgaaacccccctctctactaaaaatacaaaaattagccaggcgtggtggtgcgcccctgtaatcccaccttctgtggaggctgaggcaggagaatcacttgaactggggaggaggaggttgcrgtgagccgagatcacgccactgcactccagcctgggcaacaagagtgaaattccttctcaaaaaaaaaaaaaaaaaaggtaaatgtttagcttttatttacttattatttttatatattttgcctgtttatatgtttatttgaatatttttcaaaaacatgcttttttaaaacaaaaattatctcatttttgtagttttaattgctattttaaatacaaa

SEQ ID NO: 927883 - DNA, 749 bp, Homo sapiens
ggtgcagcttcagcagacttaaatgttcttgcctgccagctctgaagagagcagcagatctcccagcacagtgcttgagcactgctaagggacagactgcctcctcaagtgggtccctgaccccccgtgcctcctgactgggagacaacttccagcagggggcgatagacaccttatacagcagagctgtggctggcatctggcaggtgcccctctgggatgaagctgccggagcaaggagcaggcaggaatttttgctgttctgcagcctccgctggtgataaccaggcaaacagggtctggagtggaccttcagcaaactccagcagacctacagaggaggagcctgactgttacaaggaaaactaacaaacagaaagcaatagctttcaacatcaacaaaaaggatgcccacccaaaaactccatccaaaggtcaacaacatcaaagaacaaaggtagacaaatccatgaatatgaggaaaaaccagcacaaaaagsctgagaattcaaaaacacagaatgcctctcctcctccaaagaatcacaactccttgccagcaagggaacaaaactggacagagaatgagtctgatgaactgacagaagtaggcttcagaaggagggtaataacaaactcctctgaactaaaggagcactttctaacccaatacaaggaagctaagaaccttgataaaaggttataggaactgctaactagaacaaccagtttagagaagaacataaatg

SEQ ID NO: 927884 - DNA, 625 bp, Homo sapiens
aaatcaaaaaagaagcatcagacttcatctgcactatagaccaagtgggcataatagatccttacagaacatcttcattcagtggctgctgactacacattttttcctcagcacatggattactttgtaggataaaccttatattagaacacaaaataagtctcaaaacattttttaaaaattgaaataatatcaagcatcttttttaaggatgtgtgtgtgtgtgtgtgtgtgtgtgtgtgtgtgcgcgcgtgtgcgtgtgtgtgtgtgtgtatgwgtgcgttttgtagagacaaggtttctccatgttgcccaggccggtctcaaactcctgggttcaagtgatccatcctcctcaccctcccaaagtgcttggattacaggtgtgagccactatgcccagcctaatattgagtatcttcactgaccacaatggaatataactagaaatcattaagaagagaaattttggaaactgtacaaactcatggaaattaatcaatatgctcctaaatgaccagtgtgtccataaagaaattaaaaagaaaatttaaaaatttcttgaaacaaatgatagtggaaacacaacataacaaaacctatgggacaaagcaaaagcagttct

SEQ ID NO: 927885 - DNA, 648 bp, Homo sapiens
aaaaatattcccaaagacacaggagccaactgaaagagttcccaatggccaaagctgggacaagttgggtaagtaacattaaattatagcctgaagtataaaatagttatccacgaatccacactgctataaatgaataaataaataagtagggagaaagaaacaaaatccacgcagaattcctaattatttatggagatgttgcacctgataaaaggtagaacatagctacccattccttacatatgagctatgcatagtgacgtcgtcctgaagaatataatatggaaaagaggatygggggattaactttatagtagagaaaccctgacaaatactgcctcaggcaggtagtgaaggtcaatatcaacagtggaagtcgtgttggcagtatgtacccttgacaagatgtgatgaaagtggcaccttacctctgaggttttcctcccaaaaactcacagccccaaccttatcatgaaaaaaaaaaaatcagaactgacaaatcccaattgacaacattctaccaaatacttgactagtattcctgaaaactgtcaacatcataaaaagcaaagaatgcctgagaaactgtcacagccaagaggagcttcaggagacatgactactctatgtaatgtggtaccctgg

SEQ ID NO: 927886 - DNA, 635 bp, Homo sapiens
ttactctaaaattgaccacacaactggaagtaatacactcctcagcaaatgcaaaagaatggaaatcataacaaacagtctctcggaccacactgcaatcaaattagaattcaggattaagaaggtcactcaaaactgcacaactacatggaaactgaacaacctgctcttgaatgactacygggtaaataacaaaattaaggcataaataaataagttatttgaaccaataggaacaaagacacaatgtaccagaatctctgggacacagccaaagcagtgtttagagagaaatttgtagcactaaatgcccaccagagaaagcgggaaagatctaaaatcaacaccctaacatcacaattaaaagaactagagaaccaagagcaaacaaattcgaaagatagcagaagacaagaaataacaaagatcagagcagaactgaaggagatagagacatgaacaacccttcaaaaaatcaatgaatccaggagctggttttttgaagagatcaacaaaatagatggaccactagccagacaaataaagaagaaaagagagaagaatcaaatagatacaataaaaaatgagaaaggggatatcaccactgatcccacagaaatacaaactaccatcag

SEQ ID NO: 927887 - DNA, 576 bp, Homo sapiens
atgctcaataaaagtgacaacacttatgccttcgttctaccttactgctcactgaatgcttataattactgtgtaatggaataataccaatagaatgctaattgcccagagacatttagtgactcttaacactccagagataggaccatttttatattaaaaaatcaaatagcactctggctaacatatcaagctgacatccaggagaattagatctggttccatgagtgcatgccctttgcaccagttacaattgtaacccttattggacatctacacaataggcatttattgagtatatactgtgtgttcatccatccagccattcatccatcaatctagccattcatccattcatcatttattcaaaaaaacactttcagagtgcctgcatatgtcaggcagtggtctakgaagtggatatacactgaagaacaacacacgctttccctacttttatggagttacattctagtgttgggaaccactaagactaaacataaggaaataacatgatttctgggtttctggcttctgtggcaaacactggaaataaaatcttacacgtgtaggggg

SEQ ID NO: 927888 - DNA, 576 bp, Homo sapiens
atgctcaataaaagtgacaacacttatgccttcgttctaccttactgctcactgaatgcttataattactgtgtaatggaataataccaatagaatgctaattgcccagagacatttagtgactcttaacactccagagataggaccatttttatattaaaaaatcaaatagcactctggctaacatatcaagctgacatccaggagaattagatctggttccatgagtgcatgccctttgcaccagttacaattgtaacccttattggacatctacacaataggcatttattgagtatatactgtgtgttcatccatccagccattcatccatcaatctagccattcatccattcatcatttattcaaaaaaacactttcagagtgcctgcatatgtcaggcagtggtctatgaagtggatatacamtgaagaacaacacacgctttccctacttttatggagttacattctagtgttgggaaccactaagactaaacataaggaaataacatgatttctgggtttctggcttctgtggcaaacactggaaataaaatcttacacgtgtaggggg

SEQ ID NO: 927889 - DNA, 692 bp, Homo sapiens
gagattgcataattccctcactcgttctggatttattagaactcagagagctgaggtgggagccttaatattggccttggaaaactatttccactcagctcatcaatattgttagtgactctgcttactctgtttatttattgcagaacccagagacagccctcattaactccactctggagcccaccctgcgtgtactttttctytgatttcagcaattgctagatcaacgtacacatcctatttttattacacacatttgggcccacatctcactgcctggcccattggtttatgtcgatgatcaagcaaacctacaagttatgacatcagtgcttggtcaagccacccagtcacatcaatttttccaccaaaactggagaaacttacctaacaatttcaacttacccagagactaaacaaattagcctgcaatgcccagattgccagctcacaagcatgtcccctccttcaagaggtgttaaccctagaggactagaaccaaatccgttatggcaaacagatgttacacatgtccctgaatttggaaaacttaaatatgtacatgtatccattgataccaattctcacttaattagctctcatgcttttcctggagagttcacccaatatgtcattaaacatcttcttttaacttttgcatttatggggcagcccacaaaaattaaatc

SEQ ID NO: 927890 - DNA, 630 bp, Homo sapiens
aatttctccccagaaaaaggatttttctttttggccccatggacaggctgcaaattttccaaacttacactctgcttcaattttaaacataagttccaatttcagactatctctttgtgaacacatacgactatatactttcagaaacagccaggttacatattaaatgttttgcttcttagaaatttttttttgccagatacctgaaattatttctctcaagttcaaagttacacagatgtctagggcagggaaaaaatgccaccagttcccttgctaaagcatagcaagagtgatttttactccagttctcagtaagtttctcatttccctctgtgaccacctcaacttggacttcattgtccatatcactatcagcattttggtcacaaccattcaacaagtmtctaggaagttccaaactttcttacatctccctgtcttcctctgagccctccaaactattccaacctctgccatttacccagatccaaaggtgattccacattttcaggtatctttatagcaatatctcactttcaatacaattgtctgtatagctcattcttgaattgctgtaaaaaactacctaaacctgtgagactgggtaatttataaagaaaaaaggtt

SEQ ID NO: 927891 - DNA, 722 bp, Homo sapiens
cagagccacaggggctgagctgcccaaggccatgggagcccacctcttgtatcagcatgacctggatgtgagacatggagtgaaaggacatcattttggaactttaagaggtaatgactacccagccagattttagactttcatgggacctgtagcccctttgttaaggctaatttctccaatctgaaacaggagcatttacccaatgcctgtacccacccccrctcaattatatcttgtaagtaactaactggcttttgattttacaggctcttaggtagaagagacttgccttgtctcagatagacttggacttttgggttaacgctggaatgaattaagactttaggaaactgttaggaaggcatgattggttttaaaatgtgaaagaaacatgagatttggaaggggccaggggcagaatgatatggttaggctttgtgtccccacctaaatctcatcttgaatcataatccccataatccccaaaatccccatgtgccaagggagagaccaggtggaggtaagtgaatcacggaagcagttttccacattgctgttctcattatagtgagttctcatgagatctggtggttttataagcatttggttgtttatcctgtgttcattctccttcctgccacctcgtgaagaaggtgccttgcttcccctttaccttcaactatgattataagtttcccagccacaatgaactgtgaatc

SEQ ID NO: 927892 - DNA, 624 bp, Homo sapiens
ctgatctttcaggcaggcatgagctgcagcagtttttacatattctggcggcacctggaactccagtgagacaggagaattgtccactcccgtggaaagagggctgaagccagggagtcaaatggcctcgctcaatggtttctactcccacagaaccgcacaagctaagacccactggcttggaatccctgctggccaacacagcagactggagtccgctaagattaccgagttcctggggcagggaagaggggcaacggccagtactgtgactctagttggtggttttcrcccagccagtgctggggagaccaggaggtttaaactggatggtactcaccacagcagagcacagcacagcacagtggctgtggcagattgtggccagactgcttgtttaggtggaacccgaatccatccctcctcacaaggcagggcctctctacagaaatcccagcaactccagctagtggcttgcagacagaactctcatctacctgggacagaaccctgggggttggtgtgtgggtggccatggtctcacattcagcagactttatctttcctgtctgctggctatgaagagtatgggtgatccagatgagggggattcccccagcacag

SEQ ID NO: 927893 - DNA, 689 bp, Homo sapiens
gtgtgttactccagcccatttattgactgacccaaaaggctgccagttttgagtgaggtccagaacaggagaaggcttggcaacaggtccaggctgctgtgcaagctgctctaccacttgggccatatgaccaacagatccaatggtgcttgagatgtcagtggcagataagggtgctgtttggagcctctggcaggctcccagaggtgaatcacarcgaaggcctcaaggattttggagcaaggcctcttctgcagataactactgtctatcttctgccatcttctgcagataattactctccttttgagagacagctcttggcctgttactgggcttcggtggaaactgaacatttgactatgggtcatcaagtcaccagatgacctgaacggcctataaggaactgggtgctttctgacgatctagccataaagtgggtcatgcacagcagcattccatcatcaaatggaggtggtatatacctgatcaggctcgaacaggtcctgaaggcacaagtaagttacatgaagaagtagctcaaatgcccatggtctccattcctgtcaccttgctttctcttccccagcctgcactgatggccacatagagagttccccataattagttgaaagaggaagagaagactagagcctggttcacagaaggttctacatgatatgcaggca

SEQ ID NO: 927894 - DNA, 689 bp, Homo sapiens
gtgtgttactccagcccatttattgactgacccaaaaggctgccagttttgagtgaggtccagaacaggagaaggcttggcaacaggtccaggctgctgtgcaagctgctctaccacttgggccatatgaccaacagatccaatggtgcttgagatgtcagtggcagataagggtgctgtttggagcctctggcaggctcccagaggtgaatcacaacgaaggcctcaaggattttggagcaaggcctcttctgcagataactactgtctatcttctgccatcttctgcagataattactctccttttgagagacagctcttggcctgttactgggcttcggtggaaactgaacatttgactatgggtcatcaagtcaccagatgacctgaacggcctataaggaactgggtgctttctgacgatctagccataaagtgggtcatgcacagcagcattccatcatcaaatggaggtggtatatacctgatcaggctcgaacaggtcctgaaggcacaagtaasttacatgaagaagtagctcaaatgcccatggtctccattcctgtcaccttgctttctcttccccagcctgcactgatggccacatagagagttccccataattagttgaaagaggaagagaagactagagcctggttcacagaaggttctacatgatatgcaggca

SEQ ID NO: 927895 - DNA, 597 bp, Homo sapiens
ttgtatttttagtagagacagggtttcgccacattggttaagctggtctcgaactcctgacatcaggtgatccacccacctcagcctcccaaagtgctgggattacaggtgtgaaccaccacactcagccacaagtggattttttttttttttttttttttgagacagggcctctcactgttgcccgggctggagtgcagtggtgccatgtcagctcactgcaagctctgcttcctgggttcacgcctttytcctgcctcagcctcccgagtagctgggactacagggtgcccgccaccacgcccggctaattttttgtatttttagtagagacagggtttcactgtgttatccaggatggtcttgatctcctcaccttgtgatccgcccaccttggcctcccaaaatgctgggattacaggcgtgagccaccacgcccggcccacaagtgggtttttaaaaggaaagaagaggcagttcctgagttatttaccaataatttacattaacataacataagctgttgattggctatccattattaagctataggatatgggttataatgtctggtgcagcaccagtaggctaattttc

SEQ ID NO: 927896 - DNA, 597 bp, Homo sapiens
ttgtatttttagtagagacagggtttcgccacattggttaagctggtctcgaactcctgacatcaggtgatccacccacctcagcctcccaaagtgctgggattacaggtgtgaaccaccacactcagccacaagtggattttttttttttttttttttttgagacagggcctctcactgttgcccgggctggagtgcagtggtgccatgtcagctcactgcaagctctgcttcctgggttcacgcctttttcctgcctcagcctcccgagtagctgggactacagggtgcccgccaccacgcccggctaattttttgtatttttagtagagacagggtttcactgtgttakccaggatggtcttgatctcctcaccttgtgatccgcccaccttggcctcccaaaatgctgggattacaggcgtgagccaccacgcccggcccacaagtgggtttttaaaaggaaagaagaggcagttcctgagttatttaccaataatttacattaacataacataagctgttgattggctatccattattaagctataggatatgggttataatgtctggtgcagcaccagtaggctaattttc

SEQ ID NO: 927897 - DNA, 652 bp, Homo sapiens
ccctagcagatcttcagagggaaggcattgagagcagatggaggaaagatacagaagcggggctgaagaggaaggaagctgagaaccatgtatggggctaccgtgcataccatgacttgttcctggtcccagtgactctgagggaatgggttaattgaataggcaaggaacagcccgctcttgccacaggcctctggaatcccagcagaaggaaagcccatgaccaccacagacacttgagctggcaaygagagctgcttagagaaatggtaggggcagaactccagccagtgcagagcccagaggatttggtgcgggaacatctgtagtggagcatgagcaggaatgcctgttcccctaggctcaacttgctcccaaaggagaatttatgaagaactgtcagacatgaactctgcagggtggacctgcccgagagggagctggtctgatctgagcatccttcagtctgctggcctctcctgaggccccagcctggatgcacctgctttcagcgcagcccagaggggaggtacctcctggggcctgcatgacagtgcctgtgctggcagacagtgtctgaccagcagagagctccagcacagcggcccacatggacatgtgccaggctgtccatgccctccccccacaaact

SEQ ID NO: 927898 - DNA, 652 bp, Homo sapiens
ccctagcagatcttcagagggaaggcattgagagcagatggaggaaagatacagaagcggggctgaagaggaaggaagctgagaaccatgtatggggctaccgtgcataccatgacttgttcctggtcccagtgactctgagggaatgggttaattgaataggcaaggaacagcccgctcttgccacaggcctctggaatcccagcagaaggaaagcccatgaccaccacagacacttgagctggcaatgagagctgcttagagaaatggtaggggcagaactccagccagtgcagagcccagaggatttggtgcgggaacatctgtagtggagcatgagcaggaatgcctgttcccctaggctcaacttgctcccaraggagaatttatgaagaactgtcagacatgaactctgcagggtggacctgcccgagagggagctggtctgatctgagcatccttcagtctgctggcctctcctgaggccccagcctggatgcacctgctttcagcgcagcccagaggggaggtacctcctggggcctgcatgacagtgcctgtgctggcagacagtgtctgaccagcagagagctccagcacagcggcccacatggacatgtgccaggctgtccatgccctccccccacaaact

SEQ ID NO: 927899 - DNA, 617 bp, Homo sapiens
agggggagaagggggtagtgccacacacttttaaaccatcagatctcatgagaactcactcatgagaacagcaagggggatatctcgtcctcatgatccaatcaccttccactaggtctctccctcaacattggggattacaattcaacatgagatttgtgtggagacacagagccaaaccatgtcattccaccccagcccctcccaaatctcatgtccttctcaaatttcaaaacacaatcatgccttcccaacagtcccccagactgttaactcatttcagtattaattcaaatgtccaagtccaaagtctcatgtgagacaaggcaagttgctttggcctacgagcctgtaaaataaaaaacaagttaagctactctcaagatacaatgaggayacaggcattgtgtaaatagacccattccaagagagagaaatcagccaaaacaaaggggctacaggccccatgtaaatccaaaaccagcagggcagtcactaaatcttaaagcttcaaaatgatcttctttgactccatgtctcacatccaggccacactgatgtaacggatggtctcccaagaccttgagcagctttgcccctgtggcactgcagggtac

SEQ ID NO: 927900 - DNA, 748 bp, Homo sapiens
catgaccttatttagaaagatggaccaggcacgatggctcatgcctataatcccagcactttggaaggcctaggcgggtggatcacttgaggtcaggagttcaagaccagcctgaccaacatggtaaaaccccatctctactaaaaatacaaaaattagctgggtgtggtggcatgcatctgtaatccctgctactcgggaggctgaggcaggagaatcgtttgaaccctggaacctctgcagtgagccgtaatggcaccattgtgccccagcttgggtgacagagcgagactctgtctcaaaaaaaaaaaagaaaaaagaaagaaagaaaaataggggctttamagatgttcaagttaaaatgaggtaggtcattagggtgggccctaaaccattatgacttatgtctagatttttaaaaggtggagaaatttgtatacagacagatactagtaagggagaaggccatctacaagccaaggaatttgtatacagacagatactagtaatgtcttccccttactagtagggagaaggccgtctacaagccaacgaatgcataaggctgggagaatctaggagagaggcatggaatgaattctccctcacagtcctcagaagtttccaacccaccagatgcctccatttcagactttcagcctccagaactgttgagacaatacatttctgttgtttaaaccacccagtttccagtgttttgtgatggcacactagcaaattattgcag

SEQ ID NO: 927901 - DNA, 803 bp, Homo sapiens
atggcactagcatctgtttctaatgaggacttcaggctgcttccagtcatgatggaaggggagctatcatgtgcagagatccaatggcaagagaggaaagcaaagaaaaagggggagggaggtgccaggttctttttaacaaccagctcttccgtaactaatagagtgagaatgcactcatttacagaggatggcattaagccattcattaagcaatccatctccatgacccaaatacctcccattagactccacttccgtccaacattgaggatcagatttcaacatgaggtgcaggggacaaacatccaaactatacagacagtttgcaaatactctctctctctttctgtgggttatctcttcacttgattgtttcctttgctgtgcagaaactttttagcttgatgtaatcccagttgtctatttttgctytggttgtctgtgcttttgaggtcttacacaaaaaatctttggccagaccagtggcctggagcattgtctcaatgttttcttctagtagtctcatagtttctggacttagatttaaatctgtaacccatttggatttgatttttgtgtatggtgagagaaaggggtctcatttcattcttctgcatatagttctcctgtttttccagcaccatttattaaaagagtgtcctttccccattttatgttcttggcacttttgtcaaagatgagttggttgtaaatgtgtggatttaaatctgggttctctattctatttcattggtctatatgcctgtttttatgccagtaccaagctgttttggttacta

SEQ ID NO: 927902 - DNA, 746 bp, Homo sapiens
agtggcacaaggagccgaaagtggccaggtagcagtcaacttgcagttaagtggaatcattatgtctcttggtgaaagcattcttccctctggaactaagacctctaggctagtaaagcataaagtcatgggaacaggaagccaaaattttgctagtggtattactaggggtaatagtgtaccattctcatttccatcccttgattcctgggcccttgaatcctggctatcagagaaaccatgccatgtattggatactgattaagagcatgtacggacttctgaagaaccttccccagccctgcaaggtattgccacctagctggtgctataactaagtcttcaaagggctattccattgttcgatcaatccacctggttctggatggtagggaacatagtaaggccagtgaattccgtgagcatgggcccattgctatacttctttgctgtgaagtgagttctttggtcagaagcaacggtgtgtggaatactatgacrgtagataaggtgaatctgtaagtccacagatggtggttttagtagaatcactgcatgcagggaaagcaaatccatatctagatagagtgtctgttccagtgagaacaaaatataaccccttccttaatggaagcagctcactgtaattaacctgccaccgggtagcttcctgatcaccctggggaatggtgccacatcagggactcattgttagtctctgctgctggcagattgggtactcggca

SEQ ID NO: 927903 - DNA, 756 bp, Homo sapiens
gcatgcagactgagaggtgcaattcaaactaaacatcctcttagggaaccaatcagtaatgattccatgggaatcgttgtgcagcctccctgcctgttctgcaatgcaatctttccaaacaagtacgttcatttcttctgaccaggtccaatcctgtttacaaataggtttttgagggtggtattcctcaagtatagaagcagatttgttatggcaaatactgagaccagaaagcatgtgtaagtgtktcatagagtgattacatccggtcattattgccagtcaagatttgatagcgagggggtaggcaactagtggcctttcccaaacagataggtggatgttcaaatcctaaagaaatattcataacagttccttcctcatgtgggtgagatgggcctctatcatctgtaggaccgagcatccaagagttatcattagtgtatacctccattggggggtccagccaagttacaggctgtagaagtggtggaaaaggtaaatatgcccaataagtataatcgttctctgtgtcagcccttgctaaaggaatactcatggcaatggtgatcaccgctaccatggctatcattaaattactcattgtgactggttgtcctgctttcctcaggttttcttctgccatctgtgacagcttcttgatctgtccccaggtaggtggctgtgttcaacgggtgttggtcgtgacagttggggtcctccttagcatcaacttggacaatgctgccactgata

SEQ ID NO: 927904 - DNA, 628 bp, Homo sapiens
atacaatttgtctttctagataccctaattttcttttatgtccctccataaagcttatagtatgtgcatatagttcttaacacatttcttgatatatttaagctgtacctggtaggcttctggtgctctaattagatctggggatagaactccaaatatctataatggatagcatgtgtgtagactcttttctttaaatatcactatgtcttatccaggatttttatagaagttggataaaagttaattgcacagggttgtggattgctaattctccatattaacgattcatatgctttataaatcagaattgttattttaacatgaaagtgaagaggcctaacacatgtgcttaccttaattaaaagcacactccatttccacgtggcatckggtactgggcaagataagcaaagatactctgcagaaaggaacttcggatcaggccaacacttgttcaagtgtgttcctgagaccctgaatttccatatgatacaccttattaaattagtttgagtctaaaatttttcagattcagtattatcagcacctgaacctgaaaagatttaaaaaaaaatcacgaactgtgctggaagcccttcctgggcttttatgccagctccatctt

SEQ ID NO: 927905 - DNA, 625 bp, Homo sapiens
agggctacagtgaaagactcctgtttgagaaaagcagggggaaaataaaggagactctctgtcttgcacctcaggtattagctcagctacagagggtagagcaacaagcagacttctgaggtcactgagtccaggcctaggctcttggtcagcatttctggacctgccctgagccaaaaggtgagtcccagagctggcagcattggtcacaagctgackgaagagcccttaggctttaagtatcagtgatggcctggcagaacccccccataagccagtggtgatggcagccacagggagaggatcttctgcccgtggaaaggggagggaagagtgggaagcaacttgtcttgtgggtcacgtgccaccttaaccacagtagaacaaaacaccaggtaaatatctaaggttttgacttcaatccctggtgttctcagacagcatctatgaaccaatctggggcctaggggaactcaccaccctggagggaagggcacaaacctggctggctttgccacctgctgactgcagagtcctagggcctggagtaaacttaggtggtagccaggtagtggttacaccgggccttgggcaagatcgagtgctatcctggcttcgggtctga

SEQ ID NO: 927906 - DNA, 625 bp, Homo sapiens
agggctacagtgaaagactcctgtttgagaaaagcagggggaaaataaaggagactctctgtcttgcacctcaggtattagctcagctacagagggtagagcaacaagcagacttctgaggtcactgagtccaggcctaggctcttggtcagcatttctggacctgccctgagccaaaaggtgagtcccagagctggcagcattggtcacaagctgacggaagagcccttaggctttaagtatcagtgatggcctggcagaacccccmcataagccagtggtgatggcagccacagggagaggatcttctgcccgtggaaaggggagggaagagtgggaagcaacttgtcttgtgggtcacgtgccaccttaaccacagtagaacaaaacaccaggtaaatatctaaggttttgacttcaatccctggtgttctcagacagcatctatgaaccaatctggggcctaggggaactcaccaccctggagggaagggcacaaacctggctggctttgccacctgctgactgcagagtcctagggcctggagtaaacttaggtggtagccaggtagtggttacaccgggccttgggcaagatcgagtgctatcctggcttcgggtctga

SEQ ID NO: 927907 - DNA, 705 bp, Homo sapiens
catggactcacaggcagcacatgatcagatggtactttcttccctaaggagctttgagatcactgggtaaacacccatctgcctgtgacagtttgcatatgtgcctgctcagtggatggggaaggaataggattggacccatgagcctcagaagtagaagaacaaagcaaaatgtttcggaatcaatagaacctagatcgctggctccatcatgcctggcctggcccttcatggatcctgaaatttagaaccttttcctacatatcccccatgattcctccttatgagctcaaatctcaatcacattggtcaactctttgtttgcctgattctctttccttccaggtcttagctagtgtgtttgtttctctttctattttcacatttccaggctacaatcatcttccaagtcttaggtcatctgctacttccaaatggaaacaatgcctcctctctctaaccacgtagtgccttaaacttctttaaagatgcttatcrtgtgctactttgtgttccaattgtaacctgagggaattctggtgtcactagagggagtgctaaacaaacaaacaaacaaataggaagtctgactccagagatagatgtttgtatttcttggtgcttccaatgcttccaccccacaccatgacccattctgcaccacttccctgaaaacatacactttttccctctcagtattttgga

SEQ ID NO: 927908 - DNA, 561 bp, Homo sapiens
attaaaatcattggcaagctaagagaaaatgtgggctcaagcccagggtggctacacgctctctttaatgaattccaggcttctttatggagttggttaactcctttatgaagccccttcttgcttataggtcatatattagtgtttgaaccttgtatcctcaatagtataacttgaattgtttcctcttgtctagaagcaatcaaactccaaatggtgcygcaaacagaaccacacatggacacaccattcttccaaagacccttatatcaactccaggaggaacgctagctgtccttcactcaataccccctttcagcaggaagtatccagaaggagtcatcgtccaagaccccctaacaggagttagagttacagctcctgaggggggaataatataggagtaaaaaagtaattatttaggcagatagtgagggtacaggagtccttggtaaggcttttcatttaataaaaagcagcccccaaaccatttcttttctagcagaaaacagcctgaaaagtcaggctgcaagcatagacaagcaagctggaagcttgcat

SEQ ID NO: 927909 - DNA, 656 bp, Homo sapiens
actgtgttgtttgggacagtgatggcaccagctggatatgattctcaggttcccttgaaattagggatggccttatgatagttcttgtccatcaggcataagcagaaatgttggccatttgggaaaagcttcagttttatcaggtaggttctatatatatgtgtgtgtgtgtgtgtgtgtgtgtatatatatagatacacatttatatacacatatatgtgtgtgtatatatatatagatacacatttatatacacatatatrtgtgtgtatatatatatagatacacatttatatacacatatatatgtgtgtatatatatagaacctatctgtattttttatatatatataacctatcattttatatatataacctatcattttatatatatatatgtatgtatgtatgtatatacatgtaaaatatcattctacctgaaagaggaacttgatgtataaagctatttatctcctgatttttatggaaaataaatcaacctctaaattcctcacttgtttatttcactgtgctgagagttctctgctatatgacgtctaatgcaaatatcaaatacacacatattaagaaatagatgggtggggtgcggttagtcatgcctttaatcctagtactctgagaggcagaggaggaag

SEQ ID NO: 927910 - DNA, 553 bp, Homo sapiens
cccgtaatcccagatactccggaggctgaggtgcgagaattgcttgaaccagggaagtggaggttgcagtgagccaagatcacaccactgtactccagcctgggacagagtaagactctgtctcaaaaagcaaaacaaaacaaaaaaaaagaagttatcctgagaatagaatagaaggataacggtgtttgtgtgaatgttcagccaagggtgcacacgtggcagagaaaatttttaaagatcaggtatacaagatcatccattttgtgaacaccagttaagtccacagccacttgaatgcctgctcaataggcccatttacaaatggccatggcaactgggcttgagtctgtgcatgcaagtcaacamggtaagactttctacaccaagattaatctggctattgttacggtcagtgctcaacctgcaaggaacagaggccaacgagttcccattatagcaccattccttgggagattcagtcaactgtctggtggcaggatgattacaccttcacgattcatcatgaaagatatagtaacagataacctgc

SEQ ID NO: 927911 - DNA, 593 bp, Homo sapiens
aaagtacagaagcccacagcaccacccagtcagtgagtggcgcttgagagtaggaacacagcccttggcacagagaagctagaatttacctagcaggccctgatatttgtgatttggaaagatttccttttatgaacatttggcttccctgggagttaaccttggtgcttgactcagatcctggccttcggtagaactcagtagctaagttctgcccttgttcctggaaaacttctttttttttttttttttyttttttttgagatggtgtctcactgtgtcacccaggctggagtgcagtggcgcaatctcggctcactgcaatctctgtctcctgggttgaagtgattctcctgcctcagcctcctgagtagctgggattacaggcacgtgccaccatgcccagatagtttttgtatttttagtagagacagggtatctccatgttggccaggctggtttcaaactcctgacctcaagtgatccgcctaccttggcctcccaaagtgctggaattacaagcatgagccactgcgcctggcctggaacaatttcttaccaactttttctaacattttggttatggctcctgc

SEQ ID NO: 927912 - DNA, 593 bp, Homo sapiens
aaagtacagaagcccacagcaccacccagtcagtgagtggcgcttgagagtaggaacacagcccttggcacagagaagctagaatttacctagcaggccctgatatttgtgatttggaaagatttccttttatgaacatttggcttccctgggagttaaccttggtgcttgactcagatcctggccttcggtagaactcagtagctaagttctgcccttgttcctggaaaacttctttttttttttttttttcttttttttgagatggtgtctcactstgtcacccaggctggagtgcagtggcgcaatctcggctcactgcaatctctgtctcctgggttgaagtgattctcctgcctcagcctcctgagtagctgggattacaggcacgtgccaccatgcccagatagtttttgtatttttagtagagacagggtatctccatgttggccaggctggtttcaaactcctgacctcaagtgatccgcctaccttggcctcccaaagtgctggaattacaagcatgagccactgcgcctggcctggaacaatttcttaccaactttttctaacattttggttatggctcctgc

SEQ ID NO: 927913 - DNA, 620 bp, Homo sapiens
gcattcctcagtcttcctttctgcaacagataataaaatttcagagagaggatagaggacaattgtgttcttctaggtgggtccggtccttaagagatttcagggaaaggacagaaggcagttgtgttctccttgtgaggagggggttcagtctttacacagatcagggaatatcagagaaaagccttatcctttgctttgggagaaacagggggttgagggtggggcaggagtatataaagaccttgaggttgcctctttattcagcatgtcaaagsaccattattttggaatatcgttttctgagtcccattaaaggacatggctttctcctgtggtgaggaatcccacagagcaggtgggagttgggcagggaggcagcccaagcgaagccatgagcatggggaatccagggcttggagggcattctagtgcaaatacctgcgttaaattatacactaaaaaaagtgtgtttatccatccttccattgctacaaagaactgcctgagattgggtaatttatgagaaaagaggtttaattgactaatcgttctgcaagatgcacaggaagcatggctggggaggcctcaggaaacttacaatcatggcagaaggtaag

SEQ ID NO: 927914 - DNA, 583 bp, Homo sapiens
cctaggagatcatatacctgtcaaactccgccatttgactctctcagtgtgcatttgtgagcccacttgcccaactcctgagatcttatcgggaagctgctgatcaccagcttcagatatttctttttttttttgagatggaatctcactttgtcacccagactggagtgcagtgatgcaatcttttttttttttttttttttttgaggkggagtctcactctgttgcccaggctggagtgccgtggcacaatctcggctcactgcaagctctgcctcctgggttcacgccattctcctgactcagcctcccgagtagctgggactacaggcgcccgccaccacacctggctaattttttgtattttgtttagtagagacggggtttcaccatgttagctaggatggtctcgatctcctgacctcgtgatccgcccgcctccacctcccgaagtgctggaattacgggcgtgagccaccacgcccggctgacgcaatcttgactcactgcaaactccgtctccaggcttcaaatgactctcctgcctcagcctcccgagtagcaaggactacaggcatgcacc

SEQ ID NO: 927915 - DNA, 802 bp, Homo sapiens
gagatcatatacctgtcaaactccgccatttgactctctcagtgtgcatttgtgagcccacttgcccaactcctgagatcttatcgggaagctgctgatcaccagcttcagatatttctttttttttttgagatggaatctcactttgtcacccagactggagtgcagtgatgcaatcttttttttttttttttttttttgaggtggagtctcactctgttgcccaggctggagtgccgtggcacaatctcggctcactgcaagctctgcctcctgggttcacgccattctcctgactcagcctcccgagtagctgggactacaggcgcccgccaccacacctggctaattttttgtattttgtttagtagagacggggtttcaccatgttagctaggatggtctcgatctcctgacctcgtgatccgcccgcctccacctcccgaagtgctggaattacgggcgtgagccaccacgcccggctgacgcaatcttgactcactgcaaactcygtctccaggcttcaaatgactctcctgcctcagcctcccgagtagcaaggactacaggcatgcaccactatgctcagctaatttttatatttttagtagagatggggtttcagcattttagccaggctggtctcaaactcctggccccaagtgatccacccacctcggcctcccaaagtgctgggattacaggtgtgggccactgtgcccagccaggtgtttctgtttattgtgagtctgcctttccctggagctgactatgaccaactattattttagagagaccgtta

SEQ ID NO: 927916 - DNA, 734 bp, Homo sapiens
cttttccaattccatttttgaaaatgtgatactttctgtttctacttcttaattttcagcaagtccaccgaaactgttcttgccagtatttccttattgctaaatcaaaggacatttaaaaattgtcttgcttgtcctctgaagggcctggcatgtgactacttcctgttttttggaattgcgctgtggcttccacagtgccgcctcttttggcttctccttcctttgtagcagctccccctcagtcaccttcttttttttttttaattttgagatggagtcttactctgttgcccaggctggagtgcagtggtgccatcttggctcactgcaacctcagcctcccgggttcaagcgattctcctgcctcaccctcctgagtagctgggattacaagtgcacgccaccacacccagctaatttttttgtattttagtagagatggggtttcactrtgttaaccaggctggtctcaaacttctgaactgaagtgatacactcgccttggcctcccagagtgctgtgattacaggcttcagccaccacgcctggcctcagccaccttctaaagcattttttcatctgcctatgtattaaatattagtattacctaggtttctgcgagtgaccttctcactcctcatattctccctggatgatgtcacccattcttttaactagaattccctgaggactcagatgtctccacctcagacttctcctgagttctgatc

SEQ ID NO: 927917 - DNA, 582 bp, Homo sapiens
ttcagtggcctctcatgtcattcaaagtaaaacccttgtccctacaatgatctgtagggctctgagtgatgtgtccctaccctgactctggaatctcctctcctaccacttttctctttgctcttttcattgcagtcacagcagcctttttcttttcttgaacaagtcaagcattcttctatctcaaggcatacacatttgctgcctggagcacttttgccccagatattggtagggtttattttctcacttccttcagctctctgcttaaatcagtcaataaartaggtcttccttgaccactctatattaaaacaatagcaaccataaaaatgtgctccctttgtcacctctgagggttcccatctctctcttcctgctttattttactctatagaccttatggccacatatatttttagttatgtgtttaagtctatgtctccctacaagaatgtaaactcattgaagattgaagccagggatgtttttctttttatacttttattgctaatcaactcaaaccaaaacagagatgtttgtttttttcactgcgtattctcagtgcctagagtattgctt

SEQ ID NO: 927918 - DNA, 528 bp, Homo sapiens
tctccttatgatcaatatcacaaagctctgaataatctggctgatgatgtgttcaaagagtagactccaggtgcagtatacctatgcttggtatcacaccagattgggtccattcctttctctgcattttgtattggatacccatcatcacagttgacttcactatgctgttattmttactgaatgttgaaacagactccaaatgggcatcttatactgatgcttaaactgaatgcttatatgcattactttggcttcaaagaaggcttttatgttttttgctatttattataaacagtatggaattttggcacctataaaagcaattattgcctgctggtcagtgacaactcaaactactttacctcaacatctccattttacacagtagcatccactttatcttgtcttgtctcgttccttatactgaaggttccttcattaactagatgtcttcaaaatactcctctagctaatacttttctagacacttttggagtgaattgcatatgtagctgaaacagcaga

SEQ ID NO: 927919 - DNA, 528 bp, Homo sapiens
tctccttatgatcaatatcacaaagctctgaataatctggctgatgatgtgttcaaagagtagactccaggtgcagtatacctatgcttggtatcacaccagattgggtccattcctttctctgcattttgtattggatacccatcatcacagttgacttcactatgctgttattcttactgaatgttgaaamagactccaaatgggcatcttatactgatgcttaaactgaatgcttatatgcattactttggcttcaaagaaggcttttatgttttttgctatttattataaacagtatggaattttggcacctataaaagcaattattgcctgctggtcagtgacaactcaaactactttacctcaacatctccattttacacagtagcatccactttatcttgtcttgtctcgttccttatactgaaggttccttcattaactagatgtcttcaaaatactcctctagctaatacttttctagacacttttggagtgaattgcatatgtagctgaaacagcaga

SEQ ID NO: 927920 - DNA, 623 bp, Homo sapiens
agctagccagttatcccagcaccatttattgaacagggagtcttttccctgttgctagttttcgtcaggtttgttgaagatcagatagttgtaggtgcatggtcttatttcttggtgctctattctgttccagtggtttatgtgcctgtttttgtatcagtggtaccatgctgttttggttactttagccctgtagtacagttcgaagtcaggtaatgtgatgcctccagctttgttatttttgcttttgatttccttggctattcgggttcttttttggttccatataaattttaagatagttttctctagttctgtgaagaatgtcattgattgataggaatagcattggatctgtacattgctttgggcrctatggccattttaatgatattgattcttcctatccatgagcatggaatgctttccatttgtttgtgtcttctcagattttgatgagcagtgttctgtaattctcattgtagagatcattcacctccctgattagctgtattcctaggtattttatttttctgtggcaattgtgaatgagattgctttcctgattccttggctgttactagtatataggaatgctggtgatttttgtacattaattttgt

SEQ ID NO: 927921 - DNA, 637 bp, Homo sapiens
aatgtactaaggaataaatataacaatttaagatgaaatctcttaattctaggcattaatagtctaattggcacaagacattcctacttgaggcatagtgaccagacaatacattacataacaagcaaatgacatatacaaataattgtgccaayaacttccaaatatattttgaaccctcacaagaatcctataaggtcatcatgaatctatttttgtatgacgtcaggagcagataattttaagttgcagcatctagataggcacagctcttctgaccacaagtaccatgccctctccactgaggctgtcaactggaataagcaaaagaccaactgattgtgaagtagacttttaatattctctaattctgggatgggagactgcaagaaattgactgcctcctttctggtagtgctttctcttttgcaaattcctaatattcaattgcatctgaagttagaacataccattatcatactctatagattaagcaaaactccttaccctaaagaggctgagataaataatattatgaagcaacttttcaaaaaccaactcatttgcacatggtagaaacttcattctaaaaattattgtgtacctcggttgtcaacagccattactgtctaagcta

SEQ ID NO: 927922 - DNA, 637 bp, Homo sapiens
aatgtactaaggaataaatataacaatttaagatgaaatctcttaattctaggcattaatagtctaattggcacaagacattcctacttgaggcatagtgaccagacaatacattacataacaagcaaatgacatatacaaataattgtgccaacaacttccaaatatattttgaaccctcacaagaatcctataaggtcatcatgaatctatttttgtatgacgtcaggagcagataattttaagttgcagcatctagataggcacagctcttctgaccacaagtaccatgccctctccactgaggctgtcaactrgaataagcaaaagaccaactgattgtgaagtagacttttaatattctctaattctgggatgggagactgcaagaaattgactgcctcctttctggtagtgctttctcttttgcaaattcctaatattcaattgcatctgaagttagaacataccattatcatactctatagattaagcaaaactccttaccctaaagaggctgagataaataatattatgaagcaacttttcaaaaaccaactcatttgcacatggtagaaacttcattctaaaaattattgtgtacctcggttgtcaacagccattactgtctaagcta

SEQ ID NO: 927923 - DNA, 479 bp, Homo sapiens
aaacaattctcagcaaattcaaaaaaaccaaaatcatacctaccacacttttgtaccacatgcaataaaaatacacatcaatactaaggagattgctcaaaaccataccattacatggaaattaaacaatctgctcctgaatgacttttgcataaacaatgaaattaagccagtaatgaataagttctttgaaactaatgacaacaaagacacaacataccaggatctctgggacacagccaaggcagtgttaacagggaagtttatagcgctaaacaccagtgtcataaagttagaaagatctcaaatgaacaacataacattacacttagagaagctagagaaacaagaataaaccaatgtcaaagctagcagaggacaagaaatatccaaaatcaaatctgaactgaaggaaattgagatgtaaaaaacktacaaaagatcgatgaatccagaagttgatgttttgaaagaataaa

SEQ ID NO: 927924 - DNA, 558 bp, Homo sapiens
tgggcttcaccgttggtgaaagagaaggcagtcatcagtgaggacagcccaggctttggggccaggcagcccagggtctgacccgctcttggcactcgctagctttgggcaggttacttacgctgtagtgcctcagtctcctcatgtttaaatggatgttggyaattgaatatatctcagagaattgttgtaaagactggtagaaataatgtatataaattgcttcacacggtgcatggtagccataaatgctcagtaatcctggctttatcagatgcttataaaatgaatggaattagtatgacctgtattcttaggatctcctgttaaatgattgtcctgtaagctagtagtccccaagggaaaaagaaaagattgctcaccactggtttagaaaattcagagggagtaattccatgaagtacagttaagggaatctgggaatactttgatattgtattaaataaaatggcccatgccattttatttttattttattttactttttattttttgagacggagtttccctcttgtcacccaggctggaatgcaatgg

SEQ ID NO: 927925 - DNA, 832 bp, Homo sapiens
aactgattctgaaaatgcaaagtgcctagagtagccaaaataaattgaaaaggaagaacaaagttgactaaataattctgatttcaagacataaaaacaaagctgtctttatttactaaagatacttaaatagaccaatgaaacagaacaaaaaaccatgattacttctacccatatgtggacaactgatttttgagaaaatgcaaaggcaattcagcaaagacaagatcgtctttcaacaaatggtaccaktttcaacaaacagaacattaagagaaataaattttaattcaaatctcatataatatacaaaaataaactcaaaatgaattatagacctaaatgtaaaatcaaaaaccacaaaccttctttaaaaaaatgaaaatctttgtgactttggattaggcaaagatttcttagatacaaaaaaatatagatatgactatccataaaaagaaacattaataaactataatttatcaaaattagaaatgcatgcacctcaaaaacatttcttaaacaattaaaagacgagccacagcctggagaaaaacactgtaaatcccattgccaacaaaagacttgtatccaaagaactctcaaaactcaatttttaaaaaatccaatttaaaaatggtcaaaagacagaaataaatccacatatatatggggttaggacttaaatatgtgaatttggcaaaggggaacaaaactcatcccataacactggtaaaagacaatgctttcccttaaggtcaagacaaggtaagaatgtttgatctctgacaaggatgctaataatacacaatgaagagagaatatgtcttcaaca

SEQ ID NO: 927926 - DNA, 768 bp, Homo sapiens
gcaggcagtctagggattgcagtaatccaatccctagattggctgcattcttgataaacgctcatggtaagtaaatcagtggttggagaatttaagacctaatgggggaaaatagggaggccttgaattggtgtgggtatggggaggtcagtctggttaggagttggacttgggttttattgttgctttcattaccttcactgtactacaggcctcaaaaccttctagaaggctgccaagaccttttgcctgagggtggggctggggtgccagagggtatttctcagcatctgtgcttccccctcagctttcagccttctctgccagcatgccccacaaagggcatctctctccaaattcttgcccccctctcctggtggcagcctgctgtctcttgtttcttagccttgggctggttagcagtacaggaggttccctgttgttctgggcctgccttaggcctaggctggacttgtgcacctgggctttggacacggggctttctcggtgttcctgccctccgtcatgtggtagccaaactctgccttctctctgtggtcagtcttgagccagtgtctcctgtctctgycttgataataggagcgctctctctggccttcagccctgcctccatctttcatgtgaggcacgtggaaaagtgtttgctaatgagtgcgaattctccttgggtctggagtcccaggtaattccagactgacatctagtgcacctttggcctttaccagtacgttaagattatagctggta

SEQ ID NO: 927927 - DNA, 601 bp, Homo sapiens
aatcagattacttgattacttggttaccttttgacttcagctctctgctggactcaagaaaagttatgtttttgtggcttatctatctggctttttcctgttgttatgatggaaacaatgtattttgtagctttctatatcctaagcataagagtaactctcccaaggtcaggcttaaataagatttttcggctgggtgcggtggctcaacccctgtaatcccagcactttggaaggccgaggcaggtggatcacaagatcaggagttcaagactagcttggccaacatggtgaaaccctgtctctactaaaaatacaaaaattagccgggcatggtggcrggtgcccatagtcccagctactcaggaggctgaggcaggagcattgtttgaacccgggaggtagaggttgcagtgagccaagatggcaccactgcactctagcctgggcaacagagcaagactccatctcaaaaaaaaaaaaaaaaaaaaaaaaaatttttcccctcctcagaactccaagatctttattagttccaattaggtatttgtactttttaacctatatttgtctatcttatttctcctattaaatgtaagct

SEQ ID NO: 927928 - DNA, 716 bp, Homo sapiens
ctaaaaggggccaaggtacagtttgggctgttgcttcagaaggtgtaagccccaagcccttggtggcttccacttggtgttgggcctgttaatccatagaagagaagacttgagctttgggaggctttgcctatatttcagaggatgtacggaaacactttggtgtccaggcagaagtctgctgcaggggtggagccctcgtgaagaacctctgctacggcagtgcagaatggaaatgtgaggttggagcccctgcacagagtccccagtgggactctgcctagtggagctgtaagaagatggccacatcctccagacaccagaaaggtagatccaccaatagcttgcaccgtgtgcctggaaaagccacaggcactcaacaccagcccgtgaaagcagtcaaaggggccggggtcaggctcatacactgcagagccacaggggtggagmcacccaagtccatgagaacccacttcttgcatcaccatgccctagatgtgagacatagagtcaaaggaggtcattttggagctttaagatttaatgactgcctggccagatttcagacctgcatgggggcctgtggcccatttgtcttgaccaatttattggatttggaatggaaacgttatccaatgcctgtatcaccactgtatctgagaagtaactaactttatttttatttcacagattcataagtggaagggacttgcctt

SEQ ID NO: 927929 - DNA, 716 bp, Homo sapiens
ctaaaaggggccaaggtacagtttgggctgttgcttcagaaggtgtaagccccaagcccttggtggcttccacttggtgttgggcctgttaatccatagaagagaagacttgagctttgggaggctttgcctatatttcagaggatgtacggaaacactttggtgtccaggcagaagtctgctgcaggggtggagccctcgtgaagaacctctgctacggcagtgcagaatggaaatgtgaggttggagcccctgcacagagtccccagtgggactctgcctagtggagctgtaagaagatggccacatcctccagacaccagaaaggtagatccaccaatagcttgcaccgtgtgcctggaaaagccacaggcactcaacaccagcccgtgaaagcagtcaaaggggccggggtcaggctcatacactgcagagccacaggggtggagccacccaagtccatgagaaccyacttcttgcatcaccatgccctagatgtgagacatagagtcaaaggaggtcattttggagctttaagatttaatgactgcctggccagatttcagacctgcatgggggcctgtggcccatttgtcttgaccaatttattggatttggaatggaaacgttatccaatgcctgtatcaccactgtatctgagaagtaactaactttatttttatttcacagattcataagtggaagggacttgcctt

SEQ ID NO: 927930 - DNA, 776 bp, Homo sapiens
gagaacccacttcttgcatcaccatgccctagatgtgagacatagagtcaaaggaggtcattttggagctttaagatttaatgactgcctggccagatttcagacctgcatgggggcctgtggcccatttgtcttgaccaatttattggatttggaatggaaacgttatccaatgcctgtatcaccactgtatctgagaagtaactaactttatttttatttcacagattcataagtggaagggacttgccttgtcttagatgagactttggacttggacttttgagttaatgctgtaatgagttaagactttgggagactgttgggaaggtatgrttggttttaaatgtgaaaagaacatgatatttgagagggtccagggttggaataatatgctatggctctctgtcctcacccaaatgtcatcttaaattgtaatttccacatgttgagggagggacccagttcaaggtgattgaataataggagtggtttcctacatgttgttttcatgatggtgaggggattctcataagacctgatagttttaaggggggcaatttctccacacgctctctctcctgccaccaggtaagacataccttgcttcccgtttgccttccactatgattgcaagtttcctgagggctccccagccttgtagaactgtgaatcaattaaacttcttttgtttataaattacccagtctcaggtagtatctttatagaagtgtcaaaatggacgaatacacatggcaagggggaagaaaatgaga

SEQ ID NO: 927931 - DNA, 600 bp, Homo sapiens
gaggtggtgctttcaagagagcatcagttgcagtagtataggggggatataagctagccctagggtcacctggataagtattcaggtttctcaggtggtggatggggccataaagctctccagagattatgtcctttgattttgactaccagggtaggggcagggttaggggtgttggatctcagaccctcctttggcagggttgctgaagctgccctgggaaatgggggagtggttctcaggctgattaagttaccttaccaggaggattatgactgcctctcctgcatcatacaggtcacctgggaagtgagggaaagccagcagtgacagacctcacccagctcctacacagcccaaaaggccagcctcactctcatggtgctyccccagcagcactgagtttatttcctggcagccagtcagcagggctgagaacttgccccaggctacaagaccaccccactgagaaagcaagcagaactttcaggttccttacccccctacctgccatggcttttgtgtttgtatctgtactcccagtttgccccctccccccgattctgtccgggaaactttgagtttagtcaaaattgttac

SEQ ID NO: 927932 - DNA, 483 bp, Homo sapiens
tcaggttatagatacactaattaccttaatttgattattatacattgtatacatgcactgagacatcacgctgtactccccaaaataagtacaattattatgtgtcaaatatgaaataaaaagaacaaaatttgaggcatcacacgtcctgattttaaaatataaaagtaataaaaatgtatgatactggcataaaaatagacatatagaccaatggatagaatacagattccagagataatcgcatayatatatattaaactgagaagaaaagacagtctcttcaataaataatgctgggaaaactggatatctgcatgcaaaatcatgaaattggattcttatgttacctcatatacaggttaactcaaaatagattgtagacttaaacataagacataaaactcctgtgaccagtctccatcctgaagctaccttggggctgccagccattagtcaaatcattaaatacaaaaagacatc

SEQ ID NO: 927933 - DNA, 595 bp, Homo sapiens
tgatggggttttctaaatatacaatcatgtcacctgcaaacagaaacaatttgacttcctcttttcctaattgaacaccctttatttctttctcttgcctgattgccctggccagaacttccaatactatgttgaataggagtggtctgaagaaaacctaggcaatgccattcaggacataggcatgagcaaagacttcatgactaaaacaccaaaagcaatggcaacaaaagctgaaattgacaaatgggacctaattaaactaaagagcctatgcacagcaaaagaaactcatcagaatgaacaggaaacttaaagaatgggagaaaaattttgtaatctatccatctgacaaagggctaayatccagaatctacaaaacctaaaaaaatttacaagaaaaataaaccatcaaaaagtgggcaaaggatatcaacagacacttttcaaaagaagacatttatgcagccaacaaacatatgaaaaaatgatcatcatcactggtcattagagaaatgcaaattcaaatcacagtgagataccatctcacaccagttagaatggcgatcattaagaagtcaggaaagaacagatg

SEQ ID NO: 927934 - DNA, 715 bp, Homo sapiens
caacgttgaccactgccttctctcacagctcacatccagtctgtcaggaaatcctactgacttcaacatgtatccaggctctgaccatctctcaccaccaccgtgaacacggtcaggatcactatcatctcccaccgggatgttgccacagcttggcccccatgcttctacccaaatcttcccatagtctttctcaacttggcagccaggtcgtgcttttaaatcaggagacagatcacgtcgcctctctgctcagaagccctcggtggttcccattttagtcagagtaaaagccaaagccccagcaatagcgtcccagggcttacacgatctgtaccgatcccagcccagcaactccctggcctcctcgctgacttcgctccctctatctctttgctccactggcctccttccagagcctcagacacaccagagagtttcctcctaatgcctttatcctgttgactcagcctacaatgctcttccctcagcaccttggccagctccatcacctgcttcaaacttttgctcaatattcacttatgaggccaaccctgaccrctctacttaacattgccatctgtccccattcccaccatgctcatttctttctttctttctttttgaaacaaggtcttgctttattgcctaggctggagtacactggtgcaatcacagctcacagcaacttcaacctcccaggtttaaacaatcc

SEQ ID NO: 927935 - DNA, 549 bp, Homo sapiens
caaatcttcccatagtctttctcaacttggcagccaggtcgtgcttttaaatcaggagacagatcacgtcgcctctctgctcagaagccctcggtggttcccattttagtcagagtaaaagccaaagccccagcaatagcgtcccagggcttacacgatctgtaccgatcccagcccagcaactccctggcctcctcgctgacttcgctccctctatctctttgctccactggcctccttccagagcctcagacacaccagagagtttcctcctaatgcctttatcctgttgactcagcctacaatgctcttccctcagcaccttggccagctccatcacctgcttcaaacttttgctcaatattcacttatgaggccaaccctgaccgctctacttaacaytgccatctgtccccattcccaccatgctcatttctttctttctttctttttgaaacaaggtcttgctttattgcctaggctggagtacactggtgcaatcacagctcacagcaacttcaacctcccaggtttaaacaatcctcccgc

SEQ ID NO: 927936 - DNA, 587 bp, Homo sapiens
gattttaaaatttcaaacaacatgtcagcaaatcaaatccatctatatgtaaaaaggatggggccgggcagtgagtcatgcctgtaatcctagcactttgggaggccaaggtgggagaacagcttgaagccaggagttcaagaccagcctaggcaacatagtaagactccatctctacaaaaaaaaaaawtttttttaattagctgggtgccacaagctactggggaggctgaggtgggaggatcacttgagcccaggagtttgaggctgtagtgagctatgatcgtgccattgcagtccagcttgcataacagagcaaaaccttgtttcaaaaaataaataaataaataagataaggcattatgaccaagtggtattttcctcagaatgcaagactgctctagcaatttttaaatcaatcaatgaaattcaccatattaagaaactaaaaattttaaaagcccacatgattcatcaaaagatgaaaagaagcatttgacaaaacccaacatctatatctaatacaaattttcaaaggactagaaataaaagaaaatgtccccagcctgataaagggtgtatagaaa

SEQ ID NO: 927937 - DNA, 587 bp, Homo sapiens
gattttaaaatttcaaacaacatgtcagcaaatcaaatccatctatatgtaaaaaggatggggccgggcagtgagtcatgcctgtaatcctagcactttgggaggccaaggtgggagaacagcttgaagccaggagttcaagaccagcctaggcaacatagtaagactccatctctacaaaaaaaaaaatwttttttaattagctgggtgccacaagctactggggaggctgaggtgggaggatcacttgagcccaggagtttgaggctgtagtgagctatgatcgtgccattgcagtccagcttgcataacagagcaaaaccttgtttcaaaaaataaataaataaataagataaggcattatgaccaagtggtattttcctcagaatgcaagactgctctagcaatttttaaatcaatcaatgaaattcaccatattaagaaactaaaaattttaaaagcccacatgattcatcaaaagatgaaaagaagcatttgacaaaacccaacatctatatctaatacaaattttcaaaggactagaaataaaagaaaatgtccccagcctgataaagggtgtatagaaa

SEQ ID NO: 927938 - DNA, 669 bp, Homo sapiens
tttcaggtggtgcctgcatatcgtgcaggaccatctgtgaaccaggccctagtcttctctttgcctgtcaactgatcataggaaactccgcatgaggccattggtacaggctaggggagagaaggcagggtggcaggaatggagaccatgggcatttgaaccacttcctcatgtaacttacttgtgccttcaggacatgctcaaactgggtctcgtatataacacttccatttgatgctggaatgctgctatgtatgacccactttatggctagatgggtcataaagcacccaatttatgataggcagttcaggttgcacagtgacttgatgactcatagtcaaacgttcagtttccactraagcccagtaacaggccaaaagctgtccctcaaaaggagagtagttatttgcagaagaaggcagggccatgctccaaaatcctagaaccctccgtggtgactcacttatacgggcctgccaaagtccccaagcaacatccttatctgccactgacaactcaagcaccatcgaatctgctgggtcacatggcctaagtggcagagcagcttgcacagcagcctggacctgttaaggaaccttctcctgttctggaccccactcaaaactggcagcctttcgggtcacttgacatatgggccaaagtaac

SEQ ID NO: 927939 - DNA, 758 bp, Homo sapiens
ctatcttgaaaaatgtttcatgtgttgatgaaaagaatgcatattctgcaattgttgggaagaatgttctgtaaacatctgttaaatccatttgctctagggtatggcttaagtccatttttttgttgtcgtggcctttctgtcwtgattatctatatagtgctatcagtacattttcagttccccactattattgggttgctgtctatcacatattttaagtctagtagtaattattttataaatctgggagcttcagtgttagctttatataaatttagggttgtaatatcttctcattggactaatctttttatcattatataatgtattttttttactgctgttgctttaatgtctattttatcttatataaaaatagctactcctgcttgttttggtttgtatgtaatatatttgtatgtaatatatttttccacccctttcctgtaaattgatatgagtcctcacatgttagatgagtctcttgaagacagcagatatttggttagtgaattttttttttttattcattctgccattctgtactttttaagtggagcatttaggccatttacatttaatgttaatactgagatgtggggtactgttctatttatcatgttagttgttacctagctactttttttcattgtgttattgttttataggccctgtaagatttatactttatctcctgaccaacatggtgaaaccccatctctactaaaagtaaacaaaaaattagccttgcatgg

SEQ ID NO: 927940 - DNA, 635 bp, Homo sapiens
cttccccgagcctctgcattcacctgcagagcgggagtctggtagccctgtgcttggctgttgcgagaatgctctttgtagtggttgatatgatgaagagcctccacggagtatgccggagtgtttttttctgtcaaggacattgttggagtataattcttgaagcctagatgacggagcaccctttttaaattttattattttttaagagacagggtctctgtcacccaggctggagtgcagtgacgcartcatggttcactgtagcctcagcctcctgggcttgagcagtcctcccacctcagcctctcgagtagctgggattataggcgtgtgccaccacaccagactttttgtgtgtgtgtagagatggggtatcactatcttgtccaggctggtctcaaactcctgggcttaagcaaccctcctgcctcggactctcaaagtgctgggattacaggcaagagccactgtgcccggccagcatcctttttatcactcagattgctccctacatggctggtgacgtagtccctttctccattgcctttcatggaggaaggactagggtggtccctggagggcaggaggacgtgtgccatggtacatggtttggcacgttgggggcatcggtg

SEQ ID NO: 927941 - DNA, 608 bp, Homo sapiens
cctgtcagtggcagagctgcatgccaggtgctgtagcggagggaaagaaagaaaaaacagacgtggctgccctggagcaggcgggtcactgtctcgggtgtgtctgtctttcaggctaacaggacgcaatccctcaactacggctgcatcgttgagaatccacagacacacgaggtgagagcagagtgggggctgggtgggtgcctactctgtgtcatcatcccctctacctcaggcctctagagaatgctggcacagtatggggtgggctctagtcttgtcagacaggtgagacactcccgattaatcatcttatatccctttaagagagattgaccagggggagggggggaatggttaatttccctgggggtggtgctgtaataaatgtatgcacagkgcatgatgggaacaccaagggggccccaacccagccttgctggggtgggagtagagagggcttcctggaggaagcaaggtctgagcagagtcccatttgtctagatgacaaaggagacaggaaggtactacaggcagagggaatggcaggtataaaggcctggaggcaggaagtaacataccagaagcaggagcatgataggcagggc

SEQ ID NO: 927942 - DNA, 605 bp, Homo sapiens
ccaagggtctcctggcacaagtagttactaattctgtaaatttgctgtattatgtatgttttaatgattttatattcattacatttagtttctgttattcatacagtgataatatgtattgttttgaatctaagtcctaaattcttgagatttccaaactgcagagtcattgagtctttttttgaataaaaagaattggaaagattttacagaataatcaactggaatatatagcattggttatatcaggtttagttagtktcttagcacttgctgttgaagatctattgttttgaagttaggaaataatccctgagtagatttattttggtcagatttagtggccttagccaaaccgaaagacagatcaaagatggattaaaacttttgatcaagttcttcaacagaatttctccttaatgatatgcattttaaaagtgttaaaatttcagtttttgctgtatttttcataagatgaagtatcattctaaaatagtttacaaattcatgataaattttaatattatttttcagaacagaagagtctgttatctccaaaggattggtaagatgtttgttcccattataacttaaatacatagtta

SEQ ID NO: 927943 - DNA, 751 bp, Homo sapiens
actttgacagtcatggaagtgtgtcccttaaacctcctttcaagagaaaacccattatgaggagtgtactcacctgagagcacccactggccacttctttggaatcttccaccctattcaggtcaaggcacattccccagcattccagggcagctcctatacaatgactgaccatggtggaggtgctagctgagacatgcctgcccaatacagctaaactttcatgagaaatcgttgtttgggggtccccmccacactggtcaaggtttcctcagagctctgtgtggctctaggctcctcctaacaaatccttctttctttcctgtcttcataggtgtcaggcccatattgtgtctggagttggttcctgctggtgggttcgtggtctcgctgacttcaagaatggagctgcagaccttccaagtgagtgttacagctcttaaagatggcatggacccgagagtgagcagtagcaaggcttactgtgaagagctaaaagacaaagcttccacagcctgtaaggtgacctgaatgggttgccactgctggctggggtggccagcttttattcccttattgtcccctcccatgttgcatttccatcctatcagagtgtcctttttaaaagcctctctgcgattggctacttttagaatcctgctgattggtgcattttacagagtgctgattggtgtgttttacaatcctcgttagacaagaaagttccccaagtccccacttgacccagaaa

SEQ ID NO: 927944 - DNA, 591 bp, Homo sapiens
  misc_feature 49: n = A,T,C or G
agtacccaatacccagtttttcaaccctttcctccctccctccctttcntggagtccccagtgtcttttgttcccacttttatgcccatgtgtacacaatgcttagctcccacttataaataagaacatgcagtattcgattttctgtttctgggttaattcacttaagattatggcttaagtgccaatcctaagctgcatccatgttgctgcaaagaacacgatttcmttcttttttatggctatgtagtattccttggagtacatgtatcacattttctttatctggtgccactattgatgggcacctaggttgattacatgattttgatattgtgaacagtgctgcaataaacatatgtgtgcctatgtccttttggtaaaacaatttcttttcctttgggtaggtacacagtaatggggttgttgggtcaactggtaattctatttgcagttctttgcaaaatctccaaactgctttccacagggatggaagtaatttacactgccaccaacagtgtgtaagcattcccttttgtctgcatcctgccaacatctgtcatttttttactttttaataatagccattct

SEQ ID NO: 927945 - DNA, 591 bp, Homo sapiens
  misc_feature 49: n = A,T,C or G
agtacccaatacccagtttttcaaccctttcctccctccctccctttcntggagtccccagtgtcttttgttcccacttttatgcccatgtgtacacaatgcttagctcccacttataaataagaacatgcagtattcgattttctgtttctgggttaattcacttaagattatggcttaagtgccaatcctaagctgcatccatgttgctgcaaagaacacgatttcattcttttttrtggctatgtagtattccttggagtacatgtatcacattttctttatctggtgccactattgatgggcacctaggttgattacatgattttgatattgtgaacagtgctgcaataaacatatgtgtgcctatgtccttttggtaaaacaatttcttttcctttgggtaggtacacagtaatggggttgttgggtcaactggtaattctatttgcagttctttgcaaaatctccaaactgctttccacagggatggaagtaatttacactgccaccaacagtgtgtaagcattcccttttgtctgcatcctgccaacatctgtcatttttttactttttaataatagccattct

SEQ ID NO: 927946 - DNA, 591 bp, Homo sapiens
  misc_feature 49: n = A,T,C or G
agtacccaatacccagtttttcaaccctttcctccctccctccctttcntggagtccccagtgtcttttgttcccacttttatgcccatgtgtacacaatgcttagctcccacttataaataagaacatgcagtattcgattttctgtttctgggttaattcacttaagattatggcttaagtgccaatcctaagctgcatccatgttgctgcaaagaacacgatttcattcttttttatggctatgtagtattccttggagtacatgtaycacattttctttatctggtgccactattgatgggcacctaggttgattacatgattttgatattgtgaacagtgctgcaataaacatatgtgtgcctatgtccttttggtaaaacaatttcttttcctttgggtaggtacacagtaatggggttgttgggtcaactggtaattctatttgcagttctttgcaaaatctccaaactgctttccacagggatggaagtaatttacactgccaccaacagtgtgtaagcattcccttttgtctgcatcctgccaacatctgtcatttttttactttttaataatagccattct

SEQ ID NO: 927947 - DNA, 614 bp, Homo sapiens
aatatagccatcagggctatctgataatttacctaggtttgcttcaagtctgacagggaaaaaagatacatacactctgggccgaattctccagaatatatcttatgggcgtttttgccttggggggaatgtttcccatctgaaaaaaaaacatagggatgccagcacccctagtcattttccaatgagcattagtcttagagtgtcctctgtggtcctaatgcttattcctttccagggtgcgtaaccacccatggacttctgcttatcagattagttacgctcactgatgtagcagtcctgcaycccttttcccgcctttcttgatcacaaagaaaggggtctgggctgctggattctagtggtcctttactggtgtgcctaacattgcctttgcactcagaggtgagttcctttccagggtgcttaaccactcatggaactctgcttatcggatttgttatgctctctgatgtagcagtcctgcacctgttttcccgcctttcttgaccacaaagaaaggggtccaggctcctggattctagtggtcctttaccagcatggccaacattgcctttgcgctcagaggtgaattctagacctgggctgggttc

SEQ ID NO: 927948 - DNA, 612 bp, Homo sapiens
tcaggtttttgtgcaaaggaaatgctctagaatgaactgagttcctccacatccccattcagacctttcagactggaaaagtcttggcttggaccgtacaccttccagcctcagacacaaatgcctttatcaggcccaaccccacataaccctaaatgtgcaacaaggaggcactgctgacttcctcctcctcttcctccttctcctgtgtacacagccgttatccagcttgagtgtctgtctgtctgtctgttgtacttgaaagaatagatgctttgttctcacacttcgagttagaacaacttttatccacactgacttgtgaaggcccaggatgctcctgtgggaccttgttcattttcaggatttacattacaatcctgaattcagcactcagaagagatgtcactgtctcagagtaggcaaaatcctttctctttatgaaatgttccataaaaaaaaaaaaaaaaaamaaaaccagtgtctgctttatagctggaaagagtcacaagtatatcatgcacctgccagatttcacttctttttggaaaagatagtgcattcccacatattatcatgcagtctcccagaaggtttgccaggcaggaagca

SEQ ID NO: 927949 - DNA, 571 bp, Homo sapiens
aagtggcaaggtccagttttaagtccaggttattataattcctaaggcatgcttttatcacaggaacagatggtttcttgaaggctatttgtaaaacatagatttagtgaggattaaatgaggtgccacccattaagcacttggcacatagtmagtggacctgaagactctttctgtctccatctctcagcctatgcatttttcttaaatgctcctcttgacccacgctatgacatgacaccaagacactaaggtcagggagcttcatgttaaccccagcagctatgcagttataacaccttctttatacacaaaccatgttatatcagaatttcttttttttttttttgagacagtcttgttctgttgcccaagctggagtgcagtggcacaagctctgctcactgcaagcttcgcctcccaggttcatgccattctcctgcctcagcctccagagtagctgggactacaggtgcccaccaccacggccggctaatttttttgtatttttagtagagacgggtttcaccgtgttagcaaggatggtctcgatctcctgacctcgtgatcc

SEQ ID NO: 927950 - DNA, 523 bp, Homo sapiens
gacatgctcatataagtttctcaactgtagctgcctttcctctgatttcctgcattgcctgctggcagtctacattagtattttcataagccaactgcaacaataagatatcagtggcctgtgcatgattgttttttaattgcctgggttaaccrattgataaattcaacaaatggctcctgaggcccttgtcgaatatttacaaaagatacctgttgaattcggcattagagaatttggtccgaagccctgagagcacacaaagacacttgtgcacaggcctggggaacaaaacttaattgttgttgcacattcacatagggaccactgccctggagcatagcagccattatgttttgcctggcaaattgaatccggttggcttgttgtttgcacaactcatcatattctgccttccaaaggaggtattgactgggctctaaagttgttttagctagcactgaccagtcccatggggtcacatggaagtagtctgctgtggtctcaattaatcctttcataa

SEQ ID NO: 927951 - DNA, 623 bp, Homo sapiens
ttggcttgttgtttgcacaactcatcatattctgccttccaaaggaggtattgactgggctctaaagttgttttagctagcactgaccagtcccatggggtcacatggaagtagtctgctgtggtctcaattaatcctttcataaatgggctagtggcttctttttctctaatgcttttccttatctctttataagtattgccttgttgatcttgcatcaccgggcaggccaagagctccccttctcatgctgcttgcctaagacagggttccataactgtagtgtatcccttgtcttttttccgaygtgttcggggagggggctcagggaaaatctttttcgtcttttgtatctttacccggtaacagcagggctgagggaggaggaggaggtggtaaggtaggtgatggttcttcctcccttccctttataggctcttctgtgtagagtagggccaaagcagtcctaaggcccataacgttaaagatgtttactgggacccgttgccgttgtgcaggatgttgtttaagatttctccccacttgctcccagagctctaggtctagcgtaccttcttctgggaaccatgggttacaggaaacaacagtttgcataagatccc

SEQ ID NO: 927952 - DNA, 525 bp, Homo sapiens
atgcttatcacagagtgatgtcatagctgttgtaacatagtacaaggcattacgcacatggcagtggtgatgctagtgtaagcagacctactgcactgatagtcgtataatagggtagcacaaccaagtatgtacagtacctaatacttgataatgataataaatgatgagggtactgggttacgtatttactgtagtatactttttatcattagtttagtgtgtattctttctccttatcgaagaagctaatttgaaaacagcctcaggcaaatctttcaggaggtattccagaagaaggaattgttatcataggaagtgacagctccaygcgcgttattgctcctgaagatctctcagtgggacaagatgtggagtgatattgatgatcctgaccctgtgtaggcctaggctaatgtgtgcgtttgtgtcttgtttttttaaaaaaaaagtttgaaaagtaaacaaaaatatattaaaaattaaaaacagaaaaaagcatatagaataaggatataaaaaatt

SEQ ID NO: 927953 - DNA, 631 bp, Homo sapiens
caacgaaaaaaattcattttactcttatatatgaatatgtgtgagttatgttcattatctaatgctgcatgacaaaattatcctgtaacctagtgtcttaaaacatcgataatcatttatcatctctcaccatttctgatcatcagaaattcaggagtcgtttggctgcaatattctggttttagatgtctcatgaggttgtagtcagatgtcaactaagtctatagttatctgaaagtttgactgaggctggaaaatctacttccaaaatgactcactgtcatatctggcaagttggtgctggctgttggcaggaagcctcagttcctctgcatgtgggcctctcttcttgagctgcttgaatgttctmatttcatgcttgccagcttcccccagagcaggcaatcccagattaagagagaagcttcaatgaattctattatcttgatttggaagtcatgcagcatcttttccaccatattctattggtcatacagaacagccctgaatcagtgtggcagtagactatacaatggtatgaataccaggaggcaaggacaattggaagccatcttagaagctggtgtattagtcagggttctctgcaggcacagaactaataggatagatg

SEQ ID NO: 927954 - DNA, 610 bp, Homo sapiens
atatatatttcatggtgtgtatgtagcatatttgctttatctaactcactgttgatgggcatttaggttgatttcatgtattttctattgtgagtagtgctgcaatgaacatatgcttgtatgtgtctttttggtaaaagtgatttattttccttcgggtatacacaaataatgaaattcctgggtagagacakgacatagttccattttaagtcatttgagaaatctccagactggtttccacagtggctaaactattttacattcctaccatcagtgtataagtgttttgttttctttgctaccttgccagtacctgtttttttttaattttttttaaataatatccattgtgactggtgtgaaatggtatcacgttgtggttttgatttacatttcttgaatgattagtgatattgaacatttgtaaaatatgtttgctggctgcgtgtatatcttcttttgaaaagtgtctattcatgtcctttccccattttccaatggagtctttgctttttgcttgttaatttgtttaagttccttatagattcagaatatcagactgttgtcagatgcatagtttgcaatcatttttcccattctgtaggtt

SEQ ID NO: 927955 - DNA, 647 bp, Homo sapiens
gcacctggaaaattgggtcactcccaccctaatactgtgcttttccaatggtcttagcaagcggcacaacaggagattatatcccgctcctggcttggagggtcccatgcccacagagcctcactcattgctagcacagcagtccaagttcraactgcaaggatgcagcgaggctgggggaggggcgcccaccattgctgaggcttgagtaggtaagcaaagtggcctggaagcttgaactgggtggagcccaccgcagctcaaggaggcatgcctgcctgcctctgtagactccacctctgggggcagggaataactgaataaaaggcagcagaaacctcttcagacttaaatgtccctgtctgacagctttaaagagagtagtggttctcccagcacaaagtttgagatctgagaatggacagactgcctcaagtgggtccctgacccccgagtagcctagctgggaggcaccccccagtaggggcactctgacacctcacacggccagggacccctctgaggtgaaacttccagaggaatgatcaggcagcaacatttgctgtttagcaatattcactgttctgcagcctctgctgctgatacccaggcaaagagggtctggagtggacctccagcaaactcca

SEQ ID NO: 927956 - DNA, 598 bp, Homo sapiens
ctagagcggaactgaacctgagtcaggcacagaacaacttcaggctctgtacaagtttaggaagaacacattgtcgattaaaccggctcctgcctgggccatggatatgagcagagcaagatgagcacaggtggaaaagctgttacttcaaatatattttttttcattttcattgtttctgtcttctggtactccaataatttggtrgttacacattttgaaattgttctacagttcttgtatatttttcctttatatttcagtttgggaagtttctattcatctatcttcaagctcagtggtacttctccggtgaacccatcaaaagcactcttcatttgttactatgttttttatttctagttttacttttgattctttcttagtattttcctttctcagcctttgtaactcatctgttcttgcaagttgtctgatttttccattagagtccttagcatttaatcatacttatttatttattttttttgagacgcagtctcgctctgtcgcccaggctggagtgcagtagcgcgatctcggctcactgcaagctccgcctcctgggttcacgccagtctccagcctcagcctccag

SEQ ID NO: 927957 - DNA, 598 bp, Homo sapiens
ctagagcggaactgaacctgagtcaggcacagaacaacttcaggctctgtacaagtttaggaagaacacattgtcgattaaaccggctcctgcctgggccatggatatgagcagagcaagatgagcacaggtggaaaagctgttacttcaaatatattttttttcattttcattgtttctgtcttctggtactccaataatttggtagttacacattttgaaattgttctacagttcttgtatatttttcctttatatttcagtttgggaagtttctattcatctatcttcaagctcagtggtacttytccggtgaacccatcaaaagcactcttcatttgttactatgttttttatttctagttttacttttgattctttcttagtattttcctttctcagcctttgtaactcatctgttcttgcaagttgtctgatttttccattagagtccttagcatttaatcatacttatttatttattttttttgagacgcagtctcgctctgtcgcccaggctggagtgcagtagcgcgatctcggctcactgcaagctccgcctcctgggttcacgccagtctccagcctcagcctccag

SEQ ID NO: 927958 - DNA, 779 bp, Homo sapiens; identical to SEQ ID NO: 925586

SEQ ID NO: 927959 - DNA, 779 bp, Homo sapiens; identical to SEQ ID NO: 925587

SEQ ID NO: 927960 - DNA, 779 bp, Homo sapiens; identical to SEQ ID NO: 925588

SEQ ID NO: 927961 - DNA, 561 bp, Homo sapiens
tacaaaattaacttacaaaactcagttgcattgatgcacaccaataatgattaatctgaaaaggaaattaagaaaacaataccatgaacaacagtattaaaaagaataaaatgctctggaatcaatttaaccaggatgacaaactatttgtacaataaaaactttcaaaatgctgctgtaagaaatcaaaggtacaaataaatggaacagtatcttctgttcataggtgaaaagactttttaaaaaayttcaacttttattttagattcaggggttacaggcacagatttgttatgtaggaatattgtataatgctcaggtttggagcacataggtagtgagcacagcaaccaatatgtagtatattaacttgccctcccctctgcacactttagtagtccaccgtgtttactgttcccatatttatgtccatatatgctcaatgtttagctcttataagtaagaacatgcagtatttggctttctgtttctgcattaatttgcttgaaattatggcctctggttccacctatgttcataccaaggacatgatttcattat

SEQ ID NO: 927962 - DNA, 620 bp, Homo sapiens
agattgtacaaacagaaaaacacctcaaaacagtttaaacaaattaagtaatgttgcaggatacaaaattaacttacaaaactcagttgcattgatgcacaccaataatgattaatctgaaaaggaaattaagaaaacaataccatgaacaacagtattaaaaagaataaaatgctctggaatcaatttaaccaggatgacaaactatttgtacaataaaaactttcaaaatgctgctgtaagaaatcaaaggtacaaataaatggaacagtatcttctgttcataggtgaaaagactttttaaaaaatttcaacttttattttagattcaggggttacaggcacagatttgttatgtaggaatattgtataatgctcaggtttggagcacataggtagtgagcacagcaaccaatatgtagtatattaacttgycctcccctctgcacactttagtagtccaccgtgtttactgttcccatatttatgtccatatatgctcaatgtttagctcttataagtaagaacatgcagtatttggctttctgtttctgcattaatttgcttgaaattatggcctctggttccacctatgttcataccaaggacatgatttcatt

SEQ ID NO: 927963 - DNA, 513 bp, Homo sapiens
ttttttttcttgagacctaagtgttttttgcatatttcaggtatcagtcatttatcaatgtgttttgcaaatatgttcctttagtggcttttcttctctttctcttaacagtatttttgatagagaataagcatttacatttaattaagtccagtttacctaccttttatttcctggatcaggctttttgtcttatatgtaaaaagtcatcaccaaatccaagatcatttaggtttcctcctacatgttttgctaagagggtttttagttttttgttttgtggtcatgtcaactttttttttaacttttattttaggtttgggggtacatgtgcaggattgttatataagtaacttgtgtgtcatgggtttkgggtgtacagattatacattttacatttagttgtatcgtttatttttagttaatttttgtgaaagtagtaagattattattatttttgaacatgtatgtacagttttccagcaccatttcttgaaaagaatatccttttcc

SEQ ID NO: 927964 - DNA, 737 bp, Homo sapiens
atgtttctggaaaggacataatttcattctttttaatggctgtttagcattccttcatgtgtatgtaccgaattttcattatccatttttccattgatgaacatgtaggttgatttcatgtctttgctattataaatagtgctgtgataaacatacaagtttctttttctttggggacatacctaatagtgggattgctggatcaaatggtagctctatttttagttctttgagacatttccacactgttttccatagaggttgtactagtatgcatacccactaacagtgaataagcatccccattttcctgcatccacaaaaacatcttttttttttttacttttaaataatagycactttgagtggtatgagatggtatctaattgtggttttgatttgcatttctctgatgattagtgatgttgagcattttttttcttatatttcttgactgtgtatgctttcttttgagaagtgtcattttatgtccttttcccactttttaagaattctttttttattttttgttgatttgttagtttcttataaattctttattttagtcctttataggatgtatcatttgtgactactttctctcattctgtagattgtctgtgtactctattgacagtttattttggtgtgaagaagctctttagtttaagttccatttgtcaatttttattttgttgcatttgctattgaggtcttagtcataaattattttccta

SEQ ID NO: 927965 - DNA, 694 bp, Homo sapiens
aggtgaaggataaattgctgcatttggcccctcctacaatcaagaaagaggcacaatgcctagtgagcctgtttggattttggaggcaagacattcctcatttggatatgtttgttactctggcccatttatcaagtaacatgaaaggctgggagttttgagtggggtccagaacaggagaaggctctgcaacaggtccagtctactgtttggagcttttggcaggcctccgcaggtgaatcacagtggagacctctaggattttggagcaagatcctgccatcttcttcagattaactayccccagtttgagagacagctcttggcctgttactgggctttcgtggaaactgaacatttgactatgggtcatcaagtcaccatgcaacctgaacttcctgtcattaattgggtgctttcttacctatctagccataaagtgggttgtgcacagtagcattccatcatcatatggaagtggtatatatatatgagcaggctcgagcagttcctgaagacacaagtaagttacttgatgaagtggcttaaatgcccatggtccctacttctgccacctgccttctcttccccagcctgcaccgatggcctcatggggagttctgtatgatcaattgacagagaaagagaggactagggcctggttcacagatggttctccacgatatgcaggcac

SEQ ID NO: 927966 - DNA, 699 bp, Homo sapiens
ggtgaaggataaattgctgcatttggcccctcctacaatcaagaaagaggcacaatgcctagtgagcctgtttggattttggaggcaagacattcctcatttggatatgtttgttactctggcccatttatcaagtaacatgaaaggctgggagttttgagtggggtccagaacaggagaaggctctgcaacaggtccagtctactgtttggagcttttggcaggcctccgcaggtgaatcacagtggagacctctaggattttggagcaagatcctgccatcttcttcagattaactatcccyagtttgagagacagctcttggcctgttactgggctttcgtggaaactgaacatttgactatgggtcatcaagtcaccatgcaacctgaacttcctgtcattaattgggtgctttcttacctatctagccataaagtgggttgtgcacagtagcattccatcatcatatggaagtggtatatatatatgagcaggctcgagcagttcctgaagacacaagtaagttacttgatgaagtggcttaaatgcccatggtccctacttctgccacctgccttctcttccccagcctgcaccgatggcctcatggggagttctgtatgatcaattgacagagaaagagaggactagggcctggttcacagatggttctccacgatatgcaggcaccacctg

SEQ ID NO: 927967 - DNA, 632 bp, Homo sapiens
acataaactcttcttagacctctaccaaagaattcaagtaatggaacttataatagaaaataaaaagaaaaatattatttataatatctagtatttgttcaaatatatataattatatatctagtatttgttagaatatatatatatttgagacagagtcttgctctgtctcccaggctggaatgcaattgcccaatctcagctcactgcaacctctgctttccaggttcaaatgattctccaggctcacccactcgggtagctggaataacaggtgcacatcaccatgcccggctaatttttgtatttttactaaaaaggaggtttcaccatgttagcaaggcttgtctcaaactcctgacctcattatccacccacctcggcctcccaaagtgctgggattacaggtgtgggccaccataccccaccaaaaactattttttcattcaaagagctcagaaaatcaagaaagartacattttggaaataaatgaatgtataaatagacacacttttgtgaaaattttaaatactaataaaaaatacaaatccagccaggcatggtggctcatgcctgtaatcccactactttgggaggcggaggcggatggatcacttgaagtcaggagttt

SEQ ID NO: 927968 - DNA, 810 bp, Homo sapiens
cctgggtctggcttcctcccgcaacctcactctagtagagcctgtgcctgcctactagcgctctggggttcggagagtttgggaatttctcagagccaactggctcaggcttgggaaggctggctgctgccctcagctccgcctcatcagctatgtgaaggggtgtgtrtggagtgatcctgccgccccctccctgggctcgtccagagatctcaaactccgatgcccctggggccacgtatgttgtataaatggatgaaacaggcccttgagttgggagcctgcttcactttgactttcccactgttgctggagacaaagacatcgtgatgagagaaagttcgcacaatctagtcggtaacagccactttccttgagaccaagagagtgcggtggggatgggggggagagcacgggtccccgtctgacagtggccgctgccatattcaggtgtagctaattgctctggtgtgggaatgcaggcctaatgacagaaatctggagaagccagaaatacagatttgtatgtgagatgtcctgattttttaagttgttggcagaaattaattcagaaatcaaatctgcaggccaaacaaggtgcaggacccagctttggccccatgcccctgtaggtccctctgggacagtcaccgctggggtcctggctgctctgtcattgagggatgctgggcactgctgccgggtggccagggtatggggcatgtgcccagcaatgtggctccttggccccgctggccagtgtcctgggcccctgacaggcgctggctgtgagtggtttgtacatgctac

SEQ ID NO: 927969 - DNA, 727 bp, Homo sapiens
agtttgggaatttctcagagccaactggctcaggcttgggaaggctggctgctgccctcagctccgcctcatcagctatgtgaaggggtgtgtgtggagtgatcctgccgccccctccctgggctcgtccagagatctcaaactccgatgcccctggggccacgtatgttgtataaatggatgaaacaggcccttgagttgggagcctgcttcactttgactttyccactgttgctggagacaaagacatcgtgatgagagaaagttcgcacaatctagtcggtaacagccactttccttgagaccaagagagtgcggtggggatgggggggagagcacgggtccccgtctgacagtggccgctgccatattcaggtgtagctaattgctctggtgtgggaatgcaggcctaatgacagaaatctggagaagccagaaatacagatttgtatgtgagatgtcctgattttttaagttgttggcagaaattaattcagaaatcaaatctgcaggccaaacaaggtgcaggacccagctttggccccatgcccctgtaggtccctctgggacagtcaccgctggggtcctggctgctctgtcattgagggatgctgggcactgctgccgggtggccagggtatggggcatgtgcccagcaatgtggctccttggccccgctggccagtgtcctgggcccctgacaggcgctggctgtgagtggtttgta

SEQ ID NO: 927970 - DNA, 749 bp, Homo sapiens
gtctcctcatctgggaagtgggcagtgaggtctgaggcactagtagagtccatgccttggagcacagggattattggtttctcggattggctctggggagggtgagattggatcccggggactcagacctgtctctgactgcaggacatcaatgataacctgcccatcttcaatcagtccagctacaactttacggtgaaggaggaggatccaggtaygtgctccctgggccaggagagacactgcggctgggacccagtgtggctttgtcagggtggacctcgagttccaagagaggcaagggcagaggaggcttccgatggcggggtcaggagtccttctgagctctgccccttgtccacaggagtgctagtgggcgtggtgaaggcctgggacgcggaccagacggaagccaacaaccgcatcagcttcagcctgtcggggagtggtgccaactacttcatgatccgaggcttggtgctgggggctgggtgggctgagggctacctccggctgcccccggacgtgagcctggattacgagacacagcccgtcttcaacttgacagtgagtgctgagaacccagacccccaggggggtgagaccatagtagacgtctgcgtgaatgtgaaagacgtgaacgacaatccccccaccctggatgtagcctcactccggggcatccgtgtggctgagaatggctcacagcacggccaggtggctgtggtggttgcctcggatgtggacac

SEQ ID NO: 927971 - DNA, 622 bp, Homo sapiens
tcacccagtggatcctgtgccagggctgcaggtggagctgcctgccagtggtgcgctgtgtgcctgcactcctcagcccttgggtggtcaatgggactgggcaccgtggagcagagggcagcgctcgtccgggagctccggccacaaaggagcccacggaggtggggaggctcagacatggygggctgcaggtcccgagccctacccagcaggaaggcagctaaggcccggcgagaaattgagcatggcagttgctggcccaggtgctaagctcctcgctgcccgggctggtgggccggccggcttctccaagtgtggggtatgccaagcccatgcccacccggaactcgcactggcccgcaagcaccccggcagccgcggttcccacccgcgcccctccctccacacctccccacaagctgagggagccgctgcagccttggccagctcccttttggtataggaatgtttacccaactctatactcgcattatatcttggaagtaaattacttgcctttgattttacaagctcataggtggaaaggactcgccttgtctcagatgagactttgggcttttgagttaatgtggaaagagttaagactttggctgatatggtt

SEQ ID NO: 927972 - DNA, 622 bp, Homo sapiens
tcacccagtggatcctgtgccagggctgcaggtggagctgcctgccagtggtgcgctgtgtgcctgcactcctcagcccttgggtggtcaatgggactgggcaccgtggagcagagggcagcgctcgtccgggagctccggccacaaaggagcccacggaggtggggaggctcagacatggcgggctgcaggtcccgagccctacccagcaggaaggcagctaaggcccggsgagaaattgagcatggcagttgctggcccaggtgctaagctcctcgctgcccgggctggtgggccggccggcttctccaagtgtggggtatgccaagcccatgcccacccggaactcgcactggcccgcaagcaccccggcagccgcggttcccacccgcgcccctccctccacacctccccacaagctgagggagccgctgcagccttggccagctcccttttggtataggaatgtttacccaactctatactcgcattatatcttggaagtaaattacttgcctttgattttacaagctcataggtggaaaggactcgccttgtctcagatgagactttgggcttttgagttaatgtggaaagagttaagactttggctgatatggtt

SEQ ID NO: 927973 - DNA, 622 bp, Homo sapiens
tcacccagtggatcctgtgccagggctgcaggtggagctgcctgccagtggtgcgctgtgtgcctgcactcctcagcccttgggtggtcaatgggactgggcaccgtggagcagagggcagcgctcgtccgggagctccggccacaaaggagcccacggaggtggggaggctcagacatggcgggctgcaggtcccgagccctacccagcaggaaggcagctaaggcccggcgagaaattgagcatggcagttgctggcccaggtgctaagctcctcgctgcccgggctggtgggccggccggcttctccaagtgtggggtatgccaagcccatgcccacccggaactcgcactggcccgcaagcaccccggcagccrcggttcccacccgcgcccctccctccacacctccccacaagctgagggagccgctgcagccttggccagctcccttttggtataggaatgtttacccaactctatactcgcattatatcttggaagtaaattacttgcctttgattttacaagctcataggtggaaaggactcgccttgtctcagatgagactttgggcttttgagttaatgtggaaagagttaagactttggctgatatggtt

SEQ ID NO: 927974 - DNA, 764 bp, Homo sapiens
tcacccactgactaggttggcagctttggctgccccacccttcctgtgcacagattgtgatacagtggggctttctccactcccatgcccaggcagatctccaggcagtcagagcacccattcaaaaggatcagtagcttaagccacactccccttcctgtgcagagattatggtgaagtggggccctctctgctctacactcaggcagatctccaggaattcttagcacccactcacctgaattggcaacctgaggtagcacacccttcccgcgcagagactgggtgaagcagggccctctccaccccacacccaggcatatctccaggaagaccaggacttccagcctgagacactccaccttttctctgcagagactgtggtacactccatgaccagacagatctctaggcacctggagaacctactctcctggattaggagtttaggccaccaatctcctgcacycccacccttgcaatgaactttaggttgaggaagtttcccagctccatgcttaggcacatctttggatgttttgtggcaagccactggattctcccagtgctggtgcttgtgcctgccactgggggacttgcaggtgggcctgcttggtctggcccagccaatcatgctcccagcactcccggggctgagcagggagctgagaccactctgcatttcatggattagtccattgcctgaagcaacagagagcttctcccagtaagcaaggatgaagcatatacctagcctagctggc

SEQ ID NO: 927975 - DNA, 585 bp, Homo sapiens
gctggggaagaggatgctgttgccagtttaccaccgaataacacgtatgcttcttatatgacctgcctggccagtgttggcatctgaattttcaaccccagatgaggaatttctctttggaagcttttacaataaagatttaattcatctgatgaaatgagtttaagatgaaaacaaagtacatgacctcatgatattaagaggaaagagcaaaataaaaattgtcatatagagtatggttccatgtttgctttaaaataacaacaaaaaaaagaataaaaatttgcakagggaaaagaatgggatacatcaacagagttaaaaatagtagttaactcagtgtttggggaccgtggatgatatgtgctttcttgcaatcagaagaataagatttattttttggttggctgcagtggctcatgcctgtaatcccagcactttgggaggccgaggccggtggatcacttgaggtcaggagttcgagaccagcctggccgacatggcaaaccacgtttctactaaaaatacaaaaattagccaggcacagtggtgcacacctgtaatcccagctattagggaggctga

SEQ ID NO: 927976 - DNA, 510 bp, Homo sapiens
cacttatcaagtctggattcttctagataaggaaatgcagatacaatccctcttccaaaactcttgaggccagatgtatttgaaaattcagaatttttcagattttttgaaaggtaacatggtacatttttttgtatacagtagtctttcttatccacagtttcactttctgtgattccagttaactgaggcaaactgtagtctgaaaatattaaaaggaaaattccagaaataaacaattcataaattttaaactgcagcttgatcatatctgaagkgcaggacaatagttctgagaagcatgatgaaatctcatgctgtcccgctctgtcccacccagacatgaatcacccctgtgtccagcctgtagccatctcggttatcagatcaactgtcacacaatctcagcgtttgtgttcaagtaacccttattttacttaataatggccccaaagcacaagggtactgatgctggcaattgggatatgccaaagagaagccaaatatatg

SEQ ID NO: 927977 - DNA, 604 bp, Homo sapiens
attgtgacttaaagcctgccaccagatgcaacagacaattgaagtacatcaactcacttgccaatataaagcctgctaccagatgcagcttgtcacttgccacacacttattgcgttttgatatgagtctgtaagcaattgatttatgatggtctctgtgtagtcaaacctctctgctaatgttaatctgtatttgyagccactccccagtgctaacatcaccacctcagctccaccttaggtcactaggcattagattctcaaggagcatgcaacctatatcccttgcatacacagttcacaatagggtttgtgcttctctgaaagtctaatgctgccactgatctgacaggaggcagaactcaggtggtaatgccagcaatggggagtgactgtacatacagatgaggctttgctcgctcactcaatgttcacctcgtgctgtgtggcctggttcttgacaggctccggtccttggccctggggttgggggcccctgctgtagtggaatgaatggtggtccccaaaaacatacatttattttctaacccccagaaactgttaatgtgactctatttggaaaaaaaaaatatttttacatata

SEQ ID NO: 927978 - DNA, 604 bp, Homo sapiens
attgtgacttaaagcctgccaccagatgcaacagacaattgaagtacatcaactcacttgccaatataaagcctgctaccagatgcagcttgtcacttgccacacacttattgcgttttgatatgagtctgtaagcaattgatttatgatggtctctgtgtagtcaaacctctctgctaatgttaatctgtatttgcagccactccccagtgctaacatcaccacctcagctccaccttaggtcactaggcattagattctcaaggagcatgcaacctatatcccttgcatacacagttcacaatagggtttgtgcttctctgaaagtctaatgctgccactgatctgacaggaggcagaactcaggtggtaatgccagcaatggggagtgactgtacatacagatgaggctttgctcgctcactcaatgttcacctcgtgctgtgtgkcctggttcttgacaggctccggtccttggccctggggttgggggcccctgctgtagtggaatgaatggtggtccccaaaaacatacatttattttctaacccccagaaactgttaatgtgactctatttggaaaaaaaaaatatttttacatata

SEQ ID NO: 927979 - DNA, 731 bp, Homo sapiens
tagttctttaaggcatctccacactgttttccatagtggttgtaccagtttacattcccatcagcaatgtagaattgttccttgttcactgcatccacaccaacatctactgttttttgattttttgattatggtcattcttgcaggagtaaggtggtatcgcattgtgcttttgatttcaatttccctgttcattagtatgttgaccattttttcatgtttgttggccatttgtatatcttcttttgagaattgtctatycatgtccttatcccactttttgatgggattgtttgtttttttcgtgttgatttgtttgagttcgttgtagattctggatattagtcctttgtcagatgtatagattgtgaagatttttctcccactctgtgagttgtctgtttactctgctgttttttttttcctgtgcaaaagctctttagtttaattaagtcccagaaatgtatctatctttgtttttattgcatttgtttttgggttcttggtcacgaaatccttgcctaagccaatgtctagaagagtttttacaatgttatcttccagaatttttatagtttcagctcttagatttaagtccttaatccatcttgagttgatttttgtataaggtgagagatgaggatccagtttcattctcctacatgtggctagccaattattgcagcaccatttgttgaaaagggtgtcctttccaaataaaatacttagga

SEQ ID NO: 927980 - DNA, 731 bp, Homo sapiens
tagttctttaaggcatctccacactgttttccatagtggttgtaccagtttacattcccatcagcaatgtagaattgttccttgttcactgcatccacaccaacatctactgttttttgattttttgattatggtcattcttgcaggagtaaggtggtatcgcattgtgcttttgatttcaatttccctgttcattagtatgttgaccattttttcatgtttgttggccatttgtatatcttcttttgagaattgtctatccatgtccttatcccactttttgatgggattgtttgtttttttcgtgttgatttgtttgagttcgttgtagattctggatattagtcctttgtcagatgtatagattgtgaagatttttctcccactctgtgagttgtctgtttactctgctgttttttttytcctgtgcaaaagctctttagtttaattaagtcccagaaatgtatctatctttgtttttattgcatttgtttttgggttcttggtcacgaaatccttgcctaagccaatgtctagaagagtttttacaatgttatcttccagaatttttatagtttcagctcttagatttaagtccttaatccatcttgagttgatttttgtataaggtgagagatgaggatccagtttcattctcctacatgtggctagccaattattgcagcaccatttgttgaaaagggtgtcctttccaaataaaatacttagga

SEQ ID NO: 927981 - DNA, 553 bp, Homo sapiens
aaaaccggtgtccgagaggttttgtctgcaacgtgtcctgctacagtagtcctagctactcagggggctgagtgggaggattgcttgaacccaggagttcaagactgcagtgagctatgatcaggctactgcactscagcctgaacaacaggctccatctcttaaaaaaaaattttttttttggctgggcttggtggctcacgcctgtaatctcagcactttgggaggccaaggcgggcggatcacctgaggtcgggagttcaggaccagcctgaccaacatggagaaaccccgtctctactaaaaattcaaaattagctaggcgtggtggctcatgcctgtaatcccagctactcgggaggctgaaacaggagaatcacttgaacccgggaggtggaggctgtggtgagctgagatcgcaccattgcactccagcctgggcaacagaataagctccgtctcaaaaaaaaaaaaatgttaattttaaaaagggggataaataatctaaatagacatttctccaaagatgagatataaaaggccaacaatcctg

SEQ ID NO: 927982 - DNA, 553 bp, Homo sapiens
aaaaccggtgtccgagaggttttgtctgcaacgtgtcctgctacagtagtcctagctactcagggggctgagtgggaggattgcttgaacccaggagttcaagactgcagtgagctatgatcaggctactgcactgcagcctgaacaacaggctccatctcttaaaaaaaaattttttttttggctgggcttggtggctcacgcctgtaatctcagcactttgggaggccaaggcgggcggatcacctgaggtcgggagttcaggaccagcctgaccaacatggagaaaccccgtctctactaaaaattcaaaattagctaggygtggtggctcatgcctgtaatcccagctactcgggaggctgaaacaggagaatcacttgaacccgggaggtggaggctgtggtgagctgagatcgcaccattgcactccagcctgggcaacagaataagctccgtctcaaaaaaaaaaaaatgttaattttaaaaagggggataaataatctaaatagacatttctccaaagatgagatataaaaggccaacaatcctg

SEQ ID NO: 927983 - DNA, 619 bp, Homo sapiens
aggccgcaatatacagtacgtataaagtatttcaactttttcttgtaatgtcatgacttttctctgcctcaaggaagcacattcagcatcaccagtgggacttcatgtgggccccatggtgttattcaagaattacattattgcactaaacactgtaaaaaatacacaaaaaccaagagaggtaactttttactgtaatacgcaatttactggagagatgaactgctcatgcagatctgattagcatcacatgccattttaagaggatacaataggacttcaacagcaacaagaggtggttatgaaattattgcaatagtacagtatgtactataatcttatgcagttatgatgaatactacatctttacatttgtttacatttctctcaactgcaagtggtagtgccgggtagagtcagtgtttttgtgcataagtttttttayaaatttcaactttttgcaatatatttgtatatattttatagtagtaaatgatgaaacagactagtatctacatttttttaaacttttatttttggttcaggggtacatgtgtaggtttgttatacaggtaaacttttgtaacaggggtttgttgtacaggttatttcgtcaccc

SEQ ID NO: 927984 - DNA, 678 bp, Homo sapiens
acacagagggagcatttagaccagccctaggcagaggggaatcacccatgccagtgttcagaacttgagttctgccaaaccttgccaccatggactaaagtgctctggagtcttaaataaacttgaaagtcagtccaggccacaagtactgcaagttttagtgctgagctgggcctggagccagtggacttgtgggagacacaacttactgagataccaacttgggcagctaagggaatgcttgcagcacccctccctcaaccccaggcagtgcaacttwcatctccaaaagagacttcttcctttcgcttaaggagaagagagggaaaagtaaagaggactttgtcttgcatcttggataccagctcagccacagtaggatagggcaccagtcagagtcatgaggcccccatttcaggcactagttcccagacatttctagacacaccatgggccacaaggggaacctactgtattgaagggaaggatccagtcctagctggacccatcacctaaagagcccttgggccctgaataaccaccagcgatacccagctactattctgtgggccttaagcaagactctaagatgcactggcttcaagtgagactcagcaatctcagttgtggaggctacagtgagcgacttcatctggttgagaaaagcagaggggaaag

SEQ ID NO: 927985 - DNA, 554 bp, Homo sapiens
tgcggctctatgcggtactaaagagcagaagacagaagatacaaaaaccacaaaaagtagccgggcgtggtgctgcccgtcaataatcccagctactcgggaggctgagacaggagaatcgcttgaacccgggaggcggaagtttcagcgagccgagatcacgccgttgcagtccaacctgagcgtccgagcgagactctatctcagaaaataaagacagaatgaaagagcccggcgcggtggcttacgcctgtaatcccagcgctttgggaggccgaggcgggcggrtcgcctgaggtcaggagctcgagaccagcctggccgacatggcgaaaccccctaaaaatacaaaaattagccgggcgtggtggcctgcgcctgtaatcccagctacccaggaggctgaggcaggagaatcgctggaacccgggaggtagaggctgcagtgagccgagatcgcgccactgcactccagcctgggcgacagagcgagagtttgtctggaaaaaaaaaaaaaaaaagccagggtgagcggtggctcaagcctgtaatcg

SEQ ID NO: 927986 - DNA, 440 bp, Homo sapiens
cttcgagcaacagctgtggctggacaggttggaccagcaggctggagcagtcgccatcttggcagggatcattgaccctgatctatcgtcgggaggaggaagagctgatcttacgcagggagggcaggtggactatgtgtggactctggtgacctgtttgggtgccaggtgttactcccagggccacccgtaactgtgaatgtgcaggaaccctgacttgagaagggcctggcacggggggcttaggccctgggaatgagagtttggttccggtaccagggaaaccaccagcatcggcagaggtgatagctggggaggagcggggatttggacgagagacacaggatgagtaccgggggcagccctgtgatcaacaactgctgcaagaggggccgtttgttcgactcrctagtcttctgtggctctatgcggtactaaag

SEQ ID NO: 927987 - DNA, 585 bp, Homo sapiens
tcgattacaggcttgagccaccgctcaccctggctttttttttttttttttccagacaaactctcgctctgtcgcccaggctggagtgcagtggcgcgatctcggctcactgcagcctctacctcccgggttccagcgattctcctgcctcagcctcctgggtagctgggattacaggcgcaggccaccacgcccggctaatttttgtatttttagggggtttcgccatgtcggccaggctggtctcgagctcctgacctcaggcgayccgcccgcctcggcctcccaaagcgctgggattacaggcgtaagccaccgcgccgggctctttcattctgtctttattttctgagatagagtctcgctcggacgctcaggttggactgcaacggcgtgatctcggctcgctgaaacttccgcctcccgggttcaagcgattctcctgtctcagcctcccgagtagctgggattattgacgggcagcaccacgcccggctactttttgtggtttttgtatcttctgtcttctgctctttagtaccgcatagagccgcagaagactagcgagtcgaacaaacggcccct

SEQ ID NO: 927988 - DNA, 487 bp, Homo sapiens
gggcagcaccacgcccggctactttttgtggtttttgtatcttctgtcttctgctctttagtaccgcatagagccgcagaagactagcgagtcgaacaaacggcccctcttgcagcagttgttgatcacggggctgccccccggtactcatcctgtgtctctcgtccaaatccccgytcctcctcagctatcacctctgccgatgctggtggtttccctgggtaccgggaaccaaactctcattccccaggggcctaagccccccgtggccaggcccttctcaagtcagggttcctgcacattcacagttacgggtggccctgggagtaacacctggcacccaaacaggtcaccagagtccacacatagtccacctgccctccctgcgtaagatcagctcttcctcctcccgacgatagatcagggtcaatgatccctgccaagatggcgactgctccagcctgctggtccaacctgtccagccaca

SEQ ID NO: 927989 - DNA, 569 bp, Homo sapiens
tcagactctcagcctccagtaccatgagaaataaatttctgttgcctataagccacgaagtctaaggtactttgttataatagcctgaattgactaaggaaaatgcttattttgattctaaccctctgctatgtttcgaatgactgtcctctccaaaactcatgttggaacgtaatccccaatgtaacaatattgagaggtggggcctataagtgattaattcatttactggttaatggattaatgggttaatggattaatgggttagcatgggagtgggttagttatcatagaagtgtgcctgttacaaaaagtcaggttggctctttcttgcaaactcccttaccgtgtaatgctctatgccatcttgggactctgcagagaatccataccagcaagaaggcctagaagaccctcaccatayactgcccctagaccttggagtttcctggcctccaaaactgtaagaaataaatttcttttttaaaaaaattacccagtctcaagtactcatttatagcaatagaaaagggactaagacaccctccgaagacatttaatggtaatag

SEQ ID NO: 927990 - DNA, 729 bp, Homo sapiens
taaagtgagacatacgggtttctctctggactctgctactgtcttagtctgctataacaaaataccacagactggatagcttataaacaacagaaatgtattgcccatagttttggagactgggaactccaagaccaaggtactagcagattcattgtctggtgagggcttgctttataattcgtagatggccacttttkttttgttttgttttgttttgttttgttttgttttgctatatctttacatggtggaagtgttgaagaagctctctggtcctcttttgtaagggtactactcctatttataagggctctaccctcatgacctaatcaccccccaaaggtcccacctcctaataccatcacattggagattaggtttcaacatatgacatgaattttgggggaacacaaagatttaggctatagcagccacacactagctgtgtgcttgggtctctgaacttcatttttttgtgatctacacaatcaaagtaataatagctcattcataaagttgacgggaattaaaaaagtgtgtctaacatttgacatagagcctaatacatagtagccactttgcaaatattaacctgtatttaatatttcttcaagacagaagcagtccccatcccactcagggtccctcagaggcctcatgttctttatgctccccttacccactcaaggacaacagtacatacataccatctgtctttcttccctg

SEQ ID NO: 927991 - DNA, 570 bp, Homo sapiens
aacatacatcacatatcaaacaaggtaatgttttcttgtaatgtcatgacttttctatgattctcaggaccacttcaagcatcactaacggcattttgtatgagtctcacgctgttaatcaaggttcacagtcttgcactaaacatgaaaatatgtgagaaccataggagatcactttttactatagtacacaatttactggagagatgaactgctcacatggagattattaacattgcatggcttttcttttttctttttttttgagatgcagtcttgctctgtcaccaggctggagtgcagtgatgcaatctcggctcackgcaacctctgcctcccgggttcaagcgattctcctgcctcagcctcctgagtagctgggactacatgcaggtaccaccatgcccagctaatttttgtatttttagcacagatgaggttttaccatgttggccaggatggtctcgatctcttgacctcgtgatctgcctgccttggccttccaaagtgctgggattacaggcatgagccaccgcgcctggcctcattgcatgacttttaagctgatat

SEQ ID NO: 927992 - DNA, 767 bp, Homo sapiens
tccgtatcactttcaattctgctctgatattagttatttcttaccttctgctagtttttggattagtttgctcttgcctctctagctcttaattgtgatgttagggtgtcgatttgagatctttctagctttctgatgtgggcatttggtgttataaatttctctcttaacactactttagctgtgccccagagattctgatacattgtctctttgttctcattggtttcaaagaactttttgatttgtgccttaatttcattatttacccaggagtcattcaggagcaggttgttcaatttccatttaattgtgtggttttgagtgagtttcttaatcctgagttgtaatttgattacagtgtagtctaagagactgttatgatttcaggatttcagttattttgcatttgctgtggagtgtttaacttccagttatgtgggtgatttcagagtaagtgccatgtggcactgagaakaaagtatgtcaaatagacacaataaaaaatgataaaggagatatcaccattgaccccacagaaatacaaactaccatcagataataatataaacacctctacacaaataaactagaaaatctagaagaaatggataaattcctggacacatacaccctcccaagactaaaacaggaggaagttgaatccctgaatagaccagtaacaagttctgtaattgaggcagtaattaatagactgccaaccaaaaaaaaaagcccaggagcagatggattcacagctgaatttt

SEQ ID NO: 927993 - DNA, 603 bp, Homo sapiens
aatctgtcgggaataatactagggagctacctttccctggagatgggtcttgtcagtggagtgagataggctggggggaggaagaggaatgggaggctcagtttataaatattaagatcagcaagggtgtgctgctggcaggagcagagggagcctggagatttgggtggctgccgttggtaagtggttgcaatccagagagtgggattgagttcctcccttgtcatgttagcatcccgtttcctgggcgcgggtctaatgccctgcaggtggtcatttcactcatggtggctttgtctctcttctgccatctccagactcagcttcgcactccagggctgcgtaccaccagccactgtcatgttaaccccttcccaggccaatgtgtccttggyctggagcccaatctgctggacagcctgggaccgtccattttcggggtggtgggcaacctggtggccatcgtggtgctgtgcaagtcgcgcaaggagcagaaggagaccaccttctacacagttatgcggctggttgccaccgacctgttgttcactttgctggtgagccaggtgaccatcgccatgtacatgaagggcgggtaacctg

SEQ ID NO: 927994 - DNA, 567 bp, Homo sapiens
tatcacacattgtatgcctgtgtcaaactatctcatgtaccccataaatatatacacctaccatgtactcatataaattaaaaatagaaataaatttttaaaaaaactgtgagttttaaaggtgaggtttgccctccagtgctggtgcctgccaggtgtgaccttcacatcrtctttccacatggtccaggccctcatctgcagaggccaacagttcccagagtgaccttcctcagaaaacagggtcttggaggtgacagtcagaggagggggcctcatcctccccactgcccagccccttgtggggattggaagtgagggtctctgcccacaagttggcagtcaccctaagctgttttgtgggaggaagcatagggaatataggtcagtgctgggacagcctttcctgatcctgacttggagaaggtgttaaaatcttgacattcccgactcctcctttgtgagagcccctgccctgcaggtctcacagggttgttgtgagggtcacctgtggtgatgggtttggaagtgctttgtgaattacacagtgggctttcctattcctgt

SEQ ID NO: 927995 - DNA, 807 bp, Homo sapiens
taatcacacataacactcattaatcaagttacaaaggaggatcattaccaaccgaggccatagtgcaggaaaattcctgccctgcaagccacatcagtggggctttgctttactccaaagaccaggtaggggccactgggggagaaccactttcacctggtgacatttctgtggagttcaggaggacctgtaagacctgggttagtttcttaagtttcagcccttaaccaatcagagaaatgcaactacagggccaaacacaaagagggctaatagggatgaaatactaaaagattccagataactcttttttgtaaataaattaaatatgccaacatttgctataacaaaatttgtaaagtgggaatttacccattatttcagatgaattaaagttcctaattttagtgctttttaaaaaattatatttatagcatgatctcggctcactgcagcctctgccttctgggttcaagaaattctcctgcctcagcctcccgactagctggggttacaggtgcctgccaccatgctcggctaatattttgtatttttaatagagacagagttttgccatgttggccaggttggtctcaaattcctggcctcaggtgatccacctgcctcagcctcccaaagtgctgggattataggcrtgagccactgtgcccagcccacgttattgatttatagagaataaggatttagctttcctttctcccatccattcccttcacacaattccctcatcctcctgatagtttcattatatctttttgttagagtaataattatttggtaataatt

SEQ ID NO: 927996 - DNA, 618 bp, Homo sapiens
agatgagacaatccagagagaaggggtagaattagaagagaaggcagcctggggcagagcacggaggcttggcacgccacacttaagggacacggagaggcagagaaacttgaagaggagcagacatggagcttagacacccagagtggggcccagagctaaggaggagtgtctcaaggtgttggggtggggagggcacagaatcaccaggcttcagatgctgctataaggtcaggcctacaaaggtttggattyagtgcacagaggttattagtgacctggacaaagcagttattttttgctgatgaagtatattaaaaggctttccaggcatcacatgtgccttagtccattcaggctgctataacagaatactgtagactaggtggcataaagaactaaaacaacggatttattcctcacagtccttgaggctgggaagtccaagatcaagatgctggcagatccagtgtctagtgacggcccacttcctggttcatggaacagcaccttctcattgcgtccttacatagtagaaagaatgagagagctgtctggggtcccttttataaggcactaatcctatttgtgagggatctacctctgaggcctgataac

SEQ ID NO: 927997 - DNA, 618 bp, Homo sapiens
agatgagacaatccagagagaaggggtagaattagaagagaaggcagcctggggcagagcacggaggcttggcacgccacacttaagggacacggagaggcagagaaacttgaagaggagcagacatggagcttagacacccagagtggggcccagagctaaggaggagtgtctcaaggtgttggggtggggagggcacagaatcaccaggcttcagatgctgctataaggtcaggcctacaaaggtttggattcagtgcacagaggttattagtgacctggacaaagcagttattttttgctgatgaagtatattaaaaggctttccaggcatcacatgtgccttagtccattcaggctgctataacagaatactgtagactaggtggcataaagaactaaaacaacggatttattcctcacagtccttgaggctgggaagtccaagatcaagatgctggcagrtccagtgtctagtgacggcccacttcctggttcatggaacagcaccttctcattgcgtccttacatagtagaaagaatgagagagctgtctggggtcccttttataaggcactaatcctatttgtgagggatctacctctgaggcctgataac

SEQ ID NO: 927998 - DNA, 736 bp, Homo sapiens
aagccgagtaagtatgtggcccttgcaaattcatagaggtactgccttggtgatctccggtaagatcagaggggattcactggattaacatggagagactcgttttttcccttactttctcccaaacaaagtctctttctccatactgagctgctgggagctgggggaggggtgacacaacactcctgtggccaccatcactgggacygtactgggtcagacctgaagccaggacagcactcggtctgatccaaggcccatggcaaacactgcctcattactgccaatgttcactcaaggcccaatggctcttctatcagcatatggtgaatctagccagacttgtgtccttccttgagggtaagaagctccccctggcccagtgtctgtccagagatgctgtctgggagcctgggcctaaagtcaggaaccttgagattctactggtgctctattctactgtgactgagctggcacccatgctacaagacaaagtccttcccactcttctctttcctttcctcaggcagaagaaatctctccccatggccactgctaccacaggcttacagtgagtactgcctggctaccatcaatgttcactcaagtcccaagtactcttcaataaccttgtggcaaatacttccatgcttgggtctctctcttcagtaagcttgtggcaaatacttccatgcctgttctctcctctattccagggtgggcccagaaaagccca

SEQ ID NO: 927999 - DNA, 569 bp, Homo sapiens
cctgtaatcccagctactcgggaaggtgaggcaggagaatcacttgaacccgggaggtggaggttgtggtgagccgagatcatgccattgtactccagcctgggcgacagagaaagactccatctcaaaaccccccccscaaaaaaaaacaaaaaacaaacaaacaaaacaaacgttctctgtgttctcgttagctgaaaagattttatacctcttttttctatctggagcagacgtgttctacttcgtaactgttcaccgggccatttctctcacacaggactgtgtgctgtgtgggtatggatcctatcttatatactgttgtgttcccagcacttagcacagtgaaggacacatggtgagcactcaaaacatcagtgtggtgaatttatccaaaaacaaacaaatttgcatatgcactcaagcgttattttcataacacgggcctttccttttttgtgcctgcctctgaacccatacaatatatgaacatctgtacatcgtaaggatatgggcatggatctcacaaccagatgctctgtagttagggtacagtcggggctggagag

SEQ ID NO: 928000 - DNA, 647 bp, Homo sapiens
caccagcaggagctgggcaatatgcccaactttcacttgggaaatcctgacaaatcaatccggctcagtaaagctataaatggatttggctggtctcaacacagccccaatgaatacagtagtaaaacattactaataatcacaacaaaatgacaaaatctatcatcactctgacatgattcagatcacagagattaacacagaaaccaacacacaatggtgagggccagggttcttcaatgtagtgtgctactgagcacgggatcatcaacaagaaaaattattgcctaagaatctgttgggacacactggggagaaaatactctggtcgttctctgaacaacaaaagmcaaaaaacaattttaaaaggcagagccacaaattaaatgggaagactgcttgtaaccaaacccttctgaagaccagagagtaaagacttaagagttcacgtttgtagtaaggggaagggaaggaaggagggagggagaacatctgtgggaaagagatcatttccactgttgagggcagagatgatgaggctggtcagtggaatacgtagctggtcaagacagggaggagtgtctgtgttaagagatggaccacatccagcttttccctgctgtcacaagattagaaaattccagcaa

SEQ ID NO: 928001 - DNA, 460 bp, Homo sapiens
atcttattggagttcccttgtatgtctcaagtcatttttctcttgctgctttcgagattttctctttgttggctttcagcgtttttactgtgatatgtctacttgtggatttctttgtgagtttcttccttgggatttgttgagattcctaggcggtatagattaatggctttgaataaatrtggaaaattttcaggcattatttctttgaatatattttctgcttctttctctttctccccctttctggtactttcattatgtatatgttgtttccttaatggtatttcacatttctctaagtctctattcatatttcttcattcacttttctctctgtctttcagattgcataatctctatcaatctatcttgaaattcactaattctttcttctgccacttcaaatctactgttgtgccactctaacgaattttttattttagctgttataattttc

SEQ ID NO: 928002 - DNA, 594 bp, Homo sapiens
agtgcttgctggttgttctgaggcaaaaactgcttcacagactaacccaaacaaatttgagctcctttgaggggatagctcccaaaatcagtgtttgagatttgttctgactccaaaagggctcttcctagcttccccttttcccatttctctctgggaaactcgtgggcctacagtttagcctgtatctaaaatgtatctgtgaacacctaccaagtgccttttaccacaacttccactgtttttgagagtacttgtaagcctaaacttctccacatgctacaaatgaagtcacctcctttgggaacagagtggagatttctattcyatagcctatttctctcccaacatctctgagctaaggatctggtgcaggggtgaggaagtgggtagggacaacggagtctttctctttaagagttgagggtttggtgaatgggggaggggacagaagccccagttcctctcaacttgcctctcatgatgtgaaacccttaccccaaagccagaaaaaggtcaattagagcccagtattatagagtcttcatcccatgagtaaaagctgggtagaagagatcacccatctcttggctg

SEQ ID NO: 928003 - DNA, 567 bp, Homo sapiens
aaatgttaccaatggatgagtgaataaattgtgtgtgtgtgtgtgtgtgtgtgtgtgtaatctggccttagaaaagaaagaaatccttccatttgtgagaacatgaatggatctggaggatattaagtgaaataagccagacacagaaagacaaatagctgtactgtatgatctcactatgtggaatctaaactcttaaatttttttccattttatttatgtatttatccatctcagcaatatttttttaagttacataattttattttttataatttcaaattttattttagattcaggggtacacatgcaggtttgaaacatgggtatattgggtgatgctgaggtttggggtatgattgattccatcacccaggtagtgagcattgtacccactatgctttttcaaccctttccccctttcttcctcycccttttgatagtcttagtgtctattgttgcaatctttatgtccatgtgtgcacaatgtttaactcccacttacaagtgagaacacgcggcatttggttttctgtttctgtgctaatttgcctaggataatggtct

SEQ ID NO: 928004 - DNA, 735 bp, Homo sapiens
taacccgggaacttgttagaaatgcgaaaatttagggctgtcctccagacctgctgaatcagaaactctgggggtgaggtccagcaatctgtgttagtacaagccaagtacttcccaattcttgctgaagtttggcctatcctaagttgtggtctgttctatatttggacttgccatcattttgttaccttttactccaacttctcctggctctcctggtcatgagctatttatttgtcctctgcttctgtgatatcctcccaagtgacagaagcagctagatgcctccaccttctgcttccttattaacatatcagtatcatgaagacaccattgtgcctagttgacctcttcatttcctttgcaactaggtatkgtcacaggattaaattctagctaatgatttttttttgagacagagtctcactctgccatccaggctagagtgcagtggcgtgatctcctttcactgcaacctctgtctcccagtttcaagtgattctcatgcctcagcccctcctcgtacctgggattacagacgtgcgccaccacgcctggctaatttttgtatttttagtagagatggggtttcccatgttggccaggctgtctcaaactcaaactcctgacctcaggtgatccacccgccttggcctcccaaagtgctgggatcacaagtgtgagccactgtgcccagcctagctaatgattttaaatggaagttattgggaggaa

SEQ ID NO: 928005 - DNA, 735 bp, Homo sapiens
taacccgggaacttgttagaaatgcgaaaatttagggctgtcctccagacctgctgaatcagaaactctgggggtgaggtccagcaatctgtgttagtacaagccaagtacttcccaattcttgctgaagtttggcctatcctaagttgtggtctgttctatatttggacttgccatcattttgttaccttttactccaacttctcctggctctcctggtcatgagctatttatttgtcctctgcttctgtgatatcctcccaagtgacagaagcagctagatgcctccaccttctgcttccttattaacatatcagtatcatgaagacaccattgtgcctagttgacctcttcatttcctttgcaactaggtatggtcacaggattaaattctagctaatgatttttttttgagacagaktctcactctgccatccaggctagagtgcagtggcgtgatctcctttcactgcaacctctgtctcccagtttcaagtgattctcatgcctcagcccctcctcgtacctgggattacagacgtgcgccaccacgcctggctaatttttgtatttttagtagagatggggtttcccatgttggccaggctgtctcaaactcaaactcctgacctcaggtgatccacccgccttggcctcccaaagtgctgggatcacaagtgtgagccactgtgcccagcctagctaatgattttaaatggaagttattgggaggaa

SEQ ID NO: 928006 - DNA, 615 bp, Homo sapiens
ccagctgatttaaataaggcaaaatgccaagctgcaaccaattaaactatttctgtatctcactttgttttgtccataaatattgcctgatcacgttgcaggccagagtgcttagaacctgttccggttctgaagcctgtcctattttttttctgagacagaatcacactctgtcacctaggctgtaacgcagtggcacaatttcggctgactgcaacctccgcctcctgggttcaagcggttctcctgcctcagactcccgagtwgctgggattacaggtgcgcaccaccacacatggctaattttttgtatttttagtagataaggggtttcgccatgttgaccaggctggtctcaaactcctggcctcaagtgattcaccctcttcagcctcccaaagtgctgggattacaggtgtaagccaccacacccagcctcttatttttttcagagatagtctctctctgctgcccaggctgcagtgcagtagtgcaatcatagctcactgcagccttgaactcctgagttcaagtgattctcctccctcagcctcccgagtagctgggaccacaggcatggaccactatgcctggctaattttatacttttttgta

SEQ ID NO: 928007 - DNA, 671 bp, Homo sapiens
gttagtcaccccgcagggtcacgagcttcacgcagcctctaggcggccagattgtgtttcttccacctgctttatcagccaggaaacaggagcccctgactaatctgaagccctggcctcagaagaaaacaacgctaatgactcagaggccagagctgagaccagacagacccggtgtagccactcgggccaggctgctctgtgaagctgctgtttcctctgctgccgaagcggtttcttccacccagggcggtgcggtggtttggcgacttagaggtttggaggtcccttcttcctaagagttaactgtcctgaaaaagcccaaaacaagagcggcatgatcttaaatcctggggagaggacacaggctgcctggaggggccgagggcacacctagagctggggttttgttctcactctgttgcccaggctgcagcacagtggtgcgatctcggctcactgcagcctcaacctcsctgggctcagatgatcctcccaccttagcctcctgagaagctgggactacaggcacgtgccaccacatctggctaattttttgtaatttgtagagacaggggtttcaccatgttgtccaggctggtcttgaactcctgggctcaagcagtctgcctgccctggccccccaaagtgctgggattacaggcgtgcgc

SEQ ID NO: 928008 - DNA, 555 bp, Homo sapiens
agtgagttcctggtttcatcgctgggattcaagagccgaacagcctggagaagtcagagggcagaaatgtctgtgaggataggaggtgactgttctaaaaatattgtcagcgattattttacatgactattacctattacttagatgattttacatgattgtctgattttttaaagtaacctgtgatccacctgtgaatataattaacaatactgaactacacagttaaaagaagaatatactctttttttttttttagacagagtctggctctgccgcccagsctggagtacagtggtgcgatctcagctcgctgcaacctctgcatccgagattcaagcgattctcctgcctcaacctgctgagtagctgcaattacaggcgcctgccaccaagccagattaatttttgtatttttagtagaaatggggtttcaccatgttggctgggctggtttcgaactcctgacctcaagtgatccacccgcctcagcctcccaaagtgctgggattacaggcgtgagccactccgcacagccaacaccaccaccctata

SEQ ID NO: 928009 - DNA, 610 bp, Homo sapiens
gctatttacaggtcttttgtcatccatgagtcactttttagtccacgtctgttcttcctggcttggtgaagcctctagactgcctttatcttctatgtctgaaataaaatagaaaactgcatttcaaagataagtacttatttaatcactatgttagtctgttcttacattgctgtaaagaaacacctgaggctgggcaatttataaagaaaagaggtttaattaactcatagttctgcaggcagtacrggaaacatggccccagcatctgctcatggtgaggcctcaggaagcttccaatcatggtgggaggcaaagtgggagcaggcagtgtaacatggtgagagtgggagtgcatgcatgagaggggagaggttctacactctttttttttttttttgagacggagtctcactgtcacccaggctggagtgcagtggcacgatctcggctcactgcaagctctgcctgccgggttcatgccgttctcctgcctcagcctcccgagtagctgggactacaggtgtctgccaccacgcccggctaattttttgtatttttagtagagacgggctttcactgtctacactcttaaacagccagatctcat

SEQ ID NO: 928010 - DNA, 609 bp, Homo sapiens
caatatatttccatcatccctaatagattctttgtgcccccctgtagaaaatctgtcactttgctccaggctccagccagtcactgttttgtttttatcagtatagattaatttacattttctagaattttatatacatagaatcaaagcaactgttatctctagtttctttcacttagcagaatgagtttgagatttgtcttagttcgctcatgctgctataacaaaataacttagattgggtaatttataaacaacagaaatttattcctcccagttccggagcctgggaagtccaagatcaaggcacctgcagatctgatgtctgataaggactggttttctgcttcaaagatggcacctcgttgctgcatcttcacatggcataaggggtgaaagctttaagtttctttggtaagagcmctaatttcattcatgaaggaagagccctcatgacctaatcacctcctaaagggcccacctcttagtaccccacaatggagatgaggtgttttgttttgttttgtttttaatcttttaatttaaaagtaaactttactgtggaaaatgcaaacttggggagggcagaaagatcacacacaaggctgc

SEQ ID NO: 928011 - DNA, 595 bp, Homo sapiens
gctatttacaggtcttttgtcatccatgagtcactttttagtccacgtctgttcttcctggcttggtgaagcctctagactgcctttatcttctatgtctgaaataaaatagaaaactgcatttcaaagataagtacttatttaatcactatgttagtctgttcttacattgctgtaaagaaacacctgaggctgggcaatttataaagaaaagaggtttaattaactcatagttctgcaggcagtacrggaaacatggccccagcatctgctcatggtgaggcctcaggaagcttccaatcatggtgggaggcaaagtgggagcaggcagtgtaacatggtgagagtgggagtgcatgcatgagaggggagaggttctacactctttttttttttttttgagacggagtctcactgtcacccaggctggagtgcagtggcgcgatctcggctcactgcaagctctgcctgccgggttcatgccgttctcctgcctcagcctcccgagtagctgggactacaggtgtctgccaccacgcccggctaattttttgtatttttagtagagacgggctttcactgtctacactcttaa

SEQ ID NO: 928012 - DNA, 677 bp, Homo sapiens
tcgcccaggctggagtgcagtggcgcaatcccggcccagtgcaacttctgctgcccagtgattctcctgcctcagcctcccaggtagctgggattacaggcgcttgccaccacatctggctaatttttgtagttttagcagagatggggtttcaccatcttggcctggctggttttgaattcctgacctcgtgatccatccaccttggcttcccaaagtgctggaattaaggcatgagccaccctgcccagcctggcagtgagaatttcaagccagcggatcttagcttgctgggctccgtggggatgggatccggtaagctagaccacttggctccctggcttcagccccctttccaggggagtgaayggttctgtctcgctggcattccaggcgccactggtgtatgaagaaaacctcctgcagctatctcagtgtctgcccaaagggccgcccggttttgtgcttgaaacccagggccctggtggtgtatacacccgagggaatctcctggtctgcagattgcgaagactgtgggaaaagtgtagtatctgggctggatagctctatccctcacggcaggtctggagaagttttatctctttctccagtgctgtgcacttccctcggtggaaattatattgggttgtgcagttcacgctaccggccagtaggtg

SEQ ID NO: 928013 - DNA, 677 bp, Homo sapiens
tcgcccaggctggagtgcagtggcgcaatcccggcccagtgcaacttctgctgcccagtgattctcctgcctcagcctcccaggtagctgggattacaggcgcttgccaccacatctggctaatttttgtagttttagcagagatggggtttcaccatcttggcctggctggttttgaattcctgacctcgtgatccatccaccttggcttcccaaagtgctggaattaaggcatgagccaccctgcccagcctggcagtgagaatttcaagccagcggatcttagcttgctgggctccgtggggatgggatccggtaagctagaccacttggctccctggcttcagccccctttccaggggagtgaacggttctgtctcgctggcattccaggcgccactggtgtatgaagaaaacctcctgcagctatctcagtgtctgcccaaagggccgcccggttttgtgcttgaaacccagggccctggtggtgtatacacccgarggaatctcctggtctgcagattgcgaagactgtgggaaaagtgtagtatctgggctggatagctctatccctcacggcaggtctggagaagttttatctctttctccagtgctgtgcacttccctcggtggaaattatattgggttgtgcagttcacgctaccggccagtaggtg

SEQ ID NO: 928014 - DNA, 636 bp, Homo sapiens
ttttgccagacccttgcaccttagccaaccatggctgcaattgatgaacaagtatagttccagcgtgaatgttattttcctctaagttaaggagtgagatgaaaatgaagcagaagatagatgtatgttggaacttaacttggttgtcagtgatgtgagtgacttctttgctggaatggataatagttctaaaatactggaagaatatttcctcattttgcagggttagtcacaatgtagtggctacagggatgatactgaaatgtaatatgtaatctgcattagtaacatgttctccatcattttcttaagcctagacaatcaacaaagccatacatcaagccctgatgtttagtgtctgctgattttygtggtataaatacttccaccaaagctgattttaagctatccacctcatgtcattgaacatggagttgggaggagatgtgcagtagtgcacccttaacatagaatttccgccgggcgtggtggctcacgcctgtaatctcagcactttgggtggccaaggagggtggatctcctgaggtcaggagttcgagaccagcctggccaacatggcaaaaccctgtctctactaaaaatacaaaaaaattagctgtgcatggtggcacgtgc

SEQ ID NO: 928015 - DNA, 756 bp, Homo sapiens
ctggtggggacgtggagagtctttacgtctagctcagggattgtaaatacaccaatcagcaccctgtgtttagctcaaggtttgtgagtgcaccaatcaacactctgtatctagctgctctggtggggctttggagaacctgtgtgtggaaactctgtatctaactaatctgatggggacgtggagaacctttgtatctagctcagggattgtaaacgcaccaatcagtgccctgacaaaacaggccactcggctctaccaatcagcaggatgtgggtggggccagataagacaataaaagcaggctgccagagccagcagtggcaacacgcttgggtacccttccacactgtggaagttttgttcttttgctctttgygataaatcttgctactgctcactcttcggatccacactgcttttatgagctgtaacactcaccatgaagatctgcagcttctgtcctgaagccagcgagcccatgagcccaccagaaggaacgaacaactccagacgcgctgccttgagagctgtaacactcatcgggaaggtctgcagcttcactcctgagacagcgagaccacgaacccaccagaaggaagaaactcctaacacatccgaacatcagaaggaacagactccagacgtgccaccttaagagctgtaacactcaccacgaggatccgcggcttcattcttgaagtcagtgagaccaagaacccaccaattccggacactgtattagtccgttctcgc

SEQ ID NO: 928016 - DNA, 698 bp, Homo sapiens
agccagcgagcccatgagcccaccagaaggaacgaacaactccagacgcgctgccttgagagctgtaacactcatcgggaaggtctgcagcttcactcctgagacagcgagaccacgaacccaccagaaggaagaaactcctaacacatccgaacatcagaaggaacagactccagacgtgccaccttaagagctgtaacactcaccacgaggatccgcggcttcattcttgaagtcagtgagaccaagaacccaccaattccggacactgtrttagtccgttctcgcgctgctattaaagaaatacctgagactgggtaatttataaagaaaagaggtttaattggctcacagttctgctggctatacaggaagcatggctgaggaggcctcaggaaactttcaatcatggtggaaggcgaagaggaagcaggaacgtcttacatgcctggagcaggagaaagagagtgaagtgggaggtgctacatacttttaaacaacctgatcttgtgagaactcactgtcatgagaacagcaaggaggaaatacacccccacgatccaattgaagtaggatatttccctgactcctttgcaggactcatgaagggggtgccctgtttactcagcccacagctcccaactccttgtggaagggagtgcatgggtgaacgagacaggaactggagaacatgagca

SEQ ID NO: 928017 - DNA, 721 bp, Homo sapiens
atgattattattcttgcctatagcaattatcaggcgttggccaaatcatgattttctttttctgtcattcttttttcatttactaatagaattctactgtgatgaagagctgtgtcttcttcatgtatttctatattcattaattgtttaaatcagtaaaaatttatggatatttactttgttctatgacttgtaatcaggtactgtcattatttatcttattgctcaaattgtcccaaatttggccactggtagctccttcaggttggttcctaggttgtttyaacatgtccccatccattgttgaaaacttccttacattctggtaccacaagacatttcagactcatcttgtacttcccctccctttgccttggaattaaccatttctctaaggagatctggttttttttttattggagagtgatattttgaaacctagatttgtattctagttgaacacattgctgctggtgtaatgttgctgtagtccctcttagctgacagagctaggagatatgtatgtgcatgcttatgtatattacatgtgtatatgtgtgtacaccatacacatgtatagacagaaacatatacatctatatgtatctatttctgtatgtatttctacatagatctgtatctatttatttctgtatctgtttatttctaaccatgtgtatatatgagtaaaacatgagttcaactccaaatccatgtcaac

SEQ ID NO: 928018 - DNA, 652 bp, Homo sapiens
agcaacaacttgttgctacaaaaaattcttaaaaattagctcctgctgctgggcgcggtggctcacgcctgtaatcccagcactttgggggccaaggtaggcaaatcatgaggtcaggagtttgagaccagccgggccaatatgatgaaacsccgtctctactagaaatacaaaaaattagctgggcatggtggcaggtgcctgtaattccagctactcaggaggctgaggcaggaaaatcacttgaacccaggaggcagaggttgtagtgagccaatattgcgccactgcactccaacccaggcaacagagactgtctcaaaaaaaaaattaaaaaattaaaaaaaaattagcccctgctactctggacactgaagaaggagttggaggctgtaatgagctatgatcgcaccatggtacatactccagcctgggtgacagagcgagagtctgtctgaaaacacacacacattccaaggtggcgataaaaccatctccttctatttgtccaccctaggagcaacctggtccccacagcacacaaaccctaggttctcctggctgaaagcatcggaggtgccactgcggatggtgaggaacagaaagttactaggggcgaggggacaagtgagaaggcagtgaacccagaact

SEQ ID NO: 928019 - DNA, 556 bp, Homo sapiens
atatctgtgccccttcatgtgttgattgcagcatcgttctacaacagccatgacatgaaaaacaatctaagtgtcggttaataaatgaataaagaaattctgagacagatagataactacatatacatgtatgtattatttaggctaaaaraagaaggaagcccttccattttatggcaacatggatgaacctggaggacattatgcttagtgaaataaaccaggcacagaaagacaaatattacatgatctcacttacatgtagaagcttaaaaataattgaactcatagaggcagagagtagaatggtggataccagggacacaggagtgagagaaaaggggagctactggtcaaattatacagtttcatccctggggagggtttatggcatggggcagttttgagttctgagcacagactacctggaagcttgctagctgctactagtggaatactgcaggtatgaggcctgctttgccaaatgcgtgggagctgggtggggtttactgccacctgctactccccactccccatgtggattcttttgtgtggc

SEQ ID NO: 928020 - DNA, 556 bp, Homo sapiens
atatctgtgccccttcatgtgttgattgcagcatcgttctacaacagccatgacatgaaaaacaatctaagtgtcggttaataaatgaataaagaaattctgagacagatagataactacatatacatgtatgtattatttaggctaaaagaagaaggaagcccttccattttatggcaacatggatgaacctggaggacattatgcttagtgaaataaaccaggcacagaaagacaaatattacatgatctcacttacatgtrgaagcttaaaaataattgaactcatagaggcagagagtagaatggtggataccagggacacaggagtgagagaaaaggggagctactggtcaaattatacagtttcatccctggggagggtttatggcatggggcagttttgagttctgagcacagactacctggaagcttgctagctgctactagtggaatactgcaggtatgaggcctgctttgccaaatgcgtgggagctgggtggggtttactgccacctgctactccccactccccatgtggattcttttgtgtggc

SEQ ID NO: 928021 - DNA, 576 bp, Homo sapiens
actgagtaggaactgagtcattgcttacatgtctaagccacgttgttacctgcaaagaacagagaacggatgttcttcctgccaaagaattggaggagagaaagagctaagatttcagtataacaaagttaagaaaggacccaagagggaactaactgtcagtaataataaggaagcacatgacgattactgagcaagtgctaaaaacttctgctttggaaatccttgcaaacaaaaattttccataaaattgaaagggctgtgagttcagaaaaacctttaagaattcatggcaattaagaaatgtgggccrggcgtggtggctcattcctgtaatcccagcatttcgggaggctgagacggatggatgacctgaggtcaggagtttgagaccagcctggccaacatggtgaaaccacgtctctactaaaaatacaaaaaattagccaggtgtggtggcgggtgcctgtaatcccagctactcaggaggctgaggcaggagaattgcttgaacccgggaggtggaggttgcagtgagctgagattgtgccattgcactccagcctgggcaacaag

SEQ ID NO: 928022 - DNA, 555 bp, Homo sapiens
agcatcatgacagtttacaaatgccacagcaatgccaggaagttgccctgtatggcctaaaacggggcagaaccatcagttccaggaattgccttcccctttactggaaaacatatagataatccaccccttgcttagcatataatcaagaaataacaataaaaatagccaaacaacagccattagggctgctctgtctatggagtaaccacccttttatttttttactttcttgataaacttgctttcactctactctgtggactctgtggactcacccctaatttttctttcatgagatctgagaaccctctttccactaacataaagattgasaaccagctattcttaacttctccttacaattagagtactcagtaatcatataaattgtatgaacgcttccatagttaagtcataaccttattaatgcttattggcttcactggggagattaccctttgtaaagatgctcaaaagccagaaatatcagctatttgcctcagctaaaatctggtaataatgagacagccaggtgggaagggctccctggca

SEQ ID NO: 928023 - DNA, 549 bp, Homo sapiens
gctggatctctaggattttgggtgcaggattcctctttcagtacaccctctcaccttttcactttaaatttccagttctgcctggcaaaaggtctcttctttttatgtggctcttccacctacatgtgcctacctgccaactggacgggcacatgtattccagtcttccttacccccaaaatccagtttgcaggtgggaacaaacaactgtctgtccccctcatgacatcaacatgacaaaaaagagtcatcccactaatccttttayttgtgggtctaggactttctgcctccactattgcacttggaactggaatagcaggcatctcaaccactgccacgacattctgcagcctctctaatgacttctctgctaacattacagatatatcacaaactttatctgttctccaagcccaggttgactctttagctgcagttgtcctacagaactgccaaggccttgatttactcactgctgaaaaaggaggactttgtatatttttaaatgaagagtgttgtttttacttaaatcaatcaggcctggta

SEQ ID NO: 928024 - DNA, 732 bp, Homo sapiens
cagaatcacagcagattcagagaggctccagggatgcctggcggtcagagtgagtttatggaccaaaaaaggaaagtgatttacataaaacggaagtgatgtacggaaatagctaggctggttacagcttggcattttgccttacttaaacatggtttaaacaacagcctgtgaatggctggagtatggctactgggattggctgagactcagcttttgttacagaagtatactcctcagttagatttccaccctgcctacctactaagttcggttatggttcatccataaggacttaagtatgaaagtacggaagctttccaagcccaggttttagtttgatgtaaaacaatttccctagagacaaggtttacttaatttcttgattccacaaacatttattgctcacttgccatatgccacatactgagatgggtattgaaacatgtaaaggcataattcttgccttcagaaagatcaggacctcatgatgggtctaaatgtgtgtagatgtgcagaaatcaagaaatctgtgcaaggcgcagtggcarcacaagaggcttgcaataagaatcagaaaaggcatcaatgacgaggtgattcttggtgaggttttgaaaaattgttcagaaggccaataaaataaggataggaattctgggtagagagagaaaagatatagggacaagaaagtcatagcaatttcatgacctgcacgcataaaggataaga

SEQ ID NO: 928025 - DNA, 524 bp, Homo sapiens
ggaattctcccttgtcttctcctagattctggtggtgtgccggcaatctttggcattcctactcctgtagatgcaatactccaaatctctgtcttcacatggagttctttgtgtgtgtttttgttcttcacatagtcacctccttttttttttttttaagatggagtctcactctgttgcccaagctggagtgcaaaggtgccatctcagctcactgcaacctctgcctcccgggttcaagcgattctcctgcctcagcctcctgagtagctgggattacaggcccgcgctaccacaccctgctaatttttgtatttttagtagagatgtggtttcaccattttggtcrggctggtttcaaactcctgaccttgtgatctgcctgtctcgccctcccaaagtgctgggattacaggcatgagccaccacacccggctcatagtcgccttcttataaggacaacagtcatattggattagggtccaccccgctcaagtataacttcaccatcatttaactaatta

SEQ ID NO: 928026 - DNA, 662 bp, Homo sapiens
  misc_feature 421: n = A,T,C or G
ctgaatcctaccagaggtacagagaggagctggtaccattccttctgaaactattccaaacaacagtaaaagagggaatcctccctaactcattttatgaggccagcatcatcctgattccaaaacccagcagggacacaacaaaaaaagaaaatttcaggccaatatccctgataagcatcgatgtgaaaatcctcaataaaacactggcaaactgaatccagcagcacattaaaaagcttattcaccataatcaagtyggcttcatccctgggatgcaaggctggttcaacatacgcatatcaataaatgtaatccatcacatgaacagaaccaatggacaaaaccacatgattatttcaacagatgcagagaaggcctttgataaaatttagcaccccttcatgctaaaaacactcantaaagtaggttttgatgacccttttcaaagtataccgcttatttatgacaaaccccccagccagtcatctgaatgggcaaaagctgaagccattcctttgaaatcgggcacaagacaaggatgccctctctcaccactcctattcaacaaagtattagaagttctggcagggcaatcaggcaagagaaagaaataaggcgtattcaaataggaagagagaaagtcaaattatctctgtttg

SEQ ID NO: 928027 - DNA, 694 bp, Homo sapiens
atcccccacccgaagtcctctgggggctcatctccactcaggacctctcctgtttgtaccccagatacacactgcatcggtgtgcttgggtggagccttgagacatagtgtgttgctgtggaaaaagcagacagacctaggttccaactttggattcacagtgtcttcttcttctttttttttttttttttttctttttttttgagatggagtttcactctgttgcccaggctggagagcagtggtgtgatgtctgttcactgcaacctctgcccctgggttcacgcrattctcctgcctcagcatcccgaatagctgattttacaggcacctgctaccacgcctggctaatatttgtgtttttagtggaaacggggtttcaccatgttggccaggctggtctggaattcctgacctcaagtgatccactgcctcggcctcccaaagtgctgggattacaggcgtgagccactgtgcctggcccacagtgtgactttgctaagtcacttaacatctgtaacatctggagcctcaatttcctaagctgtgtgatgagaattacactatctgccttaagagctataggaaggagcagtagtgttgtctggtgacaatgcctggcagtgacacttaatagatgctctttttctttccttgatacttgaaggggcccacctgaatccagccttctccc

SEQ ID NO: 928028 - DNA, 591 bp, Homo sapiens
tagtagagaggaggtttcaccatgttgcccaagctggtctccaactcctgggctcaagcgatccatgtgccttggcctcccaaggcctcccaagtgctgggattacaggtatgggccaccatgcccagccacccatctccctcctcttgccaccagatgccctgaggcaacttaagtcttcatgactttctcaccaattacaaaaaggctttattatattttgccaaatgttaatcgctttcattatgtctccaaacattatttcaccactcatttttataacaagtgcagtgaagatatgcttatcgaatattgtacaatactgttgtgttctgtaacmctctttcgggaacagcttagatgtaggtaacaagagatgcctgcgtatgaaagtgcttcataaactgtactgtataaatgtaaactactaccattttcaggtaaaatcagagaataaatgtctcttgttggaagtgtcctctcagggactcatctagtccaatctccccagtgagtggatgagggaaaagactgacgccagaggcaggaggctctggattggagagttagaggccaacgcaagtatagaat

SEQ ID NO: 928029 - DNA, 596 bp, Homo sapiens
tttcagagatttccttttaccatcaaatggggggtttccttttcctcttttgattgatgctctttctcttggatctcttagaaattattattggtttactcactcattttagtggcacacatctcccagtaacttgctaagaaaggatacattgaacaccaaaatattaagactttatatgtctgaaaatataaagactttttttttttttttttttagacagagtctcactctgtcaccaggctggagtgcagtggtgtgatcttggctcactgctacctctgcctcctggattcaagcaattttcctgcctcagcctcctgcgtagctgagactacaggcacatgccaygacacccagctaatttttgtgtttttagtagtgacgggttttcaccatgttggccaggatgttctcgatctcttgacctcgtggtccgcccacctcaacctgcaaaagtgctgggattacaggcgtgagccaccacacctggccataaagactttttttattacatttgattaataatttattaggctatgtaattttgggttggaagtaattatttctcagaatattcaaggccttactccatt

SEQ ID NO: 928030 - DNA, 753 bp, Homo sapiens
ccaagattgtataagttctaatatttaacaactgcttttaaaaccttataagtctgttatagataataagacattaactgtgccattattagatgaataacatataataggagaaaagctctcaaccattaagaaaatatttgatttaaaactatgaaatktttatcaaaaaaagttggagaaaactaatgtttccaagagatataatatagctaataaatatgcacaaaatactgcttttgtcttctattgacaagagaatgaagatggagtccctgatgaaagataataagcagatctgttggatttctctgaacagcaaaaggtcccataacaatttgggaaatttaatcagtgagcaagaccatatcaagtcaaatgcatttttgccgaagcacgagaggtaaaaataggatcaaccaaattcacattcagatgtatcattgtagctgcaagtgctttccccccataggtctgctttcatctctcacctatttgtattcactaatactctctcattgtccttaatttttccccaattatttttttttattaaaaacagacacaacagattaaggatgtaaagttgaatattcttagcgcattagtcaaaacagacctttgaaatggcactttttttttccccaaggtggtttgttttatcccctttcagagttgggcttctccctcactccacctttcctgtcttagtcaggctttgtaccaaccaactcccctcagcttggaccaggt

SEQ ID NO: 928031 - DNA, 600 bp, Homo sapiens
agctccccaaagtccccactgtgtccggaattggttcctgctgggttcttgctccggctgacttcaggaaggaagccgggaccctcgcggtgagtgttacagttcttaaagatggtgtgtccgggatttgttccttcagatgtgtctggagtttcttccctctggtgagttcgtggtctcgctgctgacttcaggagtgaagctgcagaccttcgcagtgaacgttacagctcttaaaggtggtccgaagttgttcattcctcccggtgggttagcggtctcactgacttcaagagtaaaaccggagaccttagaagtgagtgttacagctcttaaacgtggcgcgtcgggagttgtttgttcttccaaggggtctggtggtctcgctggcttcaggagtgaaactgcagaccttcagagtgagtgctcataatagtgtggacccaaaragcgaccaacagcaagatttattgaaaacagcaaaacaacaaagctcccaaagggtggaaaatgacccaaatgggttggcgttgctggctagggttggcctgcttttattcccttatttggccccacccacatcctgctgattggcccatt

SEQ ID NO: 928032 - DNA, 647 bp, Homo sapiens
ttttctttctgctctaacaggacagcactgagttcactatctcaccattgctgcgttcttcctccctcagtgcccagagatgctctttatatcatgctgctgctgtgggggataggggaggggtggtcttggtgattcaggactcttttttctatctcttcagtgcttcttccagtgatacaaagtttaaaccaggtactatgagtgctcatctaatttttggttcttatgaaagtgtttttctktgaagataagttgttaacttggtgttaatgcctgaggtgggggggagcaatcaggggagctctctattccatattggtctgcctccccgctaatgcatagtgttaataaagtaggctgacttttagttagttttatcattgctttaccatttgctatatgcactacgtctgtcttattgactacatgtgaggctgacaactttggcagccccagccttggaatgccactcttcttggaaaatctgagttatagggtagagctaaatcatctctaatcaggaactgggaaataggctttatctttatcttaaggttaatattattgttaataatagtaacagtagatctcaaatccctggtattgatactgaatcaggcccattctacttattgttcagtgtg

SEQ ID NO: 928033 - DNA, 589 bp, Homo sapiens
agaagagttggcctgaatcagttcattcttgggttgtttgctaagattgtctgctgaaggtgggtacgtggaaaacaagatggtaagccaaggaggatgaagggaggcatgctgctggaccacttccagctcccaaatgactggatcttggccatcttgcttttcctgctaacttagaactgaactgcttattctagaaaatgagaggcactggggccatataggaaagggatagcattggacccaagtcctagactttcagtagtttgtttgcaggaccagggtcccaccccttttccaattgaaatgtaggcaaggtggtggcaagcccatggcctaggctgtgggaactcatagaacaacyatagtgatgatcgctgccttggattgcagcctactctgaatgtgtgcacctgtgctaactactttcaggtgtgttgtcttgtttcatagactcattacatttttatgatgaagtgaaacccgtgaattggctcctccagacttctcattttaatgacaaaaaagtgggtctccagagaggagctgggattttccaagatctcatagtttgttcctcactttttgt

SEQ ID NO: 928034 - DNA, 551 bp, Homo sapiens
tacaggcatgtgccaccatacctggctgatttttgtatttttggtagagttggggttttcactatggactcgatctcctgacttcaggtgatccgcccgcctcggcctctgaaagtgctgggattacaggcatgagccagcacacctggcctaatgtcccacttccaataatgaggtggaacaactagacagataatctatctatctatatacaaaagactcgaataacattataaaccaactagacctaacagatgcatgcagaacccttcaccccaaaacagcagaatacacattattcttaagtgcacatggtacattctccagaatagactaaacaagtccctatatgyttaaaaagattaaaattgtaagaaacatcttctgtaatcataatggaataaaactaaaaatcagcaacagaaggaaagttgagaagttcacaaatacatggacattaaataactaatgggtcaaagaaaaaatcacaaggaaattagaaaatacattgagataaatgaaaatgaaaacaaacataccaaaacttatgg

SEQ ID NO: 928035 - DNA, 682 bp, Homo sapiens
  misc_feature 600, 675: n = A,T,C or G
catgagacattcaaagaagaattggtaccaatcctattgacactattccacaagacagaaaaagagagactcctccctaaatcattttatgaagtcaatatcaccctaataccaaaaaccaggaaagaacataacaaaaaaaggagaaaactacagaccaatatccctgatgaatgtagatgcaaaaatcctcaacaaaatactagctaaccgaatccaacagcatatcaaaaagataatccaccatgatcaagtgggtttcataccagggatgcagagatggtttaacatctgcatgtcaataaatgtgatayactacataaacagaattaaaaacaaaaaatcatatgatcatctcaatagacacagaaaaagcatttgacaagatctagcatcactttgtgattaaaaccctcagcaaaatcgacatagaagggacataccttaaggtcataaaagccatctatgacaaacccacagccaacattacactgaatagggaaaagttgaaagcatcccccgtgagaactggaacaagacaaggatgccctctttcactacttctattcaacatagtactggaagacctagccagattantcagaccagaaaaataaataagggcatcccaattggtaaagagaaagtcaaatttcctgtttgctgatgacatgnatgtata

SEQ ID NO: 928036 - DNA, 837 bp, Homo sapiens
ttttttgtggctactgcaaatggtattgtgttcttgatttggctctcagctagaacgttacaggtatatagaaatgctactgattttttacatgattttgtattctgaaactctactgaaatcatttgtcagttctaggagcttttttgcagagtctttaggcttttctaggtatagtatcatgtggtcagcaaagacagtttgacttcttcttttcttatatggatgccttttattttcttctcttgcctgattgctctggctaagactccagtactatgttgaataggagtgctaagagtgagcacccagtcttgttccaattctcaagggaaatgattccagcttttgcccattcagtatgatattgactgtgagcttgttacagagggctcttattattttgaggtatgttccttcagtgcctagtgtgttggktttttttatcatgaagtgatgttagattttgtcaaaagatttttctgaatctgttgagatgatcatatggttattatttttaattctgtttatgtggtgagtcacatttattgatttttgtatgttgaaccaaccttgcaccccaggaataaagcccacttgattatggtgaattaactttttgatgtgctgctggtttcagtttgctagtattttgttgaaaatatttgtgtctatgctcatcagggacgttggtctgaagttttcttttttcattgtgtatctccaaaattttggtattaggctgagtctagattcatagaatgagttagggaggagccctcctcctcaatttttgggaatagtttcagtaggattggtaccagttcttccttatac

SEQ ID NO: 928037 - DNA, 837 bp, Homo sapiens
ttttttgtggctactgcaaatggtattgtgttcttgatttggctctcagctagaacgttacaggtatatagaaatgctactgattttttacatgattttgtattctgaaactctactgaaatcatttgtcagttctaggagcttttttgcagagtctttaggcttttctaggtatagtatcatgtggtcagcaaagacagtttgacttcttcttttcttatatggatgccttttattttcttctcttgcctgattgctctggctaagactccagtactatgttgaataggagtgctaagagtgagcacccagtcttgttccaattctcaagggaaatgattccagcttttgcccattcagtatgatattgactgtgagcttgttacagagggctcttattattttgaggtatgttccttcagtgcctagtgtgttggttttttttatcatgaagtgatgttagattttgtcaaaagatttttctgwatctgttgagatgatcatatggttattatttttaattctgtttatgtggtgagtcacatttattgatttttgtatgttgaaccaaccttgcaccccaggaataaagcccacttgattatggtgaattaactttttgatgtgctgctggtttcagtttgctagtattttgttgaaaatatttgtgtctatgctcatcagggacgttggtctgaagttttcttttttcattgtgtatctccaaaattttggtattaggctgagtctagattcatagaatgagttagggaggagccctcctcctcaatttttgggaatagtttcagtaggattggtaccagttcttccttatac

SEQ ID NO: 928038 - DNA, 550 bp, Homo sapiens
aaaaaaaaagtttcatgtacccctaggctgggcgggcacggtggctcacgcctgtaatcccagcactttgggaggctgaggcgggcggatcgcttgaggccagggattcaagaccagcctgggcaacgtggcgaaaccctgtctctactaaaaaaacaaaataattagccaggcatggtgcgtgcgcctgtaatccggctactcaggaagactgaggcaggagaatggcgtgaacccgggaggcggagcttgcagtgagccgagatcatgccaccaccctccagcctgggcaacagagcgagactgcgtctcaaaataaataaataaataaataaataaataaataaataaaataaaacaaacaayacacacacacacacacacacacacacacacaccctaacacaaagacctggaagaagtgcctggagagagtctcctggcctcccaacaggaccccaaaaattgaacccttgatcaatggggctggatgtgcagaggtggtgacagcccagggaggctgggtctcctgaacccgcctttcccgccc

SEQ ID NO: 928039 - DNA, 484 bp, Homo sapiens
atcctgactttgaaggctagaccaacaccaccctcccaaggtcactaccactccagttagggaacacatgcaacaagaatacccatagaaaactttcactctttattgattcggctctaaatctccatctaagtcttatgttgctgatccgagcttaactatggacaaaactcaaaggcctctacttggtacaaggtcagtgctggaagctgtgtcccctatattctggggtattkgttttgttttgttttttggcctaaggcaaacagaaggcagctatgtgcatctgccactggtagctttcctcctacttcattaccttacagcttcatgggaaaggggagaaagtgtagaaaccaaatagttccaaggtaagaggattgtgatcacatcttattctatttggaatcactttcatccaaaaaaagagccacaacaacaaagagtgacccatttttaaaaatgatggctccattttgtgacc

SEQ ID NO: 928040 - DNA, 597 bp, Homo sapiens
accccaatctatgggacctatcaaacaattcacctttttttggtaatgtcgtgactcttctctgtttcttgggagcacttccagcagcactactgactctttgtatgggtcccatggtgttattgaaggtttatgrtattgcactgaaaaatgagtgagaacttcaaaaggtcactttttactgggatacgcaatttatggatgagacaaactgctcacttggaggtgattagcatcacatgacatttcaagcagatacaatgcttgagctcactgcaatagcaatgagaggtggctacaaaagtattacagaagtaccacatgtactataattaattatagtttttatgcagttattattttgatagtacatctcaatttatttacatttttctcaactgagaatggtgccatgtagtctttaagtgtctgtatgtgtaagtgtagacaaactaactttttataatagatttttgtacatcttatagagtaaataagaaaatagactagtatcaatatgttttatgcattcatggcgtacctttttcttaatctttttgctatttctaggcatgatttatctgtgaatatttaaac

SEQ ID NO: 928041 - DNA, 611 bp, Homo sapiens
attgcaaaatgtcagcttttgctctgataaaatggaagctatcagagagtttgagcagaggaatgacatcatcccacttacaggatcgctctgttagtgtactgagaatagactgtagagagaacagaagtagaaacagaaagataattaggaaacgtttgtaatagtctcagcaaaaaataatggaccttggaccagggtggagttggtgagaagtggtcagattctggatgtatctggaagacagaatcaatagaatttgcaagtagagtggcagtgaggtatgaggagtcagggataatttctaggagtttggtctgagtaaycacaaaaaaggaaatagttattatgatgtgaggtaggaatactaaaagttcagttttagacatgttgggttagagatgctatatggcagatgcacctggcagtaataacttaagcattacccaagaactaccttgtatggcagacccaccaaaatgtgtgtgccaaactctgagctaaggaatcccaaagtgttcaacctagagattcattctttatctatgatgaacatctgagctccaataccatcctgtacatgggatggaggtctttgttttgggttaact

SEQ ID NO: 928042 - DNA, 584 bp, Homo sapiens
cttttccctctgctttcctcaaatagaaggagtctttcactatagccaccacagcttagaatgtgctgggtcacaactgatagcagcacatctcagagcccaaggatcatagtgtactacctaagtatcactgttgtttattcaaggcccatgggttctttagtcagttctttaatcctgccaaaactgggtccttcccttcaaagaaatgggttattttctgggccagagagyatcttgaaatgtcatccacgagctagggcctggaatgggggcctcacaactctacctggtgccttatcctactgttgttttgctgatatccaagatgtaagataaagtcctctttgctcatcattctcctctcttcaagcaataggaaggagtcactttcattacactgcctggggttgggagaaaggtggtgcaagtactccctttgctgcccagtctggtgtctccctaggtcatgtgaccctcaagtccactggctctaagcccagcccaggactaagacttgcctagaatttgcagtacttatgtcctaggctgcctttcaattttacctatgactcaagagtatt

SEQ ID NO: 928043 - DNA, 557 bp, Homo sapiens
tctctggtctttccctgattagcttaataactaacctcctgaattctttttcaggtaaatcagggatttcctctcagtttggatccattgctggtgaactagtgtgatttctgggggatgctgaagaaccttgtttcatcatattaccagggttgattttctggttccttctcatttggctctgtcagagggaaggtctagggctgaaggctgttgtttacattatgttgtcccacaggatgttcccttgatgtagtagtctcccccttttccaatggatgtggctytctgtgaactgaactgcagtgattgttgtctctcttcagggtctagtcacccggtgagtctacccagctctgggctggtactggaggttgtctgcacagagtcctgtgatgtgaaccatctatgggtctctcagccttggataccagtgcctgttctggtggaggtggcggtggggttgcagtggactctgtgagggttcttagttttggtggtttaatattctatttttgtgctggttggcctcctaccaggaggtggtgctttctaaa

SEQ ID NO: 928044 - DNA, 557 bp, Homo sapiens
tctctggtctttccctgattagcttaataactaacctcctgaattctttttcaggtaaatcagggatttcctctcagtttggatccattgctggtgaactagtgtgatttctgggggatgctgaagaaccttgtttcatcatattaccagggttgattttctggttccttctcatttggctctgtcagagggaaggtctagggctgaaggctgttgtttacattatgttgtcccacaggatgttcccttgatgtagtagtctcccccttttccaatggatgtggctctctgtgaactgaactgcagtgattgttgtctctcttcagggtctagycacccggtgagtctacccagctctgggctggtactggaggttgtctgcacagagtcctgtgatgtgaaccatctatgggtctctcagccttggataccagtgcctgttctggtggaggtggcggtggggttgcagtggactctgtgagggttcttagttttggtggtttaatattctatttttgtgctggttggcctcctaccaggaggtggtgctttctaaa

SEQ ID NO: 928045 - DNA, 644 bp, Homo sapiens
cttatcctgttttctttttcttgttttttgtttgtttgtttccttgtagaattttttaaattttattttaattgtaaattggcaaattataattgaatatatttatgggatacaaagtgatgttatgatttataaatacaacgtggaataataaatcaagctaattaatgtatttatcacctcaaatacttattcctttttgtggtgagaacatttaaaatttactctcttagttattttgaaatgtatgaaacactgttactatattcacactgctgtgcaatctatctcaaagaaaataaaaccatattgcttttgtctaattgaggcattgtactctttttttttgagatggattcttgctctgtcacccaggctggagagcagtggtgtgatctaggctcactgcaacctctgccacccaggttcaaatgattctcatgcctcccaagtagctgggactacaggcacccaccaccacacctggctratttttgtatttttagtagtgacggggtttcaccatgttggccaggctggtctcaactcctgacctcaggtaatctgcccgcctcgacttcccaaagtgctgggattagaggcatgagccaccctgcccagcctgaggcattgtactttttagc

SEQ ID NO: 928046 - DNA, 582 bp, Homo sapiens
atgggagaaattggccaaaacaaaggggcagtcattaaaccttaaagttccaatatgatctcctttgactccatgtcttacatccagggcacgttgatgcaagagttggactctcatagccttgcatagttacacccctgtggctttgcagggtaargcccctcctcctagctgctttcccaggttggcattgagtgtctgtgcttttccagatgcacagtgcaagctgtcagtgaatctaccattctggagtctggaggacggtggccctctttcacaactccaccaggccctgccccagtggggactctgcatgtgggctccagccccacatttcccttatgcactgccctagcagaggttttccatgagggctctgtcccttcagcagacttctgtctgtatatccaggtgtttccatacatcctctgatatctaggcagaggttcccaaacctcaattattgacttctctgtacctgcaggtcaaatactacatgcaagccaccaaggctttgggcttacaccctctgaagcaatggcctgagctataccctggccccttttagccaatgctgggagg

SEQ ID NO: 928047 - DNA, 582 bp, Homo sapiens
atgggagaaattggccaaaacaaaggggcagtcattaaaccttaaagttccaatatgatctcctttgactccatgtcttacatccagggcacgttgatgcaagagttggactctcatagccttgcatagttacacccctgtggctttgcagggtaaggcccctcctcctagctgctttcccaggttggcattgagtgtctgtgcttttccagatgcrcagtgcaagctgtcagtgaatctaccattctggagtctggaggacggtggccctctttcacaactccaccaggccctgccccagtggggactctgcatgtgggctccagccccacatttcccttatgcactgccctagcagaggttttccatgagggctctgtcccttcagcagacttctgtctgtatatccaggtgtttccatacatcctctgatatctaggcagaggttcccaaacctcaattattgacttctctgtacctgcaggtcaaatactacatgcaagccaccaaggctttgggcttacaccctctgaagcaatggcctgagctataccctggccccttttagccaatgctgggagg

SEQ ID NO: 928048 - DNA, 639 bp, Homo sapiens
accatttgttgaactggggcggttctttccctcattgcttgtttttatcagctttgtcaaagatcagatggttataggtgtgtggccttaaatctggcctctctattctgttccattggtctatgtgtctgcttttgtaccagtaccatgctgttttggttactgtagccatgtagcatagtttgaagtcaggtaaggtgacacctccagctttgttctttttgcttaggattgccttggctatttgggctcttttgtggtttcatatgaattttaaaatcattttttctagcactgtgaagaatgtcaatggtagttggataggaaaagcattgaatctgtaaattgctttgggcagtatggctattttaacaatattgtttctttctacccatgagcatggaatgtttttccatttgtttgtgtcatctttgatttctttgagcaccgttttataattctccttgcagagatctttcayctccctggttagctgtattcctacatatttttttttgtggcagttgtgaatgggcttgcattcctgagttggctcttggcttggctcttgttggtgtgtaagaatgctgatgatttttgtacattgatttttgtatcctgaaactttgccaaagttgt

SEQ ID NO: 928049 - DNA, 749 bp, Homo sapiens
gcactctgtgttcatggtaaagagagttcggagatgaactgcccaatatagtagccactagctgtatgttgctatttaaatgtaaattaagtttgaaattcacttccttggttttgtgtccggaattggtgggttcttggtctcactgacttcaagaatgaagccgtggaccctcgcggtgttacagctcttaaggtggcgtgtctggagtctgtcccttctgatgttcagatgtgttcggagtttcttcttctggtgggttcgtggtctcgctgggctcaggartgaagctgcagatcttcacggtgagtgtcacagctcataaaagcagcgtggacccaaagagtgagcagtagaaagatttattgcaaagagcgaaagaacaaagctcccacagtgtggaaggggacccgagcgggttgccaatgctggctcgggcagcctgcttttagtctcttatctggccccacccacatcctgctgattggtagagcccagtggcctgttttgtcagggcgctgattggtgcctttacaatccctgagctagatacaaaggttctccacgtccccatcagattagttagatacagagtttccacacacaggttctccaaggccccaccagagcagctagatacagagtgtcgattggtgcactcacaaaccttgagctaaacacagggtgctgattggtgtatttacaatccctgagctagacataaagactctccacgtccccaccagact

SEQ ID NO: 928050 - DNA, 812 bp, Homo sapiens
tgggctgagacaatggggttttctcaatatagaaaccatgtcatctgccaacagggaagtttgacttcctctcttcctatttggatgtcgtttattttttttctcttgcctgattgctctggccagaacttccaagactatgttgaataggagtggtgagagagggcaaccttgtcttgtgctggttttcaaggggaatgcttccagcttttccccattcagtatgatgttggctgtgggtctgtcatacattgttcttattattttgaggtatgttccttcaatacctattgagagtttttaatatggaaggctgttgaattttattgaaaggctgttctgcatctattgagacgatcatgtggtttttgtctttagtccrtttatgtgataaatccatttattggtttgcgtatgttgaaccaaccttgcatcccaggaatgaagcccacttggtcatggtggatcagctttcggatatgctgcttgattcagtttgcaagtattttgttgaggatttttgcatcaatgttcatcaaggatattggcctgaacttttcttttttttgttgtgtctctgccagaatgagttggggaggagtctcttcttctcaattttttggaatagtttcagtaggaatggtaccagctcttcattctacatctggtagaattcggctgtgaatccatctggtcctgagcattttttggttggtaggctatttattactgattcaattttggagttcattattggtctgttcagggattccacttcttcctggttcagtcttgggataatgcatgtgtcc

SEQ ID NO: 928051 - DNA, 598 bp, Homo sapiens
gaagggaacagcctctctatggtagcagtatatacacaggacccagtttcagccatgcttcatgcaagctaagatcatttgaccctatgagccctaggaacacaatcctcagccacttcatccaaattttatagtcccccagggcatgttcctgttagagtgtatgcctactagtccaccttccactttctggctctggcactagggattcctgtctcacttcgagcttaagtatttacttttcaaccattttaactattattatcatattttatgtgccattcctgtgtttggcaagtgcagcgatgtcacttttatctaggttgtccatgaattcaaggcaaagtctccatggaacagccaacctgccccttttagcacttttgttcaataattttgattactctkctttttaaaaatttttatttgttcagtgtccacatcatgctcagtatccctccccaagctccctccaccagattaatacttgacctggatttcatcctgacatctgaaactttttctagcttcttccttataaaactctgtctataccctataccattttttatgagattagtttttgattttgatgaga

SEQ ID NO: 928052 - DNA, 633 bp, Homo sapiens
tctccataaattttataaaagtgtcctttacctctcacacacattccctccatatctggttgcaaactggacatgactggaagaagaagtaaaattatagctattggattgggacatacttgcttgtttgtttgtttagtaatagtgaaggaaacaaacaacccaggcatatgagaaaaaaaatattttacatctatggagtaagtgaggtattaatgatctttcatcaaaacctcttgtagccaccctcgttactaaaaacatgatgtttctctcctaaaccattgtaagtgtctagaatttaatggattcatggggtctgtctaattacaaccctcaaccccactgactctattttatgatagccatttcccttaatccttccaagaaatctgccaaaaacaccagaggatgaccccaactcctgaacctctcaggcaaaacctatcagtatctccagatgtcttccctattctcattcccakagccactactcaaccacacatgggttggacaaatgccacccagttggtggcatgaataaataggacagtttgggctgagtgccctcaggaaatccctccaaaaatcaggacttgactcaattattcaaattgaattaagaatctgaca

SEQ ID NO: 928053 - DNA, 448 bp, Homo sapiens
gctgttccagtggtgtatgtgcctatttttacaccagtgtcatgctgttttggtgactatggccttttagtatagtttgaagtcagataatgtgatgcctccggatttgttctttttgcttagtcttgctttggctgtgagtctcttttttggttccatatgaattttaggattgtttttcctaattttgtgaaaaatgatggtrgtattttgataggaattgcatgaatttgtagattgcttttggcagtatggtcattttcacaatatggataccacccatctgtgagcatgtgacgtgtttccatttctttgtgtcatctgtgatttctttcggtaatgttttgtagttttcctcgtagaggtctttcacctccttggttaggtatattcctaagtatttttttttttttggcagctattggaaaagggattgagttcttgattt

SEQ ID NO: 928054 - DNA, 600 bp, Homo sapiens
caaaaatggagcaagggccaaccgcagtcacactgacatccacccccataacatggggacagatcaagaaaacaaagcaggaagctgagaaaatgctggagcatcagggtcaggcaaaaacccctgactccatgtgcttggccatgttagcagtagtgtcccgtgagtctataagattgggtggaccaccaaccagcaattgaaagctgcacagcctggaattacctttattcaattaatgcaaaaacataaagggggagatgttggacgccaaaggaattagggtcatgaccaactcagtataccattggaggctgtatgagcaaacagcaaattgttctcgtgaaagcagttggcaggctgacaactgaatctgcccccagaaggaatgttgagggcagtcacgtcccrggtgccatgttccttgaagttatctacagaaacgtatggagcttgttgaacaaaaaaagcaatcatgtacacctgtgttaaattaaatagttgactgacagttaccccttcctctctgtttactccaccaaataaatatgaagggctgtagaagctcagggctcttgttctctagaagcaaggagcccc

SEQ ID NO: 928055 - DNA, 603 bp, Homo sapiens
atgcaaaaatggagcaagggccaaccgcagtcacactgacatccacccccataacatggggacagatcaagaaaacaaagcaggaagctgagaaaatgctggagcatcagggtcaggcaaaaacccctgactccatgtgcttggccatgttagcagtagtgtcccgtgagtctataagattgggtggaccaccaaccagcaattgaaagctgcacagcctggaattacctttattcaattaatgcaaaaacataaagggggagatgttggacgccaaaggaattagggtcatgaccaactcagtataccattggaggctgtatgagcaaacagcaaattgttctcgtgaaagcagttggcaggctgacaactgaatctgcccccagaaggaatgttgagggcagtcacgtcccaggtgccatgttccttgaagttatctacagaaacrtatggagcttgttgaacaaaaaaagcaatcatgtacacctgtgttaaattaaatagttgactgacagttaccccttcctctctgtttactccaccaaataaatatgaagggctgtagaagctcagggctcttgttctctagaagcaaggagcccc

SEQ ID NO: 928056 - DNA, 716 bp, Homo sapiens
gggttataaatctcatttgattcttcataacctacggattgggagccattatctctcttttatagatggtaaaactgaggctcaaataatttgagatttacccttggttagtgatgattcattcagcaaatcctttgagtacctgtgatgtgccagacactgctctaggggcaggggatacatttgtgaagaagaacagtcctgcccacttctcctactgtaattggtatgggagtaggcaggggagattaatatcataaagtaaatttagaaagaatttcaaggggccgggcgctgtggctcacgcctgtaatcctagcactttgggaggccgaggcgggtggatcacaaggtcgggagatcgagaccatcctggctaacacggtgaaaccccgtctctactaaaaatgcaaaaaatgagccaggcatggtggtgggcgcctktagtcccacctactcaggaggctgaggcaggagaatggcgtgaacccagaaggtggagcttgcagtgagccgagatcgcgccactgcactccagcctgggtgatggagcgagactccatctcagaaaaaaaaaaaaaaaaaagacaaaaaagaaaggatttcagattatggcaatagaaacagctaagtcctttgagttctcactgtattcccataacaggtataagtgcttaacacacacgcgatcatctaatccttgcaagaactttgtc

SEQ ID NO: 928057 - DNA, 716 bp, Homo sapiens
gggttataaatctcatttgattcttcataacctacggattgggagccattatctctcttttatagatggtaaaactgaggctcaaataatttgagatttacccttggttagtgatgattcattcagcaaatcctttgagtacctgtgatgtgccagacactgctctaggggcaggggatacatttgtgaagaagaacagtcctgcccacttctcctactgtaattggtatgggagtaggcaggggagattaatatcataaagtaaatttagaaagaatttcaaggggccgggcgctgtggctcacgcctgtaatcctagcactttgggaggccgaggcgggtggatcacaaggtcgggagatcgagaccatcctggctaacacggtgaaaccccgtctctactaaaaatgcaaaaaatgagccaggcatggtggtgggcgcctgtagtcccacctactcaggaggctgaggcaggagaatggcgtgaacccagaaggtggagcttgcagtgagccgagatcgcgccactgcactccagcctgggtgwtggagcgagactccatctcagaaaaaaaaaaaaaaaaaagacaaaaaagaaaggatttcagattatggcaatagaaacagctaagtcctttgagttctcactgtattcccataacaggtataagtgcttaacacacacgcgatcatctaatccttgcaagaactttgtc

SEQ ID NO: 928058 - DNA, 636 bp, Homo sapiens
caggttgccaagtccctaggctgcacacagcacggagaccctgggctcagcccataaaaccacttttacctcctaggcctctgggcctttgatgggaggggctgctggaaagacctctggcatgccctggagacattttccccattttcttagggattaacattcggctcctcatgacttatgcaaatttctgtagttgtctaggatttcttctcaaaaaatgggattttctttttttcttttttctttttttttgagatggagtctcgctctgttgtccaagctggagtgcaagtggtgcaatctcagctcactgcaacttccgcctccccggttcaagcaattctccctgcctcagyttcccgagtagctgggattataggcacccgccactgcgcctggctaattttttgtatttttttttttagtagagacggggttttcccatgttggccaggctggtcttgaactcctgacctcaggtgatgtgctcacctcagcctcccaaagtgctgggattacaggcgtgagccaccatgccctgctgggattttcttttctatcacattgtcaggctgcaaattttccaaagctttatgctgcttctgttataaaaatgaatgcctttaacagcac

SEQ ID NO: 928059 - DNA, 676 bp, Homo sapiens
actttaataaaattatttttaaagtagtttcaacttttattttatattcaggaggtacatgcacaggcttgttacatagctttactgtgggaggctgatgtttggagtatgtacaattgatgccatcaccaaggtagtgagcatagtacccaatatttagtttttcaaccctgtccccttccctccctttctcctctaatggtccccactgtctactgctgccatttttatgtccataagtatacagtgtttagctctcacttagacataagaacatgcactatttggtgttctgttcctgtgtgaatttgcttagaagaaagtcctcaaactgcatccaagttgctgcaaaagacattactttgttcttttttatggaagcatagtattccatggtatatatgtactacattttcttaatccaatccaccatggatgggcacttagattgayttcatgtctttgctgttattaatagtgttgtgctgaacatataagtgcgtgtatctttttggtagaatgattgttttcttttggatatatatccagtaatgggattgctgggtcaaatggtagttctgttttaagtgctttgagaaatctccaaactgctctcagcagtgactgaactaatttacattcccaccaacagggtgtaagtaagtattcccttttt

SEQ ID NO: 928060 - DNA, 591 bp, Homo sapiens
gatccatagattgcacagtgatctgagttacctgctcagccctgccggggggcagggcagttcagggagcaagatgggcagggccagattgagcaggcccgcatagaggtcccctaatgccagacacaagccccagcaccaaggcagaatctagcaggtggccatcaagcacctggtagtgtgcctagccacagagttgaggaatctcttggcctcaagttctctgcatggggaatggaggcaacctagactcctaactcaggggagggagtgctccagatgcctggagatctgtctgtgtgtggagtgtagagggccctgatgcaccacaatctccacacatggagggtgaggttrttcagtctgcaaatccatgcaaatgtgtgctttgaattatttttatacaggtaaatacacctgaacttggggcagggaaggcggcactttaccacagtatgcaaaggaaggatgggccagctcaggctgctgattcaagcaagtggtcacactaaatgcctagagatctgcctggacatggagcagagaggatgctgcttcattataatgtctgtgcgggaaggatgggttagc

SEQ ID NO: 928061 - DNA, 638 bp, Homo sapiens
aatttgcataaataacgaggagctgaatgttaatccccaaggcaataggaaaaatgtctcctgggcatgtcagaggtcttcccagcagcccctcccatcacaggcccagatacctagaaagaaagaatggaatcatgggctgggcccagggttcccacrctgtgtgcagtctaaggacttgatgccttgcatccaagccacttcagccatgactaaaaggggccaaggtacagctcaggccatgacttcagagggggaaagccccaacccttggcagcttccatgtggtgttgagcctgtgggtacacagtagtcaagaattgaggtttgggaacctccgtctaggtttcagaggatgaatggaaatgtccagatatccaggcagaagtttgctgcaggggcagggctctcatggagaatttctgccagggcagtgcggaagggaaatatgtggtctgagccctcacatggagtccctactggggcatacctagtggagctgtgagaagagggccactgttctccagaccccagaatggtagatccaccaacaacttgcactgtgtgcctggaaaaaccacagacactcaacatcagcccatgaaagcagccaggagggagcctgtactctgcaaagc

SEQ ID NO: 928062 - DNA, 685 bp, Homo sapiens
gggggagcagaaagtatatgcatcaggtatgaggaagaaaatagattttggaagttatgagaaatgtagggagtgagttgagaatagtttgtgatttttagggcctctaaaagtattaaagcagaggcagccactgcacgcagacatgagggctaggctaaaacagtaaggtcaagttgtttgcacagaaaggctacagggtgcagtcctggcttttgtgtaagaattctgaccacactaaccatgcctaggaaggaaagaagttgttgttttgtaagggattgaggtttgggagattagtcggacccgatcagcagggaaagcacgtgtgtttttatgagaattatgcccagataggtaacagatgaggatgaaatttgagcttgactgaagtaatgggggctgtctgtgaagccttgcggcagtacggcccaggttatttgctgagcctaatgggtgtcagggtcagtctaagtgaaagtgaagagaggctgggatgaagggtgcaaaggaatagtaaagaaagcaygtttgagatccagaacggaatagtgggttgtagagggaggtattgatgataggacagtatatgggtttggcaccatggggtggataggcaaaacaatttggatgataaggcacagatcctgaactaacctgtaagacttgtctggttctaggacag

SEQ ID NO: 928063 - DNA, 651 bp, Homo sapiens
attgtgtccctaatttggctcccggcttgactgttgttggtgtataggaatgctagtaatttttacacattgattttgtattctgagacttcgctgaagttgtctatcagcttaagaggctttgggtgagactacagggttttctagacataggatcatgtcatctgcaaacagggatagtttgacttcctctcttcctacctggatgcctttattttattttcttccctgattgccctggacagaacttccaatattatgttgaataggaggacatccttaccttgtgcgagttytcaaggggaatggttctagcttttgcccattcagtgtgatgttggctgtgggtttgtcatagatggctcttattattttgaggtatgctccttcagtacttattttacagagagttttaaacatgaagccatgttgaattttaccaaaagccttttttttgcatttattgggataatcatgtggtttttgtcttcagttctgtttatgtgatgaatcatatttattgatttgtgtttgttgaactaaccttgcatctcagggttaaagcctacttgatcatggtggataagctttttcatgtgctgctaatttcagtttgccagtattttgttgaggatttttgcatcagtgttc

SEQ ID NO: 928064 - DNA, 443 bp, Homo sapiens
tgtagatgtctttgttaattttctgtcttgtttatctgtctaatattgacagtggggtgttaaagtctctcactattattgtgtgggagtctaagtcacactgttggtctctaagaacttgctttatgaatctgggtgctcctgtatttggtgcatatatatttmggatagttagctcttcttgttgcattgatccctttaccattatgtaatgcccttcttggtcttttttgatctttgttggcttaaagtctgttttatcagagactaggtttgcaaccactgctttttttttttttttttttgctttccatttgcttggtaaatattcctccattcctttattttgagcctgtgtgtgtctttgcatatgagatgggtctcctgactacagcacaccaatgggtcttgactatccaatttgccagttggtgccttttaat

SEQ ID NO: 928065 - DNA, 641 bp, Homo sapiens
aatttgcataaataacgaggagctgaatgttaatccccaaggcaataggaaaaatgtctcctgggcatgtcagaggtcttcccagcagcccctcccatcacaggcccagatacctagaaagaaagaatggaatcatgggctgggcccagggttcccacrctgtgtgcagtctaaggacttgatgccttgcatccaagccacttcagccatgactaaaaggggccaaggtacagctcaggccatgacttcagagggggaaagccccaacccttggcagcttccatgtggtgttgagcctgtgggtacacagtagtcaagaattgaggtttgggaacctccatctaggtttcagaggatgaatggaaatgtccagatatccaggcagaagtttgctgcaggggcagggctctcatggagaatttctgccagggcagtgcggaagggaaatatgtggtctgagccctcacatggagtccctactggggcatacctagtggagctgtgagaagagggccactgttctccagaccccagaatggtagatccaccaacaacttgcactgtgtgcctggaaaaaccacagacactcaacatcagcccatgaaagcagccaggagggagcctgtactctgcaaagccac

SEQ ID NO: 928066 - DNA, 593 bp, Homo sapiens
tgatttaaactttttagttcaccctccaatgaaaaggacaactccagtatgaggactcctcttcctttcttctaaatgttcccataaaagccttccaacttgtagcagactttggaacgtccccaactttgttggtatgtcttcccaggtagacccccaaatctggtttccaataaacctttatcaaattatttctacatcaacagcattaattttggttgaaaaaccaaattacaataatactggatagtttatttgcctacgtagttacttttaccagtgttctttatttcgtcatatggcttcaartgagtagtgactagtgtctattcatttaagcctgaagaacttcctttagcattgcttgtaagcatgcctaatagtaaagaacttctttatctgggaatgtcttcatttttacttcgtccttgaaagttaatatttccaggtataaaatttgtggttgaaaggtttttttttttctttcaacaatttaaatatgtcatcccactgccttccagccttcatggttcctgctgagaaattgattatttattctgttttcaatccctcatatattataagtcaattct

SEQ ID NO: 928067 - DNA, 570 bp, Homo sapiens
ggcttttgaaagtttgattataatgtgtctcagggttcatatctttgaatttatcctatttagaatttattaagcttcttagatgtgtagataaatgggctttttagaataaaatttgtgaaattttagactattatttcctcaaacattttctacacactttgtctgtcttttttctgggaataccattatgtggatgttggtacatttgatgtcaaatttgtaattaattccctaatgacatatgatgttgaggatcttttcatattcttatttgatatctgtatatattttcagtgtggtgtctgtttatatcttttgccaattttaactaggttgttttataattgttgagttttaaaaattctttgtatattttggatatcagtactttatcaaacatgtgttttgtaagtattttctctcygtctgtgacttatcttttcattctcttaacattgtcttttacagaacagaagtttccacctgtaattaagttcaacttctcaatgtttttctttcatggattatgcttttgatgttgtatctaaagtcattgtcaagcccaat

SEQ ID NO: 928068 - DNA, 585 bp, Homo sapiens
cttggttggcaagtttttgggctctatccttgagttttttgatactgtttaccaggccagactgatttaggtaaaaacaacactcttcatttaaaaatatacagagtccccctttttttttagcagtgagtaagtcagggccttggcgagttttgaggaaagagaaatgcaaagccagcaattgtttgttaaagaaggattagaaacgggtaggagagagtgagtgagattgatagtgtggtggagatagctggggagaggtagagggtggcataagaacaggaacragaataagagtgagtataaaagtaaagaataggacttcatcagggtgaaagtattggagtgtgtcctgtcagcaaagattgtctgtgcactccaggaggcagtcaagagtggcgggttggggataaattttcatgatggaaaggaaacgagaggttttaagaggtgggctaacagcttgtaacctacatggaagaggttatgaaatgacgacagaatagaatggtcctgtgaggctggagggagatttttttttggtgtaggaaccatctgccttgagatggagagggattgataggt

SEQ ID NO: 928069 - DNA, 620 bp, Homo sapiens
tagatagtcttaatagagaatgattataagtctggaaaacaaaaaacacattaaaaatttcaacaaagagtccaggggcagtggctcatgcctgtaatcccagcactttgggaggccgaggcaggtggatcacaaggtcaggagttcaagaccagcctgaccaacatggtgaaaccccgtctctactaaaaatacaaaaaattagccaggcgtggtggcgggygcctgtagtcccagctacttgggaggccgaggcaggagaatggcttgaacccgggaggcagagcttgcagtgagctgagatcacaccactgcactccagcctgggtgacagagcgagactccgtctcaaaaaaaaaaaattagccaggtgtggtagcgtgtgcctataatcccagctacttgggaggctgaggcagagaattgcttgaacctgggaggtggaggttgcagtgagccaagattgcaccaatgtactccagcctgggcaacagagcgagactgtctcaaaaaaaaaaaaaaaattcaaccaagaaaatttaatatagggaattggttaaccaggtctggagaactaaaaaggcacaatgggcacactgaggtttcacagaggcagtaac

SEQ ID NO: 928070 - DNA, 838 bp, Homo sapiens
ttttttttttttcttttgagacaggatcttgctctgttgcataggctggagtgcagtggcacaatcttggttcactgcaacctctgcctcccgagctcaagcaatcctcccaccttggcctccccggtagctgggactgtgaatgcgcaccaccacacctgactaatttttgtattttttggtagagatggggtttcaccgcattgcccaggctggcctcaaacacctgggctcaaatgatccgcctgccttgggctcccagagtgctgggattacgggtgtgagcctccgcacccagccaatagctgttttatttagtgcttactatgtactgggtgtacacaccatctcattttatcctcagagtagttttgcaaggtcgggattattaaccccatttrtttatttatttttttgagacagggtctcgttttgtcacccaggctggatacactggcacgttcaatagttcacggcagcctcgacctcccgggctcaagcaactctcccatctcagcatcccgagtagctgagaccacaggtactcaccaccatgcccagctaatttttgtatcttttttggtagagacagggtttcaccatgttgcccaggttgctctgaactcctgggctcaagtgatctgcctgcctcagcctgccaaagtgctgggattacaggcatgagccactgcatgtggccctattaactccacataagagatataaaaaccaatgacaaagtcacccagccagtaagggaagaggcggaattcaaacttaagtcatttaatgccaaggtcttcactgtgtctcacgacaactgcatttgatgcgatct

SEQ ID NO: 928071 - DNA, 610 bp, Homo sapiens
gtatcagtgatggaagactaaatgaatgaaatgaagcaagaagggaagtttagagaaagaataataaaaagaaatgaacaaagactccaagaaatatgggactatgtgaaaagaccaaatctacatttgattggtgtacctgaaagtgacggkgagaatggaaccaagttggaaaacactctgcaggatattatccaggagaacttccccaacctagcaaggcaggccaacattcagattcaagaaatacagagaatgctacaaagatactcctcgagaagagcaactccaagacacataactgtcagattcaccaaagttgaaatgaaggaaaaaatgttaagggcagccagagagaaagatcaggttacccacaaagggaagtccatcagacttacagcagatctctctgcagaaactctacaagccagaagagagtgggggccaacattcaacattcataaagaaaacaattttcaacctagaatttcatatccagccaaactaagcttcataagtgaaggagaaataaaatactttacagacaagcaaatgctgagagattttgtcaccaccaggcctgccctaaaagagctcctgaaggaagcac

SEQ ID NO: 928072 - DNA, 593 bp, Homo sapiens
aggtccaatataatcaggtagctggctgatcatcccgaggaatggtgctttatcgagggctcagtgttggtctctgctgctggcaaattgggcactcagcagtgtctggagccaggtcagccttggtgagcagaagtccatgttgctgagcccatgtktaacctatatccctgccaccatggccactttgttcatggactctttgagcaacgacaggggtggctggggaaagaggctgagtggtgtccacggaatgggtcatcctatccagttgattattaaaagcctcctctgctgaggtcacccattggtgagcactcacatgggatacaaacatcttcacagtttttgaccactcaggtcaatccacatacctcctccccaaatttctttgtcaccaattttccaatcatgtttcttccaagtccctgaccatccagccaaaccattggctacagcccatgaatcggtatatactcacacatctggccatttctccttccatccaaagtgcacaaccaggtgcactgcttgaagctctgcccactgggaagattaccctccaccgctgtcctttagggatgtcctaaaaa

SEQ ID NO: 928073 - DNA, 597 bp, Homo sapiens
acataaattgtgaagatttaatggacatttactagttccccaaattaatacttttatattttcttatgcctgtctttactgcaatctctgaacataaattgtgaagatttgatggacacttatcacttccccaattaatactcttgtgatttcctatgcctgtctttactttaacctcttaatcccgtcatcttcataagctcaggatgaatgtcgcctcaggacgctgtgatgattgcgttaactgcacaaattgtttaaacaatatgaaatctgggcaccttgaaaaaagaacaggataacagcaatgttcagggaacaagggagataaccttaaagtctggctgcctgtgggccaggcrgaacagggccatatttctcttctttcaaaagcaaatagtagaaatatcgctgatattctactcagtaaggaactgagttttctcagtaaggaacatccctgagaaagagaatgcatgcctatgggtaggcctctaaaatggccgctctggggacgtctgtcttttacggtagttgataagggatgaaataagccctggtctcctgtagctctcccaggcttattaggacgaagaa

SEQ ID NO: 928074 - DNA, 826 bp, Homo sapiens
agagacaggatttcaccatgttggccaggctgatcttgaattcctgacctcaggtgacccacctgcctcagcctcccaaagtgctgggattacaggcatgagccaccatgcctggccatcaactatgttttctttcagcagtattttgtagttgtccttgtagagatctttcacctccttggttaagtatattcctaactttttttttttttggatgccctttatttctttgtcttgtctagttgctctggctaggacttccagcactatgttgaatagaagtggtgaaagtgggcttccttgtcttgttccaattgtcatggggaatgctttcaactttgtcccattcaatgtaatgttggctgtgagtttgtcggtttgtcatagatggcttttgttaccttaaggtatgtcccttctatgctgattttgctgagggttttattaataaaggaatgctggattttgtcaaatgcttttcctatgtctgttgsgatcatgtgatttttgtttttaattgtgtttgacatttgacttgcagttgtaaaaccatccttgcatccctggtatgaaacccacttgatcatggtggattatcttttttgatatgctgttggatttggttagctagcattttgttgagaatttttgcatctatgttcatcatggacattagtctatagtattcttttttatgatatgtcctttcctggttttgatattagggtgatgctggtttcatagaatgatgtagggaggattccctctttctcttttggaatagtgtcaataggactggtaccaattcttctttgactgtctgata

SEQ ID NO: 928075 - DNA, 596 bp, Homo sapiens
ttagaagatctaacataacagaaagcaaagtaagtcaacaggagaaacaaaaaggaaaacagaagaaactaaaacaaaacaaggaaaaaaaagtttaaaaatttttatttaaatccacacagcaaaggagaagatactrtatatacataagcaagaatatattattaaaaatagtatatgtaggcagaagaatggcgtgaacccaggaggcagagcttgcagtgagccaagatggtaccactgcactccagcctgggcgacagagcgagactctgtctcaaaaaaaaaacaaaacaaaaaacaaaaaactatatgtaatattagcttgtataaaataatcagaaaacaagacaaatatctcagaagcttcaacatcttgtatctatcccccaaatgctgtaaattactatatgattaactcaaaaacttttccaggaagaataatgaaccaagaaaaaggaaagggagagaaagcaaacaaaccaaaattgagagacctagagaaaaaattcaagtccagaattaaattgatagagtttatgtaagaggcaatgtatcagtttgggtgaatcaaataaacaagagaaaataacaaa

SEQ ID NO: 928076 - DNA, 726 bp, Homo sapiens
aaattccctactggtcagcaagccgtccccattatggatccccactgggacctcaattcagatcatggggactggagtcgcaaacatctgttgacctgtgttctagaagaactaaggagaattaggaaaaagaccatgaattattcaatgttgtccaccatgactcagggaaaggaagataatccttctgccttcctcgagcagttatgggaggccttaagaaaatatactcccttgtcacccgactcacttgagggtcagttgatccaaaaagacaagkttgttacccaatcagccacagatattgggagaaacttccaaaagtgagccctgggccctgaacaaaatctggaggcattattaaacctggaaacgttagtgttttgtaatagggaccaagagcaacaggcccaaatggaaaagtgagatcagagaaaggctgcagccttagtcctggccctcagacaaacaaaccttggtggttcagagaggacagaaaatggagcaggccaatcacccagtagggcttgttatcagtgtggtttacaaggacactttaaaaaagattgtccaagaagaaacaagctgccccctcacccatgtccactatgctgaggcaatcactggaaggtgcactgccccagagggcaaaggttgtctgggccagaagcacccaaccagatgatccaacaacaggactgagggtgcctggggcaaggaccctca

SEQ ID NO: 928077 - DNA, 627 bp, Homo sapiens
gcctctgccactgtggtgaacacccagaggcagacaccccagtacccactagcactctgccaagctgctgctacaaagacaaatcctgctgtcagtgccaataaaatgcttttgctgataccacctatgagagtacagtgaccagcagtttgtgagcaccttgccccctcttcaagaacagtggattcctaatctscaggagccagagaacaaagttgaggcccaatacaagtccccagagttagaggctgcagtccagaagttgggtgctgaatgatggccccctaaaatcttccagaaatgaagtaagttgactgaatccaccttgcaccacaatcagaccctccagttcatcaaatagagtaaaagttaaataatccaaacatcagcaacctgaaaattgacagcagataaacccacaaagacaagaaagaattagcacaagaaccctgagagttcaaaaagctgtattgcctgctttcctaaatgactacagcacctctccagcaagtgttctgaactaggccaagatggctaaaatgacagaaaaaaattcagaatatggataggaatgaagatcattgggctacaggaataaattaaaacccaatcaaatggcattaaaaa

SEQ ID NO: 928078 - DNA, 795 bp, Homo sapiens
aaatatgtttcttttacagatttttaaattttaatttttaatttttgtggatgtatagtaggtgtgtatatttatgggtacatgagatattttgatacaggcatacaatgcataataatcccatcaaggtaaatagggtgtccatcacctcaagaatttatcctttgtgttacaatgatacattttaattactttcaaatacacaattaaattttacatgtatacatactatagtcaccttgttgtgctaccaaatactaggtgtaattcattctttctatcttttctgtacccattgaccatcccctgactacctccttcctgtctctgttctttacagatttttaacaattaggaaacaagaatacattagaaggagccaaatcaagactataaggtagatgcctaatgattttctacagaaacttgaaaaagtgcccttgtcttatgagaggaacaatcagcattcccgtggtggaaaaagactctggtaaagttktcctgttaaagctttggctttctcaaaacactttcctgataatcagatgatacccttcttcagccatccagtaagtcaatagcaaaatgccttgagcatcccaaaaacttgttgccatgacccttgcttttgactggttcacttttgctttgactagacctagtccaactcttgttagtcattgactagatagtgctttttcttcagggtcacactgatgaagccatgttgcatcttctgacacagttatttgaagaaatcttttatgatcttcaggatctttaaaactcccactg

SEQ ID NO: 928079 - DNA, 621 bp, Homo sapiens
gatctgagtgcaatgaatttggcactgctcaggtggaaagtttgctcagccctaatgtttcattcagaattgtgtaagctcatcctattgagatgtctgtggtgttggctcttgtttcagttattaatcatcagtcttcttcaattagggcaaaaacaagatgaatttttttcttgcaaattgatgaggatgttctgccaccakggggttcatcttcaacatcatctagatccttcttaaaatgaattatttatttgtaaactgccaagttctttgagatcattgtgctcataaattttttgtaaggaactactcttctatctaagctttatcataaatttagtgtgtgtccttgcttcaattgcagcagaattcatattgctctgataggggctcttctcaaactgatgttttattcttagtgcctcacactagatcctgttcaggcacataataacaatttagtatgagtttattttggtcaaaaacttttgaaatccatatataatgttttgataatatgtattttccatgacctttttgaagacccttcatatatatgtgtgtaaaatctccatactttgaacatatattatgattttctcctagtgtgttcaactg

SEQ ID NO: 928080 - DNA, 621 bp, Homo sapiens
gatctgagtgcaatgaatttggcactgctcaggtggaaagtttgctcagccctaatgtttcattcagaattgtgtaagctcatcctattgagatgtctgtggtgttggctcttgtttcagttattaatcatcagtcttcttcaattagggcaaaaacaagatgaatttttttcttgcaaattgatgaggatgttctgccaccagggggttcatcttcaacatcatctagatccttcttaaaatgaattatttatttgtaaactgccaagttctttgagatcattgtgctcataaattttttgtaaggaactactcttctatctaagctttatcataaatttagtgtgtgtccttgcttcaattgcagcagaattcatattgctctgataggggctcttctcaaactgatgttttattcttagtgcctcamactagatcctgttcaggcacataataacaatttagtatgagtttattttggtcaaaaacttttgaaatccatatataatgttttgataatatgtattttccatgacctttttgaagacccttcatatatatgtgtgtaaaatctccatactttgaacatatattatgattttctcctagtgtgttcaactg

SEQ ID NO: 928081 - DNA, 619 bp, Homo sapiens
gcagaaatttgcataagtaaccaggagctgaatgctaatccccaagacaataggaaaaatgtcttcggggcacgtcagaggtcttcatggcagcccctcccatcacagggccgtaggcctaggaggaaaaagtggttttgtgtgctgggcccagggtccctgtgctgtgtgcagcmtaaggacttggtgctctgtgtgccaaccactcaagctgtgtctgaaaggggcaaatgtggagtagagcttgggccatggcttcagaaagtgcaagcctcaagccttggcagcttcaacatggtgttgagcctgtgagttcacagaagtcaagatttggggtttgggaacttccacctagatttcagaagatgtatggaaacgcctggatgcccaggcaaaagtttgctgcaggggcacggctctcatggagaacctctgctagggcagtgtggaagggaaatgtggggttggaacccctacacagagtccatcctagggcactgcctagtggagctgtgagaaggcggccaccatcctccagactccagaatagtagatccactgacagcttgcaccatgcacctggaaaagccacagacactcaatgtcagcctgtgaaagc

SEQ ID NO: 928082 - DNA, 642 bp, Homo sapiens
gcaaaagcagaactatggataagggtctatgttcagcggtgcatgtattgtcttgataaacatcttaaacaacagaaaacagagttcgagagcagagaaccggtctgaccacaaatttaccagggcggagtttttccccaccctagtaagcctgagggtactgcagaagaccaggcgcatctcccgcataagacagacattcccggagcagccgtttatagaccttcccccaggaatgtattcctttcccagggtattaatattaatatttcttgctaggaaaagaatttagtgatatctctcctactttcacacccatttataggctctctgcaggaagaaaaatatggctctttttgcccgaccccrcaggcagtcagactttacttacggttgtcttcccttgttccctaaaaattactgttattctgttctttttcaaggtgcactgatttcatattgttcaaacacacatgttttacagtcaatttgtacagttaacacaattatcacagtggttctgaggtgatgtaaatcctcagcttatgaagataataggattaagaaattaaagacaggcataagaaattataaaagtattatttgggaactgataaatgtccatgaaatcttcacagttta

SEQ ID NO: 928083 - DNA, 668 bp, Homo sapiens
ccaacaaagatcacaaggcaaagggcaaaagcagaactatggataagggtctatgttcagcggtgcatgtattgtcttgataaacatcttaaacaacagaaaacagagttcgagagcagagaaccggtctgaccacaaatttaccagggcggagtttttccccaccctagtaagcctgagggtactgcagaagaccaggcgcatctcccgcataagacagacattcccggagcagccgtttatagaccttcccccaggaatgtattcctttcccagggtattaatattaatatttcttgctaggaaaagaatttagtgatatctctcctactttcacacccatttataggctctctgcaggaagaaaaatatggctctttttgcccgaccccgcaggcagtcagactttacttayggttgtcttcccttgttccctaaaaattactgttattctgttctttttcaaggtgcactgatttcatattgttcaaacacacatgttttacagtcaatttgtacagttaacacaattatcacagtggttctgaggtgatgtaaatcctcagcttatgaagataataggattaagaaattaaagacaggcataagaaattataaaagtattatttgggaactgataaatgtccatgaaatcttcacagtttatg

SEQ ID NO: 928084 - DNA, 668 bp, Homo sapiens
ccaacaaagatcacaaggcaaagggcaaaagcagaactatggataagggtctatgttcagcggtgcatgtattgtcttgataaacatcttaaacaacagaaaacagagttcgagagcagagaaccggtctgaccacaaatttaccagggcggagtttttccccaccctagtaagcctgagggtactgcagaagaccaggcgcatctcccgcataagacagacattcccggagcagccgtttatagaccttcccccaggaatgtattcctttcccagggtattaatattaatatttcttgctaggaaaagaatttagtgatatctctcctactttcacacccatttataggctctctgcaggaagaaaaatatggctctttttgcccgaccccgcaggcagtcagactttacttacggttgtcttcccttgttccctaaaaattactgttattctgttctttttcaaggtgcactgatttcatattgttcaaasacacatgttttacagtcaatttgtacagttaacacaattatcacagtggttctgaggtgatgtaaatcctcagcttatgaagataataggattaagaaattaaagacaggcataagaaattataaaagtattatttgggaactgataaatgtccatgaaatcttcacagtttatg

SEQ ID NO: 928085 - DNA, 635 bp, Homo sapiens
aattcccaaattcctccaacaaagtgttatattccacaggtcaggagatttatagccctggttcactaacgttgtatgcagaaattgggaaccgtggttctcaacctgacttatgtaagggagtcccttaaaatctttaaaaactactgaagcctggaccctcacccccagcattttggatttaattaggctaggtacagtcttgacctcagaattttgaaactctccccatttttctggtcctagacaagagtgtgrtgtgaggcccaatgctctcaaacctgcttcttgaaactgcctttgcaaaattatgactaagacagtgaaagagatctaacttaatcaattccatcttgcttctaacctccaagctgtccttgttcattcctgggtgtaggctgtacttactttgggataaatttagtttatagtttatagtttaaaacaaagacgataacagtcctttcccaaagcagacctccttcttgcctgcagattagattgcctttgtgggactaacattagccacaagattagaaattatgatttaggagtcatgccactggaggatacaagattctgaccctccctaacctgctcctaagattagtgcttgaggtatttttgcagaccct

SEQ ID NO: 928086 - DNA, 612 bp, Homo sapiens
gggccccccaactaaccccccagcccctggaggtggcagcagcagcagcaaagccttccagctcaagtcccgcctgctcagccccctcagcagcgcccgcctgccccccgaaccaggactgtctgacagctacagcttcgactacccctcggtgagtgcctggctgcagctctctgtcccctaaggccaaatcattctccaaactgatatttctctaggattgactatgccaggccatgtgctagggaggcggcagggaacgtgccagatatggtctctgcttttttttttttttttttttagagacagggtctccctctgctgccctggctggagtgcagtggtgcgatcatagctcactgcagcctcaacctcttgggctcaagcgatcctcacacctcagtctcctgaggagctgggaccacaggcaygcacctccatgcccagctaatttttaaatttgtggtagagacggagtctcattgtgttgtccaggctggtctcaaactcctgacctcaagtgagccacccgcctcagcctcccaaagtactgggattacaggcaagagccaccgcgcccagcctcatgcccttaaagtttcccgtctgtct

SEQ ID NO: 928087 - DNA, 554 bp, Homo sapiens
caaaactctttctttgcattcaggcagagagaagtctggagctccagcctcagttttttactcagggacatatgtgaagtgtcatctcatttcctccccccatgataaaaaaaatggggcagttatgcaacaaatcaactttgtgctatttccaggtacatgagactgtccatgagatgtgttttgaatgccaaacaccgaatatatagttattttttaaagctttgttgagatataactgacaaacaataaactgcacaaaataaagtatacaaattgatgttttgacatacgtatacatctgtgaaatcatcattatccttaagatagcaaacatatttttcaccsttccaaaatattttttgcactgtatttatttgaaatttccagctttattgtgatatacttatgaaaattataagggttcagtgtatacaatgtaatgattggatacacatgtatactgtgaaatgattcaccacaatcaaatgagttaacatatttattacccaaggtcattgcttccctttttgttttattctgtttttggtgag

SEQ ID NO: 928088 - DNA, 658 bp, Homo sapiens
ccctgcaactggttgcagaaataaactcttctttcccagtctgtctgcacatcattattggaccactagaatgagcagcctgttctgtcctggcacaaatcaatggcaaagcatttagaatattccataaacttagctgataaagcagtggcaggtttggagaagattgactccarttttgaaagttttgctgtgggcaaaatgctgtcaaacagcatggcatgctgtagaaaagtctttcctgaaaggaagagtctattgtggcaaacttcaccattgtcttattttaagaaattgccatagccagccaaaccttcagcaacctccatgctgaccaatccacagccatcaacactgaggcatgaacttctaccagcaaaagaattagaactcaatggaggctcagatgactcttaccatttttgagcaataaagtattttataaatcaaattatgtataatttttagacaatgttattgtacttagtaaactatagtatagtgtaaacataatttttatgtgcagtaggaaatcaagacatttatgtgactcactttatttcaatatttgctttattatggtggtctggatataaacctgcagtatctctaaggtatgcctgtattgggtgcctgtcatagatcagcctatgtgtga

SEQ ID NO: 928089 - DNA, 658 bp, Homo sapiens
ccctgcaactggttgcagaaataaactcttctttcccagtctgtctgcacatcattattggaccactagaatgagcagcctgttctgtcctggcacaaatcaatggcaaagcatttagaatattccataaacttagctgataaagcagtggcaggtttggagaagattgactccaattttgaaagtyttgctgtgggcaaaatgctgtcaaacagcatggcatgctgtagaaaagtctttcctgaaaggaagagtctattgtggcaaacttcaccattgtcttattttaagaaattgccatagccagccaaaccttcagcaacctccatgctgaccaatccacagccatcaacactgaggcatgaacttctaccagcaaaagaattagaactcaatggaggctcagatgactcttaccatttttgagcaataaagtattttataaatcaaattatgtataatttttagacaatgttattgtacttagtaaactatagtatagtgtaaacataatttttatgtgcagtaggaaatcaagacatttatgtgactcactttatttcaatatttgctttattatggtggtctggatataaacctgcagtatctctaaggtatgcctgtattgggtgcctgtcatagatcagcctatgtgtga

SEQ ID NO: 928090 - DNA, 658 bp, Homo sapiens
ccctgcaactggttgcagaaataaactcttctttcccagtctgtctgcacatcattattggaccactagaatgagcagcctgttctgtcctggcacaaatcaatggcaaagcatttagaatattccataaacttagctgataaagcagtggcaggtttggagaagattgactccaattttgaaagttttgctgtgggcaaaatgctgtcaaacagcatggcatgctgtagaaaagtctttcctgaaaggaagagtctattgtggcaaacttcaccattgtcttattttaagaaattgccatagccagccaaaccttcagcaacctccatgctgaccartccacagccatcaacactgaggcatgaacttctaccagcaaaagaattagaactcaatggaggctcagatgactcttaccatttttgagcaataaagtattttataaatcaaattatgtataatttttagacaatgttattgtacttagtaaactatagtatagtgtaaacataatttttatgtgcagtaggaaatcaagacatttatgtgactcactttatttcaatatttgctttattatggtggtctggatataaacctgcagtatctctaaggtatgcctgtattgggtgcctgtcatagatcagcctatgtgtga

SEQ ID NO: 928091 - DNA, 658 bp, Homo sapiens
ccctgcaactggttgcagaaataaactcttctttcccagtctgtctgcacatcattattggaccactagaatgagcagcctgttctgtcctggcacaaatcaatggcaaagcatttagaatattccataaacttagctgataaagcagtggcaggtttggagaagattgactccaattttgaaagttttgctgtgggcaaaatgctgtcaaacagcatggcatgctgtagaaaagtctttcctgaaaggaagagtctattgtggcaaacttcaccattgtcttattttaagaaattgccatagccagccaaaccttcagcaacctccatgctgaccaatccacagccatcaacactgaggcatgaacttctaccagcaaaagaattagaactcaatggaggctcagatgacwcttaccatttttgagcaataaagtattttataaatcaaattatgtataatttttagacaatgttattgtacttagtaaactatagtatagtgtaaacataatttttatgtgcagtaggaaatcaagacatttatgtgactcactttatttcaatatttgctttattatggtggtctggatataaacctgcagtatctctaaggtatgcctgtattgggtgcctgtcatagatcagcctatgtgtga

SEQ ID NO: 928092 - DNA, 634 bp, Homo sapiens
ggctgagaagaatgtatattctgttgatttggggtggagagttctatagatgtctattaagtctgcttggtccagagctgagttcaagtcctgaatattcttgttaattttctgtctcgcactaatactggcagtgcggtgttaaagtctgtcactcttattgtgtgggagtttaagtctctttggacgtctctaagaacttgctctatgaatctgggtgctcctgtattggatgcatatatatttagaatagttagctcttcttgttgcattgattcctttaccattatgcaatgcccacctttgtcttttttgacctttatcrgtttaaagtctgttttatcagagactagcattgcaacctctgcttttttttggctttccatttgcatggtaaatcttcctccatccctttattttgagcctacatgtgtcattgcacatgagatgggtctcctgaatacagcacaccaatgggtcttgaccctttatccaatttgccactctgtgccttttaattggggcatttatccagtttatgtttaaggttaatattgttatgtgtgactttgatcctgtcattatgatgctagatggttattttgcccattagttggtgcatttttttcatagt

SEQ ID NO: 928093 - DNA, 634 bp, Homo sapiens
ggctgagaagaatgtatattctgttgatttggggtggagagttctatagatgtctattaagtctgcttggtccagagctgagttcaagtcctgaatattcttgttaattttctgtctcgcactaatactggcagtgcggtgttaaagtctgtcactcttattgtgtgggagtttaagtctctttggacgtctctaagaacttgctctatgaatctgggtgctcctgtattggatgcatatatatttagaatagttagctcttcttgttgcattgattcctttaccattatgcaatgcccacctttgtcttttttgacctttatcggtttaaagtctgttttatcagagactagcattgcaacctctgcttttttttggctttccatttgcatggtaaatcttcctccatccctttattttgagcctacatgtgtcattgcacatgasatgggtctcctgaatacagcacaccaatgggtcttgaccctttatccaatttgccactctgtgccttttaattggggcatttatccagtttatgtttaaggttaatattgttatgtgtgactttgatcctgtcattatgatgctagatggttattttgcccattagttggtgcatttttttcatagt

SEQ ID NO: 928094 - DNA, 641 bp, Homo sapiens
ttttaacaagccctgcaggtaattctgatgcacgttcaaatttgagaaacactgtgttcgtttatctcagtttgcactgggttataactttacttttgtacattaatagtcaaggatgaacacagcacgtccatgtcaccattaatacagaaagttgaagttggagaagggctgtgtctatgggtttccctcgcctgacccaccctccacccccaaaaggaacgccaagttgaggcgttcccctgtctccctacccccattggaaacatcctgtccctcaaacccggcacctcgaactgtctgacccatctgaggctggcgcccgtggccgcagaaatccctacacctctggcgcgagtaatgcggtcgcgcagcttttatacccaccccctcctcccgctgagcacaaagtaaaaccgaaagatttctgctaaggttgaaaaatgaggaagatactttttcttttytttttttttttttttttagtcaggacccaatgttaaaatgtgagtcaagaatgaaaaacagatggttaacaaggggaaggaaaaaccaagccattgagggggcacccggatttgaaccagggacctcttgatctgcagtcaaatgctctaccactgagctatacccccgcgcct

SEQ ID NO: 928095 - DNA, 837 bp, Homo sapiens
cttcagagattctgattcagtagactcaatgttgggtccaggtatctgcattttaaactagcaccacagggattctgatacaggcaatttgtaaatgactcttttataaaattggtagttagatttactaaatatttctataagctaagtgtggtgctaatccctttagatgcattatcttaatccacacaagagctcatccagttatagctgaggacacaggctgagacgtcagctagaacttgtaaacgatgaatcctggccttaaaaacaaaggcctctgattacaaagcccacattctttcatgggctagggatagcttttaaatctttaaattattttaggagtttctaatatcttgctactcaaagtgtggtccatggacctgtaacatcgaagtcttctgggaacgtgttagaaaagtagactctcagccctccaggccctgtgaatcagaatctactttttgacgggatacctgtgtgatgtctatacacatgaaagtttragaagcactgtgataatatattttatttattcatttgtaccctcatctcatgccaaaataaattactgatgtcatttcctattacatattatggaaataccttatactgtagcttgcatatgattcctattggtttatgagctataattcatccattcaactagatttagtggaactgattttattatttgtcacccagactcttaaaattatctcctatttggtttatctgccttcagtctctcctgtcttttaatctattgctagaaaagattgaaaaaaaaaacagtggaacacattattgcaacaaaatcttggtgaaaaacct

SEQ ID NO: 928096 - DNA, 621 bp, Homo sapiens
ggttagcggattgcaaatgtgtttgtcaaaagcaggtggcagggatggtggaggggacattgtctcagaaaggagatttgggaaagcattccacttggccaggtcttcctctgggcctgaggtctgaccttgcctcctttagagatgaggtttccagccgcagccccaccccaccctgtmtattgcatctctctttcaacttttatgctgctctgggatcatgcccagtaaattgcagatgccccattaaatagagttgatcctcattacagtaggttgaatattccttatccaaaatgcttgggaccagacgtgtctcggatttcaaattttttaagatttgggagtatttgcattacatttactgtttgagcatcccaaatccaaaaatctgaaatcggaaatgctccaatcagcatttccttcaagcatcatgttggcactcaaaaactttccaattttggagcattttggatttcagatatttggattagggatactcaacctgtattagcaattccacatttatgaattcatctgctcactaaaacttatttgtaacccccacatcaatactcaggtcattcacaaacgtgcaaaaaatttgagtcattccatgca

SEQ ID NO: 928097 - DNA, 633 bp, Homo sapiens
ggggactttgaggacataggcaagtcctgtaggcctcagtgacccacattaagcagagccgacatcatctgccgtaacaacctgcccacaaagccagggctagaggcaaagccttccttgtgagaaagtctaaataccagaaggggtgaggcatcgttgccatgagtatgaagggcctgaggtgtctccttttccgtgtctctccccccatccttctctctcctaggagggccagtttctgagtgccccagaggagaatgctgtagtgaacacagccctgtacagagaagacagcagcttgattcctctcatttctcagtcattagcccctcactcgctctccgggaggataacggggtgtgygcagctcctccccttctttcctgaggaaacctcagtggcttccgtgcccttgccagggtgagtgttctcctgagtccttcctctgctcctacagaatagagaaggggcttctgttgccatcagcttagtaagcctggtgcgatggatgcccctgacagggaaagccatttaggggaagacctgggactacagcccggaggtcctgggttcttttgtggttttccccgtgctcgcctctctcagatgaagcctgctgcctgttagcgtgag

SEQ ID NO: 928098 - DNA, 622 bp, Homo sapiens
tcatttctcagtcattagcccctcactcgctctccgggaggataacggggtgtgtgcagctcctccccttctttcctgaggaaacctcagtggcttccgtgcccttgccagggtgagtgttctcctgagtccttcctctgctcctacagaatagagaaggggcttctgttgccatcagcttagtaagcctggtgcgatggatgcccctgacagggaaagccatttaggggaagacctggsactacagcccggaggtcctgggttcttttgtggttttccccgtgctcgcctctctcagatgaagcctgctgcctgttagcgtgagtgtgaggagactcgctcagaccagttcactgcccgcacccactgcatcaggcagcggggaaccctcgctccagcgaagcccttgagcctcgtcatgttgggcgcgtgagggatgggctggagttccagagcagggagctgtcacagctcgtaaggggagcctcgagagtggtcgtgcaggagggctccccagtgggcctcgtggggaccctgtcagaccctctggatgtctcagggtgacctgaggtcatcccagaatccccctggttttaagcaattgtatctctagctgtctgag

SEQ ID NO: 928099 - DNA, 540 bp, Homo sapiens
tacctgatggctttcaaactggaacatcagctcttcccggtgctacagcagcctacaggccttcgaactggaactggggcactggctctgcagattttggacttcttagcctctataattgcatgagacaattcctataataaatctctttctcyatatatgtgaacactgcatgaagcatccacattagctttggcatcagctgaaccctgctatgatctcatatttactaattgatatagtttgcatatttgtccccacctaaatctcatgttgaatggtaacccccaacgtttcacatggggcctggtgggaggtgtttggatcatgggggcagatccccccatgaatggcttaggccatccccttggtaataagtgaactctcgtcttgagttcacgtgagatctgctcatttaaaagtgtgtggcacctcccccgacacacgttctctctcttgctcctgcttttgccatgtgtaagtgcctgcacctgcttcatcttcctccataagtaaaagcatcctgaggtctccccagag

SEQ ID NO: 928100 - DNA, 540 bp, Homo sapiens
tacctgatggctttcaaactggaacatcagctcttcccggtgctacagcagcctacaggccttcgaactggaactggggcactggctctgcagattttggacttcttagcctctataattgcatgagacaattcctataataaatctctttctccatatatgtgaacactgcaygaagcatccacattagctttggcatcagctgaaccctgctatgatctcatatttactaattgatatagtttgcatatttgtccccacctaaatctcatgttgaatggtaacccccaacgtttcacatggggcctggtgggaggtgtttggatcatgggggcagatccccccatgaatggcttaggccatccccttggtaataagtgaactctcgtcttgagttcacgtgagatctgctcatttaaaagtgtgtggcacctcccccgacacacgttctctctcttgctcctgcttttgccatgtgtaagtgcctgcacctgcttcatcttcctccataagtaaaagcatcctgaggtctccccagag

SEQ ID NO: 928101 - DNA, 618 bp, Homo sapiens
ctccaggctgacagttccctggtctttcaatgaccttgacactttgggaactactggagaatgtccctcaattaatttttttcctgacattctctcaggattacattgaggttatgtgtcatttggaagaataccatagaggtgatgtcctcttttcagggcatcaaatcgaggatatgttatgttgataggaattattactagtgacattaatcttggtcacttggctagagtgatgtctgccagaattctctggtgtaaaggtactatttttcactttgaaattacgcagtattttggggaaagcaaaggattttaatgttacggagtatgaaaaatttattatgtaattcagatgctaccttgcaactaaacttaagaaatgattatttgttgagtttaggtgtaatagtaaagaagaaataaccacaagtatataaaaagacttaagatttggctgggtgtggyggctcacacttgtaaattccagtactttcacggggtgaggtgggaagattgtttgagcccaggagtttgagaccaggctggtcaacacagcgagaccgtgtctctacgaaaaactaaaacattagccaggaatggtggtgtgtgcctgtg

SEQ ID NO: 928102 - DNA, 392 bp, Homo sapiens
caagacctcgtctctacaacacaaaaaaactagccaggtgtggtggcacacacctgtagtcccaactactcagggggcagaggctggaggaccacttgagcccaggagatcgaggctgtagtgaactatgatgacaggtttcgccatgttgaccaggctggtctcaaactcctgaccccaggtgattcrcccacctcagcctcccaaagtgctgggattataggtgtgagccaccgcaattcagtctggatgacagagcaagaccccagtattaaaaaaaacaaagtcatttgtcgggaagcactagaaaatgggattttggaaatcaaagtctggacatggaacaaaggtaaccagaataatctctcagcctgactttaccttatcaggaa

SEQ ID NO: 928103 - DNA, 502 bp, Homo sapiens
ggaaaaggtgccacctggggactaggcatgttcaaaagggtggctctatcttccctttcctttgtaaaccatgcgtacagtaagaagcaggcaacatggtggcaggcaacatggcatcagccaggcaaagaccccatttgcataatagaagagtggtgggggcagccagctttctcgtgcactgtgtaaacatcacacctggcccaaccaatctttgggccctatgtaaatcagacactgcctcctcaagccagtctataaaatctggtgcactttgctgcaggccggaagtccactcgggcaaccctctccctcccagtagagagagctattctcctttctctttcttttgcctattaaagctccacttctaaacccacttcctgcatgtccacatactcaatttccttggcatgagacaacaaaactcaagtatttaccccaaacgacaccrcttcattatgttgtaagtgattaatttattagttaaaattgctatgtt

SEQ ID NO: 928104 - DNA, 725 bp, Homo sapiens
gaggtgtgtttttaaaagacctttagtctgttctacttttcctgaagacggaggactgtaagggatataaaggtttcactgaatactaaaagcctgaaaaactgcttggctgatttgactaataaaggctggtctgttatcagactgtatagaggtgggaaggctaaactgaggaattatgtctgacagaagggaagaaatgactgcggtggccttctcagaccctgtaggaaagacctgtacctatccagtgaaagtgtctacctagactaagaggtattttagttatctgactcggggcatgttgagtaaagctaatttgccagtcctgggtgggggcaaatcctcgagcttgatgtgtagggaagggagggggcctgaataatccctgaggagtagtagaatagcagatggaacactgagaagttatttccttgaggatagatytccacgatggaaagaaaatgagaggttctaaggggcgggctagtggcttgtactatagcatagcctgactttgctggtgtgtggcgattaggcctggtggaactgccatcaataaatcaagcatgatcaggatgaggaacaggaaagaaggaaatatggggaaatggggtgaatgtcaggtggatcagagagatacagtcatgagggtcaggtgtggtatcaggaataatgtgggaggctggattgaagtccgggccagaaacaatggtaattgtggg

SEQ ID NO: 928105 - DNA, 725 bp, Homo sapiens
gaggtgtgtttttaaaagacctttagtctgttctacttttcctgaagacggaggactgtaagggatataaaggtttcactgaatactaaaagcctgaaaaactgcttggctgatttgactaataaaggctggtctgttatcagactgtatagaggtgggaaggctaaactgaggaattatgtctgacagaagggaagaaatgactgcggtggccttctcagaccctgtaggaaagacctgtacctatccagtgaaagtgtctacctagactaagaggtattttagttatctgactcggggcatgttgagtaaagctaatttgccagtcctgggtgggggcaaatcctcgagcttgatgtgtagggaagggagggggcctgaataatccctgaggagtagtagaatagcagatggaacactgagaagttatttccttgaggatagatctccacgatggaaagaaaatgagaggttctaaggggcgggctagtggcttgtactatagcatagcctgactttgctggtgtgtggcgattaggcctggtggaactgccatcaataaatcaagcatgatcaggrtgaggaacaggaaagaaggaaatatggggaaatggggtgaatgtcaggtggatcagagagatacagtcatgagggtcaggtgtggtatcaggaataatgtgggaggctggattgaagtccgggccagaaacaatggtaattgtggg

SEQ ID NO: 928106 - DNA, 593 bp, Homo sapiens; identical to SEQ ID NO: 928066

SEQ ID NO: 928107 - DNA, 570 bp, Homo sapiens; identical to SEQ ID NO: 928067

SEQ ID NO: 928108 - DNA, 727 bp, Homo sapiens
tgagggtttttatcataaaggaatgcaggattttattcaatgctttttctgcatctattgagatgattgtatggtttttgtttttaattctaattatgtgatgtatcacatttactggcttgcttatgttaaaccatccctgcatccctgggatgaaacacacttgatcatgatgtattatcttttcatatatttctttttttttctttttgagacagagtctcattctgtcatccaggctggagtgcagtgacatgatctcagctcactacaacctccacctcccgggtttgagtgattctcctgcctcagcctcccaagtagctgggactacaggcaygtgccaccacacctggctaattactgtatttttagtagagatggggttttgccgtgttggctgggctggtctcaaactcttgacctcaaatgatctgcctgtcttggcctcacaaagtgctgggattacaggcatgagccactgtgcccagcattgtactatctttttgattggctgttggattcagttagctagtattttgttaaggatttttacatctatgttcatcaggaatattggtctgtagtactggtctttttaaaattatattctttcctggtttgggtatcagggtgatattggcttcatagaatcatttagggaggattccctgtttttcagtttctgaatagtttcagtaggattagcatcaattctttgaattaa

SEQ ID NO: 928109 - DNA, 727 bp, Homo sapiens
tgagggtttttatcataaaggaatgcaggattttattcaatgctttttctgcatctattgagatgattgtatggtttttgtttttaattctaattatgtgatgtatcacatttactggcttgcttatgttaaaccatccctgcatccctgggatgaaacacacttgatcatgatgtattatcttttcatatatttctttttttttctttttgagacagagtctcattctgtcatccaggctggagtgcagtgacatgatctcagctcactacaacctccacctcccgggtttgagtgattctcctgcctcagcctcccaagtagctgggactacaggcatgtgccaccacacctggctaattactgtatttttagtagagatggggttttgccrtgttggctgggctggtctcaaactcttgacctcaaatgatctgcctgtcttggcctcacaaagtgctgggattacaggcatgagccactgtgcccagcattgtactatctttttgattggctgttggattcagttagctagtattttgttaaggatttttacatctatgttcatcaggaatattggtctgtagtactggtctttttaaaattatattctttcctggtttgggtatcagggtgatattggcttcatagaatcatttagggaggattccctgtttttcagtttctgaatagtttcagtaggattagcatcaattctttgaattaa

SEQ ID NO: 928110 - DNA, 727 bp, Homo sapiens
tgagggtttttatcataaaggaatgcaggattttattcaatgctttttctgcatctattgagatgattgtatggtttttgtttttaattctaattatgtgatgtatcacatttactggcttgcttatgttaaaccatccctgcatccctgggatgaaacacacttgatcatgatgtattatcttttcatatatttctttttttttctttttgagacagagtctcattctgtcatccaggctggagtgcagtgacatgatctcagctcactacaacctccacctcccgggtttgagtgattctcctgcctcagcctcccaagtagctgggactacaggcatgtgccaccacacctggctaattactgtatttttagtagagatggggttttgccgtgttggctgggctggtctcaaactcttgacctcaartgatctgcctgtcttggcctcacaaagtgctgggattacaggcatgagccactgtgcccagcattgtactatctttttgattggctgttggattcagttagctagtattttgttaaggatttttacatctatgttcatcaggaatattggtctgtagtactggtctttttaaaattatattctttcctggtttgggtatcagggtgatattggcttcatagaatcatttagggaggattccctgtttttcagtttctgaatagtttcagtaggattagcatcaattctttgaattaa

SEQ ID NO: 928111 - DNA, 727 bp, Homo sapiens
tgagggtttttatcataaaggaatgcaggattttattcaatgctttttctgcatctattgagatgattgtatggtttttgtttttaattctaattatgtgatgtatcacatttactggcttgcttatgttaaaccatccctgcatccctgggatgaaacacacttgatcatgatgtattatcttttcatatatttctttttttttctttttgagacagagtctcattctgtcatccaggctggagtgcagtgacatgatctcagctcactacaacctccacctcccgggtttgagtgattctcctgcctcagcctcccaagtagctgggactacaggcatgtgccaccacacctggctaattactgtatttttagtagagatggggttttgccgtgttggctgggctggtctcaaactcttgacctcaaatgatctgcctgtcttggcctcacaaagtgctgggattacaggcatgagccactgtgcccagcattgtactatctttttgattggctgttggattcagttagctagtattttgttaaggatttttacatctatgttcatcaggaatattggtmtgtagtactggtctttttaaaattatattctttcctggtttgggtatcagggtgatattggcttcatagaatcatttagggaggattccctgtttttcagtttctgaatagtttcagtaggattagcatcaattctttgaattaa

SEQ ID NO: 928112 - DNA, 567 bp, Homo sapiens
cattccctgctgagcccagcacttcaattctgcctctattgaaagaaacttcccaccagtggaacaatctaatccttaagacctgccatctggattctttattcacacagggtgttcccttgatgtggcacactctccctttccttaggagtagaagttcctgagagacagactactatgagtgctgctgctcctcagggtctagccactcagtggctccagactagtgctgggggatgtctgctaaggatccagtgatatgacctgtcctccagttttccagcagckgttatcagcaccaggtctgatgggggtgccagaggcgtgacatagacctgtgagattccttgattatagataactttagtgtgttgtctttcttgaatgctagttcaggtagtaataaactggtcatgtggatagactcaggacctcctggttagacagggtagtgcaggaagtggtaatagctgaggtcacacagtagttttgtccttcttgagtgcagtgttattccacctacagatgctgcaatggactgtgttggtaggcttccagctactgggt

SEQ ID NO: 928113 - DNA, 629 bp, Homo sapiens
acaagcacgtgccaccatgcccagctactttttgtacttttagtagagatggggttttgccatgttggccaggctggtctcgaactcctgacctcaggtgatctgcccaccttggccagtgctgagattaaaggcataagccaccatgcccagcctgtgagcttgtgtttggttttgagcttctggagtctggacaggtggccatggtgaggcttagggtcatgtcctcactgcctagaccagtaacttcaaagcagagtcacgcccaagagtcaccccttcttggtcatcctgggagtgatcagatcctccaggcatcctctttaaaactgtgtactgtgtcctgagttgtatacctggagcgtaatttcaggactcagaatggcccagccctcgtagctgtcctaggtaccatgtgagtactcagaacccaggactgctarggaagacattagggaatatacctgtgttagtttctaaattattttaagtaatttaaaatcttaaaattatgttatattacaataagtaatagatgattatgagataaccgagtgatttctaaataagttaaaaatctgaaagattattaaacataagtttatatatgttggcatcttatttttgtg

SEQ ID NO: 928114 - DNA, 580 bp, Homo sapiens
gtaccacattttccttatccagtctatcattgatgggactttaggttgattccatgtctttgttattgtgaatagtgctgcaatgaacatatgtgtgcatgtatctatatagaataatttacattcctttgggtatatattcagtaatgggattgctaagtcaaatgatatttctgtttttaggtctttgaggaattgccacactgtcttccacaatggctgaactaatttacattcccatcaactgtgtataagtgttcctttttctccacaaccttcattttctatattttcattggaatataaatttcatagagcaggaaccttgtctatcttgtgtccaatgtatacccaagagctacagcagtgcctggcacatagaaagtactcagtatttattgaatggatatatacttagataataaactattgtcctatgtartaagttcatgtaatgtttctttgaaactattacctattgatatggttttgccctgtgtccccacccaaatctcatgacgaattgtaatccccatgtgtcaagagagggacctggtatgaggtaattgtatcggggggc

SEQ ID NO: 928115 - DNA, 592 bp, Homo sapiens
aggtgatggtcaggtggttgttaactgtctctttcaaataataattggttacagttggggctagggaaaggcagtttcccaatagatagaaaaacctgaaactggtgatcaacagcttcctgataagatctcaggagttgagcaagtgggcttaagcgcatgcatcaggaggcaaaatggcaaagtttaactggcatatgaccttcctctaggaaaactagactggtgggggaagaagcctcaggtgagcatgcatacaactccaatatacaccctgcatgtgctcccctcccaagtgctagcaggccactgcacatgtggagagcccacccccaagggaagaatcaggggagaggtaacaggagaccccagaagtatgccaacatataaaaccccaagtcaaatggccagaatgcacacttgatcttycaagttgcctgcttggccttcttccaagtgtactttacttcttttcatttctgctctaaagctttttaataaactttctaaaacttgccttggtttctccttctgccttacgaccttccagttgaattcttttttttttttttttttttttgagacggagtct

SEQ ID NO: 928116 - DNA, 423 bp, Homo sapiens
ggtcaccaaagcctgaaggagagggtcctgtcacaaattcttacaggtgatcagaggtttctgagtgagaggctctattactgagagggccaaggaggatgcttgtgtcactgacttagggtgaccagctcctgatgaaactgagggtggggtccctggctctcagagggttgaagaaagggctctggacactgagacatgactgagggtattcrgtcaacgggaagtataaatgaggggctttccctagcaagcatgggctcacataggtgggacaaactgcccaatgtgggatctggtagctgagatttcacggcagggttaaaccacagtggtccttaattcttcctccctcttcctccttcggcctgacctgcaggtcttctagataccagtagatggcactgcaacctcacatgtgga

SEQ ID NO: 928117 - DNA, 795 bp, Homo sapiens
tcacaagacaatgtccttctcactcttccctcctctttccacaagcagaggggtcttcccacatggccaccactgcccaggcccatgacaggtacctcctggctaccaccaatattcactcaaggccaagcgctcttcagttagcttgtggtctgggaatctgccttcaggtcacttggctcctctctgacctgggtcaggtccagaaatgccatccaaggacgaagggttggatttggggagctccagagcccacttggttctctaccctactgtggctgagctggtacctgagatgcaagacagagtacccttttatctttcctctccttttctcaagcagagtctctccccaactctaccacagcttggaatgtgctgagtcacatctgaagccatgaagtctcagagtctcacctacctcccatggtaggtactacctttttttaccattgckaataattcagggcccaaatagtctttactcagcaggtgatgaatgctaccaggactgggtccttcctttcaaggtaacaggttccttctgggtcagggtatgtccagaaacatcatctgggtgctagggcttgaaatgggggcctcaggactccacctggtgccctatcctactgtggcttagctggtacctaagtcggaagacaaagccctctttatgaaatctcccttcctctctccccaagcagaaggaaggattctctcctggagctgtgagctgtgttgcctggagttgtgggaggggtggtgcacgcatgtcttgatcaccctggctggtat

SEQ ID NO: 928118 - DNA, 620 bp, Homo sapiens
tagaattaatttggctagcttgtgtgggcttctctgtttgcaattcctgttatatcaattgaaatcactacattttcttgagatgaaatcactatcttttaactggtagtttgaatttagctaaaaagtataagccaactttgtgtttatttgcgtaaaaacaaaggaaacattttcattcttaccactaatgaacaaaatttgctagtttcctgatttagattgtttcgtgtctcttgattgattttccataaatagtccatttcctttataagtttctcctgcaaaagaagcaagaagcttagcaatgatgaagacagtagatttcatccccttatcaataaaaaaaaaggctgtaattgaaagaaacataaattaagttagagtgaagcgctcagatttttccaagttaaacgaatatgattctaataatttggatgtgaaaartgatagaaacataatagagagttttaagggacccttcagataatatcatcaattttctgagaaactggcttttacataacctgactttgaaaagtgttcttggtgctggccacagctccacagctccattctatatggttgaacaatgtttttaagggaactcctttagcgaa

SEQ ID NO: 928119 - DNA, 627 bp, Homo sapiens
ctgaggcaaaagaaatgcttgaacccgggaggcagaagttgctgtgaattgagattgtgccactgcactcgagcctggtgacagaggaagatgctgtctcaaaaaaaaaaaaaaaaaaagaaacggcatcttcaagaaccacaagaaccacaagagagttccacrctgaagaagctctgattctgcatttgctgaactactgatttgagttagccaatataacactatcttagataaagtgtacaaacaactcaatttcatctcctcattaataactgattggtctaatatcaattctgatttttaaaaagctaattagaaaaagaattaattatagaaccaataagaggtttgaatagttacaagctattcaaaggagaattcaaaaaaccattcaggtatgaggccataaagtatgatgaaataaatttcattaatatattttaaaataaactgattagacaggcaacaacacctgggcacgggtctcctcacctccagcaacacaaacccaatcacgcagctatggggttgcaaaggctgcatagtgacaaacagactgctctgagctgagatttctttacttgtatctgtattctgagaccgggtctcactctgtcactctgg

SEQ ID NO: 928120 - DNA, 449 bp, Homo sapiens
catgggttgctgggggtgagctgctgtatgatggcagtaagaacatatggtatattattgatgaatgaggtgactgtgaagaatctccagaggaggacacgggagaacacaatgacatgagtgactgtcctgcttggttaggaaagggaaacgtaaagctgtggaattctgttgatgatggatgtgagagtggtgaagccctgcgggatgatgtagagtacttccacatccctggtgaggagctgccccttgggtctgagtttctgggaggggagagggagaagctgggtgaggcaggcatgaatcttgaggagtcagggctgggggaccgctcatattatcccgagacctgtgattcyctgggggactcctgggtgcatggggctgactcccgcaggaacctggggatggctggagagtaactgggagccacaggagagtccctgagg

SEQ ID NO: 928121 - DNA, 619 bp, Homo sapiens
ctgagggatggtgaagacatgagagagactggggagtaacgcagtgaaattggtgagtttggtggtgatttctgggtgcctgcaacggactccggctgaagtgtgggcgtgtttggagagtagctgggacagacaggcgagtccctgagggttggagataaagacgtgctagagactggggagtaactcagtgaaagtggtgggcttggcggtgatccctgggttcctggaactgacccgcgctgaaatgagggcgtggttggagagtagctgggacagactggagggtccgtaagggctgggggtgaagacgtgagagagactggccaggatctcactgaggtctgagagtttgtaggtgtttctggggtgtggggtacagactcccgctgaaatstgggcgtggttggagagtagctgggacagaaaggagagtcatgggtggctgggggtgagctgctggatgatggcagtaagaacatatggtatgttaatgatgaatgaggtcactgtggagaatctccagaggaggacacgggagaacacaatgacatgagtgactgtcctgcttggttaggaaagggaaacgtaaagctgtggaattttgttgatgatggat

SEQ ID NO: 928122 - DNA, 565 bp, Homo sapiens
accaacagatgttcacaactgatggagagccgtgaaagagagatagcggtaaatagttacaataacacaattttcctgcacctgtcgaggatttccccaagaaaacgcagaatgtgggatgcacctaaggcatgtgaaagtgagagggcagaaggagtaagagagaaataggaggaaggaaggaaggaaggaaagaaggaaggtaggaaggaaggaaggaaggaaagaaggaaggacggaaggaaagaaggacgaaaggtaggagraaacacccggtgttactaaaaccccccaaaaatatggtttccccctgtgggtaagcctacaatgtggaggaatcttgaaaatattgtgctacgtgttatgtcagtcataacagctcacctattgtgcaattccgtttaaaggaaatgtccacaatatggaaatctctgcatatgtggttgatcgcactaggtagttgctacctagggctgagggtcagggagagggtttgagacagaatgaggagtgactaatgtctacagggtttttctctggtcgggggtgaatagacattcctaca

SEQ ID NO: 928123 - DNA, 586 bp, Homo sapiens
ccagacccctaattgccaacattacataataaagtgataggaccaatttttcttcaaattgatttcggttatagaaaaaagtccatatgtctttcagaacaatcctattggatatgagactacattttagaaatatattattactattattaaaagtgtgtattatgtatatgtgtgtgtatagatagatagaaagctaggtagatagataatagacataaatatagataattttgcctttggctttagaccctaaaaaatataaagacaaaactaattctagaaaaagaagtcatgccaggaaaatgtcatgcagtagccaagtctacaaaaatacttatatggaaacacctaacagatccttgactccaycatggaagattccttattttattaaaattctgatataaaaacttctagtgaaatgctttatgttaaaaataactagctttagttccgctaaaatatagatttgttgtaaaaggcatatgtccttttaggatacaatttaagaatacaatttttggaagcttggtatgtcaaagtcaaacaaacctacccttaggtaatagatttttgattatat

SEQ ID NO: 928124 - DNA, 568 bp, Homo sapiens
tacacatatacacatctatgtttctgcacataaatacacacaaaacaaagtacttaaccttggtgctgtgggctttctgctgtcaattccatccctgaaggtgaccagggctctttcacaaatttttacctgtattgttatgctataagcttattgatccctcatcagccacaaakacactagcctccctggctgtgtaatataggtgagagtttcataagtgtgttcacatatcactggtggcaggtgaagccatcttcagtggtttgtgagcaaacattcttttcattatcacaattttccattgtttttcctgtataattgaaaagatataagtagctcatccaacctagataccattaacatgattgcttaggacaaggcagcaataggtaacgctacgaggcttacgttgatttgaagatactagtaggcagttaacaggtggtagatggtaccctttggagtcatgaacatggagtgcctatgctgtgccaatcgatggtatgtgcgtattagtctgttctcaccctgctaataaagatatacctgagaccgggtaatttac

SEQ ID NO: 928125 - DNA, 564 bp, Homo sapiens
tttttagttattgacttagtagtttcttacttttgtcatgatagtcccctaaggtgtctcttcctttccaagtcaaacccctccatctgtgtttctgattgtatcctgttcaactgtatccagtttgtgagcgagtatatatcttctgtctctgtgcctctcagtctttttccccgaatccttcccttcagtctatggcctttcccattttaaacagccattctgataccacctcttcctatttacctctctctcctagttccctttgaaagcataatatacccttgttacttataattccttacttttcttttagtttttcatacttctccaaaactgtctttttaaaaaatcactaatattasgggaaatgtgaaaccctgccaatgagaaactctgctaatgggtgcagggtttctttatggggtgatgaaagtgttctgaaacttggtggtagtgatggtcacacacctctgaatatactaaaaacaactgaatagtatactttaaaagggtaaatttcatattaagtgagttatatctcaataaagctattattttaaa

SEQ ID NO: 928126 - DNA, 604 bp, Homo sapiens
agatggtggcttagactaggattacaggagtgagatggcaagaagggtcaggtttggctttaggatgtattttggagatagagccagtaggaactattgactgggatatgggagaatgagaggaatcaaggatgactcctgacctggcctatgtaactgggctgatggtgccaattatttaggcgggtaaatattggggatgatgaggggatgggaaagtggggaacagatatasggtgataaattgagagttctcaatttgtgctcattttgagttgcttatcaaacatccaaatgaggtagacagttacacaaatctagagttctacagaggactagtcaggggctggagatataaatttcagaatgattgacctaggaatggtacttaaaaccatggatcttgaactcacctagttgaaccataaaatcaaagaaaaaaaaagaggctgggtgcagtggctcatgcctctaatcctagcactttgggaggccaaggcgggtggatcacctgaggtcaggagatcaaaaccaccctggccaacacggcgaaactctgtctctactaaaaatacaaaaattagccaggtgtagcggcgcacac

SEQ ID NO: 928127 - DNA, 604 bp, Homo sapiens
agatggtggcttagactaggattacaggagtgagatggcaagaagggtcaggtttggctttaggatgtattttggagatagagccagtaggaactattgactgggatatgggagaatgagaggaatcaaggatgactcctgacctggcctatgtaactgggctgatggtgccaattatttaggcgggtaaatattggggatgatgaggggatgggaaagtggggaacagatatagggtgataaattgagagttctcaatttgtgctcattttgagttgcttatcaaacatccaaatgaggtagacagttacacaaatctagagttctacagaggacwagtcaggggctggagatataaatttcagaatgattgacctaggaatggtacttaaaaccatggatcttgaactcacctagttgaaccataaaatcaaagaaaaaaaaagaggctgggtgcagtggctcatgcctctaatcctagcactttgggaggccaaggcgggtggatcacctgaggtcaggagatcaaaaccaccctggccaacacggcgaaactctgtctctactaaaaatacaaaaattagccaggtgtagcggcgcacac

SEQ ID NO: 928128 - DNA, 744 bp, Homo sapiens
tgtcagatgctactgttattctatgacaaaatatttatagaaatgtctatatacaaacattatatacacacattcacgtggtcatttacactttaattcaatttttctttttttacaggatgccagctaattttccacagagcaatgctatggaatacaaaatgtactgacattttgttttcttctgaaaaaaatccttgctaaatgtactctgttgaaaatccctgtgttgtcaatgttctcagttgtaacaatgttgtaaatgttcaatttgttgaaaattaaaaaatctaaaaatatttttgcttagtgttttaatgagaaatactgtktaataaacctgtaaataatgatgttccttagatccctgccaggtttgacagtacagcacacatgcatttttttttttgagacagtttggctctgtcacccaggctggagtgcagtggtgtgatcttggctcactgcaacctctgcctcccgggttcaagcgattctcctgcctcagcctcccgactagctgggattacaggcatgcgccaccatgctcagctaacttttttttttgtattttttttgtatttttagtagagatggggtttcaccatgttggccaggctggtctcgaactcctgaccgcaggttatccacctgccttggcctcccaaagtgctgggattacaagcatgagtcaccatgccctgcccatatgcttttttgatgttttcattaaaggcactcaga

SEQ ID NO: 928129 - DNA, 588 bp, Homo sapiens
tcccaaggaagaagagaaatttaaaagtttggaaagcttatttgagagaataatcaaggaaaacttccctggccttgctagaggtctagatatccaaatacaagaaacttaaagaacacctgggaaattcattgtaaaaagttcatcggccaggcacagtggctcaaccgtgtaatcccagtacttwgggaggccaaggtgagtggatcacttgagatcaggagtttgagaccagcctggccaacatggtgaaaacccatctctactagaaatataaaaaatagctgggtgtggtggctactcgggaggttgaggcaggagaatcacttgaacctggggggtggaggttgcagtgagccgagatcgcaccattgctctccagcctgggcaacagagcacgacgccatctcagaaaaaaaaaaaaaaagatcattgcctaggcacatagtcatcaggttatctaaggtcaagatgaaggaaagaatcttaagagctgtaaggcaaaagcatcaggtaacctataaaggaaattagattaacagcagatttctcagcagaaaccctacaagcctgaagagactggggtcc

SEQ ID NO: 928130 - DNA, 690 bp, Homo sapiens
ttttcaaatattttcttccattctataggttgtctgtttgctctggtgattatatattttgctgtatgaaagattttcagttcaattaagtcccattgtttatttttcattttgttgcatttgcttttgatacctggtcataagtattttgcccaagccagtgtacaaaagagtttttcctaggttcccttctatgacttttttttttttaatagtgtgagttcttacatttaagtcttcttaaattaatcgagttaattttggtagataatgagggatatgggtccagttttattcttctgcatatggctatccaattttcccagctccatttattaaacagtatcctgttgactttgtcaaagaccagttggttgtagatatgtgaatttatttctctgctctttattgtctaccattgatctrtgtttctatttctgtatcagtatcatgtcgttttgattactatagctttgcagtataatttgaattaaggtaatgtgatgcttctcactttactccttttgcttaggatcgctttggctattgtggctcttttttgattctacataaatgttaagttttttttcctaattctacattaaatgatgttgataatttgataggaattgcattgaatctgtagatgctttgagcattacggacattttaactatactgatttttcca

SEQ ID NO: 928131 - DNA, 610 bp, Homo sapiens
agaaaagggctgtaagcaaaatacatttacaccaccctatccttataatgtttaattttaaatgtcaactgcactggattaaagactacctagagaacaggcaaattattatttctgggtgtgtctgtgctggtgtttccagaggatattgtcatgtgagtcagtggaccaagtgaggaagatccactctcagtgtgggtgggcatcatccaatatgctgggtacataaattgaaaaaaaagtagagtaatggaaaatctctctctctctgcctgtctttttcttattctttctctgcctctctctccttctcccccctccccctctctctcwcacattctctcctggagctgggaaacttttttttttcacatttggatatcagaatgacaggctttctggcctctggagtccaggaaatacaccagcagatctctcaatcctcaagctgttagccttaaactgagagttccatcattagcttccctggttcttgagggtttaagacttggatggagccatactaccagcatcccagtgtctccaacttctagacagcttatcatgaaactttttggccctcataatggagtacattctccaattgaaa

SEQ ID NO: 928132 - DNA, 554 bp, Homo sapiens
aagtataataataaaaaataaataaataaataacagaaaaaagaaaaaaaaagagagagtgaacagagatgcagagggtcaaatagagatgattttcaagcgtgatagtagaatcaaggttggagccctgcagcaagtgttcaggggttacagattccaaaccctggtagcaattctggtagtgacatcataagccttagsgtcttggctgtacctttcctcccttaagtacctcccaaaccacatttaggtaaattatataacctactcaagaatacttatactaaatgtctttgtcttagtttccgtcatttgtaactaataatactgtgtaaaccattaatcattaatttgaattactcaagaagggtggcacatatctaggcccctaaaaggaattcaatcataaattaataaaccatagctagtcagtattttgcagtttgcttaatccgatcaactaggcatccttttcagttaattttctaacccagtctgtttatgggttcctctaaagctgtaagtgttacaaggatatcggttgatatatttag

SEQ ID NO: 928133 - DNA, 554 bp, Homo sapiens
aagtataataataaaaaataaataaataaataacagaaaaaagaaaaaaaaagagagagtgaacagagatgcagagggtcaaatagagatgattttcaagcgtgatagtagaatcaaggttggagccctgcagcaagtgttcaggggttacagattccaaaccctggtagcaattctggtagtgacatcataagccttagcstcttggctgtacctttcctcccttaagtacctcccaaaccacatttaggtaaattatataacctactcaagaatacttatactaaatgtctttgtcttagtttccgtcatttgtaactaataatactgtgtaaaccattaatcattaatttgaattactcaagaagggtggcacatatctaggcccctaaaaggaattcaatcataaattaataaaccatagctagtcagtattttgcagtttgcttaatccgatcaactaggcatccttttcagttaattttctaacccagtctgtttatgggttcctctaaagctgtaagtgttacaaggatatcggttgatatatttag

SEQ ID NO: 928134 - DNA, 610 bp, Homo sapiens
cagttgttaagccttgacactcactaatctgttgactgttttaaaaatcatccaggactctctttaacacattcatgttttcttctaacttcttgaatagctggaatatatttataattgttttaatatgcctgtcaactaattattttatctgtrttatttcttgatttccgtattatttacatatttttctatctttttgcatgcctagtattttttaattggatgccagatattattaattttaccttattggatcctgaacaatttctgtatttctttaaatattcttgagtagttttgttatggaatacaattaagttatgtggaaaccctttgatttttcaagaatttctttcaaaacttgttaggctaaaccacaacagcctttatcccaaggctaattttgctgcattactgagaccttttaattacactactcaatgccctgtatgttaaaagttttttttgtttgttttcactttgtgatgggaacgcaaactactcctgtccttgtgtgagctccagggattgttccacttatttttcaggttgctgtttctcaacccttgggtggtcactactctttatctaacacttgctgattgat

SEQ ID NO: 928135 - DNA, 610 bp, Homo sapiens
cagttgttaagccttgacactcactaatctgttgactgttttaaaaatcatccaggactctctttaacacattcatgttttcttctaacttcttgaatagctggaatatatttataattgttttaatatgcctgtcaactaattattttatctgtgttatttcttgatttcygtattatttacatatttttctatctttttgcatgcctagtattttttaattggatgccagatattattaattttaccttattggatcctgaacaatttctgtatttctttaaatattcttgagtagttttgttatggaatacaattaagttatgtggaaaccctttgatttttcaagaatttctttcaaaacttgttaggctaaaccacaacagcctttatcccaaggctaattttgctgcattactgagaccttttaattacactactcaatgccctgtatgttaaaagttttttttgtttgttttcactttgtgatgggaacgcaaactactcctgtccttgtgtgagctccagggattgttccacttatttttcaggttgctgtttctcaacccttgggtggtcactactctttatctaacacttgctgattgat

SEQ ID NO: 928136 - DNA, 621 bp, Homo sapiens
atacccaaggtggtgttagcttgagggtggggcactggtgggaatggggcactgtggccagtggggctggtggactttgtgcctcctaatattcagagggaaacagtggtgtggtgctgagggtagagtgcactcctgctggcagcagtggctgggaagggaaggatggtctgcccatgcaaatgcactggcagagcagtatggggggtggctgtaggtgaatgcctgcagacaaagtggcatgggkgagactctgggtaaggggagggcatgaagaagctggtgcatgtctttgtggtgctctgttggagcactctgctggtcagacatggtccagcagtgcaggagctatggtgcagactcccaggaggacctgagagctgcactgctgacaggcacaaccaggctgggactcaggaggggccagcagaccaagaagtgctcaggttggactggccccatgtcatgggcaagactgccatgcaaagttcaggtccaacagttccctaggactaaagtcttttctgggagcaagttgagcctaggggatggacatccctggctatgcttcactacagacactcctgtaccaaaccttctgggttgtgcccaggctggaat

SEQ ID NO: 928137 - DNA, 472 bp, Homo sapiens
atataaattgtgaagatttcatggacatttatcagttcccgaacaataattttatgttttcttatgcctgtcttactttaatctcttaatcctgttatcttcctaagctgaggatgtacatcacctcaggaacactgtgataattgtgttaaytgtagaaattgattgtaaaacatgtgtgtttgaacaatatgaaatcagtgcaccttgaaaaagaacagaataacagcaatttttaaggaacaagggaagacaaccataaaatctgactgcctgcagggtcgggcaaaaagagccatatttttcttcttgcagagatcctataaactgacatgcaagcaggagagatatcactaaatgctttttcctagcaaggaatattaatatgaataccctaggaaaggaatgcatttcctgggggaggtctataaacggccactctgggagtgtctgtcctatgcagttgagataa

SEQ ID NO: 928138 - DNA, 472 bp, Homo sapiens
atataaattgtgaagatttcatggacatttatcagttcccgaacaataattttatgttttcttatgcctgtcttactttaatctcttaatcctgttatcttcctaagctgaggatgtacatcacctcaggaacactgtgataattgtgttaattgtagaaattgattgtaaaacatgtgtgtttgaacaatatgaaatcagtgcaccttgaaaaagaacagaataacagcaatttttaaggaacaagggaagacaaccataaaatctgactgcctgcagggtcgggcaraaagagccatatttttcttcttgcagagatcctataaactgacatgcaagcaggagagatatcactaaatgctttttcctagcaaggaatattaatatgaataccctaggaaaggaatgcatttcctgggggaggtctataaacggccactctgggagtgtctgtcctatgcagttgagataa

SEQ ID NO: 928139 - DNA, 730 bp, Homo sapiens
ccccactgggtttcagacttgcatggggcctttagcccctttgttttggccaatttctcccatttggaatggttgtatttacccaatacctgtatccccattgtatctaggaagtaactaacttgcttttgaactgggtaacaggaagattctggaacagtttggagggctcagaggaacataagaaaatgtataaaggctcataggcataaaggacttgccttgtctcagatgagactttggactgtggacttctgagttaatgctgaaatgagttaagactttgggggctgttgggaaggcatgattggttttgaaatgtgaggacatgagatttgggaagggccaagtgtggaattatatggtttggctgtttgcttatccaaatatcatattgaatgcccacatgttgtgggatggatgcagtagkaggtaactgaatcagggtggcaggtctttctggtgttgttctcatcatagtgaatgagtctcacaagatctgatggttttaaaaatgggagtttccctgcacactctctcttctcttgtctactgcctcgtgagatgtgtctttcaccttctgccatgattgcgaggcctccccaaccatgtggaactgtaagcccattaaacctctttcttttataaattgcccggtctcaggtatgtctctattggcagtgtgaaaacgagctaatacagatggtgaaacatgtcttagtcttatact

SEQ ID NO: 928140 - DNA, 716 bp, Homo sapiens
tcctccaggcagggacatgtgcccataaggcagagccccgaattcataacccacaacaacaacacagagagcaacagctcactactaggatcccagctatgctacttgtgactattagggcccagcaagagccagagcctagagatgcccaccatctctgcagggggtaatcttgcagattaaggcttttgaccaccttaatctcctgtgagaccctttgcagggctgctgttatgttctgcccattgtcaggaataaaggtgcaacattgtgttcctaaaagggcacaggtgcctccttgggcagcagttactatgtgtaaggccattcagttttgtaacaccatttttctcatctgatcaacctcatccattaacagcaagagggctacttaggtgtaattcagagcccaagcggtgtkctctgcaagagaggtaacttgtgcttctacagttaggacaccggctccagggatagtcatttctaaggggtagaaccaccagggggctcatcacacttgcaaaaaccaagagcgtaccacctcccagttatgtgagtgtctgggcaatgtggggagaacagtggcacgtacataagaccacccccatgtacaacagccagtccagttcactggtaagaccaccctgtgtacccacagactcataaactcccagggggcacaaagtccatcagagcctgaccgtggtggggctgct

SEQ ID NO: 928141 - DNA, 581 bp, Homo sapiens
tgtgcttctacagttaggacaccggctccagggatagtcatttctaaggggtagaaccaccagggggctcatcacacttgcaaaaaccaagagcgtaccacctcccagttatgtgagtgtctgggcaatgtggggagaacagtggcacgtacataagaccacccccatgtacaacagccagtccagttcaytggtaagaccaccctgtgtacccacagactcataaactcccagggggcacaaagtccatcagagcctgaccgtggtggggctgcttgctataccataccttcagtgtggtgacatgtgttatgtttgcacaggtcgtaaggggcatccatcccacagtggcggtaccctaatgctgttctatgcaccatgttgcttgggtcaggggtactacatgttcccccactagccagtcccacccatcataaacactatgggccagccaggaggtgggtgtaccatgggtcttgcagtgtcctttgtccaaggctagccatgttgcgttccaggcatcggtcatgggaccccaaatctccagccatgttcagttctctgcagaccctgaatgtatg

SEQ ID NO: 928142 - DNA, 658 bp, Homo sapiens
tccattaacagcaagagggctacttaggtgtaattcagagcccaagcggtgtgctctgcaagagaggtaacttgtgcttctacagttaggacaccggctccagggatagtcatttctaaggggtagaaccaccagggggctcatcacacttgcaaaaaccaagagcgtaccacctcccagttatgtgagtgtctgggcaatgtggggagaacagtggcacgtacataagaccacccccatgtacaacagccagtccagttcactggtaagaccaccctgtgtacccacagacycataaactcccagggggcacaaagtccatcagagcctgaccgtggtggggctgcttgctataccataccttcagtgtggtgacatgtgttatgtttgcacaggtcgtaaggggcatccatcccacagtggcggtaccctaatgctgttctatgcaccatgttgcttgggtcaggggtactacatgttcccccactagccagtcccacccatcataaacactatgggccagccaggaggtgggtgtaccatgggtcttgcagtgtcctttgtccaaggctagccatgttgcgttccaggcatcggtcatgggaccccaaatctccagccatgttcagttctctgcagaccctgaatgtatgtgctg

SEQ ID NO: 928143 - DNA, 589 bp, Homo sapiens
actggtgaggtatgcgctcacaatgaggtttcctctataagttattttttttaccttttttttttttttttttggttagcaaagcagttgccgctacagattaaatgcatttgggccatccgcgggttactgagttaaggatttttgatacgaaggcatcagtgctttcaggatatgcccttgtttacactgaaaacaaagtggtattggagtattatagggttatggagaataccttcaattatcaattataggttttaaatttaccttggtttttaaaggaatagggtacacttttttttaactacttgtatatctctctctttctttctctctttgactttgtctctctctctttgactttmcttttgcctctgtctcttcttctctctctacctctctctttttttctctctctctccttgactccctgtttgtctgtctcttcttctctatctcttcctctctctctttgcctctttttctctctgtctctttcctttctctttctctctgctggtctctccttgcctctgccagccgcttacgctgctgttctctcaaccactgtgtgttgggggcagggggt

SEQ ID NO: 928144 - DNA, 568 bp, Homo sapiens
ggagaaaagggaactcttatacaccgtcagcggaaatgtaaattagtacagccactatggtaaacagtatggagatttacaaaacaccaaaaataaaactaccatataatccagcaatccctctactatgtatttattcaaaggcaaataaattagtatatgtcaaagggatacctacactcccatttttattgcagcactattcataatattcaagatatggaattaagctaagtgtccatcaatagatgaatggatwaaaaaaatgtggtatatatacctatttgaatactgtttggtcataacaaagaattaaatcatgtcatttgctgcaatatggatggaactggaggtcattatgctaagtgaaataaaccaggcaccatcagacaaatacctcatgttctcactcatatgtggaagctaaaaacttggtctcatggatgtagagagtagaatgatatacttcagtgtaaaggtggtgaggggataaagagaggttgattgatgtatacaaatacacagttcatgagaggaatttttttgtagatatggattctggctatgt

SEQ ID NO: 928145 - DNA, 601 bp, Homo sapiens
cctccttcctctggatgctttatcccagagggcaccaacctgatgccagccagacctctcctgtgggaagtgtctgtcaacctgtgttgggaggtctctccccgtcaggaggcatgggggtccaggacccactagaggaggcagtctgtctcttagcagagcttgatcactgtgctgggaaaacccttcttgtcaggatccactgctgtcttcagagctggcaggcaggaacatttaagtccactgaagcggcacccacagccgtcctttccccctggtgctctgtctcagggagatgggarttttatctataagcccctgactgaggctgctgcctttctttcagaactgccctgccagtgaagaggaatctagagaggcagtctgccacagccactttgctgtgctgtgttgaattctgcccagtctgagcttcctggtctccttagcactgtcaggggaaaaccgcctactcaagcctcagtaatggtggatgcccctccccttaccaagctcaatcatccccagtagacttcagactgctgtgctggcagtgagaatttcaagccagtggttcttagcttgctgggctccatgggag

SEQ ID NO: 928146 - DNA, 709 bp, Homo sapiens
gatgccattcagaaagcagggcttagaaactcagtaacctttgtaatctacttggttctctattctactgaggctgaactggtacccaagctgcaagacaaaaagtccttcccatgctttcctccttttctctcaagcagaggagtccctctatgtggctaccactgacccaggcccacagtgggtactgcctggttatcacccatgttcactcaagacccaaggtttcttcattcagtttgtgatgagtgctgccaggcctggctctcttctggcccagggtgggtccagaattgccatctgggagccaaggcctgamactggggaccccaggagcctgcttggtgctctagcccactgtggccaagctggtatccaagctgcaagacaaagtcttctttattcttccctctcttttcctcaagcagaaggattatctccccaggaattgcagtccttgtggcttagactgccattaacgtttatttaggaccccagaatactttagcccactgtggtgaggcttgaggggctcaggttccagcctctagggtggatgatttttctctggctagggctgtactaaatgctccctctgtgggcactggtacatttcaaccctatattgctttctgctctggcagggcatcaccgagtttcagtgcaaagtcccacaatcactgtgctctccttcccctaagtgcacaaa

SEQ ID NO: 928147 - DNA, 709 bp, Homo sapiens
gatgccattcagaaagcagggcttagaaactcagtaacctttgtaatctacttggttctctattctactgaggctgaactggtacccaagctgcaagacaaaaagtccttcccatgctttcctccttttctctcaagcagaggagtccctctatgtggctaccactgacccaggcccacagtgggtactgcctggttatcacccatgttcactcaagacccaaggtttcttcattcagtttgtgatgagtgctgccaggcctggctctcttctggcccagggtgggtccagaattgccatctgggagccaaggcctgaaactggggmccccaggagcctgcttggtgctctagcccactgtggccaagctggtatccaagctgcaagacaaagtcttctttattcttccctctcttttcctcaagcagaaggattatctccccaggaattgcagtccttgtggcttagactgccattaacgtttatttaggaccccagaatactttagcccactgtggtgaggcttgaggggctcaggttccagcctctagggtggatgatttttctctggctagggctgtactaaatgctccctctgtgggcactggtacatttcaaccctatattgctttctgctctggcagggcatcaccgagtttcagtgcaaagtcccacaatcactgtgctctccttcccctaagtgcacaaa

SEQ ID NO: 928148 - DNA, 587 bp, Homo sapiens
aagcagcttccttggctggcactggggaatgcagtggagcctggaatctcagagatgccaggcactgcaggatcccaaagagggagtcacagtcctggctctgggagctcccaaatctgggctccctgaggggccatagctcttgtctgttcacctgcaatgtrgggagcaaggggcatgtttcagccttgtttgtattatagctcttttagctccaccattcagcgggtccagagctcttgttctgtgactaggtatgcagataagtggagggtgagcaagatgaagaagagctttattgagcaatagaacagctcacaggagacctgcaggaggcagctcctttttgcagccagggtgtccctatgagtgttcagctcctagcagagaggagaccctggagtgggaagttcctctctgcaggcaggttgtcctgtggtctctgaagctctcagcagagaggaggtcctgggatggttttttcctctctgcaggcaagccatcccatccatctcatcatctccccagctcctagcagagaggaggccctggagtggtagctcctctctgctgctggtcatcctaat

SEQ ID NO: 928149 - DNA, 579 bp, Homo sapiens
agtggggcattgctgaaacgatacccaaaaatgtggaagtgactttggaactaggtaacaggcagaggttggaacagtttgaagggctcaaaagaagacaggaaattgtgggaaagtttggaacttcctagagacttgttaagggctttgacaaaaatgctgatagtgttatcaacaaaaagttccagactgaggtagtctcaaatggagatgacgaacttgttgggaactggagcaaaggtgactcttgttatgttttagcaaagagcctggtggcattttgcccctgccctaaagatttgtggaactttgaactcaagagagatgatttaaagtatctagtggaagaaatttccaagcagcaaagcattcaagaggtgacttgggtgctgttaaaggcattcagttttataaggaaagcagarcatgagactttggaaaatttacagcctgacaatgtgatagaaaagaaaaccccattttctggggaggaattcaagttggctgcagaaatttgcataagtaataaggaactgaatgccaatccccaagacaatggggaaaatgtctccagggcat

SEQ ID NO: 928150 - DNA, 626 bp, Homo sapiens
agctgaattctaccagaggtacaaagaggagctgataccattccttctgaaactattccaatcagtagaaaaagagggaatcctccctaactcattttatgaggccagcatcatcctgataccaaagcctggcagagacacaacaaaaaaagagaattttataccaatatccctgatgaacatcaatgcaaaaatcctcaataaaatactggcaaaccaaatcaagcagcacctcaaaaaacttatccaccatgatcaagtgggcttcattcctgggatayaaggctggttcaacatacgcaaatcaataaatgtaatccagcatataaacagaaccaatgacaaaaaccacatgattatctcaatagatgcagaaaaggcctttgagaaaattcaacaatgcttcatgctaaaaactctcaaaaaattaggtattgatgggatgtatctcaaaataataagagctatctatgacaaacccacagccagtttcatactgaatgggcaaaaactggaagcattccctttgaaatctggcacaagacagggatgtcctctctcaccactcctattcaacatagtgctggaagttctggccagggcaataaggcaggagaaagaaataa

SEQ ID NO: 928151 - DNA, 572 bp, Homo sapiens
agaaatgtgcataagtaatgaggagccaaatgttaatcaccaagacaatggggaaaatgtctccagggcatgtcagagaacttcatggcagccactcccattacaggcataaaggcctaagagggaaaaacgcccctgctatgtgcagccttgggacttgttgcactgcctcctgcctygcagccactccagccatggctaaaagggcccaaggtacagctcaggccatggcttcagagggtgcaagctccaaactttggcagcttccacgtggtgttggtcctgtgggtgtgtggaagacaagaattgaggtttgggaacctccacctggattttggaagatgtatggaaatgcctggatgtccaggcagaggtgtgttgcaggggtggaaccctcatggagaacctctgctagggaagtgcagaaaggaaatgtgaggttggagcctccacacagagtcctcactagggcactgcctagtggaactatgagaagagggcccctgtcctccagactccagaatggtagatccaccaacagcttgcactgcgtgcctcggaaagccacagac

SEQ ID NO: 928152 - DNA, 572 bp, Homo sapiens
agaaatgtgcataagtaatgaggagccaaatgttaatcaccaagacaatggggaaaatgtctccagggcatgtcagagaacttcatggcagccactcccattacaggcataaaggcctaagagggaaaaacgcccctgctatgtgcagccttgggacttgttgcactgcctcctgccttscagccactccagccatggctaaaagggcccaaggtacagctcaggccatggcttcagagggtgcaagctccaaactttggcagcttccacgtggtgttggtcctgtgggtgtgtggaagacaagaattgaggtttgggaacctccacctggattttggaagatgtatggaaatgcctggatgtccaggcagaggtgtgttgcaggggtggaaccctcatggagaacctctgctagggaagtgcagaaaggaaatgtgaggttggagcctccacacagagtcctcactagggcactgcctagtggaactatgagaagagggcccctgtcctccagactccagaatggtagatccaccaacagcttgcactgcgtgcctcggaaagccacagac

SEQ ID NO: 928153 - DNA, 572 bp, Homo sapiens
agaaatgtgcataagtaatgaggagccaaatgttaatcaccaagacaatggggaaaatgtctccagggcatgtcagagaacttcatggcagccactcccattacaggcataaaggcctaagagggaaaaacgcccctgctatgtgcagccttgggacttgttgcactgcctcctgccttgcagccactccagccatggctaaaagggcccaaggtacagctcaggccatggcttcagagggtgcaagctccaaactttggcagcttccacgtggtgttggtcctgtgggtgtgtggaagacaagaattgaggtttgggaacctccacctggattttggaagaygtatggaaatgcctggatgtccaggcagaggtgtgttgcaggggtggaaccctcatggagaacctctgctagggaagtgcagaaaggaaatgtgaggttggagcctccacacagagtcctcactagggcactgcctagtggaactatgagaagagggcccctgtcctccagactccagaatggtagatccaccaacagcttgcactgcgtgcctcggaaagccacagac

SEQ ID NO: 928154 - DNA, 617 bp, Homo sapiens
caaagcagcctactcaactgacactataggacacatctacaagaaaaaattatttccctaggaaagctactttataaagttggaaaaagtgatgactattccaccagacgtacagatattaacacaggaacacaagaaacatgaaaaagcaaggaaacattctaccttcaaaggaacataataattcttcagtagtagactcccccataaagaggaagtctatgaaatatctgaaaaggaattcaaaatagtgattttaaggaaactcagtgagatataagagaacacatatagttcaatgaaatcaggaagacaatttattatttgaatgagaaattcaacaaatagatatagaaaagaaccaaacagaaatcttggacctgaggaatccartgaatgaaataaaaaatacagttgtgagcctcaacaatagactggatcaagcagaagaatttctgaacttaaagacagatcttttgaaataacccattcaaacaaaaaataaaaagaaagcctacgagacatatggaacaccatcaagtgaacaaatattcacattatgcaaattctagaaggataagagatgggaaaaggcatagaaacctatttaataaagt

SEQ ID NO: 928155 - DNA, 765 bp, Homo sapiens
aatacagatgaagttttacttgcttgcccaccactcaccttctgctgtgtggcccagctcctaataggccactgaccagtaccagtctgtgacctgggggctgggaacccctatagtagctaatctgtatgttctacatcagcgagctcctttgtcctctggcttccatttgggttctaccaagggggacactggagtgagatctaggaattattctgccagcaaacctctctgtaaatatgactttatttgaaaatagtgttttgtagatacaatcaagttgagatgaggccaaactaaataaaggcagtccctaatccaatgactaattcttagaagaagggggaagtttgaacacacacagagcygcacaaggagaatgtcatgtgatgacagaggcagagattaaggtaatgataaggcaaaggatgccaggggtttctggcagttaccaggagagaagcatggaacagattctccctcagaatctccagaaggaaccaattctgccaacaccttgattttggacttctagtctccaaaactgtgagagaatacattcccactcctttaggccactcaatttgtggtcgtttgttatggcagccctaggagatgaatagattgattggacatttttctttggtgttatgttagaaatatctgtgttgagtggacccattacaattttaatgtgttttctcctgattatgatagtaatacattgaaactacaaaaaaactataaagaagaataacaattcaa

SEQ ID NO: 928156 - DNA, 526 bp, Homo sapiens
aaaattagccaggatagggtttttaagggttttggagtgggttgaagagcggagatcactggttggttaaaaagtgtggggtgaagtcatgggacagggagatgaagaagccgggttctcatgctgatctcgatcctctgtgggggtcttcaaactagttgctggaattcatggyctgaaaaaaatgtcttaagagatccttaaacaaaagccttatgaggctgggcacagtggctcacacctgtgatcccaacactttggtgggaggattgcttgagcacatgagttaaagaccagcctaggcaatatagtgagcctcccacctctacaaaaactcaaaaattagccaggcatagtggtgcatgtctgtggtcccagctactcgggaggctcaggtgggaggatcactcaagccttggaggtggaggttgcagtgagccaagattatgcctctacactccagcctgggcaacagagcaagaccttgtctcaaaaaaaatagaagccttatgattctaatgttaga

SEQ ID NO: 928157 - DNA, 526 bp, Homo sapiens
aaaattagccaggatagggtttttaagggttttggagtgggttgaagagcggagatcactggttggttaaaaagtgtggggtgaagtcatgggacagggagatgaagaagccgggttctcatgctgatctcgatcctctgtgggggtcttcaaactagttgctggaattcatggcctgaaaaaaatgtcttaagagatccttaaacaaaagccttatgaggctgggcacagtggctcacacctgtgatcccaacactttggtgggaggattgcttgagcacaygagttaaagaccagcctaggcaatatagtgagcctcccacctctacaaaaactcaaaaattagccaggcatagtggtgcatgtctgtggtcccagctactcgggaggctcaggtgggaggatcactcaagccttggaggtggaggttgcagtgagccaagattatgcctctacactccagcctgggcaacagagcaagaccttgtctcaaaaaaaatagaagccttatgattctaatgttaga

SEQ ID NO: 928158 - DNA, 526 bp, Homo sapiens
aaaattagccaggatagggtttttaagggttttggagtgggttgaagagcggagatcactggttggttaaaaagtgtggggtgaagtcatgggacagggagatgaagaagccgggttctcatgctgatctcgatcctctgtgggggtcttcaaactagttgctggaattcatggcctgaaaaaaatgtcttaagagatccttaaacaaaagccttatgaggctgggcacagtggctcacacctgtgatcccaacactttggtgggaggattgcttgagcacatgagttaaagaccagcctaggcaatatagtgagcctcccacctctacaaaaactcaaaaattagccaggcatrgtggtgcatgtctgtggtcccagctactcgggaggctcaggtgggaggatcactcaagccttggaggtggaggttgcagtgagccaagattatgcctctacactccagcctgggcaacagagcaagaccttgtctcaaaaaaaatagaagccttatgattctaatgttaga

SEQ ID NO: 928159 - DNA, 747 bp, Homo sapiens
tatttgtgttaagtgaaagatgtatgtaaggttgtttcctgataattgacttgctttttaactttaattttacttggaacaatgaaagtattttaattataattagtgatgacaaaagttattaaatgatcttagtctttctcaggaagagaagaaaatcaattagaaaatttcagacatatagaaatatacattcttattttgcaaaaaaaaaaaagtttctaacaacaaataggtaatttacataataagccctggaagcatatgcttaggtatgtatatatttttaaatggtgaaattaatgaattttaaggaaaaataagtttatcgtaatttcaataattacatataaaatggctcagatacaatcgtgtatgtcattcattagagatccagtatttttgtaaaagctatgctaaattaaaatggaatacccagtggatatcatytaaaaagcaactgaagttttattctaaacagtagtaattgatcctacagcgagatttattctgtaatcatgaaagtcaatggcatttacaactagaataaattaaggtaaatgaagaggaaaattgtattctgtgtaacatttaggtcattataggcttaaacaacgatgtcaatccatgttcatcaatagaagttatggtgcttgcagacataattgaatgaaaatattatctccaagaaacagctaatgttacacaagcatagaaatcattgtttttttaaactgctcttctttt

SEQ ID NO: 928160 - DNA, 542 bp, Homo sapiens
actgtactccagcctgggcgacacagcaagactccgtctcaaaaaaaaaaaaaaagaaagaaagaaaaagaaaaagaaaaaaaaaaaagaaaagcaactttatcaagtagagtgctatgtatagttatttttacctttcattttacaatcactactcatttctaagttttcttagattagcaccttcttcccatcgcatttataaatttgtaatacacttagagcctttttcatattccgtattcatcttgagatctccagctacacaaatgatatgttaaatgtgaatacagtaaggtttacgtttgggggctatmaagttttagatttaataaatgcttaatatcttttctttaccattacagtataatacagaatagtttcaccagcctatgaaaaatctatgcttcacctattcaatgttccttcaaccccaaaccactagccactgacaatcactgttaattatactatttctatgttctgccttttctataatgtcctgtcattacaaccatagtatgcagtttttagactggctg

SEQ ID NO: 928161 - DNA, 847 bp, Homo sapiens
ggcagtgcacggtggttcacgcctgtaatcccaacactttgggagaccaaggcaggaggatcatctgaagtcgggagttcgagatcagcctgacaaacatggagaaaccccatctttactaaaaatacaaaaaattatccaggtgtagtggtgcatgcctgtaatcccagcctctcgggaggctgaggcaagagaatcgcttgaacacaggaggtggaggttgtggtgagccaagatcacgccgttgcactacagcctgggcaacaaaaactccgtctcaaaaaaaaaaaagaaaaaagcctcaattaactaggtatttaaaggacagggacgtacttcaaaataataagggacatgtatgacaaacgcacagccaatattatactgaatgggcaaacgctggaagcattccccttgaaaactggcacaagagctgtttaaatacattatgattggctgtattaaatttgaggaatgacacacagtttttttttgktttttttttttttttttttgagacggagtcttgctctttctcccatgccggagtgcagtggcgctatctcggctcactgcaagctccgccttccggcttcacgccattctcctgcctcagcctcccgagtagcagggaccacaggcgcccgccactgcgcccggctaattttttgtatttttagtagagacggggtttcaccgatgacatacagtttttaagagaatgagatcaaagatggaaaacttttgaggatagcggagttaaaaatcaagtttcaaagcacaaattgtgtgtgcctagaaaatagccacaattctgtcattcagattcttaatatgattatttcca

SEQ ID NO: 928162 - DNA, 603 bp, Homo sapiens
ggaccacatgcacatgccaccacgcctggctaatttttgtatttttagtagagatggggtttcaccatgttggccaggctggtcttgaactcctggcctcaagtgatccacctgtctcagcctcccaaagtgctgggattacaggtgtgagccaccatgcctggcctgttttgaaatattaatagaagttagatggttcagcaagggtgaaataaaatcagtaattctctgggaggtaaaattgacagggcttggtgactgctgcacatggcagtgaagaagggagatttccaggccagygcagggttttcaggtgggcttttgagtaaatggggagagaggactcccaggcactgtgtggattccctaaggtgatccacaggaaggaccaggcacacagtagggctctgcgttttctcagtcttctgccttcatttagattcccagcactcagagtcttttttgaagcaccccagatttaactggtggagatgtcagtgttatctcaaacccctccttccccagcatttcaactccagtctcctaggaaccaagaaaatgcagttgcctacaggtcccttggctatgtctcccagctcgccc

SEQ ID NO: 928163 - DNA, 608 bp, Homo sapiens
tttcatacaaacatagaatgtgggttttttttccctcttggacctttcctaaagtaaaatctcaggaatataacttaggcagatagaaagtgattccagatggaaactttgagatataagaacaaattaagagtattaaaatatgtgaggtaatggctgggcacggtggctcattcctgtaatcycagcactttgggaggccaaggcgggcagatcacgaggtccggagatcgagaccatcctggctaacacggtgaaaccctgtctctactaaaaatacaaaaaattagctgggtgtggtggcgggcgcctgtagtcccagctactcgggaggctgagacaggagaatggcatgaacctgggagtcggagcttgcagtgagccgagatggcaccactgcactccagcctgggcgacagagcaagactccgtctcaaaaaaaaaaaaaaaaaaaaaaagtgaggtaatataaaaaagcttcaactatgtaagaaaataataataccttatgggattaaaaatagaaaatactaaaatactctacaataatggcagagaagcagttgagtgagaaattcttgcatgtgtgccccaggaggcataaagaa

SEQ ID NO: 928164 - DNA, 608 bp, Homo sapiens
tttcatacaaacatagaatgtgggttttttttccctcttggacctttcctaaagtaaaatctcaggaatataacttaggcagatagaaagtgattccagatggaaactttgagatataagaacaaattaagagtattaaaatatgtgaggtaatggctgggcacggtggctcattcctgtaatctcagcactttgggaggccaaggygggcagatcacgaggtccggagatcgagaccatcctggctaacacggtgaaaccctgtctctactaaaaatacaaaaaattagctgggtgtggtggcgggcgcctgtagtcccagctactcgggaggctgagacaggagaatggcatgaacctgggagtcggagcttgcagtgagccgagatggcaccactgcactccagcctgggcgacagagcaagactccgtctcaaaaaaaaaaaaaaaaaaaaaaagtgaggtaatataaaaaagcttcaactatgtaagaaaataataataccttatgggattaaaaatagaaaatactaaaatactctacaataatggcagagaagcagttgagtgagaaattcttgcatgtgtgccccaggaggcataaagaa

SEQ ID NO: 928165 - DNA, 608 bp, Homo sapiens
tttcatacaaacatagaatgtgggttttttttccctcttggacctttcctaaagtaaaatctcaggaatataacttaggcagatagaaagtgattccagatggaaactttgagatataagaacaaattaagagtattaaaatatgtgaggtaatggctgggcacggtggctcattcctgtaatctcagcactttgggaggccaaggcgggcagatcacgaggtccggagatcgagaccatcctggctaacacggtgaaaccctgtctctactaaaaatacaaaaaattagctgggygtggtggcgggcgcctgtagtcccagctactcgggaggctgagacaggagaatggcatgaacctgggagtcggagcttgcagtgagccgagatggcaccactgcactccagcctgggcgacagagcaagactccgtctcaaaaaaaaaaaaaaaaaaaaaaagtgaggtaatataaaaaagcttcaactatgtaagaaaataataataccttatgggattaaaaatagaaaatactaaaatactctacaataatggcagagaagcagttgagtgagaaattcttgcatgtgtgccccaggaggcataaagaa

SEQ ID NO: 928166 - DNA, 585 bp, Homo sapiens
actccagaccctgtttgcctgggtatcagcagcggaggctgcagaacagtggatttttctgaaccgcgaatgctgctgtctgatcgttcctctggaggtttcctctcagaggagtacctggccgtgtgaggtgtcagtctgcccctactcrggggtgcctcccagttaggctactcaggggtcagggacccacttgaggaagcagtctgtcctttctcagatctcaagctgcatgctgggagaaccactactctcttcaaagctgtcagacagggatatttaagtctgcagaggtttctgctgccttttgtttggctatgccctgcccccagaggtggagtctacagaggcaggcaggcctccttgagctgcagtgggctccacccagttcgagcttccggtcactttgtttacctactcaagcctcagcaatggtgggcgcccctcccccagcctcgctgctgccttgcagttcgatctcagactgctgtgctaccagtgagtgaggctccgtgggcgtgggaccctcccagccatgcacaggatataatctcctggtgtgccatttgctaagaccattggaaa

SEQ ID NO: 928167 - DNA, 712 bp, Homo sapiens
cttgcaaacaagctacaaaaagaatcctccaaaaaagtggaaagtgataccagttaaaaaagaaaggctgggcacagtggctcacacctaaaatcctagcactttgggaggctgagccaggaggatcacttgaggccaggattttgagaccaccctgagcaacacagttaagactctgtctctattaaaaaaaaaaaaaaaaaaaaaaaaggaaaggggccaggcacggtgactcaggcctgtaatcccagcactttgggaggctgaggcaggcggataacaaggtcaggagttcgagacctggtgaaacctggtctcaactaaaaatacaaaaaattagccaggcatggtggcacgcgcctgtagtcccagctacttgggaggctgaggcaggagaataccttgaacccaggaagyggaggttgcagtgagctgagatggccccactgcactccagcctgggcaacagagggagactccctctcaaaaaaataaataaataaataagttccactgggcatggtggctcatgcctgttatcccagtattttgggaggccgaagcaggtgcatcacctgaggtcaggagttcgagactaccctggccaacatggtgaaaccccgtctctactaaaaatacaaaaattagctaggcgtggtggtgtgcgcctgtagtcccagctacttgggagaggcaggagaattccttgaac

SEQ ID NO: 928168 - DNA, 630 bp, Homo sapiens
tcctttcccagagtattaatatcaatattccttcctatgaaaagaatttagcaatatctctcctacttgcaagtccatttataggccctctgcaagaaaaaaaatatggctcttttttcctgaccccacaggcagtcagaccttatggttgtcttctcttgttccataaaaatctctgttattatgttctttttcaaggtgcactgatttcatattgttcaaacacacattttaaaaacaatttgtacagttaacacaattatcatagtggtcctcaggtgacgtacatcctcagcttacaaagataacaggattaagagattaaagtaaagacaggcataagaaatataaaaagtattatttgggaactgacaaatgtccatgaaattttcacaattcatgttcctctgccgcagctccagcctgtccctccattcggggtccctgacttccctcaacactggccaaaatagtgaaaccccrtctctactaaaaatacaaaaattagccaggcatggtggcacatgcctctagtcccagctacacaggagactgaggcaggagaatcacttgaacctgagggacggaggttgcagtgagcagaggtcgcaccactgcactccagcctgg

SEQ ID NO: 928169 - DNA, 711 bp, Homo sapiens
aacataatgtctgcctctcagactcattccattcacaagttgatttctgtctccctgatccattcattctccttaataatcatttactgctcctcaaaacaatgctctatgtttcccatctcctcgctcccctgggaaaaagagtacataagcttctgtacyccattgggggattggggtaatcacactgtaattctctcccatgaatgttaataaatgtgtatcctttttctcctactaatctgccttttgtcaggtgattttcagtgaaccttcagaaggaaaaggggaagttttcccttcacccatatgcaggcatgtaaagatgttcattgcagtgctgtttatagcagagaaaatggcaaacacaatcaaacaatagggggatagttaagaaaaaaatgcacagttgcagttagactggtctctaccggcagggaggttttttttcaccctttttgattctcacagcagccctatgatgtagacaaaaccgggttcacatttattctccccattattcatgggggtgggggccaggatgcagactgagttttgagaaattctgggcagagcttccaacagggaatcagattctgaactgggacagctcccaggtgtcctaaagcggaatccagagctgactcacagcagcgtgtgtctgacagggggatccagcggcaagtccctactcttggataaagatgaaac

SEQ ID NO: 928170 - DNA, 711 bp, Homo sapiens
aacataatgtctgcctctcagactcattccattcacaagttgatttctgtctccctgatccattcattctccttaataatcatttactgctcctcaaaacaatgctctatgtttcccatctcctcgctcccctgggaaaaagagtacataagcttctgtaccccattgggggattggggtaatcacactgtaattctctcccatgaatrttaataaatgtgtatcctttttctcctactaatctgccttttgtcaggtgattttcagtgaaccttcagaaggaaaaggggaagttttcccttcacccatatgcaggcatgtaaagatgttcattgcagtgctgtttatagcagagaaaatggcaaacacaatcaaacaatagggggatagttaagaaaaaaatgcacagttgcagttagactggtctctaccggcagggaggttttttttcaccctttttgattctcacagcagccctatgatgtagacaaaaccgggttcacatttattctccccattattcatgggggtgggggccaggatgcagactgagttttgagaaattctgggcagagcttccaacagggaatcagattctgaactgggacagctcccaggtgtcctaaagcggaatccagagctgactcacagcagcgtgtgtctgacagggggatccagcggcaagtccctactcttggataaagatgaaac

SEQ ID NO: 928171 - DNA, 711 bp, Homo sapiens
aacataatgtctgcctctcagactcattccattcacaagttgatttctgtctccctgatccattcattctccttaataatcatttactgctcctcaaaacaatgctctatgtttcccatctcctcgctcccctgggaaaaagagtacataagcttctgtaccccattgggggattggggtaatcacactgtaattctctcccatgaatgttaataaatgtgtatcctttttctcctactaatctgccttttgtcaggtgattttcagtgaaccttcagaaggaaaaggggaagttttcccttcacccatatgcaggcatgtaaagatgttcattgcagtgctgtttatagcagagaaaatggcaaacacaatcaaacaatagggggatagttaagaaaaaaatgcacagttgcagttagactggtctctaccggcagggaggttttttttcaccctttttgattctcacagcagccctatgatgtagacaaaacygggttcacatttattctccccattattcatgggggtgggggccaggatgcagactgagttttgagaaattctgggcagagcttccaacagggaatcagattctgaactgggacagctcccaggtgtcctaaagcggaatccagagctgactcacagcagcgtgtgtctgacagggggatccagcggcaagtccctactcttggataaagatgaaac

SEQ ID NO: 928172 - DNA, 711 bp, Homo sapiens
aacataatgtctgcctctcagactcattccattcacaagttgatttctgtctccctgatccattcattctccttaataatcatttactgctcctcaaaacaatgctctatgtttcccatctcctcgctcccctgggaaaaagagtacataagcttctgtaccccattgggggattggggtaatcacactgtaattctctcccatgaatgttaataaatgtgtatcctttttctcctactaatctgccttttgtcaggtgattttcagtgaaccttcagaaggaaaaggggaagttttcccttcacccatatgcaggcatgtaaagatgttcattgcagtgctgtttatagcagagaaaatggcaaacacaatcaaacaatagggggatagttaagaaaaaaatgcacagttgcagttagactggtctctaccggcagggaggttttttttcaccctttttgattctcacagcagccctatgatgtagacaaaaccgggttcacatttattctccccattattcatgggggtrggggccaggatgcagactgagttttgagaaattctgggcagagcttccaacagggaatcagattctgaactgggacagctcccaggtgtcctaaagcggaatccagagctgactcacagcagcgtgtgtctgacagggggatccagcggcaagtccctactcttggataaagatgaaac

SEQ ID NO: 928173 - DNA, 773 bp, Homo sapiens
ggctgagcacttgctgaccctacttcctcccacctcctggggcctctgccctttccgtgacctcggcaacagggagggcggaggagcctcccagcagccccagacactaagaggctccctgcaagagacatggccttttggggtacgctggcttcagggtactgcccagagtgttcccaagtggggaaccctcagccaggcagagcttcaaggcccatgcccaggccagacccacaggaggtcacaccactcgccctgctggccacagctatacctacgcgagcagggcgctccaggcctggggtccggccgccttgcgccgtagggctacctggcgcctgcgggacagtgggcgcacacgggtgggcagcatggtgccggcggtggtgcctgaggctcttcggcccccagggccagggtgctggcctgagggccgccgctggctgaggcgccgatagtagccgtgcaggccccagagagcgtggtcatatacggcatccgcggggagcaggtgggaggaggctcggcgcaggtagcggggtaggggcaacagcggctgggcgccccgaggtgggggtggccctggtgtcttrgtgcctggctggatggcgctcgatgcctcggctaccacatcctcctggacaccctcctcctcattcatgcccacaagcccggtcaacagcaggggtgcacccagaagctgggcccccacggtggtaggctgtggagtgagcaccttatccacgatgaagcgggggttgcaggaagggggc

SEQ ID NO: 928174 - DNA, 608 bp, Homo sapiens
ccaggcgtggtggctcacgcctgtaatcccagcactttgggagaccgagacaggcggatcacttgaggtcaggagtttgagaccagcctggccaacatggtgaaaccctgtctctgctaaaaatacaaaaaaattagccaggcgtggtggctcgcacctgtaatcctagctactggggaggcttgaaccctggaggcagaggttgcggtgagtcaagatcacgcyactgcactccagcctgggcaacagagtgagactccgtctcaagtgggaaaaggatatttgccccaactcttcaagagctctaatggaaaatccaagcaattccagggctttttgccagcagcacgtacttttgagtgtgtgtgtgtgtgcccaaatctgtccctgatgccatggggcactcagaattccaggttctgctccaacagagacaaaaccaaaagataagttggcaagcaagaaataaaaaaccatggccagagttaggaagactcttattttctagaaaattctgtattagtggactctggactgaaagacacatcacttagctgtgtgactttgggcaagccatttgccttttctgggcttcactttcccttgtt

SEQ ID NO: 928175 - DNA, 737 bp, Homo sapiens
atggtgagtgttacagctcttaaggcagcacatctggagttgttcgttcctccactcgtcgtctcactggcttcaggagtgaagctgcagaccttcgcggtgagtgttacagctcataaaagcagcgtggacccaaagagtgagcagtagcaagatttattgcacagagtggaagaacaaagcttccacactgtggaaggggaccckagcgggttgcccctgctggctcaggcagcctgcttttattctcttatctggccccacccacgtcctgctgattggtagagccaagtggtctgttttgacagggcgctgattggtgcgtttacaatccctgagctagacaaaaaggttctccacctccccaccagattagttagatacagagtatggacactgaaggttctccaaggccccaccagagtagctagatacagagtgtcgattggtgcattcacaaaccctgagctagacacagggtgctgattggtgtgtttacaaaccttgagctagatacagagtgccgattggtgtatttacaatccctgagctggacataaatgttctccaaggccccaccagagtagctagatacagagtgtggattggtgcactcacaaaccctgagctagacacagggtgctgattggtgtgtttacaaacctggagctagagacagagtgctgattggtgtatttacaatccctgagctagacataaaggttctccaaggcccc

SEQ ID NO: 928176 - DNA, 572 bp, Homo sapiens
ggaggtgatcgaatcatgggggccagtctttcctgtgctattctcgtgacagtgaataaatctcacgagatctgatggttttatcaggggtttctgcttttgcttcttcctcattttctcttgctgccaccatgtaagaagtgcctttcacctctgccatgattctgaggtctccacaggcatgtggaactataagtccagttaagcctctttttcttcccaatctcaggtatgtctttatcagcagcaggaaaatggactaatacagtaaattggtwccagtagagtgggtgttgctgaaaggatacccgaaaatgtagatgtgactttggaactgggtaacaggcagaagttggaacagtttggagggctcagaagacaggaaaatgtgggaaagtttggaacttcctagagacttgttgaatggcttttcccaaaatactgatagctctaagtacaataaaatccaggctaaggtgatctcaggtggagatgaggaacttgttgagaactggagcaaaagtgactcttgctatgtgttagcaaagagactggtgacattttgcccctgc

SEQ ID NO: 928177 - DNA, 618 bp, Homo sapiens
tttttgcctcctcagaggaaagaattcggctaaggggcattagacagagtgagagactaaggcaagttgtagaacaggaacaaaaggaagtaaagtacacttggaacaggggcaagtgggcaacttgagagatacaagtgcactgtttggcccttggtttagggttttatacattggcatggttctggggcttctgtttctcctcccttgatttttcccttggggtagcgtgtccacatgcacagtgaactgccagcacttgggaggggccacatgcacagtgtgtttactgaagttgtgtgcatgmtcatttgaagcatttttcccttaccagtggtcttggaggaaggccatatgccagttaaactctgccatcttccctcctagtgcacatgcttgagtccacttgcccaactccagagatcttattcggaagctgcagatcaccagcttcaggtattttctatctattaagagcctgccctttcctggtgccaggtatggccaattagagacagtttaacaacaacttaactatcccctgatggtcgcctgacattcctggggtatagtggggcttctcctgtcctgttcatgtctccctagctacccactcta

SEQ ID NO: 928178 - DNA, 595 bp, Homo sapiens
aaactcatactgttcatctttcttcagtcttcctcaaagggacctactgctatttatcagggtaactgtccactggagaaggggaaatcatctgacttcaggggattactggatactgattctgaactggcactaattccagaagacccaaaatgtcactgtgctcccaacccccaacccccagtcagtaagggcttgtggaacrtcaggtgactgatgaagttttctctcaagttcatctcacagtgggtccctgaatcttctgtgtggttatttcaccagtttcagaatgcgtaactgggacagacatactcagcaactcaacacatctccaggttggttccctgacctgtggaacgagggcttatggaagccactagaactgtctatacttagaaaaattgtaagccaaaagtaatactgcattcctggagggattacagagattaatgccactattaaggacttgaaaaatacaggagtgctgattttcctcacatccacattcaacctgactattgggcctatgcagaaagacagatgaattctggaaattgccagtagattcctgtaaatttaaccctatgatgactcc

SEQ ID NO: 928179 - DNA, 581 bp, Homo sapiens
caaatggcatcttactttactcatctagaattgaccattctcacacagcattgcatattttaggctcagtaacgttgttttaggtgactgctgtatattcatactttctgatgtataataatgcattatgaatatctattccattaatacagttattcattatccgactaataaaaatttgtttatatgtattcattattctaagtaatacttctaaatacactctcacatatgccttctgtatttgcacaaaaatgtctttacattttttttttttttttgagacagagtctcgctctgtcgccaggctggtgtccagtggcgcaatcacgactcactgcaacctccacctcctgggttcaagtgattctcctgcctcagcttcctgagcagatgggactataggggtgtgccaccatgccaagstaatttttgtatttttagtagagacggggtttcaccatgttggccaggatggtttcgatctcctgacctcatgatctgcctgccttggtctcccaaagtgctgggattacaggtgtgaaccaccatgcctggtcatgtctttaaaatttattaat

SEQ ID NO: 928180 - DNA, 761 bp, Homo sapiens
ttttaatgggcatttcttgctttatgttttcttgctaatgatttattacttgatttttttaatgcttattttagagtatggaagtgatgttagacaaaaagcaaattcgagcaattttcttatttgagttcaaaatgggtcgtaaagcaacagaaactcacaacatcaacaacgcatttggcccaggaactgctaacgcacatacagtacagtggtagttcaagaagctttgcaaagaaaacaagaaccttgaagatgagaagtgtagtggccggccatcagaagttggcaatgaccaactgagagcartcatcgtagctgattgtcctacaactacaagagaagttgtcaaagaactcaacgtcaaccattcttcggtcatttgcattggaagtacattggaaaagtgaaaaaccttgataagtgggtgccacaggagctgagttaaaaaaaatcattttgaagtgtcatcttctcttattctaacaattctaattctaaacaatgaacgatttctcaatcggatcgtgacatgccatgaaaagtagattttataggacaaccggagacaaccacctcattggttggaccctgaagaagctccaaagcacttctcaaagccacatttgaaccaaaaaaatggtcatggtctctatttagtggtccactgcgggtctgatccagtacagctttctgaatcctggagaaaccattatatctgagaagtatgctcaacaaattgatgagatgcaccaaaaact

SEQ ID NO: 928181 - DNA, 580 bp, Homo sapiens
aattattttaacctgtgcgtgaaacagtttccagaataagcctcattttgggccacaaaataagggtcaacaaatttaagagaactgaaattatatcaagtgtcctttctgaccacatagaataaacatgaagaactctcaaaattgtacaaatacatgaaaattaaacaatgtgctcctgaataagcaatgggmcattacaaaaaaagaatgaaatactaaaataattttgaaacaaaggaaaataagaacataacataccaaaatatgggcaacagcaaaaggagtggtaagaggaaagtttatagcaataaacacctatatcaagaaagtagaaatattttaaataaacaacctaataatgttctcaaggaattagaaaagcaagaacaaactaaactcaaaatcacaaaaaggaaagaaataacataaatcagagcagaaataaataaaattgagactagatgaatagaaattatttaaaaaacaaaaagttggttttttgaaagataaaatcaactatccattacctaaactaataaaaaagagagagaagacccaaataaataaaatcagaaat

SEQ ID NO: 928182 - DNA, 577 bp, Homo sapiens
gaaggggagaaaatatttgaaaactttcatttaacaagagattaacattcagagtacataaggagcacaaatgactcaacagcaaaataactaataatatgattaaaatatgggcaaatgagctaaatagatatctctcaaaagaaaatatacaaatgaccaacaggtatatatagaaatgctcaacatcactaatcatcatggaaatgcaaatcataatgacaatgagatatcattttatcccagttacaatggctattatcaaaaagactacaaagaaacacacaccacacacacacacacacacacacacacacacacacacacacacacaccagcagtctacatactggcaaaaatgtatagaaaggataactcatatgtttttggtgggaatgtaaattagtacagcccattttgggaaacagtatggmgtttccaaaaaactaaactaatattaatatatgattcagcaatcccactactgggacttccaaaggaaaggaaatcagtatgttgaagagatatctgcactcccatgtttattgcagcactatccacaaaagccaagatatga

SEQ ID NO: 928183 - DNA, 612 bp, Homo sapiens
acaaccacaaaatttagaaactcttattatcttcatggtcctgatgaggggactgaggtacacacatgttattgacatctactaaaaggcagataccacactttcaggacagaaacatgacagcagataccacacttccagatgctatgcaattttgtacaaacacttccttgcataaatactcaactcstttgttcccagtggggacatcaaagagtggcttggaggaaagctgaagaattttcatttactaacctcctagctacccaaataagtaaatgaaaacatgcagatgaggcctcaaaatattttccatggccccaacccacttgtaatatccatatccccattccattcttccaatctataatgccacttctaagtctcttttatgtaaacattttggagttgccactacttgcccctctcccctgtcatatctcttttaaaaacaaataggccaggcatggtggctcacgcctgcaatctcaacactttgggaagccaaggctggcagatcacctgaggtcaggagtttgagaccagcctgaccaacattgagaaacctcgtctctactaaaaatacaaaactagccgggcatggtggcacat

SEQ ID NO: 928184 - DNA, 595 bp, Homo sapiens
tcttcaaagcttcttaccatctcacttattttttaacagctttattgatgtataccacatatatcatacaattgtccattcaaattatgcaatctaatatttttagcatattctcatagttgcacaaccatcatcacaatctaatyttagaaaatgtttcccttacctaaaataaatgacatcccaatgaccagtcattccatgctaaattgaacacccagttcagcccttgacaaccacttaaatattcactatctctatggatttacctatttggggcattacatataaatggaatcaagcaatatgtgatcttccgttatgggtttatttcatttaatattttccagatctatctatgttgtaacacatattagtactttattctctttttcccctaaataatatttcattgtgtagatataccacattttgtgtatccatttgtcacttgatggggatttgggttctttcacttttttggctattatgaaaaaattatgctattaacattcatataaaagtttttgtgtggtcaaatgttaccattactcttgggtatatatttcaaaatgaaattactgggtcatacggt

SEQ ID NO: 928185 - DNA, 360 bp, Homo sapiens
atagttttctccttccttatctccctcttctgccttctcctacctgcttcctgaatctcccaccatcctcaaaagcacgcctacactcaagtctttgtctcaggctcagcctggaggagcccaagttagaatggaaccccagctctctttctttccccccccgcctctctctctgtctctctcccctttctytttttctctctctctctttctttctttcagtggagtcttgcttcatcgcccaggctggagtgcaatggcacaatcttgtctcactgcaacctctgcctcctgggttccagcgattctcctgccttagcctcccaagtagttgggactacaggcgcacatgccaccacg

SEQ ID NO: 928186 - DNA, 622 bp, Homo sapiens
tgaaagttcaagttaagtgcatcagccaggatgggccagcttatgctgtcatagtaaagtacccaaaatgcagcgattcacaataaaaacagttcatttcttcccattatctctatcctccagggactggctgggggctcggctccatgtcaycctctctctggcattcaggctgacagagtggccactttgcagaacagcggcagtggttgtgcagaggaagatggcataccacactacacacaggctcttgaagctttcacatgaaagtggcatgcaggccaggtgcaatggctcctgcttgtaatcccagcgctttggcaggccacagcaggaggttcacttgagcttaagagttcaagaccagtctgggcaacatagtgagacccccatcattataaaaattttaaaaatttaaccgggcatggtggtgcacacctgtggtcctagaaacttgggaggggctgaggtgggaggaccacttgagcccaggaggtcagggctgcagtgagctatgatcacatctctgcattccggcctaggtaactgagtgagactctgtctccaaaaaaagcaaagaaagtggcttggagcacttcggattctgtttcataggccaggt

SEQ ID NO: 928187 - DNA, 622 bp, Homo sapiens
tgaaagttcaagttaagtgcatcagccaggatgggccagcttatgctgtcatagtaaagtacccaaaatgcagcgattcacaataaaaacagttcatttcttcccattatctctatcctccagggactggctgggggctcggctccatgtcaccctctctctggcattcaggctgacagagtggccactttgcagaacagcggcagtggttgtgcagaggaagatggcataccacactacacacaggctcttgaagctttcacatgaaagtggcatgcaggccaggtgcaatggctcctgcttgtaatcccagcgctttggcaggccacagcaggaggttcacttgagcttaagagttcaagaccagtctgggcaacatagtgagacccccatcwttataaaaattttaaaaatttaaccgggcatggtggtgcacacctgtggtcctagaaacttgggaggggctgaggtgggaggaccacttgagcccaggaggtcagggctgcagtgagctatgatcacatctctgcattccggcctaggtaactgagtgagactctgtctccaaaaaaagcaaagaaagtggcttggagcacttcggattctgtttcataggccaggt

SEQ ID NO: 928188 - DNA, 776 bp, Homo sapiens
tgtgccaaaccctattaacctcagtaaggaagacaccaggttcaagaggctgaagaagagacccagagccagcaaaggaggcatggggttttattaggggcttacatccaggcaagagagtctagcggcaataagctggacattagaaccgccttatatacagaaacagtccagcaacagagggctggataagatttcaccttcctatgatccactgtcagcaggctagatgacatamgcacacagcctagtggcagtgggctggggaggaaaactgcaaacatcatgcaatttatataacattttcccttaacacactccccctaatgacctccacctggcaaccttcatcaacccaaaactcagggcctcaatgtgtacagctcatgtcccatggaatgaaacggagtggggggctcagatgtttatcatagacaaggaacaaatctcctggtcgacctctcctggattccctagtttggaacacacattcaggtgcatctgccatcctgggtcatcccaagggtatgcttaagtcactgttatcagatgcatttaccctacaggaacaccttcacatcatgttagcccaattcctttctttctttgtatcattgcttccctttaaatctaaaaagaagattaagtcttccatgccaagccaagcccaattactacaatcagtctttatatggcagtaccccacccatctagactgccgactaacttctctcctcctgatagtctctgctttatgtattttccttaaaaaccac

SEQ ID NO: 928189 - DNA, 776 bp, Homo sapiens
tgtgccaaaccctattaacctcagtaaggaagacaccaggttcaagaggctgaagaagagacccagagccagcaaaggaggcatggggttttattaggggcttacatccaggcaagagagtctagcggcaataagctggacattagaaccgccttatatacagaaacagtccagcaacagagggctggataagatttcaccttcctatgatccactgtcagcaggctagatgacataarcacacagcctagtggcagtgggctggggaggaaaactgcaaacatcatgcaatttatataacattttcccttaacacactccccctaatgacctccacctggcaaccttcatcaacccaaaactcagggcctcaatgtgtacagctcatgtcccatggaatgaaacggagtggggggctcagatgtttatcatagacaaggaacaaatctcctggtcgacctctcctggattccctagtttggaacacacattcaggtgcatctgccatcctgggtcatcccaagggtatgcttaagtcactgttatcagatgcatttaccctacaggaacaccttcacatcatgttagcccaattcctttctttctttgtatcattgcttccctttaaatctaaaaagaagattaagtcttccatgccaagccaagcccaattactacaatcagtctttatatggcagtaccccacccatctagactgccgactaacttctctcctcctgatagtctctgctttatgtattttccttaaaaaccac

SEQ ID NO: 928190 - DNA, 763 bp, Homo sapiens
tcactatagaccctacagaaatacaaaggattgtaaaagaatactgtgaacaatggtgtgccaaaaaatccaataacctgaacgaaacaaaaatttctaaaagtatacaaactaccacaactgactaaacgagaaaaaatcgaagagaacctgtaagagattgaattagtaatacattctttttcccccacaaagaaagcccagacccagatgccttcactggtgaattctaccaagtacttaggaagaattaacaccaawccttcccaaactcttccaaaaactagaagaggaggcaatacttcccaactcattctatgaggccagtattatccggataccaaaagcatgcaaagacatttattataatatatcttgcaaatataagcacaagctcctcaacaaaatactagcaaaccagatcgagcaacatatcaaaatgattgtatcccatgatcaagtaaggagttagcccagaaaaacaagtttgatttgaaatacaaaaagcaatcaagtgaaataaaggacaagataaaaagacaaaaaccatatgatcatctcaatagacagagaaaaagcattgaacaaaatccagcactcttttgatacaggagatagaaagaaattatttaggcagatagtaagggcaacagagtcatcagtggaatttcccttttaacaaaaagcagccccaaaataatttcctttctaacaaagagcagcctgaaaaatcgagctgcaaacatagataagcaagctggaa

SEQ ID NO: 928191 - DNA, 763 bp, Homo sapiens
tcactatagaccctacagaaatacaaaggattgtaaaagaatactgtgaacaatggtgtgccaaaaaatccaataacctgaacgaaacaaaaatttctaaaagtatacaaactaccacaactgactaaacgagaaaaaatcgaagagaacctgtaagagattgaattagtaatacattctttttcccccacaaagaaagcccagacccagatgccttcactggtgaattctaccaagtacttaggaagaattaacaccaatccttcccaaactcttccaaaaactagaagaggaggcaatacttcccaactcattctatgaggccagtattatccggataccaaaagcatgcaaagacatttattataatatatcttgcaaatataagcacaagctcctcaacaaaatactagcaaaccagatcsagcaacatatcaaaatgattgtatcccatgatcaagtaaggagttagcccagaaaaacaagtttgatttgaaatacaaaaagcaatcaagtgaaataaaggacaagataaaaagacaaaaaccatatgatcatctcaatagacagagaaaaagcattgaacaaaatccagcactcttttgatacaggagatagaaagaaattatttaggcagatagtaagggcaacagagtcatcagtggaatttcccttttaacaaaaagcagccccaaaataatttcctttctaacaaagagcagcctgaaaaatcgagctgcaaacatagataagcaagctggaa

SEQ ID NO: 928192 - DNA, 763 bp, Homo sapiens
tcactatagaccctacagaaatacaaaggattgtaaaagaatactgtgaacaatggtgtgccaaaaaatccaataacctgaacgaaacaaaaatttctaaaagtatacaaactaccacaactgactaaacgagaaaaaatcgaagagaacctgtaagagattgaattagtaatacattctttttcccccacaaagaaagcccagacccagatgccttcactggtgaattctaccaagtacttaggaagaattaacaccaatccttcccaaactcttccaaaaactagaagaggaggcaatacttcccaactcattctatgaggccagtattatccggataccaaaagcatgcaaagacatttattataatatatcttgcaaatataagcacaagctcctcaacaaaatactagcaaaccagatcgagcaacatatcaaaatgattgtatcccatgatcaagtaaggagttakcccagaaaaacaagtttgatttgaaatacaaaaagcaatcaagtgaaataaaggacaagataaaaagacaaaaaccatatgatcatctcaatagacagagaaaaagcattgaacaaaatccagcactcttttgatacaggagatagaaagaaattatttaggcagatagtaagggcaacagagtcatcagtggaatttcccttttaacaaaaagcagccccaaaataatttcctttctaacaaagagcagcctgaaaaatcgagctgcaaacatagataagcaagctggaa

SEQ ID NO: 928193 - DNA, 791 bp, Homo sapiens
tgagggaaaaacacacagatcacagaaggaatattctggaatccattgtgagggagaataatacagaccctcgtagcagtgttctggaatcctatgtgagggagaaatgctcaacccagaagcagtgttctgcaatcctatgtgagggacaatcattcagactacagccggggtgttctggagtcctacgtgtgggacaaacatgcagacccgcgtagcatttttctggaatcctctttgaggaaaatacattcagaacacaacaggagtgttgtggagtcctatgtgcgggacaaacattcagtccctcgtagcagtgttctggaatgccatgtgagggagaaacactcataacccagtagtagtattgtggaatcctatatgagggacaatcattcataccacagttgaggcattctggaatcctatgtgtggggcaaacattcagacccggacccttgtagcactgttctgcaatcctatgtgaggaacaaacttttagacccagggagcagtgttctggaaccgcamgtgagagacaaacacttggaaccctacagcagtgtcctggaatcctaattgagggacaaacatacagaccacgaaggaatcttctggaatcctatgtgagggagaataattcagaccctcgtagcagtgttctgcaatcctatgtgagggaaaaactttcagaccacagtagcagtgttctggaataccatgtgagggagaaacactcacaacccagcagcagtgttgtggaatcctatgtgagggacaatcattcagac

SEQ ID NO: 928194 - DNA, 858 bp, Homo sapiens
gtttccagaacactgctatgaggttctgaatgtttgtctcacacataggactccagaacactcctgctgtgttccaaatgcattttcctcacataggataccagaacaatgctacgagggtctgaatgtctgtcccacacgtaggattccagaacatcccatcggtggtctgaatgattgtccctcacataggattctggaatattgctcctgggttctgaatgtttctccctcacatgggattccagaacactgctgttaggctctgagtgtttgtccctcagttataattccagaacactgctacgtgggtccaaatgcttgtcgatcacataggattgcagaacacagctattagggtctgaatgtttgtcccayacagaggactccagaaaactcctgctgtgttctgaatgtattttcctcacattggataccagaacaatgctacgagggtgtgaatgtttgtcccacaggtaggattgcagaacactactgctgtggtctgaatgattgtccctcacgtaggattccagaacactgctgctgtgttctgaatgtttctccctcacataggattccagaacactcctgctgtagtctgaatgtttgcaactcacttaggattccagaatactgctgttgagttctgagtgtttgtccctcaggtatgattccataacactgctacgtgggtctaaatgtttctcgatcacatgggattccagaacacagctactagagtctgaatgtttgtcccacacaaaggactccagaacgctgctgctgtgttctcaacatattttcctgacataggattccacacgaatgctacaaggctctgaaagtttgtcccag

SEQ ID NO: 928195 - DNA, 713 bp, Homo sapiens
gaaaagggaaaatggtcccatttayaaatgacagatttgaaactggggttcacatcaacagtgtcactgccaggaaggagggtcatgctagccatgtcaccggtagtgtggcccgcagggacgccgacctgctggagcgtcgtgccagcatgggctgtggcaaccacgtgggccagcaggaggttcccgctgcacagctgtggggtgaggatagactgggtggtgatatcggccattacaggggcctcttctgctggcaagagtgtgacagtagcaagtagatggacaggcctgcgtgtgaggacggaatgcaggaggggttcttgtgcggctgggtgtggggccctcacgggaaccgtggagaaatggccaggtaactgcgtcatgtgggctagtagattggccagggcttcgaactgaaggacgataacggggagtagctgtcaggccctgggagtgcctgagtgtaagtggagatgggtttggggtcactgaggtatgcgtgggagccattcctgtataggtacaggtcatagggagatagtctcgtgaggcctgtgagtgtctagggttgtcctgggtgcctggggctgactgtggcagaaatctggggaaggctggagagaagctgggagacccaggagagtccctgaaggcagggggtgaagaggtgaaagaaatgggggagggtttcagtaaggtccgtgagtttg

SEQ ID NO: 928196 - DNA, 598 bp, Homo sapiens
ggcgtggttggagagtagctgggacagacgggagagtccctgagggatggtgaagacatgagagagactggggagtaacgcagtgaaattggtgagtttggtggtgatttctgggtgcctgcaacggactcccgctgaagtgtgggcgtgcttggagagtagctgggacagcacaggcgagtccctgagggttggagataaagrcgtgctggagactggggagtaactcattgaaagtggtgggcttggtggtgatcccagggttcctggaactgacccgcgctgaaatgtgggcgtggttggagagtatctgggacacactgtagggtccgcaagggctgtgggtgaaaacatgagagagactggcgaggatctcactgtggtgtgtgagtttgtaggtgtttctggggtgtggggtacacactcccgctgtaatctgggcgtatttggagagtagctgggacagcacacgagagtcatgggtggctgggggtgagctgctggatgatggcagtaagaacatatggtacattattgatgaatgaggtgactgtgaaaaatctccagaggaggacacgggagaacacactgacatgag

SEQ ID NO: 928197 - DNA, 646 bp, Homo sapiens
cgtggttggagagtagctgggacagacgggagagtccctgagggatggtgaagacatgagagagactggggagtaacgcagtgaaattggtgagtttggtggtgatttctgggtgcctgcaacggactcccgctgaagtgtgggcgtgcttggagagtagctgggacagcacaggcgagtccctgagggttggagataaagacgtgctggagactggggagtaactcattgaaagtggtgggcttggtggtgatcccagggttcctggaactgacccgcgctgaaatgtgggcgtggttggagagtatctgggacacactgtagggtccgcaagggctgtgggtgaaaacatgakagagactggcgaggatctcactgtggtgtgtgagtttgtaggtgtttctggggtgtggggtacacactcccgctgtaatctgggcgtatttggagagtagctgggacagcacacgagagtcatgggtggctgggggtgagctgctggatgatggcagtaagaacatatggtacattattgatgaatgaggtgactgtgaaaaatctccagaggaggacacgggagaacacactgacatgagtgactgtcctgcttgggtaggaaagggaaacgtaaagttgtggaattctg

SEQ ID NO: 928198 - DNA, 636 bp, Homo sapiens
gagtagctgggacagacgggagagtccctgagggatggtgaagacatgagagagactggggagtaacgcagtgaaattggtgagtttggtggtgatttctgggtgcctgcaacggactcccgctgaagtgtgggcgtgcttggagagtagctgggacagcacaggcgagtccctgagggttggagataaagacgtgctggagactggggagtaactcattgaaagtggtgggcttggtggtgatcccagggttcctggaactgacccgcgctgaaatgtgggcgtggttggagagtatctgggacacactgtagggtccgcaagggctgtgggtgaaaacatgagagagactggcgaggatctcwctgtggtgtgtgagtttgtaggtgtttctggggtgtggggtacacactcccgctgtaatctgggcgtatttggagagtagctgggacagcacacgagagtcatgggtggctgggggtgagctgctggatgatggcagtaagaacatatggtacattattgatgaatgaggtgactgtgaaaaatctccagaggaggacacgggagaacacactgacatgagtgactgtcctgcttgggtaggaaagggaaacgtaaagttgtggaattctg

SEQ ID NO: 928199 - DNA, 486 bp, Homo sapiens
aatgtgggcgtggttggagagtagctgggacagacgggagagtccctgagggatggtgaagacatgagagagactggggagtaacgcagtgaaattggtgagtttggtggtgatttctgggtgcctgcaacggactcccgctgaagtgtgggcgtgcttggagagtagctgggacagcacaggcgagtccctgagggttggagataaagacgtgctggagactggggagtaactcattgaaagtggtgggcttggtggtgatcccagggttcctggaactgacccgcgctgaaatgtgggcgtggttggagagtatctgggacacactgtagggtccgcaagggctgtgggtgaaaacatgagagagactggcgaggatctcactgwggtgtgtgagtttgtaggtgtttctggggtgtggggtacacactcccgctgtaatctgggcgtatttggagagtagctgggacagcacacgagagtcat

SEQ ID NO: 928200 - DNA, 486 bp, Homo sapiens
aatgtgggcgtggttggagagtagctgggacagacgggagagtccctgagggatggtgaagacatgagagagactggggagtaacgcagtgaaattggtgagtttggtggtgatttctgggtgcctgcaacggactcccgctgaagtgtgggcgtgcttggagagtagctgggacagcacaggcgagtccctgagggttggagataaagacgtgctggagactggggagtaactcattgaaagtggtgggcttggtggtgatcccagggttcctggaactgacccgcgctgaaatgtgggcgtggttggagagtatctgggacacactgtagggtccgcaagggctgtgggtgaaaacatgagagagactggcgaggatctcactgtggtstgtgagtttgtaggtgtttctggggtgtggggtacacactcccgctgtaatctgggcgtatttggagagtagctgggacagcacacgagagtcat

SEQ ID NO: 928201 - DNA, 582 bp, Homo sapiens
ctgggacagacgggagagtccctgagggatggtgaagacatgagagagactggggagtaacgcagtgaaattggtgagtttggtggtgatttctgggtgcctgcaacggactcccgctgaagtgtgggcgtgcttggagagtagctgggacagcacaggcgagtccctgagggttggagataaagacgtgctggagactggggagtaactcattgaaagtggtgggcttggtggtgatcccagggttcctggaactgacccgcgctgaaatgtgggcgtggttggagagtatctgggacacactgtagggtccgcaagggctgtgggtgaaaacatgagagagactggcgaggatctcactgtggtgtgtgagtytgtaggtgtttctggggtgtggggtacacactcccgctgtaatctgggcgtatttggagagtagctgggacagcacacgagagtcatgggtggctgggggtgagctgctggatgatggcagtaagaacatatggtacattattgatgaatgaggtgactgtgaaaaatctccagaggaggacacgggagaacacactgacatgagtg

SEQ ID NO: 928202 - DNA, 524 bp, Homo sapiens
gaaatgtgggcgtggttggagagtagctgggacagacgggagagtccctgagggatggtgaagacatgagagagactggggagtaacgcagtgaaattggtgagtttggtggtgatttctgggtgcctgcaacggactcccgctgaagtgtgggcgtgcttggagagtagctgggacagcacaggcgagtccctgagggttggagataaagacgtgctggagactggggagtaactcattgaaagtggtgggcttggtggtgatcccagggttcctggaactgacccgcgctgaaatgtgggcgtggttggagagtatctgggacacactgtagggtccgcaagggctgtgggtgaaaacatgagagagactggcgaggatctcactgtggtgtgtgagttwgtaggtgtttctggggtgtggggtacacactcccgctgtaatctgggcgtatttggagagtagctgggacagcacacgagagtcatgggtggctgggggtgagctgctggatgatggcagta

SEQ ID NO: 928203 - DNA, 557 bp, Homo sapiens
actccagctgaaatgtgggcgtggttggagagtagctgggacagacgggagagtccctgagggatggtgaagacatgagagagactggggagtaacgcagtgaaattggtgagtttggtggtgatttctgggtgcctgcaacggactcccgctgaagtgtgggcgtgcttggagagtagctgggacagcacaggcgagtccctgagggttggagataaagacgtgctggagactggggagtaactcattgaaagtggtgggcttggtggtgatcccagggttcctggaactgacccgcgctgaaatgtgggcgtggttggagagtatctgggacacactgtagggtccgcaagggctgtgggtgaaaacatgagagagactggcgaggatctcactgtggtgtgtgagtttgtaggtgtttctggggtgtggggtacacactcccgctgtaatctgggcgtakttggagagtagctgggacagcacacgagagtcatgggtggctgggggtgagctgctggatgatggcagtaagaacatatggtacattattgatg

SEQ ID NO: 928204 - DNA, 617 bp, Homo sapiens
aaacaggagtacctaataaaaatatgcttagtgacttgggataaagcaatagatgttcacaagtgatggagagccgtgaaagagagatagcggtaaatagttacaataacacaattttcctgcacctgtcgaggatttcccccaaaaaacgcagaatgtgggatgcacctaaggcatatgaawgagagagggcagaaggagtaagagagaaataggaggaaggaaggaaggaagcaaggaagacaggaaggaaggaaagaaggaaggtaggacggaaggaaggaaggaaggaaggaaagaaggatgaaaggaaggagaaaacaccggtgttactaaaaccccccaaaaaatggtttccccctgtgggtaagcctacaatgtggatgaatcttgaaaatattgtgctacgtgttatgtcagtcatagcagctcacctattgtgcaattccgtttataggaaatgtccacaatatggaaatctatgcatatgggattgatcgcactaggtagttgctacctagggctgagggtcagggagagggtttgagacagaatgaggagtgactaatgtctacagggtctttctctggtcgggggtgataagacgttttacaatg

SEQ ID NO: 928205 - DNA, 626 bp, Homo sapiens
tataaggaaaaacaggagtacctaataaaaatatgcttagtgacttgggataaagcaatagatgttcacaagtgatggagagccgtgaaagagagatagcggtaaatagttacaataacacaattttcctgcacctgtcgaggatttcccccaaaaaacgcagaatgtgggatgcacctaaggcatatgaaagagagagggcrgaaggagtaagagagaaataggaggaaggaaggaaggaagcaaggaagacaggaaggaaggaaagaaggaaggtaggacggaaggaaggaaggaaggaaggaaagaaggatgaaaggaaggagaaaacaccggtgttactaaaaccccccaaaaaatggtttccccctgtgggtaagcctacaatgtggatgaatcttgaaaatattgtgctacgtgttatgtcagtcatagcagctcacctattgtgcaattccgtttataggaaatgtccacaatatggaaatctatgcatatgggattgatcgcactaggtagttgctacctagggctgagggtcagggagagggtttgagacagaatgaggagtgactaatgtctacagggtctttctctggtcgggggtgataagacgttttacaatg

SEQ ID NO: 928206 - DNA, 595 bp, Homo sapiens
aaaaacaggagtacctaataaaaatatgcttagtgacttgggataaagcaatagatgttcacaagtgatggagagccgtgaaagagagatagcggtaaatagttacaataacacaattttcctgcacctgtcgaggatttcccccaaaaaacgcagaatgtgggatgcacctaaggcatatgaaagagagagggcagaaggagtaagagagaaataggaggaaggaaggaaggaagcaaggaagamaggaaggaaggaaagaaggaaggtaggacggaaggaaggaaggaaggaaggaaagaaggatgaaaggaaggagaaaacaccggtgttactaaaaccccccaaaaaatggtttccccctgtgggtaagcctacaatgtggatgaatcttgaaaatattgtgctacgtgttatgtcagtcatagcagctcacctattgtgcaattccgtttataggaaatgtccacaatatggaaatctatgcatatgggattgatcgcactaggtagttgctacctagggctgagggtcagggagagggtttgagacagaatgaggagtgactaatgtctacagggtctttctctggtcg

SEQ ID NO: 928207 - DNA, 722 bp, Homo sapiens
cgaccctacactccagaaacagctgtataaggaaaaacaggagtacctaataaaaatatgcttagtgacttgggataaagcaatagatgttcacaagtgatggagagccgtgaaagagagatagcggtaaatagttacaataacacaattttcctgcacctgtcgaggatttcccccaaaaaacgcagaatgtgggatgcacctaaggcatatgaaagagagagggcagaaggagtaagagagaaataggaggaaggaaggaaggaagcaaggaagacaggamggaaggaaagaaggaaggtaggacggaaggaaggaaggaaggaaggaaagaaggatgaaaggaaggagaaaacaccggtgttactaaaaccccccaaaaaatggtttccccctgtgggtaagcctacaatgtggatgaatcttgaaaatattgtgctacgtgttatgtcagtcatagcagctcacctattgtgcaattccgtttataggaaatgtccacaatatggaaatctatgcatatgggattgatcgcactaggtagttgctacctagggctgagggtcagggagagggtttgagacagaatgaggagtgactaatgtctacagggtctttctctggtcgggggtgataagacgttttacaatggattgcgaattaaaattgaatgtgcacaaccacaggtatactaaaagccactcaattcatgacctttaatg

SEQ ID NO: 928208 - DNA, 642 bp, Homo sapiens
aaaacaggagtacctaataaaaatatgcttagtgacttgggataaagcaatagatgttcacaagtgatggagagccgtgaaagagagatagcggtaaatagttacaataacacaattttcctgcacctgtcgaggatttcccccaaaaaacgcagaatgtgggatgcacctaaggcatatgaaagagagagggcagaaggagtaagagagaaataggaggaaggaaggaaggaagcaaggaagacaggaaggwaggaaagaaggaaggtaggacggaaggaaggaaggaaggaaggaaagaaggatgaaaggaaggagaaaacaccggtgttactaaaaccccccaaaaaatggtttccccctgtgggtaagcctacaatgtggatgaatcttgaaaatattgtgctacgtgttatgtcagtcatagcagctcacctattgtgcaattccgtttataggaaatgtccacaatatggaaatctatgcatatgggattgatcgcactaggtagttgctacctagggctgagggtcagggagagggtttgagacagaatgaggagtgactaatgtctacagggtctttctctggtcgggggtgataagacgttttacaatggattgcgaattaaaattgaatgtg

SEQ ID NO: 928209 - DNA, 585 bp, Homo sapiens
acagctgtataaggaaaaacaggagtacctaataaaaatatgcttagtgacttgggataaagcaatagatgttcacaagtgatggagagccgtgaaagagagatagcggtaaatagttacaataacacaattttcctgcacctgtcgaggatttcccccaaaaaacgcagaatgtgggatgcacctaaggcatatgaaagagagagggcagaaggagtaagagagaaataggaggaaggaaggaaggaagcaaggaagacaggaaggaaggaargaaggaaggtaggacggaaggaaggaaggaaggaaggaaagaaggatgaaaggaaggagaaaacaccggtgttactaaaaccccccaaaaaatggtttccccctgtgggtaagcctacaatgtggatgaatcttgaaaatattgtgctacgtgttatgtcagtcatagcagctcacctattgtgcaattccgtttataggaaatgtccacaatatggaaatctatgcatatgggattgatcgcactaggtagttgctacctagggctgagggtcagggagagggtttgagacagaatgaggagtgactaat

SEQ ID NO: 928210 - DNA, 674 bp, Homo sapiens
tataaggaaaaacaggagtacctaataaaaatatgcttagtgacttgggataaagcaatagatgttcacaagtgatggagagccgtgaaagagagatagcggtaaatagttacaataacacaattttcctgcacctgtcgaggatttcccccaaaaaacgcagaatgtgggatgcacctaaggcatatgaaagagagagggcagaaggagtaagagagaaataggaggaaggaaggaaggaagcaaggaagacaggaaggaaggaaagamggaaggtaggacggaaggaaggaaggaaggaaggaaagaaggatgaaaggaaggagaaaacaccggtgttactaaaaccccccaaaaaatggtttccccctgtgggtaagcctacaatgtggatgaatcttgaaaatattgtgctacgtgttatgtcagtcatagcagctcacctattgtgcaattccgtttataggaaatgtccacaatatggaaatctatgcatatgggattgatcgcactaggtagttgctacctagggctgagggtcagggagagggtttgagacagaatgaggagtgactaatgtctacagggtctttctctggtcgggggtgataagacgttttacaatggattgcgaattaaaattgaatgtgcacaaccacaggtatactaaaagc

SEQ ID NO: 928211 - DNA, 595 bp, Homo sapiens
aaaaacaggagtacctaataaaaatatgcttagtgacttgggataaagcaatagatgttcacaagtgatggagagccgtgaaagagagatagcggtaaatagttacaataacacaattttcctgcacctgtcgaggatttcccccaaaaaacgcagaatgtgggatgcacctaaggcatatgaaagagagagggcagaaggagtaagagagaaataggaggaaggaaggaaggaagcaaggaagacaggaaggaaggaaagaaggaaggwaggacggaaggaaggaaggaaggaaggaaagaaggatgaaaggaaggagaaaacaccggtgttactaaaaccccccaaaaaatggtttccccctgtgggtaagcctacaatgtggatgaatcttgaaaatattgtgctacgtgttatgtcagtcatagcagctcacctattgtgcaattccgtttataggaaatgtccacaatatggaaatctatgcatatgggattgatcgcactaggtagttgctacctagggctgagggtcagggagagggtttgagacagaatgaggagtgactaatgtctacagggtctttctctggtcg

SEQ ID NO: 928212 - DNA, 608 bp, Homo sapiens
acttgggataaagcaatagatgttcacaagtgatggagagccgtgaaagagagatagcggtaaatagttacaataacacaattttcctgcacctgtcgaggatttcccccaaaaaacgcagaatgtgggatgcacctaaggcatatgaaagagagagggcagaaggagtaagagagaaataggaggaaggaaggaaggaagcaaggaagacaggaaggaaggaaagaaggaaggtaggamggaaggaaggaaggaaggaaggaaagaaggatgaaaggaaggagaaaacaccggtgttactaaaaccccccaaaaaatggtttccccctgtgggtaagcctacaatgtggatgaatcttgaaaatattgtgctacgtgttatgtcagtcatagcagctcacctattgtgcaattccgtttataggaaatgtccacaatatggaaatctatgcatatgggattgatcgcactaggtagttgctacctagggctgagggtcagggagagggtttgagacagaatgaggagtgactaatgtctacagggtctttctctggtcgggggtgataagacgttttacaatggattgcgaattaaaattgaatgtg

SEQ ID NO: 928213 - DNA, 397 bp, Homo sapiens
aggagtacctaataaaaatatgcttagtgacttgggataaagcaatagatgttcacaagtgatggagagccgtgaaagagagatagcggtaaatagttacaataacacaattttcctgcacctgtcgaggatttcccccaaaaaacgcagaatgtgggatgcacctaaggcatatgaaagagagagggcagaaggagtaagagagaaataggaggaaggaaggaaggaagcaaggaagacaggaaggaaggaaagaaggaaggtaggacggaaggaaggaaggaaggaaggaargaaggatgaaaggaaggagaaaacaccggtgttactaaaaccccccaaaaaatggtttccccctgtgggtaagcctacaatgtggatgaatcttgaaaatatt

SEQ ID NO: 928214 - DNA, 669 bp, Homo sapiens
aaacagctgtataaggaaaaacaggagtacctaataaaaatatgcttagtgacttgggataaagcaatagatgttcacaagtgatggagagccgtgaaagagagatagcggtaaatagttacaataacacaattttcctgcacctgtcgaggatttcccccaaaaaacgcagaatgtgggatgcacctaaggcatatgaaagagagagggcagaaggagtaagagagaaataggaggaaggaaggaaggaagcaaggaagacaggaaggaaggaaagaaggaaggtaggacggaaggaaggaaggaaggaaggaaagraggatgaaaggaaggagaaaacaccggtgttactaaaaccccccaaaaaatggtttccccctgtgggtaagcctacaatgtggatgaatcttgaaaatattgtgctacgtgttatgtcagtcatagcagctcacctattgtgcaattccgtttataggaaatgtccacaatatggaaatctatgcatatgggattgatcgcactaggtagttgctacctagggctgagggtcagggagagggtttgagacagaatgaggagtgactaatgtctacagggtctttctctggtcgggggtgataagacgttttacaatggattgcgaattaaaattgaatgtgcacaaccaca

SEQ ID NO: 928215 - DNA, 606 bp, Homo sapiens
aaaaacaggagtacctaataaaaatatgcttagtgacttgggataaagcaatagatgttcacaagtgatggagagccgtgaaagagagatagcggtaaatagttacaataacacaattttcctgcacctgtcgaggatttcccccaaaaaacgcagaatgtgggatgcacctaaggcatatgaaagagagagggcagaaggagtaagagagaaataggaggaaggaaggaaggaagcaaggaagacaggaaggaaggaaagaaggaaggtaggacggaaggaaggaaggaaggaaggaaagaaggatgaaaggaaggagaaaacaccggtgttactaaaaccccmcaaaaaatggtttccccctgtgggtaagcctacaatgtggatgaatcttgaaaatattgtgctacgtgttatgtcagtcatagcagctcacctattgtgcaattccgtttataggaaatgtccacaatatggaaatctatgcatatgggattgatcgcactaggtagttgctacctagggctgagggtcagggagagggtttgagacagaatgaggagtgactaatgtctacagggtctttctctggtcgggggtgataag

SEQ ID NO: 928216 - DNA, 634 bp, Homo sapiens
aggaaaaacaggagtacctaataaaaatatgcttagtgacttgggataaagcaatagatgttcacaagtgatggagagccgtgaaagagagatagcggtaaatagttacaataacacaattttcctgcacctgtcgaggatttcccccaaaaaacgcagaatgtgggatgcacctaaggcatatgaaagagagagggcagaaggagtaagagagaaataggaggaaggaaggaaggaagcaaggaagacaggaaggaaggaaagaaggaaggtaggacggaaggaaggaaggaaggaaggaaagaaggatgaaaggaaggagaaaacaccggtgttactaaaaccccccaaaaaatgrtttccccctgtgggtaagcctacaatgtggatgaatcttgaaaatattgtgctacgtgttatgtcagtcatagcagctcacctattgtgcaattccgtttataggaaatgtccacaatatggaaatctatgcatatgggattgatcgcactaggtagttgctacctagggctgagggtcagggagagggtttgagacagaatgaggagtgactaatgtctacagggtctttctctggtcgggggtgataagacgttttacaatggattgcgaatta

SEQ ID NO: 928217 - DNA, 546 bp, Homo sapiens
gctgtataaggaaaaacaggagtacctaataaaaatatgcttagtgacttgggataaagcaatagatgttcacaagtgatggagagccgtgaaagagagatagcggtaaatagttacaataacacaattttcctgcacctgtcgaggatttcccccaaaaaacgcagaatgtgggatgcacctaaggcatatgaaagagagagggcagaaggagtaagagagaaataggaggaaggaaggaaggaagcaaggaagacaggaaggaaggaaagaaggaaggtaggacggaaggaaggaaggaaggaaggaaagaaggatgaaaggaaggagaaaacaccggtgttactaaaaccccccaaaaaatggtttycccctgtgggtaagcctacaatgtggatgaatcttgaaaatattgtgctacgtgttatgtcagtcatagcagctcacctattgtgcaattccgtttataggaaatgtccacaatatggaaatctatgcatatgggattgatcgcactaggtagttgctacctagggctgagggtca

SEQ ID NO: 928218 - DNA, 619 bp, Homo sapiens
aaaaacaggagtacctaataaaaatatgcttagtgacttgggataaagcaatagatgttcacaagtgatggagagccgtgaaagagagatagcggtaaatagttacaataacacaattttcctgcacctgtcgaggatttcccccaaaaaacgcagaatgtgggatgcacctaaggcatatgaaagagagagggcagaaggagtaagagagaaataggaggaaggaaggaaggaagcaaggaagacaggaaggaaggaaagaaggaaggtaggacggaaggaaggaaggaaggaaggaaagaaggatgaaaggaaggagaaaacaccggtgttactaaaaccccccaaaaaatggtttccccctktgggtaagcctacaatgtggatgaatcttgaaaatattgtgctacgtgttatgtcagtcatagcagctcacctattgtgcaattccgtttataggaaatgtccacaatatggaaatctatgcatatgggattgatcgcactaggtagttgctacctagggctgagggtcagggagagggtttgagacagaatgaggagtgactaatgtctacagggtctttctctggtcgggggtgataagacgttttacaatg

SEQ ID NO: 928219 - DNA, 776 bp, Homo sapiens
acagctgtataaggaaaaacaggagtacctaataaaaatatgcttagtgacttgggataaagcaatagatgttcacaagtgatggagagccgtgaaagagagatagcggtaaatagttacaataacacaattttcctgcacctgtcgaggatttcccccaaaaaacgcagaatgtgggatgcacctaaggcatatgaaagagagagggcagaaggagtaagagagaaataggaggaaggaaggaaggaagcaaggaagacaggaaggaaggaaagaaggaaggtaggacggaaggaaggaaggaaggaaggaaagaaggatgaaaggaaggagaaaacaccggtgttactaaaaccccccaaaaaatggtttccccctgtgggtaagcctayaatgtggatgaatcttgaaaatattgtgctacgtgttatgtcagtcatagcagctcacctattgtgcaattccgtttataggaaatgtccacaatatggaaatctatgcatatgggattgatcgcactaggtagttgctacctagggctgagggtcagggagagggtttgagacagaatgaggagtgactaatgtctacagggtctttctctggtcgggggtgataagacgttttacaatggattgcgaattaaaattgaatgtgcacaaccacaggtatactaaaagccactcaattcatgacctttaatgggggaatcttacgtggcgtagtctcatggagaccacggcagacatagtgagagagaaaaaggtgagtaaata

SEQ ID NO: 928220 - DNA, 644 bp, Homo sapiens
gtttccccctgtgggtaagcctacaatgtggatgaatcttgaaaatattgtgctacgtgttatgtcagtcatagcagctcacctattgtgcaattccgtttataggaaatgtccacaatatggaaatctatgcatatgggattgatcgcactaggtagttgctacctagggctgagggtcagggagagggtttgagacagaatgaggagtgactaatgtctacagggtytttctctggtcgggggtgataagacgttttacaatggattgcgaattaaaattgaatgtgcacaaccacaggtatactaaaagccactcaattcatgacctttaatgggggaatcttacgtggcgtagtctcatggagaccacggcagacatagtgagagagaaaaaggtgagtaaatatctgaaacggaggcagaaacagagagaatgaaaagccctgtgaatggaagggagagcgaaaagggaaaatggtcctatttacaaatgacagatgtgaaactggggttcacatcaacagtgtcactgccaggaaggagggtcatgctagccatgtcaccggtagtgtggcccgcagggacgccgacctgctggagcgtcgtgccagcatgggctgtggcaaccacgtgggccagcag

SEQ ID NO: 928221 - DNA, 554 bp, Homo sapiens
agcagctcacctattgtgcaattccgtttataggaaatgtccacaatatggaaatctatgcatatgggattgatcgcactaggtagttgctacctagggctgagggtcagggagagggtttgagacagaatgaggagtgactaatgtctacagggtctttctctggtcggggstgataagacgttttacaatggattgcgaattaaaattgaatgtgcacaaccacaggtatactaaaagccactcaattcatgacctttaatgggggaatcttacgtggcgtagtctcatggagaccacggcagacatagtgagagagaaaaaggtgagtaaatatctgaaacggaggcagaaacagagagaatgaaaagccctgtgaatggaagggagagcgaaaagggaaaatggtcctatttacaaatgacagatgtgaaactggggttcacatcaacagtgtcactgccaggaaggagggtcatgctagccatgtcaccggtagtgtggcccgcagggacgccgacctgctggagcgtcgtgccagcatgggctgtggc

SEQ ID NO: 928222 - DNA, 752 bp, Homo sapiens
cagatgcttaaattaaaaagaagaaagatctcaaacccatgctaaagggaagcttatagctgcaggtgcttaaattaaaaagaagaaagatctcaaatcaataacctaacattacacctgaagggggggaaaaaaaaaactattgacaaaccaagcaaaaggaagaaaatatcagattagagcagagataagcagaataataccagaaaaaaaaggaaaaaaaaacacactgagttttttttaaagatcaataacaattttaaaactcacagctatattaaaaaaaaaagagaaatctcaaatactaaaatcgtaaataaaagaggtgacagtacaacagcatgccacagaaatgaaaaagattamaagagactaatgtgagcaaccgtatgccacaaaactgggcaacctataataaatttataaattcctagaaacacaaaccaccatactgaatcacggagaaataaaaaatccaaagagacctgtgactagtaagaagattcaaccagtaatcaaaaaccccccaaaaaagaaaattccaggtccacataacttcactggagaattttaccaaacatttcaagaaaaattaatgccaatcctctgcaaaatattccaaaaatgttcaaaaaccagaaggggacattccaatccattctatcaggtcaacatttatctggttccacagccacatgaacaccttttgtaatataaagactctcagaattagtaatatatggaaactcctc

SEQ ID NO: 928223 - DNA, 657 bp, Homo sapiens
aaaaaaaaactattgacaaaccaagcaaaaggaagaaaatatcagattagagcagagataagcagaataataccagaaaaaaaaggaaaaaaaaacacactgagttttttttaaagatcaataacaattttaaaactcacagctatattaaaaaaaaaagagaaatctcaaatactaaaatcgtaaataaaagaggtgacagtacaacagcatgccacagaaatgaaaaagattaaaagagactaatgtgagcaaccgtatgccacaaaactgggcaacctataataaatttataaattcctagaaacacaaaccaccatactgaatcacgragaaataaaaaatccaaagagacctgtgactagtaagaagattcaaccagtaatcaaaaaccccccaaaaaagaaaattccaggtccacataacttcactggagaattttaccaaacatttcaagaaaaattaatgccaatcctctgcaaaatattccaaaaatgttcaaaaaccagaaggggacattccaatccattctatcaggtcaacatttatctggttccacagccacatgaacaccttttgtaatataaagactctcagaattagtaatatatggaaactcctcagtaaataaagattgtacatgaaaagctcacagct

SEQ ID NO: 928224 - DNA, 657 bp, Homo sapiens
aaaaaaaaactattgacaaaccaagcaaaaggaagaaaatatcagattagagcagagataagcagaataataccagaaaaaaaaggaaaaaaaaacacactgagttttttttaaagatcaataacaattttaaaactcacagctatattaaaaaaaaaagagaaatctcaaatactaaaatcgtaaataaaagaggtgacagtacaacagcatgccacagaaatgaaaaagattaaaagagactaatgtgagcaaccgtatgccacaaaactgggcaacctataataaatttataaattcctagaaacacaaaccaccatactgaatcacggagaaataaaaaatccaaagagacctgtractagtaagaagattcaaccagtaatcaaaaaccccccaaaaaagaaaattccaggtccacataacttcactggagaattttaccaaacatttcaagaaaaattaatgccaatcctctgcaaaatattccaaaaatgttcaaaaaccagaaggggacattccaatccattctatcaggtcaacatttatctggttccacagccacatgaacaccttttgtaatataaagactctcagaattagtaatatatggaaactcctcagtaaataaagattgtacatgaaaagctcacagct

SEQ ID NO: 928225 - DNA, 722 bp, Homo sapiens
atatcggacaaacattcaaaccctcatagcattgttctggaatcctaagtgaggaaaatattttcagaaaacagcagatgttttctggagtcctgtgggtgggacaacattcagaccctcgtagcagtgttctggaatcctatgtgagagaaaaacatttagacccacgtagcagtgttctggactagtatgtaagtgagaaatacacagaacccaacarcagtgttctcgaatagtaagtgagggacaaacattcagacaacaggtggagtgttctggaatccgatgggatggggaataattaagacacccgtagcagtgttctggaatcctatgtgaggggcaaacattcagaccttcatagcagtgttctggaatcctgtgtgacggacaaacatttagaatcaagtagcagtgttctgtaatcaaaggtgagggacaaacactcagaacccaacagcagtgttctagaatcctcagtgagcgacaaacattcagaccacagcaggagagttctggaaccctatgtgagggacaaacattcagacactcatagcagtgttctggaatcctatgagagggacaaacatttagacccacgtaccagtgtgctggaatagtacgtgagggacaaacactcagaacacaacagcagtgttctggaatcctaagtgagggacattcagatgatggcaggagtgttctggaatcctatgtgaggg

SEQ ID NO: 928226 - DNA, 722 bp, Homo sapiens
atatcggacaaacattcaaaccctcatagcattgttctggaatcctaagtgaggaaaatattttcagaaaacagcagatgttttctggagtcctgtgggtgggacaacattcagaccctcgtagcagtgttctggaatcctatgtgagagaaaaacatttagacccacgtagcagtgttctggactagtatgtaagtgagaaatacacagaacccaacaacagtgttctcgaatmgtaagtgagggacaaacattcagacaacaggtggagtgttctggaatccgatgggatggggaataattaagacacccgtagcagtgttctggaatcctatgtgaggggcaaacattcagaccttcatagcagtgttctggaatcctgtgtgacggacaaacatttagaatcaagtagcagtgttctgtaatcaaaggtgagggacaaacactcagaacccaacagcagtgttctagaatcctcagtgagcgacaaacattcagaccacagcaggagagttctggaaccctatgtgagggacaaacattcagacactcatagcagtgttctggaatcctatgagagggacaaacatttagacccacgtaccagtgtgctggaatagtacgtgagggacaaacactcagaacacaacagcagtgttctggaatcctaagtgagggacattcagatgatggcaggagtgttctggaatcctatgtgaggg

SEQ ID NO: 928227 - DNA, 726 bp, Homo sapiens
cctggcaacaagtttcttgaatttttatttttctgaggaaggccttaattctccttcacttttgaagggtggtttcagtgtgtacagaaacttaggttggtggggttttttctgtcaatattttcaatttttcatttcactgtcttcttgctttcacaatttctgcaatgttgaatgcygttcttatctttgtgtctctgtaggtaaggtgttttctgccccacctctggtttctttcagagttttcctttatcttttatttcatatagtttgaaaattatatgtccaagtgtaggttgttggcatttattctgcatggtgttctcggagcttcctggatttttggtttggtgtctgacattaatactggaagttctcagacatggtagttgcagaactttcttctatttcttctcctcctggtattctcactactctgtttcaccttttgtagttgtcccacagtcttggatatcatcttctgttcttttcagtgtttcttttctttagtttttgaagtttctgatgataaatcctcaagctcagagactctttactcagctgagtccagtctactaataagccatcagaggtattcttcagttatttaccacattttttatcactacattatgttgaaggttcttacgatgtctgtctttctgattacattacccatctacacttgaatgctgtctacttcattcattagagcccttaacatat

SEQ ID NO: 928228 - DNA, 662 bp, Homo sapiens
tgttaagcttatttttaatttttataatgctgttttaaatgtaattctttttttttttttttgagatggagtcttgctctgtctcccaggctggagtgcagtggcactatctcagctcactgcaacctgcgccttctttattcaagcgattctccaacctcagcctctcaattacctgggatcacaggtgtgcgccagcacrcccagctaattttttggtatttttagtagagacagggtatctccatgttgaccaggcaagtcttgaacttgtgacctcaggtgatctgcccgcctcggcctcccaaactgctgggattgcaggcatgaaccactgcacccagccaaatgtcattcttttcaaaaatttcttttcttttgtgttatctttcttttctttctctctctttctttcctttctttcttttctttgagatggcgtctcactcagtttcctaagctggagcgcagtggcacaatctcagctgactgcaacctccactttccaagttcaagcaattctcctgcctcagcctcccaagtagctgggactacaggtgtctgcctatatgcccagctaatttgtgtatttttaatagagacagagttttactatttatattagagatgggattggcccagctggtcacgaactcctgacc

SEQ ID NO: 928229 - DNA, 617 bp, Homo sapiens
tgaacatttttggaatattttgcagaggattggcattaattcttcttgaaatgtttggtaaaattctccagtgaagttatctggacctggaattttcttttttggggggtttttgattactggttgaatcttcttactagttacaggtctctttggattttttatttctccgtgattcagtatggtggtttgtgtttctaggaatttataaatttattctaggttgcccagttttgtggcatacggttgctcacattagtctcttttaatctttttcatttctgtggcatctgttgtactgtcacctcttttatttamgattttagtatttgagatttctctttttttcttaatatagctgtgagttttaaaattgttattgatctttaaaaaaaactcagtgtgtttttttttccttttttttctggtattattctgcttatctctgctctaatctgttattttcttccttttgcttggtttgtcattagttttttttttcccccccttcaggtgtaatgttaggttattgatttgagatctttcttctttttaatttaagcacctgcagctataagcttccctttagcatgggtttgagatctttcttcttttta

SEQ ID NO: 928230 - DNA, 617 bp, Homo sapiens
tgaacatttttggaatattttgcagaggattggcattaattcttcttgaaatgtttggtaaaattctccagtgaagttatctggacctggaattttcttttttggggggtttttgattactggttgaatcttcttactagttacaggtctctttggattttttatttctccgtgattcagtatggtggtttgtgtttctaggaatttataaatttattctaggttgcccagttttgtggcatacggttgctcacattagtctcttttaatctttttcatttctgtggcatctgttgtactgtcacctcttttatttacgattttagyatttgagatttctctttttttcttaatatagctgtgagttttaaaattgttattgatctttaaaaaaaactcagtgtgtttttttttccttttttttctggtattattctgcttatctctgctctaatctgttattttcttccttttgcttggtttgtcattagttttttttttcccccccttcaggtgtaatgttaggttattgatttgagatctttcttctttttaatttaagcacctgcagctataagcttccctttagcatgggtttgagatctttcttcttttta

SEQ ID NO: 928231 - DNA, 617 bp, Homo sapiens
tgaacatttttggaatattttgcagaggattggcattaattcttcttgaaatgtttggtaaaattctccagtgaagttatctggacctggaattttcttttttggggggtttttgattactggttgaatcttcttactagttacaggtctctttggattttttatttctccgtgattcagtatggtggtttgtgtttctaggaatttataaatttattctaggttgcccagttttgtggcatacggttgctcacattagtctcttttaatctttttcatttctgtggcatctgttgtactgtcacctcttttatttacgattttagtatttgagatttctctttttttcttaatatagctgtgagttttaaaattkttattgatctttaaaaaaaactcagtgtgtttttttttccttttttttctggtattattctgcttatctctgctctaatctgttattttcttccttttgcttggtttgtcattagttttttttttcccccccttcaggtgtaatgttaggttattgatttgagatctttcttctttttaatttaagcacctgcagctataagcttccctttagcatgggtttgagatctttcttcttttta

SEQ ID NO: 928232 - DNA, 625 bp, Homo sapiens
gcatgggtttgagatctttcttctttttaatttaagcatctgcagctgtaagcttccctttagcatgggtttgagatcttttttctttttaatttaagcatctgcagctgtaagcttccttttagcacgggtatgaggtctttcttctttttaatttaagcatctgcagctgtaagcttccctttagcactgcctttgttgcctcctcctgagtttgggtatgtcatggttttcttttcgtttgcttaaacattttttgtcctattgtaatataattgcattgtttttaataaaggtaattaatgaaacacataatgaattttgcttctgtttttataatattttaagtattcttaactcagaaatgtaaattttagaaaaaaattccaggccaggcacagtggctcacacctttaatcccagcacttggggaggccgaggcgggtggatcatctgaggtcaggagttggakaccagcctggccaacatggtgaaaccctgtctttactaaaaatagaaaatatatatataaaagttagctgggtgtcgtggcgggtgcctgtaatcccagctactctggaggctgaggcaggataatcacttgaatctgggaggcggaggttgc

SEQ ID NO: 928233 - DNA, 591 bp, Homo sapiens
gtctgtcccattggttggttgatttccatttccttaaggggcccatacctcacaccgcacacacacaaacacacacacacacacacacgcacacgcacacacgcacacacactccttccttctgcgagttagaacattagtgggggcccctgggagctgcaggtttcctaatcatgtctgcacctaagaacagtagggtsttgtctggctcttcttatgaacggtcccccagcacggacaccccaaggtccatgcgagcctcacccagcttctccctctcccctctcagaaactcaggcttaaggggaagctcctcaccagggatccggaactaccattcaccatcccctagggcttcaccacactcacctctgtcatcaccagaatcccacaagctcccatttccctgtcctcaccgtgatgggcaatcaatgaagccattgggctctgccgtgtcctcctctgaggactcctcagagtccccacgttcatcaataatataccacatgttcttactgccatcacccagcagctcacccccagctctcgggggttctcctgtgtctcccagctactctccaaacaacccca

SEQ ID NO: 928234 - DNA, 670 bp, Homo sapiens
agggtcagggggaggtcttgttacaacacagatctgcggatctccggggtttgattgtggcaaggatgctgctggtgtcaaaaccacaacgtgggaagcacagaaccactagttggttttcagtgtttcagtgcatacaattcctaataaatctggccaagaaaacctgtaagttcttagattgtcccaaaggtggcgcatgaaatcaaagcaggagaacagtttcctacgaggtgtagcctgggaaagttgggggtgactgatggaaaggaggagtgaagctccgccctttccgctgctaggctgcgcccgaggctatttaaacccaccctggctggcctgtactcagatcttcgcggagcggatcagcggccggagcgtttggcggactctgcgtggacttggagctcacagcgtcttgcgacttgraagcggattcagaggacaggacacaacacttgggcaagtgaatctctgtctgtctgtctgtctgtctgtcccattggttggttgatttccatttccttaaggggcacatagctcacaccgcacacacacaaacacacacacacacacacacacgcacacgcacacacgcacacacactccttccttctgcgagttagaacatcagtaggggcccctgggagctgcaggtttcctaatcatg

SEQ ID NO: 928235 - DNA, 597 bp, Homo sapiens
ggaacctcctgctggcccacgtggttgccacagcccatgctggcacgacgctccagcaggtcggcgtccctgcgggccacactaccggtgacatggctagcatgaccctcctccctggcagtgacactgttgatgtgaaccccagtttcacatctgtcatttgtcaatgggaccattttcccttttcgctctcccttccattcacagggcttttcattctctctgtttctgcctccgtttcagatatttactcacctttttctctctcactatgtctgccgtggtctccatgagactgcgccacrtaacattcccccattaaaggtcatgaattcagtggcttttagtatacctgtggttgtgcacattcaattttaattcgcaatccattgtaaaacgtcttatcacccccgaccagagaaaaacgctgtagacattagtcactcctccttctgtctcaaaccctctccctgaccctcagccctaggtagcaactacctagtgcgatcaatcccatatgcatagatttccatattgtggacatttcctataaacggaattgcacaataggtgagctgctatgactgacataacacg

SEQ ID NO: 928236 - DNA, 597 bp, Homo sapiens
ggaacctcctgctggcccacgtggttgccacagcccatgctggcacgacgctccagcaggtcggcgtccctgcgggccacactaccggtgacatggctagcatgaccctcctccctggcagtgacactgttgatgtgaaccccagtttcacatctgtcatttgtcaatgggaccattttcccttttcgctctcccttccattcacagggcttttcattctctctgtttctgcctccgtttcagatatttactcacctttttctctctcactatgtctgccgtggtctccatgagactgcgccacataasattcccccattaaaggtcatgaattcagtggcttttagtatacctgtggttgtgcacattcaattttaattcgcaatccattgtaaaacgtcttatcacccccgaccagagaaaaacgctgtagacattagtcactcctccttctgtctcaaaccctctccctgaccctcagccctaggtagcaactacctagtgcgatcaatcccatatgcatagatttccatattgtggacatttcctataaacggaattgcacaataggtgagctgctatgactgacataacacg

SEQ ID NO: 928237 - DNA, 631 bp, Homo sapiens
aacctcctgctggcccacgtggttgccacagcccatgctggcacgacgctccagcaggtcggcgtccctgcgggccacactaccggtgacatggctagcatgaccctcctccctggcagtgacactgttgatgtgaaccccagtttcacatctgtcatttgtcaatgggaccattttcccttttcgctctcccttccattcacagggcttttcattctctctgtttctgcctccgtttcagatatttactcacctttttctctctcactatgtctgccgtggtctccatgagactgcgccacataacattcccccattaaaggtcatgaattsagtggcttttagtatacctgtggttgtgcacattcaattttaattcgcaatccattgtaaaacgtcttatcacccccgaccagagaaaaacgctgtagacattagtcactcctccttctgtctcaaaccctctccctgaccctcagccctaggtagcaactacctagtgcgatcaatcccatatgcatagatttccatattgtggacatttcctataaacggaattgcacaataggtgagctgctatgactgacataacacgtagcacaatattttcaagattcatccacattgtagg

SEQ ID NO: 928238 - DNA, 547 bp, Homo sapiens
gccacagcccatgctggcacgacgctccagcaggtcggcgtccctgcgggccacactaccggtgacatggctagcatgaccctcctccctggcagtgacactgttgatgtgaaccccagtttcacatctgtcatttgtcaatgggaccattttcccttttcgctctcccttccattcacagggcttttcattctctctgtttctgcctccgtttcagatatttactcacctttttctctctcactatgtctgccgtggtctccatgagactgcgccacataacattcccccattaaaggtcatgaattcagtggcttttagtatacctgtggttgtgcacattcaattttaattcgcaatccattgtaaaacgtcttatcasccccgaccagagaaaaacgctgtagacattagtcactcctccttctgtctcaaaccctctccctgaccctcagccctaggtagcaactacctagtgcgatcaatcccatatgcatagatttccatattgtggacatttcctataaacggaattgcacaataggtg

SEQ ID NO: 928239 - DNA, 569 bp, Homo sapiens
ggagtatagggtcgcatacwcataaacccagtgtaactcagaaacgaatctaatattccattaaacccatcataacgttgaaaaatcataaatcaaaccatcataagtcacggtttgtctgtggatatgggcgtcatcaattccgttgtattcagtaatgccgtacaccattaacaatggcagactgattgggagttgatattgatagcattataaaagtcagttattagagggatacttctttaacctgactgaagaactgatctgatggctttagtacagtgcatgattacgtgagatgttttgagacagagtagtacatttgtgaatgaaattttatggcttttttttcacttagtaggaaccattgtgtgtggaaaagtgagaaaattgctttctgctgtagggtctggcattcattgtagatttaagcttatttttctgtgagcaaatcttattcaataaaatactactctttatactaaaaaacaaaaacagtggtgatgtgtggtcattatcgtcagcaaactaatccagggaaagaaaaccaaacgccaccttctcactta

SEQ ID NO: 928240 - DNA, 592 bp, Homo sapiens
gtactagagatcaggagtttgagaccagcctggccaacatggtgaaaccctctctctactaaaaataacaaaaaatagctgggtttggtggcatatgcctgtaattccagctactcaggaggctgagacaggaatcgcttgatcccaggaggcagaggttgcagtgrgccgttatcacgccactgcactccagcctcagtgacagagtgagactccgtctaaaaaagaaaaaagaaaaggtgtggcatctctcccctccctctgttgcccctgctctcaccatgtgatgtgcctgctccaacgtcaaattctgccatgaataaatgtttcctgaggctctcaccagaagcagatgtcagaaccatgcatcctatcagacctgtagaaccatgagccaattaaacctctttcctttataaatagctcagcctcaggcatttctttacagcaacatacaaatgttctagcagagtctttacctccctgcatatgcacatggtttactatggcacacatatttctattcaatgctctattcccaaacaagagtattttctttcttttagagagactctgtttcctgtgcaggttg

SEQ ID NO: 928241 - DNA, 585 bp, Homo sapiens
tgggattgctgggtcacagggtaattctcaagttctttgagaaatcaccaaactgctttccataatggctgaactaatttacatacccagcagtagtgtataagcattccctttcctctgtaactttgccagcatctattttttggctttttattaatagctattctgactggtatgakatggtatctcattgtagttttgatttgcatttctctagtattagtgatgttgagcattttttcatgtttgttagctgtgtgtatgtcttttgagaagtgtctgttcctgtcctttgccccctcctttttttttagtgaggttgttttttgcttgtaaatttgtttcagttccttatagattctggatactagaaccttgtcagatgcataatctgtaaatattttttcccattctgtaggctgtctgttcaatctgttgatagtttcttttgctgtgcagaagctctttaattaggttccacttgtctgtttttgtttttgttgcaattgcttttggcatcttcatcatgaaatcttcataaggtcctatgtcagaatggtatttcctagcttatcttccagggat

SEQ ID NO: 928242 - DNA, 600 bp, Homo sapiens
gctttgcaggattacaaagtccaggacccctgaggtacatcggctagttgctatcagtgtggcaggcaagggcattttaaggagtgcccaaacagcaagaggaagccaccttgaccctgtccagcctgtggtggagaccactggagatcaaactgaccccggaggtagaggtcaccaggttcggaaccagtttcacagatattccagcaggacggatggatcccagggctcaaacccccggcttcagtagctcaaactgccattacagcacaagagccctgggtgattctgtaaattgaaggaagtaaagtagacctccttctaagctctacagctagtctctgtctctctctcttcacttctctaatccaggcctcccctcttcccatagcaccataaggygcatctcaggaaaaactctaatccaacatttttctcaacctcttagttacagttaggagaacctactgtttacacatgcctccaggccattgtcaccatggctctactagtcagaaaagcctctaaattagccctaggaaataactatttatacccaacataatgtggcaaaattactgtactctagggggagccctt

SEQ ID NO: 928243 - DNA, 554 bp, Homo sapiens
ttcaaaatggaagttttatttctgtatttctaaattcactaagccaacgatacaaatatctcaaaaatattttgtaattttcattccttcaggtattgccaataaaatcaaatgtgctgatcatctgggtgtagcataatacctagtttggtcccatatttttagytaaaaacatactaacaaagcaaacacaaatgttttgtatctcaaataaaaaatcaaacagcaattatttgatatatgcctaattagagtccattagttgttcatgtaacaagtatttttatacacacatattcaaaggtttcttaaatgggcgtgttcctgtgtaagttggcaataaagaagaatgcagttgtagtgtggttattagccagcatttttattgaaaacaatgggctacttgtttttatttgaaattttcatgcaacaatattttcttaggtagttcagacactctagattttcaaacgtttacaaagtgctgattttcatttactctgggaattttctttctttttctttttttttttttttttttgagacggagtctt

SEQ ID NO: 928244 - DNA, 554 bp, Homo sapiens
ttcaaaatggaagttttatttctgtatttctaaattcactaagccaacgatacaaatatctcaaaaatattttgtaattttcattccttcaggtattgccaataaaatcaaatgtgctgatcatctgggtgtagcataatacctagtttggtcccatatttttagtyaaaaacatactaacaaagcaaacacaaatgttttgtatctcaaataaaaaatcaaacagcaattatttgatatatgcctaattagagtccattagttgttcatgtaacaagtatttttatacacacatattcaaaggtttcttaaatgggcgtgttcctgtgtaagttggcaataaagaagaatgcagttgtagtgtggttattagccagcatttttattgaaaacaatgggctacttgtttttatttgaaattttcatgcaacaatattttcttaggtagttcagacactctagattttcaaacgtttacaaagtgctgattttcatttactctgggaattttctttctttttctttttttttttttttttttgagacggagtctt

SEQ ID NO: 928245 - DNA, 632 bp, Homo sapiens
tttactgttatcattctatttctcacagggtgttagatagctatagctatcccctctttggtaggaattctgtaacttgaaaattaatatattggtctccatttaaacttaaggctaactggtttctacatcattttagtaaaatagaagtcttttttgaaggtgaagaaaaattttattttgaaaaaaatacattcaatgtcaattataagattgaatattatgtaataaaaatagtcataaatttttaaaattaaaaaagaaactgaacaaacagaaagcttctttgttttcagaagtcgatggaaactacttcactattttaatcattcatactcaattttatacacagaatctcaaattgtaccatttggaagcayttaatattttaatcactgttgcgggagtcagggaccccaaatggagggacccactgaagccatggcagaagaatgtggattgtgaagatttcatggatatttattagtaccccaaattaatacttttataatttcttatgcctgtctttaccgcaatctctaaacataaattatggagatttcatggacacttatcacttccccaatcaatacccttgtgatttcctatgcctgtctttactttaatctctt

SEQ ID NO: 928246 - DNA, 872 bp, Homo sapiens
taaagacacaggaattgttggagttacaattcaagatgagatttgggtgaggacacagccaaagcatatcatttagctcctggcccctcccaaatctcatatcctcacatttccaaatcaatcatgccttctcaacagtccccaaaggtcttaactcatttcagcattaactcaaaagttcacagtccaaagtcttatctgagacaaggcaagtcccttccacctatgagcctgtaaaatcaaaagcaagttggttacttcctagatacaatggggacacaggcattgggtaaatgcagccattccaagtgggagaaattggccaaaacaaggggctacaagcccaatgcaagtctgaaacccagtagggtagtcaaatcttaaagtcccaaaatgatctcctttgactccatgtcttacatctgaatcatgctgatccaagaggtgggttcctatggtgtttggcagctctgccactgtgccttttcagggtatagtctcctccctggctgctttcatgggttggtgctatctgcagcttttccaggtgcacagtgcaagytgtcagtagatctaccattctgggatctggaggacagtggccttcttctcacagctccactaggtggtgttccagtagggactggtgtgggggctccaactccacatttcccttccacactgccctagcagaggtactccatgagggtcctgcccctgcagcaaacttcttcctggacttccaggcattcccatacatcctcttaaatctaggcagaggttcctaaaccccagttcttgacttcagtgtacttgcaggctcaactctatgtggaaactgccaaggcttggggcttgcaccctctgaagcc

SEQ ID NO: 928247 - DNA, 751 bp, Homo sapiens
aaaataaatgagtctgaagtgagatgaacttggagtgcacaaggaatagtaaggaggtgtatgtatctggagtgaggggagagctgtgggaactgagagagcaggaacagcctaggccagcacatgtggaggtgtgcaggtcatgcagctttggattttattctaagcacgatgagaggacaggagagcaggggagaatcataacctgacttagcttgtaagtttgcctgtgggtgctgtaatgagtgtggactggatggggcaagtgtagcaggaagggagttcaattaggagactcttgattgttatccagcattctaaataagagaagacagcttggactakgttgaaaggggtgaagtaattggtcacatataggatatatttgaaagtcagagttcattctattttctgatgacttggaagtagggtgggaaagagagaagccaggatgggcaactaaatgcatggtggtgccagacaatgacatgggaaaagtgtggtaaagaaggttgggagggatcaagagttgggttttcttagacataagttttagatgccaaatagccatccaagtcaagatgtcaggtttttaggtatgtgagtttgaatttagggacagtttggattggcggcatgtggtaggcagattttagttactccccgaagatgtccacatcctaattcccagagtctgtatgtcatgttacatggcaaggggcgattaaggtagcagacggaactgaagctg

SEQ ID NO: 928248 - DNA, 751 bp, Homo sapiens
aaaataaatgagtctgaagtgagatgaacttggagtgcacaaggaatagtaaggaggtgtatgtatctggagtgaggggagagctgtgggaactgagagagcaggaacagcctaggccagcacatgtggaggtgtgcaggtcatgcagctttggattttattctaagcacgatgagaggacaggagagcaggggagaatcataacctgacttagcttgtaagtttgcctgtgggtgctgtaatgagtgtggactggatggggcaagtgtagcaggaagggagttcaattaggagactcttgattgttatccagcattctaaataagagaagacagcttggactatgttgaaaggggtgaagtaattggtcacatataggatatatttgaaagtcagagttcattctattttctgatgacttggaagtagggtgggaaagagagaagccaggatgggcaactaaatgcatggtggtgccagacaatgacatgggaaaagtgtggtaaagaaggttgggagggatcaagagttgggttttcttagacataagttttagatgccaaatagccatccaagtcaagatgtcaggtttttaggtatgtgagtytgaatttagggacagtttggattggcggcatgtggtaggcagattttagttactccccgaagatgtccacatcctaattcccagagtctgtatgtcatgttacatggcaaggggcgattaaggtagcagacggaactgaagctg

SEQ ID NO: 928249 - DNA, 598 bp, Homo sapiens
gatggatagatagacagacagatggctagataaatgatggatagatggatgatagatgatggatggatggatggttgaatggatggatggatgcatggatgcatagataataaatagatggatagataaataatagatgggtagatggatggacggatggatagataaatggacacatagataatagatgaatggatggatggatggatggatggatggatggataatacatagatgacagattatggataggtagatggatggatgaatagacagataaatgatagatagatagatagatagatacatagatacatagatacatagataatgaggagttggctcatgcaattatagaggctggcaagtcccgaaaactgcagttgtcaagccgaagacccaggagagccagcaaagtacttccattctgaaggtrtgaggaccaggagagacaatatttcattctgagtccaaaggcagggaaaaaactgatgtcccaggcaatcagacaggaggaattccctcttactctggggagagtcagcccttttgttctgttcaggttttcagttgattggatgacattcacccacattgt

SEQ ID NO: 928250 - DNA, 641 bp, Homo sapiens
cattgcaaccactcacatcatctctccgagactcagaggcaccatatagaagactgaaatatgacttcccattgtgcagggaggaaagaggcatgaaaaacaagccagcacaacttctcatgctccaggagcagcctcctccactgcaattctgctaacgaagggcattaagaaaggcatagtcatggacaagggaaaagagaaggggtatttttccttttggcttgaaagatattgttatgtgatttttgkgagcagtgaggtgacctcccgaaagcgttttgttgtagttggcataagaataaaaataacacgtgactgttaacaatatactcactatgtgccgggcactggaccaggttccacgcagaccttattccaaatcccaatccaaaccctgaggtggtgattaaggttctcattttgcaccagtgtcagagcagacacttttgaacctctgcagccagaaagtgtgtttgcatcaacttgctcttcaaccacagatagaaggcagcaactcagcaggatcctgtttggaacattctgtagctccccactcagatgcccatcacttgtgagccaactcaacctaatcttggtttcagaatggaaaaaaaaatacaagtttcacaactggatga

SEQ ID NO: 928251 - DNA, 418 bp, Homo sapiens
aatacatttcataataaataaatttcataataaatgttatttatgaaataacataaaacgaaccaacaaaaatagtctatgaaataaaattaaaaagaaattaaaaatttaattaaaaaattaaagagacattaaaaggagttgaaattgtctcaataacagcaaatgggggccagatgyggtggcttatgcctgtaatcccagcactttgggaggccgaggtgggcggatcacctgaggtcaggagttcaagaccagcctggccaacatgaggaaaccccatctctacaaaaaatacaaaaattagcagagcatggtggtgggtgcctgtagtcctagctactcaggaggctgaggcaggagaattgcttgaacctgggaggaagaggttgcagtgagccaagatcacaccactgca

SEQ ID NO: 928252 - DNA, 740 bp, Homo sapiens
caccattgtcctgaggctgcacagagcagggggtcctgggcctggcccacaaaactatttttccctcctaggcctccagacctgtaatgagaggggctgccatgtaggtctttgacttgccctgaagacatttttcctattgtcttagtgattaacatttgcctgctygttacttatgcaaatttatgcagtcagcttaaatttctctccagaaaatgggcttttattttctataacatcatcaggctgcaaattttccaaacttttatgttctgcttttgttttaatgctttaccacttccgccagaaaccctaaatcatctctctcaagttcaaaattccacagctccctagggcagagacaaaatgccatcagtctctttgctaaagcatagcaagagtgacctttgctccatttcccaccaagttcttcatctccatcagagaccacctttgcctggatgtaattgtttatatcgttatcagcattttcgtcaaaaccattcaacaagtctccagtaagttccaaactttcccacatttttctgccttcttccaagctctccaaactgttctaacctcttcctgttacccagtttcaaagtcacttccacattttggggtatccttacagcagtgtcacactaccttcgtaccaacttactatattagttcattctcatggtgctattaagactgggtgatttataaaggaagggggcttaattgactcacccttc

SEQ ID NO: 928253 - DNA, 688 bp, Homo sapiens
attgtcctgaggctgcacagagcagggggtcctgggcctggcccacaaaactatttttccctcctaggcctccagacctgtaatgagaggggctgccatgtaggtctttgacttgccctgaagacatttttcctattgtcttagtgattaacatttgcctgctcgttacttaygcaaatttatgcagtcagcttaaatttctctccagaaaatgggcttttattttctataacatcatcaggctgcaaattttccaaacttttatgttctgcttttgttttaatgctttaccacttccgccagaaaccctaaatcatctctctcaagttcaaaattccacagctccctagggcagagacaaaatgccatcagtctctttgctaaagcatagcaagagtgacctttgctccatttcccaccaagttcttcatctccatcagagaccacctttgcctggatgtaattgtttatatcgttatcagcattttcgtcaaaaccattcaacaagtctccagtaagttccaaactttcccacatttttctgccttcttccaagctctccaaactgttctaacctcttcctgttacccagtttcaaagtcacttccacattttggggtatccttacagcagtgtcacactaccttcgtaccaacttactatattagttcattctcatggtgctatt

SEQ ID NO: 928254 - DNA, 740 bp, Homo sapiens
caccattgtcctgaggctgcacagagcagggggtcctgggcctggcccacaaaactatttttccctcctaggcctccagacctgtaatgagaggggctgccatgtaggtctttgacttgccctgaagacatttttcctattgtcttagtgattaacatttgcctgctcgttacttatgcaaatttatgcagtcagcttaaatttctctccagaaaatgggcttttattttctataacatcatcaggctgcaaattttccaaacttttatgttctgcttttgttttaatgctttaccacttccgccagaaaccctaaatcatctctctcaagttcaaaattccacagctccctagggcagagacaaaatgccatcagtctctttgctaaagcatagcaagagtgacctttgctccatttcccamcaagttcttcatctccatcagagaccacctttgcctggatgtaattgtttatatcgttatcagcattttcgtcaaaaccattcaacaagtctccagtaagttccaaactttcccacatttttctgccttcttccaagctctccaaactgttctaacctcttcctgttacccagtttcaaagtcacttccacattttggggtatccttacagcagtgtcacactaccttcgtaccaacttactatattagttcattctcatggtgctattaagactgggtgatttataaaggaagggggcttaattgactcacccttc

SEQ ID NO: 928255 - DNA, 743 bp, Homo sapiens
gaggatgtatgtcgcctcaggaccctgtgatgattgcgttaactgcacaaattatttgtagagcatatttgttagaataatatgaaatctgggcaccttgaaaaaagaacaggataacagcaatgttcagggaacaagagagataaccttaaactctgactgctggtgagctgggtggaacagagtcatatttctcttctttcaaaagcaaatgggagaaatatgactgaattctttttctcagcaaggaacatccctgagaaagagaatgtgtccttgagggtaggcctctaaaagggcccccttgggtgcagccgtcttttatggtcgagctgtagggatgaaataagccccagtctctggtagtgctcccaggcttattaggaagaggaaattcccgcctaataaatttttggtcagaccggttgtctgctcaaaccctgtctcctgataaratgttatcaatgacaatggtgcccaaaacttcattagcaattttaattttgcccaggtactgtggtcctgtgatctcgctctgcctccatttgccttgtgatattctattaccttgtgaagcacgtgatctctgtgacccacaccctattcataggcttcctccccttttgaaaatcactaataaaaacttgctggttttacggcttgtgggacatcacggaacctactgacatgtgatgtctcccccggatgcccagctttaaaatttctctcttttgtactctgtc

SEQ ID NO: 928256 - DNA, 640 bp, Homo sapiens
tctttgttaagtctcccacaattaccattgttcctggcccagacttcaatctagcctcccatattattcctgataccacacctgaccctcatgactatatctctctgatccacctgatgttcaccccatttccctacattccttcttccctgtttttcaccctgatcacacttggtttattgatggcagttccaccaggcctaatcgccacacaccagcaaaggcaggctatgctatagtacaagccactagcccgccttttagaacctctcatttcctttccattgtggaaatctatcctcaaggaaataacttcttagtgttccatctgmtattctactactcctcaaggattattcaggccccctcccttccctacacatcaagctcagggatttgcccccacccaggactggcaaattagctttactcaacatggcccgagtcaaaaaactaaaatacctcttagtctaagtagacactttcactagataagtagaagcctttcctgcagggtctgagaaggccaccgcagtcatttcttcccttctgtcagacacaattactcagtttagccttcctacctctatgcagtccgatagcagaccagcctttattagtcaaattaggcaagcagctt

SEQ ID NO: 928257 - DNA, 669 bp, Homo sapiens
ccccctcccttccctacacatcaagctcagggatttgcccccacccaggactggcaaattagctttactcaacatggcccgagtcaaaaaactaaaatacctcttagtctaagtagacactttcactagataagtagaagcctttcctgcagggtctgagaaggccaccgcagtcatttcttcccttctgtcagacacaattactcagtttagccttcctacctctatgcagtccgatagcagaccagcctttattagtcaaattaggcaagcagcttttcaggctcttagtattcagtgaaacctttatatcccttacagtcctcagtcttyaggaaaggtaaaacagactaataatcttttaaaaacacacctcaccaggctcagccaccaacttaaaaaggactggacaatacttttacctctttcttttctcagaatacaggcctgtccttagaatgctacaaggtacagctcatttaagctcctgtatggacgttcctttttattaagccccagtctcattccagacaccagaccaacttagactgtgccccaaaaacttgtcatccccactatcttctgtctagtcatactcctattcaccattctcaactactcatacatgctctgctcttgtttacactgccagtttactctgtttctcca

SEQ ID NO: 928258 - DNA, 627 bp, Homo sapiens
ctcagggatttgcccccacccaggactggcaaattagctttactcaacatggcccgagtcaaaaaactaaaatacctcttagtctaagtagacactttcactagataagtagaagcctttcctgcagggtctgagaaggccaccgcagtcatttcttcccttctgtcagacacaattactcagtttagccttcctacctctatgcagtccgatagcagaccagcctttattagtcaaattaggcaagcagcttttcaggctcttagtattcagtgaaacctttatatcccttacagtcctcagtctttaggaaaggtaaaacagactaataatcttttaaaaacacacctcaccaggctcagccaccaacttaaaaaggactggacaatacttttacctctttcttttctcagaatacaggcctgtccttagaatgctacaaggtacagctcatttaagctcctgtatggaygttcctttttattaagccccagtctcattccagacaccagaccaacttagactgtgccccaaaaacttgtcatccccactatcttctgtctagtcatactcctattcaccattctcaactactcatacatgctctgctcttgtttacactgccag

SEQ ID NO: 928259 - DNA, 740 bp, Homo sapiens
ggtgcagcttcagcagacttaaatgttcttgcctgccagctctgaagagagcagcagatctcccagcacagtgcttgagcactgctaagggacagactgcctcctcaagtgggtccctgaccccccgtgcctcctgactgggagacaacttccagcagggggcgatagacaccttatacagcagagctgtggctggcatctggcaggtgcccctctgggatgaagctgccggagcaaggagcaggcaggaatttttgctgttctgcagcctccgctggtgataaccaggcaaacagggtctggagtggaccttcagcaaactccagcagacctacagaggaggagcctgactgttacaaggaaaactaacaaacagaaagcaatagctttcaacatcaacaaaaaggatgcccacccaaaaactccatccaaaggtcaacaacatcaaagaacaaaggtagacaaatccatgaatatgaggaaaaaccagcacaaaaagsctgagaattcaaaaacacagaatgcctctcctcctccaaagaatcacaactccttgccagcaagggaacaaaactggacagagaatgagtctgatgaactgacagaagtaggcttcagaaggagggtaataacaaactcctctgaactaaaggagcactttctaacccaatacaaggaagctaagaaccttgataaaaggttataggaactgctaactagaacaaccagtttagagaaga

SEQ ID NO: 928260 - DNA, 602 bp, Homo sapiens
ctaaagaagtcctttttttttttttttttttgagacaaagtcttgctttgtcacccaggctggagtgcagtggcatgatctcggttcactgaaacctccacctcccgggttcaagtgattctcctgcctcagcctcccgagtagctgagatcacaggcatgtgccaccacaccaggttaatttttgtatttttagtagagatggggtttcactatgttggtcaggctggtctcgaactcctgacctcaagtgatctgcccacctcggtctcccaaagtgctcggattacaggcgcgagacactatgccgaggcaagaagatcttttgagcatcacattcctcatttgtaaaatgtggatagtagtagwatctatccaaggattacattgagcaatggttatacagtgcttaggcacaggcaaataataagcatgtgctacatggtagctatttttattacaatatatagagagaaacccagttggaaaagattaagaatatcttcacagaaatgttggcatttcaggtggaccttaaagagtaggttatattttgacagcagaaattgagagtggagggacagtagtcctggtagaggaagg

SEQ ID NO: 928261 - DNA, 572 bp, Homo sapiens
gttgttgttcccttgcatttcttgcctttatcctcattcggtcagtggtatgctgccaattcatacgtcccagtattatcccgtaatatttggaaaagttggtatcaactaagagtgcacgagtacaagtcttaactttggagtttgaaaagctgaaaccccaggaataaaatttcttaatttagaagaatatacagctaggcaatttttcttattcctggaaatagacaaagatttcttggattgagggatggaagatgatatcaatagttgaggaggaacaggagagttgaackatgtgtctttgagaacgggatcattactttatctccatgccagactgaaaaaccctggactggggatgaaatcagataaaaaaaaattctggtaattttgggaaatgtgaaaacagagaaattttgccctgtgctccctggatagaacccaagaaagcagcaaaatctcaggttgcttgccctgtggggattgtatttaatcattcacacactgatttgtctgttcaacaggtattttctttttcattgattgatggattgattgagaaagggtgt

SEQ ID NO: 928262 - DNA, 565 bp, Homo sapiens
aaagacataaatccatgcgtataaaatatacattggtttggtcaggaaaggtgggacatcttgagtagtggggctcccagccaggtcatgagtgaattattttctgattgacaattggttgaaagagttaagctatgcctgaagaattgaagtcagtataaatacttgagttaagataaggcaagttctggaagccaagattcttgttatttagatgaagcctccaggtaacaggctttggatcaaatagatgattaatatctcttatcaggcctaaaaatgtgtcagactctctggaaaaggaagttccggatagaatattaaattgataaggaatgaagattctctacagagtgtaaacttcttcctcaagggacagctttgcagggccatttcaaaatatgcaaaataaaayatatctgaggataaaatattcagatttccttcagggctaccatctgtcatgtgatactatactaaactcaggttggaatttgctatcatcttattgctacaaagagtctgttttgtcagtcttatgatctctattttaatgttaatactg

SEQ ID NO: 928263 - DNA, 565 bp, Homo sapiens
aaagacataaatccatgcgtataaaatatacattggtttggtcaggaaaggtgggacatcttgagtagtggggctcccagccaggtcatgagtgaattattttctgattgacaattggttgaaagagttaagctatgcctgaagaattgaagtcagtataaatacttgagttaagataaggcaagttctggaagccaagattcttgttatttagatgaagcctccaggtaacaggctttggatcaaatagatgattaatatctcttatcaggcctaaaaatgtgtcagactctctggaaaaggaagttccggatagaatattaaattgataaggaatgaagattctctacagagtgtaaacttcttcctcaagggacagctttgcagggccatttcaaaatatgcaaaataaaacatatckgaggataaaatattcagatttccttcagggctaccatctgtcatgtgatactatactaaactcaggttggaatttgctatcatcttattgctacaaagagtctgttttgtcagtcttatgatctctattttaatgttaatactg

SEQ ID NO: 928264 - DNA, 700 bp, Homo sapiens
ctccaaaaatttatatccacccagaacctctgagtgtgaccttatttggaaatacggttttatagatataattaagttaaaatgagaacatactggattagggtgaacctaagtccaatgactagtatccttataagacagacacacagagacatgcacagaaaagaaagccatctgaagatggaggcagagatcacagcgatgaagctacaacccaaggaacatcagaaactcagagagtggcaagaaagaattcttctctagagcatttagatggagcatggctctgtcaacaccttgatttttgaacatctaacctcccaagctgtgagagaataaatgtctgttgttataacccacctagtttgtcayattttttgtggcagccctatgagtgccctgaaaactatcagttatctcaattaacaaaattctattgtattagtcagcttgaactgtcataacaaaatactacagactggatggcttaaacaatgggaatttttctctcacagttctggaggctgggaagtccaaaatcaaggtgcaagacaattcatttctctgatgacggtgttcttcctggcacatagctggctcccacacaaaggcctcagagttgtcagcaatatcctcatcattgatgtccatgccataccatgtgcctctctgggcatgctatgcccacagcttgttgaga

SEQ ID NO: 928265 - DNA, 531 bp, Homo sapiens
cagtcagagcttcttggtggtaaggccggcattaccacctggatctgttgactctggctccaggggacattctgtgactcgggagaacccgagttgagaccgacttcatccagggtgcactgggaatctgcctgtgtatcccayagatgtttcaggcttaccatgttttaaattcaaccccgatctcccatcttacaccaagcccactctacctgcagccttccccacctcagttacagcaatgccattctttttttttttatgtgtttttgataaatctattctcccccagctttattgagctataactgacaaatacaattatataaattttaggggtacaatgtgatgatttgataagtttatatattgtgaaatgattaccataatcaagtgagttaagatgtcccttgccttctgtggttatgtgaaaggaaaataaaatctctgggacctcaaaccccctatggcaaagggaaaaagttaagtttgggagctgagtcatgcaaaaaacaacaatgacaacaaaaa

SEQ ID NO: 928266 - DNA, 613 bp, Homo sapiens
aggctctggctcctctaagtctaggggaggaacaaagaacctgattgctttgcttgtacttctagcacactgcagccaccgtaaggagagaagaccagactatgttccctgtgagcccttgtgcccccactctttaccaggcagagcaccccctggcttgggggacccatagtgtagcctctacacccttggttgattactcccatcagccatggttccatgtttctctasgctggagaccccagaggcaactgacaaattctctgacattgcttccacagtggtccctactcctactgcccccaagctggggagggaaaaaaaggctgagctactcccaaggctgtggtggtagcctggaattgccaagctgaggtttgtgaatggcacttaagcagaagaggagctgcactgtaagagcactgggaaagctgagtctcaggattgtgtggtctgccatgggagtggggcatgccttcctctcagggctggcccagaaaatgcctgtgcctgaggaagtgctgtgggccaaatacttgacaaaataaatgaaggtacagtggcagtgattggagggggctcctccattgtccaggagctgacttggtgaggg

SEQ ID NO: 928267 - DNA, 613 bp, Homo sapiens
aggctctggctcctctaagtctaggggaggaacaaagaacctgattgctttgcttgtacttctagcacactgcagccaccgtaaggagagaagaccagactatgttccctgtgagcccttgtgcccccactctttaccaggcagagcaccccctggcttgggggacccatagtgtagcctctacacccttggttgattactcccatcagccatggttccatgtttctctagrctggagaccccagaggcaactgacaaattctctgacattgcttccacagtggtccctactcctactgcccccaagctggggagggaaaaaaaggctgagctactcccaaggctgtggtggtagcctggaattgccaagctgaggtttgtgaatggcacttaagcagaagaggagctgcactgtaagagcactgggaaagctgagtctcaggattgtgtggtctgccatgggagtggggcatgccttcctctcagggctggcccagaaaatgcctgtgcctgaggaagtgctgtgggccaaatacttgacaaaataaatgaaggtacagtggcagtgattggagggggctcctccattgtccaggagctgacttggtgaggg

SEQ ID NO: 928268 - DNA, 613 bp, Homo sapiens
aggctctggctcctctaagtctaggggaggaacaaagaacctgattgctttgcttgtacttctagcacactgcagccaccgtaaggagagaagaccagactatgttccctgtgagcccttgtgcccccactctttaccaggcagagcaccccctggcttgggggacccatagtgtagcctctacacccttggttgattactcccatcagccatggttccatgtttctctaggctggagaccccagaggcaactgacaaattctctgacattgcttccacagkggtccctactcctactgcccccaagctggggagggaaaaaaaggctgagctactcccaaggctgtggtggtagcctggaattgccaagctgaggtttgtgaatggcacttaagcagaagaggagctgcactgtaagagcactgggaaagctgagtctcaggattgtgtggtctgccatgggagtggggcatgccttcctctcagggctggcccagaaaatgcctgtgcctgaggaagtgctgtgggccaaatacttgacaaaataaatgaaggtacagtggcagtgattggagggggctcctccattgtccaggagctgacttggtgaggg

SEQ ID NO: 928269 - DNA, 636 bp, Homo sapiens
agatggccaaataggaacagctccagtctacagctcccagcgtgagtgacgcagaagatgggtgatttctgcatttccatttgaggtaccggcttcatctcactagggagtgccagacagtgggtgcaggacagtgggtgcagtgcactgtgcacgagccaaagcagggcaaggcattgcctcacttgggaagtgcaaggggtcagggagttccctttcctagtcaaagaaaagggtgacagacggcacctgggaaatcgggtcactcccaccctaatactgcacttttcggacaggcttaaaaaacagcgcaccaggagattatatcccacacmtggcttggagggtcctacacccacagagtctcactgattgctagcacagcagtctgagatcaaactgcaaggcagcagcgaggctgggggaggggcgcccgccattgcccaggcttgattaggtaaacaaagcagccgggaatcttgaactggtggagcccaccacagttcaaggaggcctgcctgcctctgtaggctccacctctgggggcagggcacagacaaacaaaaagacagcagcaacctctgcagacttaaatgtccttgtctgacagctttgaagagagcagtggttctccca

SEQ ID NO: 928270 - DNA, 636 bp, Homo sapiens
agatggccaaataggaacagctccagtctacagctcccagcgtgagtgacgcagaagatgggtgatttctgcatttccatttgaggtaccggcttcatctcactagggagtgccagacagtgggtgcaggacagtgggtgcagtgcactgtgcacgagccaaagcagggcaaggcattgcctcacttgggaagtgcaaggggtcagggagttccctttcctagtcaaagaaaagggtgacagacggcacctgggaaatcgggtcactcccaccctaatactgcacttttcggacaggcttaaaaaacagcgcaccaggagattatatcccacacctggcttggagggtcctacacccacagagtctcactgattgctagcacagcagtctgagatcaaactgcaaggcagcagcgaggctgggggaggggcgcccgccattgcccaggcttgattaggtaaacaaagcagccgggawtcttgaactggtggagcccaccacagttcaaggaggcctgcctgcctctgtaggctccacctctgggggcagggcacagacaaacaaaaagacagcagcaacctctgcagacttaaatgtccttgtctgacagctttgaagagagcagtggttctccca

SEQ ID NO: 928271 - DNA, 636 bp, Homo sapiens
agatggccaaataggaacagctccagtctacagctcccagcgtgagtgacgcagaagatgggtgatttctgcatttccatttgaggtaccggcttcatctcactagggagtgccagacagtgggtgcaggacagtgggtgcagtgcactgtgcacgagccaaagcagggcaaggcattgcctcacttgggaagtgcaaggggtcagggagttccctttcctagtcaaagaaaagggtgacagacggcacctgggaaatcgggtcactcccaccctaatactgcacttttcggacaggcttaaaaaacagcgcaccaggagattatatcccacacctggcttggagggtcctacacccacagagtctcactgattgctagcacagcagtctgagatcaaactgcaaggcagcagcgaggctgggggaggggcgcccgccattgcccaggcttgattaggtaaacaaagcagccgggaatsttgaactggtggagcccaccacagttcaaggaggcctgcctgcctctgtaggctccacctctgggggcagggcacagacaaacaaaaagacagcagcaacctctgcagacttaaatgtccttgtctgacagctttgaagagagcagtggttctccca

SEQ ID NO: 928272 - DNA, 562 bp, Homo sapiens
acagctgaatgtttaaaaatttgattttgtgggcagggctcagtggctcatgcctgtaatcccagcactttgggaggctgaggcaagtggatcacgaggtcagcgtgttcaagacctgcctgaccaatacagtgaaaccccgtcactactaaacatacamaaattagctagatgtggtggtgcatgcctgtagtcccagccactcaggaggctgaggcaggagaattgcttgaactcaggaggtggaggttgcagttagccaagactgcgccactgaactccagcttgggaaacagagtgagactctgtctcaacaacaacaacaacaacaaaatgattttataccagtggacttttgagataatgggtctcagcctgcagtaaagaaataagcaatataggaatcaggtcaggggtgggattacaatctatagcctataataccagcactttgggaagcagagacaggagaatcatttgaagccagaaatttgacactcacctggtcaaaataatgagactttgtttctaaaaaaaaaaaaaaaggagacaatacacaaag

SEQ ID NO: 928273 - DNA, 655 bp, Homo sapiens
ataggtatacatgtgccatgttggtttgctgcacccatcaactcatcatttacattaggtatttctcctaatgctatgattcccctagccccccacctgccgacaggcctctgtgtgtgattttccccaccctgtgtccaggtgatctcattgttcagttcccacgaatgagtgagaacatgtggtgtttggttttctgtccttgtgatagtttgctcagaatgatggtttccagctttgtccatgttccagcaaaggacatgaactcatcgacgaggcacccttaattgtgataactcaaatggtatcagatctgaaccagaatttgaagagtttccaacagtgacccgatgtcctgaagggaagcacatggacccactttgggaatgcagtgagtcagccatctgactygttagattttgttctgtgtcattcagcaaaagggaaagcatcctgaagaattacaaagtgaagatgggaacacatgcttgatggaatctccatctgttctttgaaagggcttagctaaatctttaaaatacgggggtaaaatgtttcaacagaaggtagaattgaagaggtataaagaaactggtagtcatctcctttaaggatgggaacaccaaggctcagagacaaatctgaagagtttttc

SEQ ID NO: 928274 - DNA, 750 bp, Homo sapiens
tattaatttacctgaggtaattattatgtatatttcaaataaaatagtaattccgttttcctaaaggtaaaaatacattaggtatacattcccgagtcactgcccataaactaggatcagaacaaccagaattataaggatcaaaatactgacgttattcctttaatgccttaaaattagtctttctttgtacatttggcataggacaaaggcgagctcattttggacagatttgttaaactatcaagaggttgtcaggcaattaggcagcaggtcattactaagaccgataccttcaagtatctattaaaaccatcattttgaaactgtgaaatctggaaagtgatcagctacaaagggccaaatatggaatgcagaagatacagaatgtggtggctttgtgtccgggattggtgggttcttggtctcactgacttcaagaatgaagctgcggaccctcgcggtgagtgttamcagctcttaaggtggcacgtctggagtttgttccttctgatgctgcggatgtgttcagagtttcttccttctggtgggttcgtggtctcgctggctcaagagcgaagctgcagaccttcgtggtgagtgttacaactcttaaagcggcgcgtctggagttgttcgttcctccccgtggtctcgctggcttcaggagtgaaactgcagaccttcgcggtgagtgttacggctcataaaagccgtatggtcccaaagagtgagcagtagcaagattta

SEQ ID NO: 928275 - DNA, 592 bp, Homo sapiens
gctcaatgctttcctgaaagcttgtgatgaactcaccgacatccttccagagcaggagcagcaggggctgcaggaagctgttcgaaagctccacaaacaatggaaggtgagtcaggacaggacggagacaccgtgcatcctcaatgaagggagaagcttgagcgtgttaaggtccaaatgtaagagaaatttagaaattcctggaaagtcactgtaactatttcgctcatttaaaaactcaaaaaactggacttaaataaaacctgataatatatgatagaattgkgttattcctatttattatcagcatcaattttatcctattactcgagcattctttttggtttcctgatttttttttaatccagggtgcaagaacatttaacttattctagcaacatttcataagcttctctctgctgaataaatcttgctaggtatacctactgaaatcataaaacatgtatgtatagtttctgccccccaaagattttatcatctagttgagatagctatgatcaaaaaatataaatgaaaacattttgtagtcaagaattcaatgatgaacaaagcatacccctcttccccccaa

SEQ ID NO: 928276 - DNA, 592 bp, Homo sapiens
cacaggaaggggaatatcatactctggggactgttgtggggtggggggacggggagggatagcattgggagatatacctaatgctagatgacgagttagtgggtgcagcgcaccagcatggcacatgtatatatatgtaactaaccygcacaatgtgcacatgtaccctagaacttaaagtacaataaaaaaaaaaaaaaaaagacacagattctgctcttagacagatcacaatctagttgtgtgactctgggaagtttccttaatctctctgaggcttcagtccttccacgacatagtaggaatattattatcaatctcactggattgttatgagaattaaatgggaatatgtatgtaaagatagtgctgtatctgatatcaagttaatgcttaataaatgttttctccctgcacttgtctattctcagtgcaacagaggaactttaagtagcaactatcatcatctgtcatgtgctatttatatgccaactgagtgcaaaaggtctcattcaatattttattcagtttatttaaaaatgactatgtagtaggtgttaatatagtagttattaattgattaacataagta

SEQ ID NO: 928277 - DNA, 592 bp, Homo sapiens
cacaggaaggggaatatcatactctggggactgttgtggggtggggggacggggagggatagcattgggagatatacctaatgctagatgacgagttagtgggtgcagcgcaccagcatggcacatgtatatatatgtaactaacccgcacaatgtgcacatgtaccctagaacttaaagtacaataaaaaaaaaaaaaaaaagacacagattctgctcttagacagatcacaatctagttgtgtgactctgggaagkttccttaatctctctgaggcttcagtccttccacgacatagtaggaatattattatcaatctcactggattgttatgagaattaaatgggaatatgtatgtaaagatagtgctgtatctgatatcaagttaatgcttaataaatgttttctccctgcacttgtctattctcagtgcaacagaggaactttaagtagcaactatcatcatctgtcatgtgctatttatatgccaactgagtgcaaaaggtctcattcaatattttattcagtttatttaaaaatgactatgtagtaggtgttaatatagtagttattaattgattaacataagta

SEQ ID NO: 928278 - DNA, 645 bp, Homo sapiens
aaacaggtgtacctaataaaaatatgcttagtgacttgggataaaccaatagatgttcacaagtgatggagagtcgtgaaagagagatagcggtaaatagttacaataacacaattttcctgcacctgtcgaggatttcccccaaaaaacgcagaatgtgggatgcagctaaggcatatgaaagagagagggcagaaggagtaagagagaaataggaggaaggaaggaaggaagcaaggaagaaaggaaggaaggaaagaaggaaggaaggacggaaggaaggaaggaaggaaggaaggaaggaaggaaggaaagaaggatgaaaggaaggagaaaacaccggtgttactaaaaccccccaaaaaatggtttccccctgtgggtaagcctayaatgtggatgaatcttgaaaatattgtgctacgtgttatgtcagtcatagcagctcacctattgtgcaattccgtttataggaaatgtccacaatatggaaatctatgcatatgggattgatcgcactaggtagttgctacctagggctgagggtcagggagagggtttgagacagaatgaggagtgactaatgtctacagggtctttctctggtcgggggtgataagacgttttacaatggattgcgaatta

SEQ ID NO: 928279 - DNA, 852 bp, Homo sapiens
gtctgggacaaactttcagagccttgtagcattcgtgtggaatcctatgtcaggaaaatatgttgagaacacagcagcagcgttctggagtcctttgtgtgggacaaacattcagactctagtagctgtgttctggaatcccatgtgatcgagaaacatttagacccacgtagcagtgttatggaatcatacctgagggacaaacactcagaactcaacagcagtattctggaatcctaagtgagttgcaaacattcagactacagcaggagtgttctggaatcctatgtgagggagaaacattcagaacacagcagcagtgttctggaatcctacgtgagggacaatcattcagaccacagcagtagtgttctgcaatcctacctgtgggacaaacattcacaccctcgtagcattgttctggtatccaatgtgaggaaaatacattcagaacacagcaggagttttctggagtcctctgtrtgggacaaacattcagaccctaatagctgtgttctgcaatcctatgtgatcgacaagcatttggacccacgtagcagtgttctggaattataactgagggacaaacactcagagcctaacagcagtgttctggaatcccatgtgagggagaaacattcagaacccaggagcaatattccagaatcctatgtgagggacaatcattcagaccaccgatgggatgttctggaatcctacgtgtgggacagacattcagaccctcgtagcattgttctggtatcctatgtgaggaaaatgcatttggaacacagcaggagtgttctggagtcctatgtgtgaggcaaacattcagaacctcatagcagtgtt

SEQ ID NO: 928280 - DNA, 677 bp, Homo sapiens
  misc_feature 675: n = A,T,C or G
tcctgcatatcggacaaacattcaaaccctcatagcattgttctggaatcctaagtgaggaaaatattttcagaaaacagcagatgttttctggagtcctgtgggtgggacaacattcagaccctcgtagcagtgttctggaatcctatgtgagagaaaaacatttagacccacgtagcagtgttctggactagtatgtaagtgagaaatacacagaacccaacarcagtgttctcgaatagtaagtgagggacaaacattcagacaacaggtggagtgttctggaatccgatgggatggggaataattaagacacccgtagcagtgttctggaatcctatgtgaggggcaaacattcaaaccttcatagcagtgttctggaatcctgtgtgacggcacaaacatttataatcaagtcacagtgttctgtgatcaaaggtgacggacaaacactcagaacccaacagcagagctctagaatcctcagtgagcgaccatcattcagaccacagcaggagagttctggaaccctatgtgagggacaaacattcagacactcatagcagtgttctggaatcctatgagagggacaaacatttagacccacgtaccagtgtgctggaatagtacgtgagggacaaacactcagaacacaacagcagtgttctggaatcnta

SEQ ID NO: 928281 - DNA, 677 bp, Homo sapiens
  misc_feature 675: n = A,T,C or G
tcctgcatatcggacaaacattcaaaccctcatagcattgttctggaatcctaagtgaggaaaatattttcagaaaacagcagatgttttctggagtcctgtgggtgggacaacattcagaccctcgtagcagtgttctggaatcctatgtgagagaaaaacatttagacccacgtagcagtgttctggactagtatgtaagtgagaaatacacagaacccaacaacagtgttctcgaatmgtaagtgagggacaaacattcagacaacaggtggagtgttctggaatccgatgggatggggaataattaagacacccgtagcagtgttctggaatcctatgtgaggggcaaacattcaaaccttcatagcagtgttctggaatcctgtgtgacggcacaaacatttataatcaagtcacagtgttctgtgatcaaaggtgacggacaaacactcagaacccaacagcagagctctagaatcctcagtgagcgaccatcattcagaccacagcaggagagttctggaaccctatgtgagggacaaacattcagacactcatagcagtgttctggaatcctatgagagggacaaacatttagacccacgtaccagtgtgctggaatagtacgtgagggacaaacactcagaacacaacagcagtgttctggaatcnta

SEQ ID NO: 928282 - DNA, 656 bp, Homo sapiens
tccgtcctaccttccttctttccttccttccttccttccttccttccttccttccttccttccttccttcctcctgtttctgtcttactccttctgccctctctctttcatatgccttaggtgcatcccacattctgcgttttttgggggaaatcctcgacaggtgcagaaaaattgtgttattgtaactatttaccgctctctctctttcacggctctccatcacttgtgaacatctattggtttatcccaagtcactaagcatatttttattaagtacacctgtttttccttatacagctgcttctggagtatagggtcgcatacwcataaacccagtgtaactcagaaacgaatctaatattccattaaacccatcataacgttgaaaaatcataaatcaaaccatcataagtcacggtttgtctgtggatatgggcgtcatcaattccgttgtattcagtaatgccgtacaccattaacaatggcagactgattgggagttgatattgatagcattataaaagtcagttattagagggatacttctttaacctgactgaagaactgatctgatggctttagtacagtgcatgattacgtgagatgttttgagacagagtagtacatttgtgaatgaaattttatggcttttt

SEQ ID NO: 928283 - DNA, 841 bp, Homo sapiens
aagtttcagttaaatatcttttgtttccctctaaagaatttcatttaacatttcttgcaagacaggtctcctggcaacaagtttcttgaatttttatttttctgaggaaggccttaattctccttcacttttgaagggtggtttcagtgtgtacagaaacttaggttggtggggttttttctgtcaatattttcaatttttcatttcactgtcttcttgctttcacaatttctgcaatgttgaatgcygttcttatctttgtgtctctgtaggtaaggtgttttctgccccacctctggtttctttcagagttttcctttatcttttatttcatatagtttgaaaattatatgtccaagtgtaggttgttggcatttattctgcatggtgttctcggagcttcctggatttttggtttggtgtctgacattaatactggaagttctcagacatggtagttgcagaactttcttctatttcttctcctcctggtattctcactactctgtttcaccttttgtagttgtcccacagtcttggatatcatcttctgttcttttcagtgtttcttttctttagtttttgaagtttctgatgataaatcctcaagctcagagactctttactcagctgagtccagtctactaataagccatcagaggtattcttcagttatttaccacattttttatcactacattatgttgaaggttcttacgatgtctgtctttctgattacattacccatctacacttgaatgctgtctacttcattcattagagcccttaacatattctccagaggtttaaaaaaaatccaaaatcatatttttgtctgctt

SEQ ID NO: 928284 - DNA, 592 bp, Homo sapiens
ggaacctcctgctggcccacgtggttgccacagcccatgctggcacgacgctccagcaggtcggcgtccctgcgggccacactaccggtgacatggctagcatgaccctcctccctggcagtgacactgttgatgtgaaccccagtttcacatctgtcatttgtcaatgggaccattttcccttttcgctctcccttccattcacagggcttttcattctctctgtttctgcctccgtttcagatatttactcacctttttctctctcactatgtctgccgtggtctccatgagactgcgccacrtaacattcccccattaaaggtcatgaattcagtggcttttagtatacctgtggttgtgcacattcaattttaattcgcaatccattgtaaaacgtcttatcacccccgaccagagaaaaacgctgtagacattagtcactcctccttctgtctcaaaccctctccctgaccctcagccctaggtagcaactacctagtgcgatcaatcccatatgcatagatttccatattgtggacatttcctataaacggaattgcacaataggtgagctgctatgactgacata

SEQ ID NO: 928285 - DNA, 592 bp, Homo sapiens
ggaacctcctgctggcccacgtggttgccacagcccatgctggcacgacgctccagcaggtcggcgtccctgcgggccacactaccggtgacatggctagcatgaccctcctccctggcagtgacactgttgatgtgaaccccagtttcacatctgtcatttgtcaatgggaccattttcccttttcgctctcccttccattcacagggcttttcattctctctgtttctgcctccgtttcagatatttactcacctttttctctctcactatgtctgccgtggtctccatgagactgcgccacataasattcccccattaaaggtcatgaattcagtggcttttagtatacctgtggttgtgcacattcaattttaattcgcaatccattgtaaaacgtcttatcacccccgaccagagaaaaacgctgtagacattagtcactcctccttctgtctcaaaccctctccctgaccctcagccctaggtagcaactacctagtgcgatcaatcccatatgcatagatttccatattgtggacatttcctataaacggaattgcacaataggtgagctgctatgactgacata

SEQ ID NO: 928286 - DNA, 624 bp, Homo sapiens
aacctcctgctggcccacgtggttgccacagcccatgctggcacgacgctccagcaggtcggcgtccctgcgggccacactaccggtgacatggctagcatgaccctcctccctggcagtgacactgttgatgtgaaccccagtttcacatctgtcatttgtcaatgggaccattttcccttttcgctctcccttccattcacagggcttttcattctctctgtttctgcctccgtttcagatatttactcacctttttctctctcactatgtctgccgtggtctccatgagactgcgccacataacattcccccattaaaggtcatgaattsagtggcttttagtatacctgtggttgtgcacattcaattttaattcgcaatccattgtaaaacgtcttatcacccccgaccagagaaaaacgctgtagacattagtcactcctccttctgtctcaaaccctctccctgaccctcagccctaggtagcaactacctagtgcgatcaatcccatatgcatagatttccatattgtggacatttcctataaacggaattgcacaataggtgagctgctatgactgacataacacgtagcacaatattttcaagattcatccaca

SEQ ID NO: 928287 - DNA, 554 bp, Homo sapiens
gccacagcccatgctggcacgacgctccagcaggtcggcgtccctgcgggccacactaccggtgacatggctagcatgaccctcctccctggcagtgacactgttgatgtgaaccccagtttcacatctgtcatttgtcaatgggaccattttcccttttcgctctcccttccattcacagggcttttcattctctctgtttctgcctccgtttcagatatttactcacctttttctctctcactatgtctgccgtggtctccatgagactgcgccacataacattcccccattaaaggtcatgaattcagtggcttttagtatacctgtggttgtgcacattcaattttaattcgcaatccattgtaaaacgtcttatcasccccgaccagagaaaaacgctgtagacattagtcactcctccttctgtctcaaaccctctccctgaccctcagccctaggtagcaactacctagtgcgatcaatcccatatgcatagatttccatattgtggacatttcctataaacggaattgcacaataggtgagctgct

SEQ ID NO: 928288 - DNA, 800 bp, Homo sapiens
aataacctaacattacacctgaagggggggaaaaaaaaaactaatgacaaaccaagcaaaaggaagaaaataacagattagagcagagataagcagaataataccagaaaaaaaaggaaaaaaaaacacactgagttttttttaaagatcaataacaattttaaaactcacagctatattaagaaaaaaagagaaatctcaaatactaaaatcgtaaataaaagaggtgacagtacaacagatgccacagaaatgaaaaarattaaaagagactaatgtgagcaaccgtatgccacaaaactgggcaacctagaataaatttataaattcctagaaacacaaaccaccatactgaatcacggagaaataaaaaatccaaagagacctgtaactagtaagaagattcaaccagtaatcaaaaaccccccaaaaaagaaaattccaggtccagataacttcactggagaattttaccaaacatttcaagaagaattaatgccaatcctctgcaaaatattccaaaaatgttcaaaaaccagaaggggacattccaatccattctatcaggtcaacatttatctggttccagagccagatgaacaccttttgtaataaaaagactcaaagaattagtaatatatggaaactcctcagtaaataaagattgtacatgaaaagctcacagctaacatcatactcaatggtgaaaaactaaaatcttttcctctaggatcaggaataagatagcaacatcccttcctgccacttctattcaccaaagcactggaatttctactcag

SEQ ID NO: 928289 - DNA, 800 bp, Homo sapiens
aataacctaacattacacctgaagggggggaaaaaaaaaactaatgacaaaccaagcaaaaggaagaaaataacagattagagcagagataagcagaataataccagaaaaaaaaggaaaaaaaaacacactgagttttttttaaagatcaataacaattttaaaactcacagctatattaagaaaaaaagagaaatctcaaatactaaaatcgtaaataaaagaggtgacagtacaacagatgccacagaaatgaaaaagattamaagagactaatgtgagcaaccgtatgccacaaaactgggcaacctagaataaatttataaattcctagaaacacaaaccaccatactgaatcacggagaaataaaaaatccaaagagacctgtaactagtaagaagattcaaccagtaatcaaaaaccccccaaaaaagaaaattccaggtccagataacttcactggagaattttaccaaacatttcaagaagaattaatgccaatcctctgcaaaatattccaaaaatgttcaaaaaccagaaggggacattccaatccattctatcaggtcaacatttatctggttccagagccagatgaacaccttttgtaataaaaagactcaaagaattagtaatatatggaaactcctcagtaaataaagattgtacatgaaaagctcacagctaacatcatactcaatggtgaaaaactaaaatcttttcctctaggatcaggaataagatagcaacatcccttcctgccacttctattcaccaaagcactggaatttctactcag

SEQ ID NO: 928290 - DNA, 669 bp, Homo sapiens
tagaccacctgaggtcaggagttcgtgaccagctgggccaatcccatctctaatataaatagtaaaactctgtctctattaaaaatacagaaattagctgggcatagtggcagacacctgtagtcccagctacttgggaggctgaggcaggagaattgcttgaacttggaaggtggaggttgcagtcagctgagattgtgccactgcgctccagcttaggaaactgagtgagacgccatctcaaagaaaagaaagaaaggaaagaaagagagagaaagaaaagaaagataaaacaaaagaaaagaaatttttgaaaagaatgacwtttggctgggtgcagtggttcatgcctgcaatcccagcagtttgggaggccgaggcgggcagatcacctgaggtcacaagttcaagacttgcctggtcaacatggagataccctgtctctactaaaaataccaaaaaattagctgggcgtgctggcgcacacctgtgatcccaggtaattgagaggctgaggttggagaatcgcttgaataaagaaggcgcaggttgcagtgagctgagatagtgccactgcactccagcctgggagacagagcaagactccatctcaaaaaaaaaaaaaaagaattacatttaaaacagcattataaaaattaaaaataagct

SEQ ID NO: 928291 - DNA, 669 bp, Homo sapiens
tagaccacctgaggtcaggagttcgtgaccagctgggccaatcccatctctaatataaatagtaaaactctgtctctattaaaaatacagaaattagctgggcatagtggcagacacctgtagtcccagctacttgggaggctgaggcaggagaattgcttgaacttggaaggtggaggttgcagtcagctgagattgtgccactgcgctccagcttaggaaactgagtgagacgccatctcaaagaaaagaaagaaaggaaagaaagagagagaaagaaaagaaagataaaacaaaagaaaagaaatttttgaaaagaatgacatttggctgggtgcagtggttcatgcctgcaatcccagcagtttgggaggccgaggcgggcagatcacctgaggtcacaagttcaagacttgcctggtcaacatggagataccctgtctctactaaaaataccaaaaaattagctgggygtgctggcgcacacctgtgatcccaggtaattgagaggctgaggttggagaatcgcttgaataaagaaggcgcaggttgcagtgagctgagatagtgccactgcactccagcctgggagacagagcaagactccatctcaaaaaaaaaaaaaaagaattacatttaaaacagcattataaaaattaaaaataagct

SEQ ID NO: 928292 - DNA, 581 bp, Homo sapiens
tattgtgctacgtgttatgtcagtcatagcagctcacctattgtgcaattccgtttataggaaatgtccacaatatggaaatctatgcatatgggattgatcgcactatgtagttgctacctagggctgagggtcagggagagggtttgagacagaatgaggagtgactaatgtctacagggtctttctctggtcggggstgataagacgttttacaatggattgcgaattaaaattgaatgtgcacaaccacaggtatactaaaagccactcaattcatgacctttaatgggggaatcttacgtggcgtagtctcatggagaccacggcagacatagtgagagagaaaaaggtgagtaaatatctgaaacggaggcagaaacagagagaatgaaaagccctgtgaatggaagggagagcgaaaagggaaaatggtcctatttacaaatgacagatgtgaaactggggttcacatcaacagtgtcactgccaggaaggagggtcatgctagccatgtcaccggtagtgtggcccgcagggacgccgacctgctggagcgtcgtgccagcatgggctgtggc

SEQ ID NO: 928293 - DNA, 579 bp, Homo sapiens
catagcagctcacctattgtgcaattccgtttataggaaatgtccacaatatggaaatctatgcatatgggattgatcgcactatgtagttgctacctagggctgagggtcagggagagggtttgagacagaatgaggagtgactaatgtctacagggtctttctctggtcgggggtgataagacgttttacaatggattgcgaattaaaattgaatgtgcacaaccacaggtataytaaaagccactcaattcatgacctttaatgggggaatcttacgtggcgtagtctcatggagaccacggcagacatagtgagagagaaaaaggtgagtaaatatctgaaacggaggcagaaacagagagaatgaaaagccctgtgaatggaagggagagcgaaaagggaaaatggtcctatttacaaatgacagatgtgaaactggggttcacatcaacagtgtcactgccaggaaggagggtcatgctagccatgtcaccggtagtgtggcccgcagggacgccgacctgctggagcgtcgtgccagcatgggctgtggcaaccacgtgggccagcaggagg

SEQ ID NO: 928294 - DNA, 788 bp, Homo sapiens
gtctgaatgattgtccctcacataggattccagaacactgctgctgggttgtgagtgtttctccctcacatggtattccagaacactgctactgtggtctgaaagtttttccctcacataggattgcagaacactgctacgagggtctgaattattctccctcacataggattccagaagattccttcgtggtctgtatgtttgtccctcaattaggattccaggacactgctgtagggttccaagtgtttgtctctcacktgcggttccagaacactgctccctgggtctaaaagtttgttcctcacataggattgcagaacagtgctacaagggtccgggtctgaatgtttgccccacacataggattccagaatgcctcaactgtggtatgaatgattgtccctcatataggattccacaatactactactgggttatgagtgtttctccctcacatggcattccagaacactgctacgagggactgaatgtttgtcccgcacataggactccacaacactcctgttgtgttctgaatgtattttcctcaaagaggattccagaaaaatgctacgcgggtctgcatgtttgtcccacacgtaggactccagaacaccccggctgtagtctgaatgattgtccctcacataggattgcagaacactgcttctgggttgagcatttctccctcacataggattccagaacactgctacgagggtctgtattattctccctcacaatggattccagaatattccttctgtgatctgtgtgtttttccc

SEQ ID NO: 928295 - DNA, 585 bp, Homo sapiens
agatcaggagtttgagaccagcctggccaacatggtgaaaccctctctctactaaaaataacaaaaaatagctgggtttggtggcatatgcctgtaattccagctactcaggaggctgagacaggaatcgcttgatcccaggaggcagaggttgcagtgrgccgttatcacgccactgcactccagcctcagtgacagagtgagactccgtctaaaaaagaaaaaagaaaaggtgtggcatctctcccctccctctgttgcccctgctctcaccatgtgatgtgcctgctccaacgtcaaattctgccatgaataaatgtttcctgaggctctcaccagaagcagatgtcagaaccatgcatcctatcagacctgtagaaccatgagccaattaaacctctttcctttataaatagctcagcctcaggcatttctttacagcaacatacaaatgttctagcagagtctttacctccctgcatatgcacatggtttactatggcacacatatttctattcaatgctctattcccaaacaagagtattttctttcttttagagagactctgtttcctgtgcaggttg

SEQ ID NO: 928296 - DNA, 721 bp, Homo sapiens
taaggaaaaacaggagtacctaataaaaatatgcttagtgacttgggataaagcaatagatgttcacaagtgatggagagccgtgaaagagagatagcggtaaatagttacaataacacaattttcctgcacctgtcgaggattwcccccaaaaaacgcagaatgtgggatgcacctaaggcatatgaaagagagagggcagaaggagtaagagagaaataggaggaaggaaggaaggaagcaaggaagacaggaaggaaggaaagaaggaaggtaggacggaaggaaggaaggaaggaaggaaagaaggatgaaaggaaggagaaaacaccggtgttactaaaaccccccaaaaaatggtttccccctgtgggtaagcctacaatgtggatgaatcttgaaaatattgtgctacgtgttatgtcagtcatagcagctcacctattgtgcaattccgtttataggaaatgtccacaatatggaaatctatgcatatgggattgatcgcactaggtagttgctacctagggctgagggtcagggagagggtttgagacagaatgaggagtgactaatgtctacagggtctttctctggtcgggggtgataagacgttttacaatggattgcgaattaaaattgaatgtgcacaaccacaggtatactaaaagccactcaattcatgacctttaatgggggaatcttacgtggcgtagtctca

SEQ ID NO: 928297 - DNA, 647 bp, Homo sapiens
aaaaacaggagtacctaataaaaatatgcttagtgacttgggataaagcaatagatgttcacaagtgatggagagccgtgaaagagagatagcggtaaatagttacaataacacaattttcctgcacctgtcgaggatttcccccaaaaaacgcagaatgtgggatgcacctaaggcatatgaaagagagagggcagaaggagtaagagagaaataggaggaaggaaggaaggaagyaaggaagacaggaaggaaggaaagaaggaaggtaggacggaaggaaggaaggaaggaaggaaagaaggatgaaaggaaggagaaaacaccggtgttactaaaaccccccaaaaaatggtttccccctgtgggtaagcctacaatgtggatgaatcttgaaaatattgtgctacgtgttatgtcagtcatagcagctcacctattgtgcaattccgtttataggaaatgtccacaatatggaaatctatgcatatgggattgatcgcactaggtagttgctacctagggctgagggtcagggagagggtttgagacagaatgaggagtgactaatgtctacagggtctttctctggtcgggggtgataagacgttttacaatggattgcgaattaaaattgaatgtgcaca

SEQ ID NO: 928298 - DNA, 583 bp, Homo sapiens
acagctgtataaggaaaaacaggagtacctaataaaaatatgcttagtgacttgggataaagcaatagatgttcacaagtgatggagagccgtgaaagagagatagcggtaaatagttacaataacacaattttcctgcacctgtcgaggatttcccccaaaaaacgcagaatgtgggatgcacctaaggcatatgaaagagagagggcagaaggagtaagagagaaataggaggaaggaaggaaggaagcaaggaagacaggaaggaaggaargaaggaaggtaggacggaaggaaggaaggaaggaaggaaagaaggatgaaaggaaggagaaaacaccggtgttactaaaaccccccaaaaaatggtttccccctgtgggtaagcctacaatgtggatgaatcttgaaaatattgtgctacgtgttatgtcagtcatagcagctcacctattgtgcaattccgtttataggaaatgtccacaatatggaaatctatgcatatgggattgatcgcactaggtagttgctacctagggctgagggtcagggagagggtttgagacagaatgaggagtgacta

SEQ ID NO: 928299 - DNA, 584 bp, Homo sapiens
aaggaaaaacaggagtacctaataaaaatatgcttagtgacttgggataaagcaatagatgttcacaagtgatggagagccgtgaaagagagatagcggtaaatagttacaataacacaattttcctgcacctgtcgaggatttcccccaaaaaacgcagaatgtgggatgcacctaaggcatatgaaagagagagggcagaaggagtaagagagaaataggaggaaggaaggaaggaagcaaggaagacaggaaggaaggaaagaaggaaggwaggacggaaggaaggaaggaaggaaggaaagaaggatgaaaggaaggagaaaacaccggtgttactaaaaccccccaaaaaatggtttccccctgtgggtaagcctacaatgtggatgaatcttgaaaatattgtgctacgtgttatgtcagtcatagcagctcacctattgtgcaattccgtttataggaaatgtccacaatatggaaatctatgcatatgggattgatcgcactaggtagttgctacctagggctgagggtcagggagagggtttgagacagaatgaggagtgactaatgtctacagg

SEQ ID NO: 928300 - DNA, 606 bp, Homo sapiens
acttgggataaagcaatagatgttcacaagtgatggagagccgtgaaagagagatagcggtaaatagttacaataacacaattttcctgcacctgtcgaggatttcccccaaaaaacgcagaatgtgggatgcacctaaggcatatgaaagagagagggcagaaggagtaagagagaaataggaggaaggaaggaaggaagcaaggaagacaggaaggaaggaaagaaggaaggtaggamggaaggaaggaaggaaggaaggaaagaaggatgaaaggaaggagaaaacaccggtgttactaaaaccccccaaaaaatggtttccccctgtgggtaagcctacaatgtggatgaatcttgaaaatattgtgctacgtgttatgtcagtcatagcagctcacctattgtgcaattccgtttataggaaatgtccacaatatggaaatctatgcatatgggattgatcgcactaggtagttgctacctagggctgagggtcagggagagggtttgagacagaatgaggagtgactaatgtctacagggtctttctctggtcgggggtgataagacgttttacaatggattgcgaattaaaattgaatg

SEQ ID NO: 928301 - DNA, 628 bp, Homo sapiens
gctgtataaggaaaaacaggagtacctaataaaaatatgcttagtgacttgggataaagcaatagatgttcacaagtgatggagagccgtgaaagagagatagcggtaaatagttacaataacacaattttcctgcacctgtcgaggatttcccccaaaaaacgcagaatgtgggatgcacctaaggcatatgaaagagagagggcagaaggagtaagagagaaataggaggaaggaaggaaggaagcaaggaagacaggaaggaaggaaagaaggaaggtaggacggaaggaaggaaggaaggaaggaargaaggatgaaaggaaggagaaaacaccggtgttactaaaaccccccaaaaaatggtttccccctgtgggtaagcctacaatgtggatgaatcttgaaaatattgtgctacgtgttatgtcagtcatagcagctcacctattgtgcaattccgtttataggaaatgtccacaatatggaaatctatgcatatgggattgatcgcactaggtagttgctacctagggctgagggtcagggagagggtttgagacagaatgaggagtgactaatgtctacagggtctttctctggtcgggggtgataagacgttttacaa

SEQ ID NO: 928302 - DNA, 721 bp, Homo sapiens
taaggaaaaacaggagtacctaataaaaatatgcttagtgacttgggataaagcaatagatgttcacaagtgatggagagccgtgaaagagagatagcggtaaatagttacaataacacaattttcctgcacctgtcgaggatttcccccaaaaaacgcagaatgtgggatgcacctaaggcatatgaaagagagagggcagaaggagtaagagagaaataggaggaaggaaggaaggaagcaaggaagacaggaaggaaggaaagaaggaaggtaggacggaaggaaggaaggaaggaaggaaagraggatgaaaggaaggagaaaacaccggtgttactaaaaccccccaaaaaatggtttccccctgtgggtaagcctacaatgtggatgaatcttgaaaatattgtgctacgtgttatgtcagtcatagcagctcacctattgtgcaattccgtttataggaaatgtccacaatatggaaatctatgcatatgggattgatcgcactaggtagttgctacctagggctgagggtcagggagagggtttgagacagaatgaggagtgactaatgtctacagggtctttctctggtcgggggtgataagacgttttacaatggattgcgaattaaaattgaatgtgcacaaccacaggtatactaaaagccactcaattcatgacctttaatgggggaatcttacgtggcgtagtctca

SEQ ID NO: 928303 - DNA, 647 bp, Homo sapiens
aaaaacaggagtacctaataaaaatatgcttagtgacttgggataaagcaatagatgttcacaagtgatggagagccgtgaaagagagatagcggtaaatagttacaataacacaattttcctgcacctgtcgaggatttcccccaaaaaacgcagaatgtgggatgcacctaaggcatatgaaagagagagggcagaaggagtaagagagaaataggaggaaggaaggaaggaagcaaggaagacaggaaggaaggaaagaaggaaggtaggacggaaggaaggaaggaaggaaggaaagaaggaygaaaggaaggagaaaacaccggtgttactaaaaccccccaaaaaatggtttccccctgtgggtaagcctacaatgtggatgaatcttgaaaatattgtgctacgtgttatgtcagtcatagcagctcacctattgtgcaattccgtttataggaaatgtccacaatatggaaatctatgcatatgggattgatcgcactaggtagttgctacctagggctgagggtcagggagagggtttgagacagaatgaggagtgactaatgtctacagggtctttctctggtcgggggtgataagacgttttacaatggattgcgaattaaaattgaatgtgcaca

SEQ ID NO: 928304 - DNA, 617 bp, Homo sapiens
aaaaacaggagtacctaataaaaatatgcttagtgacttgggataaagcaatagatgttcacaagtgatggagagccgtgaaagagagatagcggtaaatagttacaataacacaattttcctgcacctgtcgaggatttcccccaaaaaacgcagaatgtgggatgcacctaaggcatatgaaagagagagggcagaaggagtaagagagaaataggaggaaggaaggaaggaagcaaggaagacaggaaggaaggaaagaaggaaggtaggacggaaggaaggaaggaaggaaggaaagaaggatgaaaggaaggagaaaacaccggtgttactaaaaccccccaaaaaatggtttccccctktgggtaagcctacaatgtggatgaatcttgaaaatattgtgctacgtgttatgtcagtcatagcagctcacctattgtgcaattccgtttataggaaatgtccacaatatggaaatctatgcatatgggattgatcgcactaggtagttgctacctagggctgagggtcagggagagggtttgagacagaatgaggagtgactaatgtctacagggtctttctctggtcgggggtgataagacgttttacaa

SEQ ID NO: 928305 - DNA, 774 bp, Homo sapiens
acagctgtataaggaaaaacaggagtacctaataaaaatatgcttagtgacttgggataaagcaatagatgttcacaagtgatggagagccgtgaaagagagatagcggtaaatagttacaataacacaattttcctgcacctgtcgaggatttcccccaaaaaacgcagaatgtgggatgcacctaaggcatatgaaagagagagggcagaaggagtaagagagaaataggaggaaggaaggaaggaagcaaggaagacaggaaggaaggaaagaaggaaggtaggacggaaggaaggaaggaaggaaggaaagaaggatgaaaggaaggagaaaacaccggtgttactaaaaccccccaaaaaatggtttccccctgtgggtaagcctayaatgtggatgaatcttgaaaatattgtgctacgtgttatgtcagtcatagcagctcacctattgtgcaattccgtttataggaaatgtccacaatatggaaatctatgcatatgggattgatcgcactaggtagttgctacctagggctgagggtcagggagagggtttgagacagaatgaggagtgactaatgtctacagggtctttctctggtcgggggtgataagacgttttacaatggattgcgaattaaaattgaatgtgcacaaccacaggtatactaaaagccactcaattcatgacctttaatgggggaatcttacgtggcgtagtctcatggagaccacggcagacatagtgagagagaaaaaggtgagtaaa

SEQ ID NO: 928306 - DNA, 614 bp, Homo sapiens
aatcttgaaaatattgtgctacgtgttatgtcagtcatagcagctcacctattgtgcaattccgtttataggaaatgtccacaatatggaaatctatgcatatgggattgatcgcactaggtagttgctacctagggctgagggtcagggagagggtttgagacagaatgaggagtgactaatgtctacagggtctttctctggtcgggggtgataagacgttttacaatggattgckaattaaaattgaatgtgcacaaccacaggtatactaaaagccactcaattcatgacctttaatgggggaatcttacgtggcgtagtctcatggagaccacggcagacatagtgagagagaaaaaggtgagtaaatatctgaaacggaggcagaaacagagagaatgaaaagccctgtgaatggaagggagagcgaaaagggaaaatggtcctatttacaaatgacagatgtgaaactggggttcacatcaacagtgtcactgccaggaaggagggtcatgctagccatgtcaccggtagtgtggcccgcagggacgccgacctgctggagcgtcgtgccagcatgggctgtggcaaccacgtgggccagcaggagg

SEQ ID NO: 928307 - DNA, 667 bp, Homo sapiens
tctgagttcttcccctcttcagcagcaggggtggtgcaacacagctccagggtctcacctagtgccaatatcactgttggggagagggatagtggggagtggcaacgtgctcctcatcagacatgtggtaccactgagacaaccgtcggccctgcccacatggtccctttgggcccagtaatgctgttatcttcatgtcatgtttgggattcaggcactgtttgtgagtctgcttgtagtcacaagccagcamcgattccttcctggggacgtgccacctctcaggaagcagaaccatgctccctgctgatcagagaccctcaggcctctctcttcttcttccccaccaagatgctctatttttgtccctaaacaccaccaatacctgcaaaccagcttcttcccttcattccttagcaaactccctaattttccctcaggcttcttgggtttcccgcaaacaaaagccagaaagctttgcctccttctgccttctgctctgcctgagagctttttcaaggtttcatagttcagagataactctctgtttaaatgagaggaatggggaggagcaaatgagggagggaggcaacctattaaaatctcagtatataaaatctagctgcataggcaagaggcaactgaggttcccaaattcgggaagcaa

SEQ ID NO: 928308 - DNA, 384 bp, Homo sapiens
gctcggctttttcaccttccagttagcctccctgccccccatggggagctggggctgggggcagggtgctctcgtaggggggattgggaaagctccccgtggccgcttcctcttcctcctttgcagtcccgggctcctgtcaggcgctcttctcagacccccgggaacttggcttcggccgccccgcccctccgtggatcccagtagcccccgccccggactckgctttccccggctgctcgcttgtcaggaagcgcctggggtgccccgcttgtgggaagcgcgatcccggggcgatagggtggggatctgggggagaagctctggtaaagtttagcgagccccgggccggcgttggggttcggctgagaggtagtgagcggg

SEQ ID NO: 928309 - DNA, 737 bp, Homo sapiens
tgtgggaggccagcgcccgccttaccacgctggtgacgaggctcgccctgctgcagagaccattcacgctgcccaggaactccagcaggtctcttgccagctccaccaccagggagggtttcagcgtacacagggccaggaactgagaactcagcacactgcccagaaagccgggtctacgcctgctctgtgcagacctatgaccccatccccatccaggccaagggcctggagaaacccgggaagcgtctgagtggtaggtgtatgctgcaccctccgatagaggaacacagaagactgccagcctcagagaaactgttctcactggggagaaggctggcaccagcgctggcctcaggcccaggctcagagtggaaccaggatgggcctgcatgcatcaggcctttggagagaaggaccccaggggacaagacggggaagagggacctgagctaaccctgaagaggacaggctcggcagaaagaaggacgggaatgttcttgagargcagagagaagtgcctggggctgggtgtggggctgtgggtgggggtggcagggtctgaggctgctgagggcccagctaggggtggtgccgaagccactgaaggggaggggggaggggagagggggaggagtccaggaggcacccgcccagggctgtggcaggagcgcaggagggacctacctgtgcacaccggcagcgtaccctggggccgggtagagcgagtcgctcct

SEQ ID NO: 928310 - DNA, 606 bp, Homo sapiens
ttgcaaactttgcaaatcaacaaaggtctaatatccagaatctataatgaacttaaacaattaaatgagcaaaaaccaaataaccctgttaaaaggtgaacaaaagacacgaacagacacacttcaaaagaagacatacaaacatccaacaaacatatgaaaaaaatacttcactaatcatcagaaaaatgcaaatcaaaactacagtgagataacatggtcacaactgctattattaaaaagtcagaaaataasgtgctggtgagtctatggagaaaagcgaatgtgtatacactcttgttggggatgtaaattagttcaactactgtggaaagctgtttggagttttctcaaagaacttaaaacagaactactattcaacctagtaatctcattactctgtatacactcaagggaaaataaattgtactgaaaggatacatgcattcatgttcagcacatctctatttacagtggcaaagccatcaacctatgggcccatcaacagtggatagaataaagaaaatatgttattgatacttatacactgtggaatattacatagccatgaaaaagaacaaaatcatattctttgcagcaacatag

SEQ ID NO: 928311 - DNA, 642 bp, Homo sapiens
ccctggaaaggcattcggaatgagtttcaaattcgcattttggcctgaggaaaagggagtgaagttatgactttttccccttctgattgtcaagtaacaccattagcccaggccaagaagccatttctccaagtagagatatagatgaggctggttattctttccaaaattccgcaaggctccaattaattccatgtgtatkgtatagttaacaggcatttcttcctgagaacaacagaagatggtatactttaactacatttcagagaggccagaacgttgggctggaaggtgtgctagaagagtgtctttcttgtccagtgggtctgaaactttactggattttaaaatccccagagctcatgctgttcatacatattaccaggccccaaacctcggagattataattcaatagaggtctagggtggtgcccagaaatctgccttttggataagtaacctaaatgattctgattcagatgacacttggagaaacaccagaatcccttatttcttagctggggaaaacttgatcacagtcataaaataactgactcatacagatagtaagtagcaaggctgggactggacctcaggtctccttgctttgagttcagtgcttcttaagtaattgacttaatt

SEQ ID NO: 928312 - DNA, 642 bp, Homo sapiens
ccctggaaaggcattcggaatgagtttcaaattcgcattttggcctgaggaaaagggagtgaagttatgactttttccccttctgattgtcaagtaacaccattagcccaggccaagaagccatttctccaagtagagatatagatgaggctggttattctttccaaaattccgcaaggctccaattaattccatgtgtattstatagttaacaggcatttcttcctgagaacaacagaagatggtatactttaactacatttcagagaggccagaacgttgggctggaaggtgtgctagaagagtgtctttcttgtccagtgggtctgaaactttactggattttaaaatccccagagctcatgctgttcatacatattaccaggccccaaacctcggagattataattcaatagaggtctagggtggtgcccagaaatctgccttttggataagtaacctaaatgattctgattcagatgacacttggagaaacaccagaatcccttatttcttagctggggaaaacttgatcacagtcataaaataactgactcatacagatagtaagtagcaaggctgggactggacctcaggtctccttgctttgagttcagtgcttcttaagtaattgacttaatt

SEQ ID NO: 928313 - DNA, 642 bp, Homo sapiens
ccctggaaaggcattcggaatgagtttcaaattcgcattttggcctgaggaaaagggagtgaagttatgactttttccccttctgattgtcaagtaacaccattagcccaggccaagaagccatttctccaagtagagatatagatgaggctggttattctttccaaaattccgcaaggctccaattaattccatgtgtattgtatagttaacaggcatttcttcctgagaacaacagaagatgrtatactttaactacatttcagagaggccagaacgttgggctggaaggtgtgctagaagagtgtctttcttgtccagtgggtctgaaactttactggattttaaaatccccagagctcatgctgttcatacatattaccaggccccaaacctcggagattataattcaatagaggtctagggtggtgcccagaaatctgccttttggataagtaacctaaatgattctgattcagatgacacttggagaaacaccagaatcccttatttcttagctggggaaaacttgatcacagtcataaaataactgactcatacagatagtaagtagcaaggctgggactggacctcaggtctccttgctttgagttcagtgcttcttaagtaattgacttaatt

SEQ ID NO: 928314 - DNA, 602 bp, Homo sapiens
ttttgtattttttgtagagatggggtttcaccatgttggccaggatggcctcaatctcttgacctcgtgatctgcccgcctcagcctcccaaagtgctgggattacaagcatgagccatcgcacccggcctatttttaagaatatgggtttattactttaaaatgtatttttatcatttattaccatttgtttatttattttcttttttttttttttttttctgagacggaatttcattcctgttgcccaggctggagtgcaatggcacaatctcggttcattgcaaccttgcctcccgggttcaagcaattctcctgcctcagcctcccgagtatctggrtgcctgccaccacacccagctaatttttttgtatttttaggagagatggggtttcaccatgttggccaggctcgtctcaaactcttgacctcaggtgatccacccacctcaacctcccaaagtgcagggattataggcatgagccactgtgcccagcctatttgttacctttttaaccgtttttttttttctttagacagagtctcactctgtcgcccaggctggagtgcagtggcaccatctcaactcactgcaacctcc

SEQ ID NO: 928315 - DNA, 641 bp, Homo sapiens
taactctcttcctattgaataccctttatttctttctcttgccttatttctctggccagaacttccaatactatgttgaataggagtggtgagagagggcatccttgtcttgtgctggttttcaaggggaatgcttccagcttttgcctgttyggtatgatattggctgtgggtttgtcataaatggctcttattattttgaggtatgttccaccaatacctagtttattgagagtttttaacatgaaggaatgttgaattttattgaaggccttttctgcatctattgagataatcatgtggtttttgtctttacttctgtttatgtgatgaattacatttactgatttgcatatgttgaaccagccttgcatcctggggatgaagctgacttgattgtggtggataagctttttgatgtgctgctggattcagtctgccagtattttattgaggatttttacactgatgttcatcaggagtattggcctgacattttctttttttgttgtatctctgccaggttttggtatcaggataatgctggtctcataaagtgagttagggagaagtccctccttttcaattgtttggaatagtttcagaagaaacggtaccagatcctctttgtacctctggta

SEQ ID NO: 928316 - DNA, 641 bp, Homo sapiens
taactctcttcctattgaataccctttatttctttctcttgccttatttctctggccagaacttccaatactatgttgaataggagtggtgagagagggcatccttgtcttgtgctggttttcaaggggaatgcttccagcttttgcctgttcggtatgatattggctgtgggtttgtcataaatggctcttattattttgaggtatgttccaccaatacctagtttattgagagtttttaacatgaaggaatgttgaattttattgaaggccttttctgcatctattgagataatcatgtggtttttgtctttacttctgtttatgtgatgaattacatttactgatttgcatatgttgaaccagccttgcatcctggggatgaagctgacttgattgtggtggataagctttttgatgtgctgctggattcagtctgccagtattttattgaggatttttacactgatgttcatcaggrgtattggcctgacattttctttttttgttgtatctctgccaggttttggtatcaggataatgctggtctcataaagtgagttagggagaagtccctccttttcaattgtttggaatagtttcagaagaaacggtaccagatcctctttgtacctctggta

SEQ ID NO: 928317 - DNA, 423 bp, Homo sapiens
taattttgcaaaatatgattaaaacctgacatatacgtaaaagctagaggacaaacaatgtgatgaaatataccaaatactaataatagtggttctctgaatctctgaattatagatgaatttaattttctttcttatactttcagatatccctaaaatgtctcatttwgaatgtcctttataatccaaaaaagttatcgtaaggcaatttaagagttgtctttatagctgtgtgaaaatattttatatttaaagaaacgtgcttgttttatttggaatattaaaatataaagatggagaactttcagataatagtagataactggcattcacagatgaggacctaccctacaggtccccggcaaccagacccacggtgtctgggttcatgggactgaaaatcagtcaccaggtggaaaagct

SEQ ID NO: 928318 - DNA, 423 bp, Homo sapiens
taattttgcaaaatatgattaaaacctgacatatacgtaaaagctagaggacaaacaatgtgatgaaatataccaaatactaataatagtggttctctgaatctctgaattatagatgaatttaattttctttcttatactttcagatatccctaaaatgtctcattttgaatgtcctttataatccaaaaaagttatcgtaaggcaakttaagagttgtctttatagctgtgtgaaaatattttatatttaaagaaacgtgcttgttttatttggaatattaaaatataaagatggagaactttcagataatagtagataactggcattcacagatgaggacctaccctacaggtccccggcaaccagacccacggtgtctgggttcatgggactgaaaatcagtcaccaggtggaaaagct

SEQ ID NO: 928319 - DNA, 565 bp, Homo sapiens
caggggaaacttcatggacaaggtggcctatctgcctttcgtgtaaaggatttataaagatgaaaggaaagggcaaatgtaacaatcattaaaaaggcagggaaaagaaggtggtctgaatgactatttcatccagggatgactaagtataggagagggaagagtccaacttcaggctaggatgaaagtacagagtttggtagaaatcccctggaaaataaaaattcttctagaaactaaaaactagctataagtttgggcaatatattattttctgcacaygggagtctggaaggttgtcatgtgtgtctcatctctcctcctttctctgcctaccctatcacccctgcatcaaatcacttaccaagcaccaccaattctccatccatatcctctcttctatctcttctttttgtcactctaattccactgtgtgcttaatgactgaaagactcctgcatggtgccatgtttcctctctccctcttcaatctacacctgaatcctttgaaaggcaggctatggacctggctgcttatcacgacacacaggtcaaggaggtgagt

SEQ ID NO: 928320 - DNA, 579 bp, Homo sapiens
tttttaacaaagctctattgagttataattcacaaaccataaaaaaatttcacccatttaaaatgtgtaattcaatgactaggcatattcacagagtggtgcaaccatcaccaaatcaatttagaacattttcattacactaaaaagaarcactataccccttagctatcacctccacttctccacgtatccaagccctaggcaaccaccaatctactctatagatcatactggtctctatagatttgtctattctggatatttcacataaatgcaatcatataaaaagtggccctttgtgactggcttctttcacttagtatagtgtttccatggttcgtccactcaatatttcatttttaatttttttattgccaaatgattttcaagtgtatgtgtgtaccatattttatttatccatttatcagttgatggatattatggctcttatgaataatgctgccattgacattcgcgtaaaagtttttgtgtagacatattttctcttgggtatatacctaggagtggaattgctgcatcatatggtaactctgcatttggccttttgaggaactgcca

SEQ ID NO: 928321 - DNA, 580 bp, Homo sapiens
acagcattggacagtctacactgttcctttcagaaggagtctagagtagctcattttgagcttgcaaaggcttccaactacttaagacaacttttagagctaactatgacctcctagggacataaaacaagatggagacctcatccagttgttttgtttgtttcagggacctgcagcaaagtttgttactgaccaggctactgggttgtcacgagcagtgagcttatggggtcctaagcccatgttctatcctaaggtacacctcttcatgacagtacaacagagaaagaaaaattcatagcacaaaataacccagatttgctacagcttatgagtagcctcagaatttcttttcacattaaccaaaacwttacaaaggagataaacagtgatttttaccattcattcgattggtttgcacagagagaggtcagaagtccaactggtaagaaattcttacccttttgctggcatgtcagatttctgggttctccttccctaggcagccctagcaaccctactcaactgtaggcaaaaaaataaataaataaataaattgccatgagttaagaacattcac

SEQ ID NO: 928322 - DNA, 473 bp, Homo sapiens
acttctgtcatttcagccatctcagcctcagcccagttccaaacccttgctggagaggtgtcgcagtcatttggaggaaagtgggcactctggctttttgagtcttccgtatttttgtgctgattccttctcatctttgtgggcttatctaccttcartcttcgaggttgctgccatttggatggggtttttgtgttttttttcttttgcaaaaatgaactcaagatggagtaaagaattaaatataaaacctaaaactataaaaacctcagaagaaagcctaggcaataccattcaggacatagacatgagcaaggatttcatgacaaagatgctaaaagcaattgcaacgaaacaaaaactgacaaatgagatttaattaaactaaagagcttctgcacagcaaaagaaactgtgaacaaataacctacaaaaagggagaaaacttggaatctatgcacctgacaaaggtc

SEQ ID NO: 928323 - DNA, 758 bp, Homo sapiens
taacatttaatgatgggctaatctgacaatggcctctcaaaattcctcatgattttttgaaggcagtgcagagcatctttgtttttaccttctctggagaataaacctccagtcttttgctttcatttgtaagggaaaattgcctggctgactggtgtgtggtaagaaagctgggtggtgtgggggggggggcgtgtcttttctttttaatttattgaagtggcattcacatgacataaaattaattcctttgaagtaaccaactcactgacattcagtacattcacagtgttatgcaaacaccacacccttatctggttttaaaacatttcaatcactccaatgcaaaacccctgagttagtttgctaggactgctattaaaaagtgccagacaatgggtggattaaaaaacaaaaaaatcattttttcacagttctggaggctggaatttcaagatcaargtgtcagcaggcttcgtttctgctgagggccatgagggagaatctgttccaggcctctctccttggcctgtcaatggctgtcttctccctgtgttttcacgtagtcctccctttgtatgtgtctgtgtccaaatttcctcttcttataagggtatctgtcacattggatgagggccaactataatgaccgcattttaacttatctacctctgtaaagaccctgtctccaaatagagttactttcctaagtactatgggttacaactttaacataccaatttttcttttgcaggagg

SEQ ID NO: 928324 - DNA, 585 bp, Homo sapiens
gagtttattaaaggatcaataaatgttggctatcattgctaggaggagtgatgtgagaaagatggaaggtcagttgcaatacaatgagtagacaaaaaaaatgaatgtgctgtgatggcaaaggtgggggcacatatctaacacccagtgaagacctggaagagcaggtgacttttagctgggtctggagagatgggggaattagatgggtgaagaagctagagaggtatactttgggcagaaagatcaggccatgcaaatgyatggatccaagggagcccaaggggtgttcagagaacgacaaacaatccagaatggagggagcacatgtggattatttcatcagatgagaacaaggcatcttgagggaccataaaattgaaaaccttgtaagccaagctaggagaaagaactctgttctatcagtcatggggagcccataagggatttcaggtgaaaccttcaatctgtgatttatgatcattctgaaagagggtgactgaagagaggcaagcctagaggataatggattcctcagtagtaagttcatgcttagggtgtcaataatgcaggggccaatgagct

SEQ ID NO: 928325 - DNA, 567 bp, Homo sapiens
gctgtatagaaacaatgtttttgtccattctgtgaatgaacatttgggagctcattgaggtcaatggtgaaaaagtgattatctctataaaaaactagaaataagctatctgagaaaccacttagtgaagtgtgcaatattcgagtagagtttaaccttatttttcattcatcagtttggaaacacagtttagatagaatctgcaaatttatatttgggagcgcattgaggcctatggtgaaaaaggaagtatcttcagataaaaataagaaaaaaacctttctaagaatctactttatgaagtgcacattaatctcacacagctcaatctttcttttgatttggctgtttggaaatggtttttgtccrttctgtgattggacatttgggaggtgattgaggccaatggagaaaaagtgaatatccaagaaataaaactagaaggaagctatctgagaaaccactttctgatgtgagcattcatctcatagaggaaaacgtttcttttcaatcagcagtttggaaacactgtttgatagagtctgcaaaagtatatttgggagacca

SEQ ID NO: 928326 - DNA, 573 bp, Homo sapiens
tcgccagctgctttctcagaatggatttccagagtgcaggccaactgaagagaaggagctgaaagactccagagaggttgatcagtgacaataggtattgctgcctttgttcaagatctgcttaacttttaaactaaggtgaaataagcatacccgtttctaaattatctttcttttttttcacagattagattttaaatgatgatggaagaacactcagcatattctggatattagaggtaaagttaagctatctctctctatctctatctctatctctatctctgtctatgtatctaaaggaccataaatgcaatgcagcgatgtgataagtaggaccatagggtccaaggaccccatggaattgcagttagaagaatcatattttactaccctatccgtgttgtttaacaggcagggaayaaattttcagctcactcagggaaatttttctcttagctttaatttaccataatgaatcaattacaagaaagtatttgttaaggcgggcagaagaaaacttttggaggtgatagatacgtttacagcatagcttgtgaagatggtttcatg

SEQ ID NO: 928327 - DNA, 738 bp, Homo sapiens
cgcagtggctcatgcctgtaatcccagcactttgggaggctgaggtgggtggatcacctgaggtcaagagttcaagaccagcctggccaacatggtgaaaccccatctctactaaaaatacaaaaaattagccagacatggtgatgggcacctgtaatcccagctacttgggaggctgaggcaagagaatcacttgaacccaggaggcagaggttgcagtgagccgagatcgcaccattgcactccagcttgggcgacagagmgaaactccgtctcaaaaaacaaaaacagaaacaaaaaaagaaagaaatgcatccccatttcccaatgagtatcacaagagacaggctagcatctgcaggcccagactgccagggttgaaactgtctctgccatgtgtaccaactgtgcaacagtcggcaagtcaagttactgctcctcagagcctcatgaggaagtagaactaacaagactaataacagccctcataggaatgtcatgaaaattaaatgagttaatacatgtaaaatgtttgcaaaagtgcctagctcataagtaaaccctcaatcaatgttagttgttgttactattatagttataattattaatcatcttggctgtgaaatatgattcaccatgaaaagccatttatgatacttaatttgttagtaaatgcaatagagcaaaaatataaaataaaaccaagggttaaaaggttcctatgtcaggaaaaggcct

SEQ ID NO: 928328 - DNA, 596 bp, Homo sapiens
acaaaaaaagctactagaactaataaatgaatctagcaagtgtgtaatataaagtttgacaaagatcaattgtacttctgtatgtaatcaatgaacaatcagaaattgaaattaagaaagcataactatttataatatcataagaatgttaaatactcggttggggggaggtgggagggatagcatyaggagatatacctaatgctaaatgatgagttaatgggtgcagcacctgagcatggcacatgtatacatatgtaactaaccggcacattgtgcacatgtaccctaaaacttaaagcataataataataataataaaaagaaaaacaaaaacaaacaaaaaagaatgttaaatactcagagatgcactttactaatgacatgaaagccctacgatactgaaaactgttacacatttatgggaggagttaaagatttgaaaaaacagggagttatcaaaagactaaatactgttcaggtatcatttctccccagattatctatagattcagcacaatcccaatagcatcaaagtttttcccagaaattgaaaaactgattttaaaatcattatggaaataaaatggacctag

SEQ ID NO: 928329 - DNA, 596 bp, Homo sapiens
acaaaaaaagctactagaactaataaatgaatctagcaagtgtgtaatataaagtttgacaaagatcaattgtacttctgtatgtaatcaatgaacaatcagaaattgaaattaagaaagcataactatttataatatcataagaatgttaaatactcggttggggggaggtgggagggatagcatcaggagatatacctaatgytaaatgatgagttaatgggtgcagcacctgagcatggcacatgtatacatatgtaactaaccggcacattgtgcacatgtaccctaaaacttaaagcataataataataataataaaaagaaaaacaaaaacaaacaaaaaagaatgttaaatactcagagatgcactttactaatgacatgaaagccctacgatactgaaaactgttacacatttatgggaggagttaaagatttgaaaaaacagggagttatcaaaagactaaatactgttcaggtatcatttctccccagattatctatagattcagcacaatcccaatagcatcaaagtttttcccagaaattgaaaaactgattttaaaatcattatggaaataaaatggacctag

SEQ ID NO: 928330 - DNA, 575 bp, Homo sapiens
tggctgagcccagggcttttatgggcctcagaggggaggaagtgcctgctggtcagtcacagggtggtgatgggtggccagaaaaggcacaagttcccactcctgtcagtgggactggcagcctggcccccagcctgaaggtggggcttcaccagggacctctccctcctgaccagaaatctgtctgcctcctgctgccattcatgtcactggggctcaggactcctctggactttgctccaagatgagcaggcacygacagcagggagaagccaggcagtgggaagagatacttaccagcctgatgacagggaggccttcctggatccccaagggtgcagggatgcctgagtcttaagccacagtttgggcagctgcagctgcaccctggagggcaggggtcctgcctgctccctgccctccagagcagggaggctgctatctgcaacttgggttcctgcagccttgcctaggagggcggggcttctgcctgctctttggagtgggaggcctgggtccacagccaggaagtggtggggatcccacttgtctcctgctcccactggctccaagga

SEQ ID NO: 928331 - DNA, 575 bp, Homo sapiens
tggctgagcccagggcttttatgggcctcagaggggaggaagtgcctgctggtcagtcacagggtggtgatgggtggccagaaaaggcacaagttcccactcctgtcagtgggactggcagcctggcccccagcctgaaggtggggcttcaccagggacctctccctcctgaccagaaatctgtctgcctcctgctgccattcatgtcactggggctcaggactcctctggactttgctccaagatgagcaggcaccgacagcagggagaagccaggcagtgggaagagatacttacmagcctgatgacagggaggccttcctggatccccaagggtgcagggatgcctgagtcttaagccacagtttgggcagctgcagctgcaccctggagggcaggggtcctgcctgctccctgccctccagagcagggaggctgctatctgcaacttgggttcctgcagccttgcctaggagggcggggcttctgcctgctctttggagtgggaggcctgggtccacagccaggaagtggtggggatcccacttgtctcctgctcccactggctccaagga

SEQ ID NO: 928332 - DNA, 781 bp, Homo sapiens
tttcaacatgtgcgtaccactttgtgtcctgtgaacaaggacacaaagatgaatgaggtggatcttgggccctgaggagcttgtcatctactaagcacttaatgcagaagccagggattcctttattttttaaaataaatacaatttttcaagaaaaaaattttccacagaaaaataagagatataatttatttattttttcttttcttttctttttgtttttttttttgagacagactctcgctctgtcgcccaggctggagtgcagtggcgcgatctcagctcactgcaagctccgcctcccgggttcacaccattctcctgcctcagactcctgagtagctgggactacaggcacccgccaccacgcccgcctaaattttttgtatttttagtagagatggggtttcaccgtgttagccrggatggtcttgatctcctgacctcgtgatcctcccaccttggcctcccaaagtgctgggattagaggcgtgggccaccgcacccggccgatataatttattttttgaaaagttaaagagaagttgaagaagaagacacactaaaggaagagaacaagagtgattccaagttctggtaccctacctaggggggccttgctgctctcgggcagcctggagcttgtcaagtgctcttcattgctttgggacaaatgggggtgttgtcagtgtccttgtccttgtcattctttcttaaaccatcatatcccccatgtgctgagcgacatgccaaaacttcagggggtgtttcctgctttgtg

SEQ ID NO: 928333 - DNA, 631 bp, Homo sapiens
gcggaggggctcctcacttctcagacggggtggttgccaggcagagggtctcctcacttctcagacggggtctcggccgggcagaggcgctcctcacatcccagatggggcggcggggcagaggcactccccacatctcagatgatgggcggccgggcagagacgctcctcacttcctagatgtgatggcggctgggaagaggcgctcctcacttcctagatgggatggcggccgggcggagacgctcctcactttccagactgggcagccaggcagaggggctcctcacatcccagacgatgggcggccaggcagagacactcctcacttcccagacggggtggcggccgggcagaggctgcaatctcggcactttgggaggccaaggcaggcggctgctccttgccctcgggccccgcggggcccgtccgctcctccagccgctgcctccygggcggccgaggtgaaatatttctacaaggaaaactacaaaatattgatgaaagaaattgtagacgacacaagcaaatggaaaactatcttatttaatggatcagaagaattagtatcattaaaatgaccataatgcccaaaacaatctacagatttaatgcaatttccatcaaaatg

SEQ ID NO: 928334 - DNA, 556 bp, Homo sapiens
gtgattgaatcatgggggcagtttctcatggtttaacaccacccgccttggtgctgtcattgcaatagtgagttctcagggaatctggttgtttaaaagtgtgtggcaccttcccccctctctctttctcctttgccagccatgtgaagtgccggctccccctttgccttctgctataattgttaagttttctgagggctccccagaagttgagaagatgccagcataatgcttcctgtacagcctgcaaaaccaattaaaacatwtttttaaataaaatacccagtctcaagtatttccttatagcagcgagagaacagactaatacattgggcaaagggagaagttgaaccacgatacatgctaagtgatggactccaacatccacatggggattttggaagacagcatggcccttcagtattgtctaacattttagtcaggagtctcactttacaccaatctcactcaccactagaaaccatctttgcatacagacatctctgggaaggaaacatcaccttgggcaagctggctctctactgttgagacaatt

SEQ ID NO: 928335 - DNA, 610 bp, Homo sapiens
ttcagctactcaggaggttgaggaagaagaatcacttgaacccaggaggtggaagttgcagtgagccgagattgcgccactgcactccagcctgggcgacagagtgagactctgtctcaaaaaacaaaacaaaagaaaacaacttcatgtcgaagtcccagccctcagtgtggttggtatttgaagacagggcctttaaacagataattaaggttaaattgagttgtaagtgtggggacttaatctaatagaactagaaagcacgatcgtattattatttattttagggtataaagcattttggctttttttatttgttwatttcttttggacagctctgaccagatcacaaagctcaacaggactttctcctttacccactcctcgctcttcctattaactcccccgcccccctcccgctcccttttaacctccgcactaacaactcttgaagaaacttgaatcctgcaattaaaaggagtgaaaaatggaaaccctgccctagcccactgactcagtagaaagttaagaagaaagcattttaactggggctggaaaacacaacgccttgaacttgtgcttttgcttttttgccacaagatggcaggag

SEQ ID NO: 928336 - DNA, 801 bp, Homo sapiens
ttgttaacggtctctctaaaataatagttggtcatagtcagctccagggaaaggcagactcacaataaacagaaacacctggctgggcacagtggcccacacctgtaatcccagcactttgggaggccgaggtgggtggatcacttggggccaggagtttgagaccagcctggctaaaatgctgaaaccccatctctactaaaaatataaaaattagctgagcatagtggtgcatgcctgtagtccttgctactcgggaggctgaggcaggagagtcatttgaagcctggagacrgagtttgcagtgagtcaagattgcgtcagccgggcgtggtggctcacgcccgtaattccagcacttcgggaggtggaggcgggcggatcacgaggtcaggagatcgagaccatcctagctaacatggtgaaaccccgtctctactaaacaaaatacaaaaaattagccaggtgtggtggcgggcgcctgtagtcccagctactcgggaggctgagtcaggagaatggcgtgaacccaggaggcagagcttgcagtgagccgagattgtgccacggcactccagcctgggcaacagagtgagactccacctcaaaaaaaaaaaaaaaaaaaaaagattgcatcactgcactccagtctgggtgacaaagtgagattccatctcaaaaaaaaaaagaaatatctgaagctggtgatcagcagcttcccgataagatctcaggagttgggcaagtgggctcacaaatgcacactgagagagtcaaatggcggagtttgacaggtatatg

SEQ ID NO: 928337 - DNA, 582 bp, Homo sapiens
ggtgcatgcctgtagtccttgctactcgggaggctgaggcaggagagtcatttgaagcctggagacggagtttgcagtgagtcaagattgcgtcagccgggcgtggtggctcacgcccgtaattccagcacttcgggaggtggaggcgggcggatcacgaggtcaggagatcgagaccatcctagctaacatggtgaaaccccgtctctactaaacaaaatacaaaaaattagccaggtgtggtggcgggcgcctgtagtcccagctactcgggaggctgagtcaggagaatggcgtgaacccaggaggcagagcttgcagtgagccgagattgtgccacggcactccagcctgggcaacagagtgagactccmcctcaaaaaaaaaaaaaaaaaaaaaagattgcatcactgcactccagtctgggtgacaaagtgagattccatctcaaaaaaaaaaagaaatatctgaagctggtgatcagcagcttcccgataagatctcaggagttgggcaagtgggctcacaaatgcacactgagagagtcaaatggcggagtttgacaggtatatgatctcctag

SEQ ID NO: 928338 - DNA, 626 bp, Homo sapiens
ctgagaatctctgttctcagggagggagagtgggactttgtgttggaactcggtgctgccaacatgcacagacctcagcaaatgcccatggagggaccacttagagcagccctagccagagggaaatcacccattccagatgytacaacctgagttttggcaaaccttgccaccatgggctaaagtgttctgaggctctaaacaacttgaaaggcagtctaggccacaagaactgcaactcctaggcaagttttattgccgtgtggggtcagagccagtgggcttgaggtgcacatgacctagtgatatacctagctaaagaagtgggttgtgccatccctcccccaaccccaggcagcacagctcactgctccaaagaagaccccctcatttcacttcgagagaggaagagaaaagagtaaagaggactttgcaacttggataccagctcagccacagcaggatagggcaatgggtagagtagtgaggcccccatcttaggccctagctcctggaagacatttctagacacacatgggccagaagaaaacccactggcttgaagggagggatgcagtcctggcacaattcatcacctgctgactaaagagcccttgggcactgaa

SEQ ID NO: 928339 - DNA, 631 bp, Homo sapiens
tctcagctttgcatatgtaaggctgaaaccaaagtttcacaaaacaatacctacttttgaaaccacctttgcaaaattataactgaggaaatgacaacagtgaaagaaatcagacctaaccgactccatctcgcttctaacctttaagctgtccttgttcattcctgggcatgggctgaacaaactttgggatggaattcagttcatggtttgactstgacacagaattgataatagcagtttccggaaaagaccccctgcttgcctggggaccagtctgcctttgcaggactaacaaattagctacaagatgagaagttacagtttaggggtcatgcagcctctggctccaagagtctaaacccccccagattgctcctaggaataagatcactgttgtaaaacctaagatcagcgcttgagatattttgcagagcctgcattctgatgcaccagctaacaccacccagaccagtcatctggctcagccagttctgctatcccacccaggaacagaagacagcaagaaaaactcacttcaaacccctgattccatctccagtctggccaatcagcactccccatttcccaagcctctaccggccaaattatctttaaaagctctgatccc

SEQ ID NO: 928340 - DNA, 746 bp, Homo sapiens
gagcggttttgagtgagtttcttaatgctgagttctagtttgattgcactgtggtctgagagatagtttgttataatttctgttcttgtacatttgctgaggagtgctttatttccaagtatgtggtcaattttggaataggtgtggtgtggtgctgaaaaaaatgtatattctgttgatttggggtggagagttctgtagatgtctattaggtccgcttggtgcagacgtgagttcaattcctgggtatctttgttgactttctgtctcgttgatctgtctaatgttgacagtggggtgttaaagtctcccattattaatgtgtgggagtctaagtctctttgtaggtcactcaggacttgctttatgaatctgggtgctcctgtattgggtgtatatatatatttaggatagttagctcttcttgttgacttgatccctttaccattatataatggccttttttgtctcttttgatctttgttggtttaaagtctgttttatcagagactaggattgcaasccctgcctttttttgttttccatgtgcttggtagatcttcctccatccttttattttgagcctatatgtgtctctgcaggtgagatgggttgcctgaatacaacacaccgatgggtctcgactctttatccaatttgccagtctgtgtcttttaattggagcatttagtccatttacatttaaagttaatattgttatgtgtgaatttgaacctgtcattatg

SEQ ID NO: 928341 - DNA, 667 bp, Homo sapiens
ccatcccctgaagcctccctgaatagttttctccctgatccagtcactttttccgtcccatagattctacttctacagtatctctcagctccatccctctccactgcctctggcttcctttatgctctcatcagctctttactggcccagcttttgctagtctcactcctgctataataaaacaaggcaaaacctaagtgactccctcatcagtcaggttatgctatcttatatgtgtaacgaaacaatgaactccaaaatccccagggcattcagcaacaaaggcttatttctcacacacacactacacacttctcactagttggctgtatttctctgttccacgttactccaggccatactctggaatggagcagctaccttatggaataatgatggtstttctgtctgagacaaggagaaggggccgggcatggtggctcacacctgtaatcctagcactttgggaggctgagaaggaggatcacttgagctcagtagtttgagaccagcctggacatatagtgagacctcatctctgctaaacatgaaaaaagatagctggatgtggtggctcatgcctgtagttccaactactcagggggtgggggtcaggggtgctaaggcaacaggatcacttgagcctgggaggtgaaggctgcagtga

SEQ ID NO: 928342 - DNA, 688 bp, Homo sapiens
gtttctgtgcatcaggagtctaggcatgacttagggtcctctgatcagagtctcaaaaggtggctatcaagttgtcggtcagagctgggttcttgtacgaggtctcctttcaacctcatgtggttgtcagacaacactcaattccttgtagtcgcaggatttgtggacttgcttcttcaaagccagccacagagaaagaacagcagggaagattgagaaagtcagtctcgtgtgagtacaccagtggaacatgcccttatgcaacataaygtatcacaggagtgaagtccgctcacctttgatatacttattgggtagaagcaagtgataagtcccattcatagtgaaggagagggaatactagaaggacatgaaccccaaaagccccagaggcaggagtcaagagtctgtcttccacagtcactgaggctgcagaccagagtagtgataagatgctgataagaacctccctggctttcttaccttctctctctcttcatcttatcctatacacccactcttttcttaccttgcactcccaccaaccccgtaacaccatgcagcagcttctgatctttccacatttcccagggatccatttgccaggaaacaacaccagaagactttgctgctcacggctttcctggaagtccgggagaaggaaagaaggcctttggagggctctgtg

SEQ ID NO: 928343 - DNA, 688 bp, Homo sapiens
gtttctgtgcatcaggagtctaggcatgacttagggtcctctgatcagagtctcaaaaggtggctatcaagttgtcggtcagagctgggttcttgtacgaggtctcctttcaacctcatgtggttgtcagacaacactcaattccttgtagtcgcaggatttgtggacttgcttcttcaaagccagccacagagaaagaacagcagggaagattgagaaagtcagtctcgtgtgagtacaccagtggaacatgcccttatgcaacataatgtatcacaggagtgaagtccgytcacctttgatatacttattgggtagaagcaagtgataagtcccattcatagtgaaggagagggaatactagaaggacatgaaccccaaaagccccagaggcaggagtcaagagtctgtcttccacagtcactgaggctgcagaccagagtagtgataagatgctgataagaacctccctggctttcttaccttctctctctcttcatcttatcctatacacccactcttttcttaccttgcactcccaccaaccccgtaacaccatgcagcagcttctgatctttccacatttcccagggatccatttgccaggaaacaacaccagaagactttgctgctcacggctttcctggaagtccgggagaaggaaagaaggcctttggagggctctgtg

SEQ ID NO: 928344 - DNA, 688 bp, Homo sapiens
gtttctgtgcatcaggagtctaggcatgacttagggtcctctgatcagagtctcaaaaggtggctatcaagttgtcggtcagagctgggttcttgtacgaggtctcctttcaacctcatgtggttgtcagacaacactcaattccttgtagtcgcaggatttgtggacttgcttcttcaaagccagccacagagaaagaacagcagggaagattgagaaagtcagtctcgtgtgagtacaccagtggaacatgcccttatgcaacataatgtatcacaggagtgaagtccgctcacctttgatatacttattggktagaagcaagtgataagtcccattcatagtgaaggagagggaatactagaaggacatgaaccccaaaagccccagaggcaggagtcaagagtctgtcttccacagtcactgaggctgcagaccagagtagtgataagatgctgataagaacctccctggctttcttaccttctctctctcttcatcttatcctatacacccactcttttcttaccttgcactcccaccaaccccgtaacaccatgcagcagcttctgatctttccacatttcccagggatccatttgccaggaaacaacaccagaagactttgctgctcacggctttcctggaagtccgggagaaggaaagaaggcctttggagggctctgtg

SEQ ID NO: 928345 - DNA, 714 bp, Homo sapiens
caccatattcctctatatcattgaacatgaaggtatgatgtttgtcccttttgtttattgttgctttttttagacaatttacaccccttcccccttaaaaaaaaaacttggatttgaagattatactctcagattgtatcactcactacctctcctttttgtagtcatctatacaaacctaggccaatccccttcatccctcaaggattttagcctcaagaccattgcaactccctgcagtagtattctgagtgatttcaatattctttttttttttttttttaagacggagtctcactttctcgcccaggctggagtacaatggcatgatcttgactcactgcaacctctgcctcctgggttcaagtgattctcttgtctcagcctccagagtagctgggattacaggcgtgtgccaatacaaccagctaatttttgtacttttagtagagatggggtttcactatgttggctaggctggtctcaaactcctgacctcaggcaatccacccmcctcagcctcccaaagtgctgggattacaggcgcaagccaccacacccagccataatttcaatattcttatgtgtgatcttcccagtaccatggtctccaaggttctctgtctattctatttcagtagtttaattctccacttaacttagttgctcattcttataatcacaggtagatcttatcatcaatattaattgcac

SEQ ID NO: 928346 - DNA, 786 bp, Homo sapiens
ttccatataatatctggaatgtaattatactaaaaaaaattgttcctctgcaatttaaatttaactgggcagcttctgttttatctagcaacccctaaccttggttttctcatctgaaaagataaaaataaataactggtaatgtatcagtgtcaccaagtcttctacttgtctttaaatatccatccttgtcttctcccttagtaacagaacactaaatttttagctgggcttgaagctacccaactaaatgattacatttcctagcctcccttgcagaaagaaayggccatgtgactaagttctgcccaaagatgtgatggagaatatagagtagagagatttctaggaacttgccttgaaaataaaagattacatccagtttttgacttcttttccttacatggatgtaatggctgaaattctaacaaattccgttctaggccataaggatttgctgcatgccctgagggttggcagacacaagagctgaaaacattaggcagtaatgaccattggccacagtccttaccttggctgcatgttagaattttctgggcactgttgaaaactccccatgccccaaacaattaaatgaaaacttctgtggacatctgtactttttaaattttaaaattaattgtttcattgatataattgtacatattattgcagtacaatttgatgttttgagacttatctattttggataatgatctagtcaaggtagttggtgtatccatcgcccagtgcatttattatttctttgtggtgagaacattcaaa

SEQ ID NO: 928347 - DNA, 568 bp, Homo sapiens
tcacatataacctataccctgacacccttatgttaacttacacaaccattgtataattatcaaaaccagaaaattggtagaatgctaaataaatttagtaaaccataagccttacttgaatttcatcagttttctgcctaacgtttcttttacccttttagaatcaaatttaagagctcataatgcatttaattattgtgactcctttgtctcyttcaatcactaatagtttgtaaatgttttgttatctttcatggcccttgacacttttgatgagctctaataagtcattttgttgaatatttggatttgtctgatgttttgtcatgatcatacggagattatgcattttttggcaaggataccacagaagtgttgtctttttgtcagtacgctataccagggagcacaatattttgatgtgccgcattgctagtgtgttaaccttgattatctggtataggtggtatctgctgagtttcaccactataaagttactacattctctttataattgataaatatctttggaaagctacttcgaggttatgccaacatactgtttctc

SEQ ID NO: 928348 - DNA, 591 bp, Homo sapiens
tctgtctggtcttgggttttttgtttttttttgttttgttttgtttttctggttggtaggctactactgcctcaatttcagaacttgttattgttctattcagggatttgactgttttcctggtttagtcttgggagggtgcatgtgtccaggaatttctccatttcttctagattttctagattttatttccatagaggtgtttatagtattctctgatggtaattagtatttctgtgggatcagtggtgatagtccatttatcattttttattgtgcctatttgattcgtctcacttttcttctttattagtttggctagtggtctattttgttaatcttttaaaaaaaccagctcctggattcattgattttttgaaaggtttttcatgtctctrtctccttcagttctgctctgatcttaattatttcttctcttctgccagctcttgaatttgtttgctcttgcttctctagttcttttaattgtgatgttaggttgtcaattttagatctttcctgctttctcctgtgggcattttagtgctataaatttccctctaaatgctgcttttgctgtttcccagagat

SEQ ID NO: 928349 - DNA, 756 bp, Homo sapiens
aaggtagtcatcaataccagctttttttttcttgagacagagtttcgctcttgttgcccagactggagtgcaatggcacagtctcggctcactgcaacctccgcctcccaggttgaagtgattctcctgcctcagcctcccaagtagctgggattacacggtacccacgaacacaccgggctaatttttgtactttttagtgggatagagtttcaccatgttggccaggatggtctcgaactcctgacctcaggtgattcgcccacctcggcttcccaaagtgctaggattactggcatgagccaccttcttttgttaaaaacttggtttgtgcatgtatacacttgtactaagaaaatatcttcattttatttcctttctcttttatcatgtaagatttattgacttcacatcagcacatcacatcagcataaagtattgttaactttatgtaatagtatttgggttggggatyggtgcatttccggttgtatgaaggatagttatattatcttaggtgtaattatgaccttattattgtctttatttgaagattatgtatgatctcaggagatgtgtatgggttcaagttgacaaagggtggacttgtgatggttaatactgagtgtcaacttgattggattgaagtattgatcctgggtatgtctgtgagggtgttgccaaaggagattaacatttgagtcagtgggctgggaaaggcaaacccacccttaatctgggtgggtgggcacaatc

SEQ ID NO: 928350 - DNA, 773 bp, Homo sapiens
ccaaatttgtctgttgaagttctaattcccagagactatatttggagacacggtctttaaagagataattaaggttaaatgagggcattcgtgtaggccctaattcagtatggctggtgtcctcataagaagaagagcttgggtagggcacggtggctcacgcttgtaatcccagaactttgggaggctgaggcgggtagattgcctgagctcagcagtttgagaccagcctgagcaacacagtgaaaccscatctctactaaaaaatacaaaaaattagccaggcatggcggcgtgcacctgtaatcccagctacttgggaggctgaggaaggagaattgcttgaacccgggaggcagaggttgcagtgagctaagattgtgccactgggtgacagagtgagactccatctccaaaaaaacaaaaaaaaagaaagaagaagaagaagagcttagctgggcgcggtggctcacatctgtaatcccagaaatttgggagactgaggcaggtggattccctgaggtcaggagttccagaccagcctggccaacatggtgaaaccccatctctactaaaaatacaaaaattagccaggcgtggtggcacgcgcctgtaatcccaactactcaggaagctgaggcaggagaatcgcttgcacccgggaggcggaggttgcagtgagccgagatcgtgccaccacattccagcctgggcaacagagcaagacttcgtctcaaataaataaataaataaataattttttaaaaatgaag

SEQ ID NO: 928351 - DNA, 815 bp, Homo sapiens
ccactgcactccaccctgggcaacagagagagactccatctctataacagcaacaacgacaactgttgcaggaagtcagggactttgaacagagggactggctggagctctggcagaggaacataaattgtgaagatttcattttaatatggacatttatcagttcccaaaattaatacttttataatttcctatgcctgtctttactgcaatatctgaacataaactgtgaaaatttcatggacatttatcagttcccaaataatactcttataatttcttatgcctgtcttactttagtctcttaatcctgttatcttcgtaagctgagaatgtacgtcacctcaggaccactattgtacaaattgattgtaaaacatgtgtgtttgaacaatatgaaatcagkgcaccttgaaaaagaacagaataacagcaattttagggaacaagggaagacaaccataagggctgactgcctacagggtcaggcagaatagagccatatttttcttcttgcagagagcctataaatggacatgcaagtagggaagagaccgttgaattcttttcctagcaaggaatattaatagttaatatcctggggggaaggaatgcattcctggagggaggtcaataaatggccgctctgggagtgtctgtcttatgtggttgagataaggactgaaatacaccctgatctcctgcagtaccctcaggcttattaggatgggggaaaaaaccccaccctggtgaatttgaggtcagactggttctctgctcttgaaccctgttttctgttgcttaagatgtttatc

SEQ ID NO: 928352 - DNA, 674 bp, Homo sapiens
gcttataggtcatgccagacctgacaccgagagggtccctcagtcaagtctccccatcatctgtaaaatggccactgaggcactcagtcattattggcattgatcttagctgaaaaacttgtacaaagtctatactactgcatcttctcrgaatcagagttaccacaatcttcacaattagcataccaagactcatctgcaagtgaaagccactgtgtaaagtttggaagaggtgattgttctgccaggtgtaaagacattgatgcagaaacaaaaaggaaatacgaaagagcgagacaatatgatatcaacaaagaaacacgataattctccagtaactgaccccaaagaaaaggaaagttatgaatttcctgaaaaggaatttataatgatcttaaggaaactcagtgagatacaagagaatacagatagacaaattaggaaaagagtttcctaattcagcaaatttaggaaaattaggaaaattaggagaagagtttaaagaatttaaatgagaaacttaacaaagagataaatatcatttaaaaagaaccaaacagaaactttggagctgaagaatttaatgaatgaaatgaaaaaaattaatagagagttttaatagcagactagagcaagcagaagaaagaatctctgaatttggagctaggtctttt

SEQ ID NO: 928353 - DNA, 674 bp, Homo sapiens
gcttataggtcatgccagacctgacaccgagagggtccctcagtcaagtctccccatcatctgtaaaatggccactgaggcactcagtcattattggcattgatcttagctgaaaaacttgtacaaagtctatactactgcatcttctcggaatcagagttaccacaatcttcacaattagcataccaagactcatctgcaagtgaaagccactgtgtaaagtttggaagaggtgattgttctgccaggtgtaaagacattgatgcagaaacaaaaaggaaatacgaaagagcgagacaatatgatatcaacaaagaaacacrataattctccagtaactgaccccaaagaaaaggaaagttatgaatttcctgaaaaggaatttataatgatcttaaggaaactcagtgagatacaagagaatacagatagacaaattaggaaaagagtttcctaattcagcaaatttaggaaaattaggaaaattaggagaagagtttaaagaatttaaatgagaaacttaacaaagagataaatatcatttaaaaagaaccaaacagaaactttggagctgaagaatttaatgaatgaaatgaaaaaaattaatagagagttttaatagcagactagagcaagcagaagaaagaatctctgaatttggagctaggtctttt

SEQ ID NO: 928354 - DNA, 762 bp, Homo sapiens
ggtggggatgagaaggggtatggtaagggggtagggagcagggctgctgtggctgagatattcagcaacaacctctctgagaagatgacattcaatcagagatgtggatggtgtgaaggaggatattctgcggaaaagcccagttggcagagggcactgcacatgcaaaggctgtgaggctggccatgcttagggtgctcggtggaggccagtgtggccaggtcgggtgggggaggggggctggtaagtgcagaggtaagtgaggcaggggagctgacacagggccacggctttccttcaacgtggggagggcttgggacaccatgtggggttttttttttttttttttttttggggggggttgtttttgagacagggtcttgctctttcacccaggctatagtgcagtagcgcaaccatggctcactgcagcctcgacctcctgggctcaagcgatcctcstacctcagcttcccgagtagctggaactatagttgtgcaccgccatgcctggctaattttaaattttttgtagagacagtcttgctgtattgcccaggctggtcttgaactcctgggctcaaggaatctgcccgcttcagcctcccaagggacaccatggtttaagtggcggttgtgcctgaacatgtgacctgtgtcccccgtgtgtctgtgtgcacatgtgtggacctagaccaccaagggaagggcagcaggctgctggggggtggtgtacatggagcagagagtcaaagagccttg

SEQ ID NO: 928355 - DNA, 764 bp, Homo sapiens
tctgttggagtttgccggaggtccactccagaccctgtttgcctggatatcagcagcagacgctgcagagtggctgatattggtgaacagcaaatgttgctgcctgatcgtttctctggaagttttgtctcagcggartacccggccgtgtgaggtgtcagtctgcccctactgaagggtgcctcccagttaggctactcaggggtcagagacccacttgaggaggcagtctgtccattctcagatctccatctgagtgctgggagaaccactactcccttcaaggctgtcagacagggacatttcagtctgcaaaggattctgctgtcttttgtttggctatgtcctgcccccagaggtggaggctacagaggcaggcaggcaggcctccttgagctgcggtgggctccacccagttcgagcttccccgccactttgtttacctacccaagcctcagcaatggcgggcgcctctccccaagcctcgctgccgccttgcagcttgatctcagactgctgtgctagcaatgagcagggctctgtgggcataggaccctccaagccatgtgcgggatataatctcctggtgtgccatatgctatgaccattggaaaagcgcagtattagggtgggagtgacccaattttccaggtgccatctgtcacccctttctttgactaggaaagggaattccctgaccccttgcgcttcccgggtgaggcagtgcctcgccctgcttcggctcatgctcggtccgctgcgcc

SEQ ID NO: 928356 - DNA, 767 bp, Homo sapiens
gagtttgccggaggtccactccagaccctgtttgcctggatatcagcagcagacgctgcagagtggctgatattggtgaacagcaaatgttgctgcctgatcgtttctctggaagttttgtctcagcggagtacccggccgtgtgaggtgtcagtctgcccctactgaagggtgcctcccagttaggctactcaggggtcagagacccacttgaggaggcagtctgtccattctcagatctccatctgagtgctgggagaaccactactcccttcaaggctgtcagacaggkacatttcagtctgcaaaggattctgctgtcttttgtttggctatgtcctgcccccagaggtggaggctacagaggcaggcaggcaggcctccttgagctgcggtgggctccacccagttcgagcttccccgccactttgtttacctacccaagcctcagcaatggcgggcgcctctccccaagcctcgctgccgccttgcagcttgatctcagactgctgtgctagcaatgagcagggctctgtgggcataggaccctccaagccatgtgcgggatataatctcctggtgtgccatatgctatgaccattggaaaagcgcagtattagggtgggagtgacccaattttccaggtgccatctgtcacccctttctttgactaggaaagggaattccctgaccccttgcgcttcccgggtgaggcagtgcctcgccctgcttcggctcatgctcggtccgctgcgcccactttccga

SEQ ID NO: 928357 - DNA, 731 bp, Homo sapiens
cttgtgaaaggctgcagcgaggggctgaggcagatgctccctcctggccctccacggagcccacctgcctacacctggatcttggactcatggcctccagaccttgtagagacatttcttttctttttctctcccttccttcctttctttccttccttccttccttccttccttccttccttccttccttccttccttccttcctttctttccttctttcttctttttttgttttgttttgagacagaattttgctctgtcacccatgctggagtgcagtgacgccatctcatctcactgcaacctccacctcccgagttcaagggattctccggccttakcctcttgagtagctgggattacaggtgcctgccactacacccggcttatttttgtagttttagtagagactggggtttcaccatgttggccaggctggtgtcttactcctgacctcagatgatccgcctgcctcagcctcccgaagtgctgggattctaggcatgagccaccgcgcagggctggagagacgtttctgttgaagccgcctggtttgcggtgcttggctccagcagcctcaggccacacacaatatcccagggcggcaccctcaatgccaggccctgctgggaagtcaagggccgaggtgaacatgccctctgcacggtaggggattcagagtgccgccctgcacctgggctgggggaggagcgcagagcacaccggcagac

SEQ ID NO: 928358 - DNA, 583 bp, Homo sapiens
aaagctaattcaccacaatcaagtaggctttatctctgggatgagagattggttcaacatatgcaaatcaataaatgtgattaatcacagaaacagaactaaaaactaaaacgacatgatcatctcaatagatacataaaaggctttcaataaaattcaacatccctttacattaaaaactctcaaactaggcattgagttaacatatcttcaaataataagggkcgtctatgaaaaacccatggtcaacatcatactgaatgagcaaaagctggacgcattccccttgagaactggaacaacacaaggattcccactctcgccattcctattcaatatagtactggaaatcataaccagagcaatcaggcaagtgaaaaacataaaaggcgtccaaataagagaggaagtaaaattatcctcatctgcagatgatataattttatggctagaaaactccatattctctacctcaaaactgggtctgataaacaacttaagcaaagtttcaggatacaagatcagtccatttctgtgtactaagaatatccaggctgattgccaactcaagaaccaatctcat

SEQ ID NO: 928359 - DNA, 583 bp, Homo sapiens
aaagctaattcaccacaatcaagtaggctttatctctgggatgagagattggttcaacatatgcaaatcaataaatgtgattaatcacagaaacagaactaaaaactaaaacgacatgatcatctcaatagatacataaaaggctttcaataaaattcaacatccctttacattaaaaactctcaaactaggcattgagttaacatatcttcaaataataaggggcgtctatgaaaaacccatggtcaacatcatactgaatgagcaaaagctggacgcattccccttgagaactggaacaacacaaggattcccactctcgccattcctattcaatatagtactggaaatcataaccagagcaatcaggcaagtgaaaaacataaaaggcrtccaaataagagaggaagtaaaattatcctcatctgcagatgatataattttatggctagaaaactccatattctctacctcaaaactgggtctgataaacaacttaagcaaagtttcaggatacaagatcagtccatttctgtgtactaagaatatccaggctgattgccaactcaagaaccaatctcat

SEQ ID NO: 928360 - DNA, 619 bp, Homo sapiens
ccaagtattgatgataagtaaaactgtgattccttaaggacagttttaagttgctatctcattttgttggggcaggggggcatcgatttttattattaaagtataattgcataagatatatagatctaaaattaactattaggtaaatacactagcataaacatcactcagcagaagacatagaaaattatcagcatcacggggatatctctcatgtccctccctgatattatgcactctccccaaaatcatcaatattctgatttctatcatcttgagttatttaggctaggtttagcatttgtttaaatggctagcacaaataaagctggtatgagtatacatacgcttatttgggtatttactaagagtaaaatttccacgtcgtacttagagctagtataaaacctaaatgagtttcccaayaaattttatcaatttagattcccaacagcaatgtacaagatatttagttgctccaaatccttactcacttttgcttttgtcatgtgtgtgtgtttcatactaatattctcacaggtacatggtagtatttcattgtggttttaatttgcatttccctaatgattgaaatgggcacgtttgcccatttgaatat

SEQ ID NO: 928361 - DNA, 674 bp, Homo sapiens
ccgtaagggctgggggtgaagacgtgagagagactggccaggatctcactgaggtctgtaagtttgtaggtgtttctggggtgtggggtacagactcccgctgaaatctgggcgtggttggagagtagctgggacagacaggagagtcatgggtggctgggggtgagctgctggatgatggcagtaagaacatatggtatattattgatgaacgaggtgactgtgaagaatctccagaggaggacacgggagaacacaatgacatgagtgactgtcctgcttggttaggaaagggaaacgtaaagctgtggaattctgttgatgatggatgtgagagtggtgaagccctgcgggatgatgtagagtacttccacatccctggtgaggagctgccccttgggtctgagtttctgggaggggagagggagaagctgggtgaggcaggcatgaatcttgaggagtcagggctgggggaccgctcatattctcccgagacttgtgagtctctgggggactyctgggtgcatggggctgactcccgcaggaacctggggatggctggagagtaactgggagccacaggagagtccctgagtactgggggtgaagagatgaaagacacaggggtggagcaccgtcaggctcatgagtttgtaggtgattcctgggtgtgg

SEQ ID NO: 928362 - DNA, 780 bp, Homo sapiens
agagcagtagccagtctataatgacataattgaatttccatttccagtgttttgtttttgtgtcttacattgtacagttcagaaatgagcattttattcccaattgtcaaaatgctaagctgtccactgtactgaaatactgtttttgttaatgcttcgtcattcaattttttttaaggtgaacactttcatccaacttttctcaagtcagagtacaggtaagccctggctgccttgagccactctcagggagaccaaaacccttcatacattccaagttggggtacaaaaaagtggggccatgaaggctagtcattcaaaataaaacaaaatttgaaagtattaaggcaaakatttaaaaaaattttgcattacataatttacacaaaagcaatgctatcgcctaccatgtgtgaactcgggagaggactgggccattctccttaaagagaagtagggtggcttttaggagggcaaggggcttcctgaaacaatgcatctcacaatatttggaatgactattgaaaagaagaacattgtacaatcaaagtccttggcgacattgtagaacaggcgggtgctgacccctgagacacaaccacagttctgggtttgggggtttggtaaaaccaccccaaggacagagttctggggccgggttttggaggaaccaaggcgcctccaagggatggtgtgtcactcctgcttgccatgaatgtgccacaggctgtcccctgccatccatcctgctggacaggatgggggaagtgagggaacagg

SEQ ID NO: 928363 - DNA, 656 bp, Homo sapiens
cccccacacccaggaatcacctacagactcacgagcctcacggtgctccacccctgtgtctttcatctcttcacccccagtactcagggactctcctgtggctcccactaactctccagccatcccaaggttcctgcgggagtcagccccatgcacccaggagtcccccagagactcacaggtctcgggagaawatgagcggtcccccagccctgactcctcaagattcatgcctgcctcacccaccttctccctctcccatcccagaaactcagacccaaggggtagctcctcaccagggatgtggaagtactctacatcatcccgcagggcttcaccactctcacatccatcatcaacagaattccacagctttacgtttccctttcctaaccaagcaggacagtcactcatatcattgtgttctcccgtgtcctcctgtggagattcttcacagtcacctcattcatcaataatataccatatgttcttactgccgtcatccagcagctcacccccagccacccatgactctcctgtctgtcccagctactctccaaccacgcccagatatcagcgggagtctgtaccccacaccccagaaacacctacaaactcacagacctcagtgagatcctggccagtctctctcacgt

SEQ ID NO: 928364 - DNA, 592 bp, Homo sapiens
  misc_feature 181: n = A,T,C or G
agggagaggcaggtgcatgctgggaggtcaggacctgtgagggctgtgggggcatcaggtggagtgggctccaggtgcaccctcagtgcaccaggcaggtctcaggccaggctccctggaccccggctgggtgatgtggtcactccctgggggactgttgtcagaccctggccaccctccntgggcagcaccgtcccatcccagaactggactttctgagttctaaaacaggacagtgctgcccaggcctgacagactgggaggacctgtgaagtcctccatccctagaccagcctcccaacagcagggacagtctcctacctttaccttcaggtaaaggtactgatacatctcattctaaggcaaccaaggcagasctgaggacctgtgccaggctgggagccagttctctccctaaatgggccttagggaagcctcatccctgtcccagtgcactgcaagtttcagcccaggagacacatagggaagtgaggaaggggtctccccactggctgaccctggaaaagtgggacctgggagaagagggagtgcagggctggcaggggatgctccagacccatggagagctcag

SEQ ID NO: 928365 - DNA, 607 bp, Homo sapiens
tctgcatatctaatttttcccacaaattactgttttgaattgcactgaattcaatttaaggggatgccatttataaacagtgcaaatatatactgcacgagggatcttaaaaatcatacgtatggtttgatccacaagctcmtatgagcgtgcaatgtcaacttttttcatgtttttttaagtccacttaaattctattttaagccaccatctgcctgtgctgttagggcagttagccctcaatcattttaagatgctcccctctaagtactgtgatagtgatagagatgtcaccagtcaagtgtcctaggaagccgactccgagttggagatttgcatgcaaggaggttgaaatgatattcccaacacctgtggaagagcgaaagcaataggattgggtggagcaggaagtcggctggaatgcaatcactatcatggccgcagtgcactctacagggatcttggtgagtttacctaatgacctcaaattggagcaagcaaacaaggccattatatttctgtaccaagcagttctcggatgtgggatgccttgagaagggacatggatttggatgaaggaactttactgtgctgtgagtattgttga

SEQ ID NO: 928366 - DNA, 563 bp, Homo sapiens
aaggcacctgcaaggactgctctgtgatggcagcagtggtccacgtggagcagttgctacggagacactgactgaggtggggaggagtggctggggctgtgcgctcctcgaagctggtgggagccaggaacgggtgggagccccaccccttctaaattggcaggcaggagccccgccctcccaggcacagatgcagccatccagccatgactgcaaacccgggcatctttgcactctcagaggcccagcaagcccccctgtccccgcaggctcagtcgtgcctggtcccaccacctggcatctttccactcccagagcccaytccaacttcggatccaagttgaggctgaacccaggcacagtcgcaacccggcccggtttgtgcaagctcagggcagtgctgacatgccagctccctgccacctcggccccctccagactttgggcagtgacgagcacaagagggaggttgaggtggggctaagagtggctcagcactggtctgaaggcactcctcagctcgaacagcctcggcaatgtgggtacagctaaccacagtgcgt

SEQ ID NO: 928367 - DNA, 616 bp, Homo sapiens
tacaagccagaaaagatattcaacttcttaaagaaaagaaatttcacgtagtatggcagagacagatataccatataataacatggtgttattataaatggttaaaagaaaaagaaatttcaacccagaatttcatgtccagcaaaattaagcatcataagtgaaggagaaacaagatccttttcagacaagcaaatgctgagagaattcattatcaccagatctaccttacaagagctcctgaattaagcactaaatatggaaagaaaagaccatcaccagccactacaaaaatgcaccgaagtacacagactattaatgctaaaaaccaaccacatacacaagtctgcaaaataactagctgacagcatgacgacaggatctaatccacacataccattactaaccttaaatggaaatkggctaaatgctccgattgaaagacacaggggggcaagctggataaagaaccaagacccatttgagtatgccatctccaagaaacccatctcacattcagtatcatacataggctcaaaatgaaggaatggtgaaaaatctttcaagccaatggaaaacagaagaaatcaggtgttacactcccagtttcgacaaa

SEQ ID NO: 928368 - DNA, 548 bp, Homo sapiens
cttttaatttctgcttttagtttctccttaccattagaacactcagtaatcatatgaattgtgcatttgttgttttgcttaactctttttgtttgtttatgcttggggctttattgttgttgtttcacttttctcccgtctcttcctgayttggtcaaatccaaaggaattttccaaattgtgggcagcaaggcctctgaattggctaaaactcctatggctgcaaacaaacaaacaaacaaataaacaacaacaaaaaacattccagttagcagaaattattttttaaaacttttttttttacataagtggtctcatctacataacaaggccacccttttgctagccaaggctaaactgaaggagtagtggtggtgacccaatgtgaagattctgccctgttcactacagaaacctgagtttggttcctaagtctagttctttctgtttgatatttgtgttacttttaaagcgtcagcagtttgtcccagctatgatgtggtaataaaagattcaaaaggattttctttacaagttctatgattaaa

SEQ ID NO: 928369 - DNA, 766 bp, Homo sapiens
caatattttcctcatcttgctgtcttctaagctttcccaattcttctgacctctgtcttttactcacttctgaacctggttctacattgtcagctatctttatcagagcctggcaatgtggtaaaacagaaaagtccattttcgggggaaaattcacgaaggcttcagatatttgcatgaaaagaagctgagtgctggttgccaagacaaaggggaaagggccttgaaggcatttcatggctccacttcatagcactgattttctgtatgatcataaagaaaagaggtttaattggctcactatacagcaggctgtaaaggaagcgtagtggcttctgcttctgggaggatcagatcaggaagcctcccaatcataccagaaggccaaggggcaatgagatatttcaaatggcaggagtagaagcaagactgcgagaggaaagagttrccaccccgttatataaccagatctcatgagaacacactatcatgaggacagcatcaagaagacgttgcctaaccattggtgaaggatctgcctcccacacccacctcctactgtttccacgcagtagcctcctgcagacgaagagttcttgggaaacctctactagggcagtgcagaaggaaaatatggacttggagcccccatgctaccaccctccagaccccagatacatagacccaccaacagcttgcaccctccgtgtggaaaagctacaggcactcaacactagtccaatctatgagagcagccatgggggct

SEQ ID NO: 928370 - DNA, 615 bp, Homo sapiens
acaccctcactgattagaacctcatgaccaggccccactaacaaggcccccactgccgggcacacaatgacaaggactccactgaccaggaccttactgacaaggactcactgacaaggcctcacggactatgtccttactgacaagtcctcactgactaggtcattattgacaaggcctcactgatcaggttccactaatcatgamctcattccctgatcccaaagatgaggccccactgaccaggcctccagggaacaggttgccactgatcaggcccctaataacgaggccttatgtcaccagatgcccctgactgggaccctagtgagtagaccccactgaaccggcaccaaatgctgagatccccgctgaccaggtcaccctgtagaccggtgctacaaaagtcaccactgaccaagtcctctctgaccaggacaatacagattaggtcccactgacaaggctgccctgaccagggccccactgacaagggcctcactgatgaggacacgcccaccagggtctgctgactaagtctcatgtgcccagtcctccactgaatagcaccccttgacctggtcaccagtgccccagcccatgctgaccaggcca

SEQ ID NO: 928371 - DNA, 592 bp, Homo sapiens
tcattggcagatgctttagtagagagcaactgagggatatggcaaagtcccggtccctgcttcatcttcctctatggtcatgtcgtgggccaaactttagagcctatcgctctcaaagacctacctggaaggtataatctgtctgtcaacatctrctcactcgactcaaatgaaatgtcctcttatttagtcccaactatccctccaatagcttcagataacagttatcagcctttcactgagtagtgattttgtatatgtgtgtgtgtgtctgactggcacatatcttatgagattagaagcactagaagggtcaaaacttatcttgggtatttttgtctccttagcaactagaacatgcctggctcatagcagaaagtcaaagaaataaatccaaacaaataatatatatttgttgaatatattcaagacctcattcaaaatccttcaattcttcatcaccttcaaacctgccatagtgttaactccctctgtgattccatagtaatttatatatgattctcttacagcattttcatgtaacttcataattatatatgtatttcccagtagcctatgtaattatcaagca

SEQ ID NO: 928372 - DNA, 592 bp, Homo sapiens
tcattggcagatgctttagtagagagcaactgagggatatggcaaagtcccggtccctgcttcatcttcctctatggtcatgtcgtgggccaaactttagagcctatcgctctcaaagacctacctggaaggtataatctgtctgtcaacatctgctcactcgactcaaatgaaatgtcctcttatttagtcccaactatccctccaatagcttcagataacagttatcagcctttcactgagtagtgattttgtatatgtgtgtgtgtgtctgactggcacatatcttatgagattagaagcactagaagggtcaaaacttatcttgggtatttttgtctccttagcaactagaacatgcctggctcatagcagaaagtsaaagaaataaatccaaacaaataatatatatttgttgaatatattcaagacctcattcaaaatccttcaattcttcatcaccttcaaacctgccatagtgttaactccctctgtgattccatagtaatttatatatgattctcttacagcattttcatgtaacttcataattatatatgtatttcccagtagcctatgtaattatcaagca

SEQ ID NO: 928373 - DNA, 607 bp, Homo sapiens
catcaaatagttaattcaggctgggcacggtgactcatgcctgtaatcccagctctttgggaggctgaagcaggtggatcacttgaggtcaagagtttaggatcagcctggccaacacggtgaaatcctgtctctagtatctatgcaaaaattagccaagtgtgtttgcgmatgactgtaatcccagctacttgggaggcagaggcaggagaatcgcttgaaccccacaagtggagtttgctgtgagtcgaaatcatgccactgcactttaccgaaagcgataggctgagtgagaatctgtctcaaaagaaaaaaaaaaaaaaagtagtcactaattccaccatgatcaagtaggcttaatctgcacgatgcacggttggttcagcatgcacagatcaaaacgtttgattcagcacataaacagaactatagacaaaaaccacatgcatatttcaatagatacaaaaatgtcctttgataaaattcaacatcttttcatgtcaaaaactctcaataaactaggtattgcaggaacatacttcaacataattagagccacctataacaactccacagccaacatcatactgaatgggcaatagctgga

SEQ ID NO: 928374 - DNA, 607 bp, Homo sapiens
catcaaatagttaattcaggctgggcacggtgactcatgcctgtaatcccagctctttgggaggctgaagcaggtggatcacttgaggtcaagagtttaggatcagcctggccaacacggtgaaatcctgtctctagtatctatgcaaaaattagccaagtgtgtttgcgcatgactgtaatcccagctacttgggaggcagaggcaggagaatcgcttgaaccccasaagtggagtttgctgtgagtcgaaatcatgccactgcactttaccgaaagcgataggctgagtgagaatctgtctcaaaagaaaaaaaaaaaaaaagtagtcactaattccaccatgatcaagtaggcttaatctgcacgatgcacggttggttcagcatgcacagatcaaaacgtttgattcagcacataaacagaactatagacaaaaaccacatgcatatttcaatagatacaaaaatgtcctttgataaaattcaacatcttttcatgtcaaaaactctcaataaactaggtattgcaggaacatacttcaacataattagagccacctataacaactccacagccaacatcatactgaatgggcaatagctgga

SEQ ID NO: 928375 - DNA, 607 bp, Homo sapiens
catcaaatagttaattcaggctgggcacggtgactcatgcctgtaatcccagctctttgggaggctgaagcaggtggatcacttgaggtcaagagtttaggatcagcctggccaacacggtgaaatcctgtctctagtatctatgcaaaaattagccaagtgtgtttgcgcatgactgtaatcccagctacttgggaggcagaggcaggagaatcgcttgaaccccacaagtggagtttgctgtgagtcgaaatcatgccactgcacttyaccgaaagcgataggctgagtgagaatctgtctcaaaagaaaaaaaaaaaaaaagtagtcactaattccaccatgatcaagtaggcttaatctgcacgatgcacggttggttcagcatgcacagatcaaaacgtttgattcagcacataaacagaactatagacaaaaaccacatgcatatttcaatagatacaaaaatgtcctttgataaaattcaacatcttttcatgtcaaaaactctcaataaactaggtattgcaggaacatacttcaacataattagagccacctataacaactccacagccaacatcatactgaatgggcaatagctgga

SEQ ID NO: 928376 - DNA, 607 bp, Homo sapiens
catcaaatagttaattcaggctgggcacggtgactcatgcctgtaatcccagctctttgggaggctgaagcaggtggatcacttgaggtcaagagtttaggatcagcctggccaacacggtgaaatcctgtctctagtatctatgcaaaaattagccaagtgtgtttgcgcatgactgtaatcccagctacttgggaggcagaggcaggagaatcgcttgaaccccacaagtggagtttgctgtgagtcgaaatcatgccactgcactttaccgaaagcgataggctgagtgagaatctgtctcaaaagaaaaaaaaaaaaaaagtagtcactaattccaccatgatcaagtaggcttaatctgcacgatgcamggttggttcagcatgcacagatcaaaacgtttgattcagcacataaacagaactatagacaaaaaccacatgcatatttcaatagatacaaaaatgtcctttgataaaattcaacatcttttcatgtcaaaaactctcaataaactaggtattgcaggaacatacttcaacataattagagccacctataacaactccacagccaacatcatactgaatgggcaatagctgga

SEQ ID NO: 928377 - DNA, 654 bp, Homo sapiens
cttttatcgaggttcttagcttcctttcattgggttagaaaatgctcctttagctcagaggagtttgttattatccaccttctgaagcctacttatgtcaaatcgtcaatctcattttccatccagttttgtgtccttgctggagagaagttgtgatcatttggaggagaggaagcattctggtttttgtaattttcagcgtttttatgctttttttttttctcatctttgtgcatttatctacctttgatctttgaggctgatgacctttggatgggggttttatctgggttctttatgttgatgttggtgttgttgctttctgtttgttaatttttcttctaacaatcagggccctcttctgcaggtctgctgcagtttgctagaggtccactttagaccctgtttgcctgggtatcaccagtggaggctgcagaacagcaaagtttgctggctgctccttcctcyggcagcttcatcccagaggggcctggcctgatgacagccagagctctcctgtatgaggtgtctgttgacccctgttgagaggtttcttccagtcaggaggcatgggtgtcagagacgcacttgaggaggcaagctgtctcttagcagagcttgtgcactgtgctggggaatccctgttgtcaggat

SEQ ID NO: 928378 - DNA, 623 bp, Homo sapiens
gagtcaccatttgagcttatgataatccactgtcattatccaagatctagctgtcttctgcacaggccgaacagaagagctgaatgggaatgtgatggaaatcaccacccctgcatcttccaagtccttgatggtggcactaagccytgcaacccctccagggatgcaatattgtttgtgacttactatttttctaggtagaggcagctccaatagctttcatttggcctttcccaccataatagccctcaccctaccagtcagggagccaatgtggggattctgccacctgctaagtccatgtctatgccaattatctattctggcactggagaaatgaccacaggatgattacagagacccactggacccaccgtaaatcaaacctgagctataattccatttaattacctgaccttcataagcctcaactttaactggagaaccaaaatgacactttgggtcccgtggaatcaacatcaattcagagccagagtccagtagttcccgaaaaatctgatttttctcgtgtccccaatatacagttactctggtaaaaggctgaaggtctccttggggaaaatggaagaaagattaacagtataaactgtcagtagagcagt

SEQ ID NO: 928379 - DNA, 615 bp, Homo sapiens
cttgattgccttacaaatgacctgcttccaggatgcggaaattcctaatttcttctgtgacccttctcaactcccccatcttgcatgttgtgacaccttcaccaataacataatcatgtatttccctgctgtcatatttggttttcttcccatctctgggacccttttctcttactataaaattgtttcctccattctgagtgtttcatcatcacgtgggcagtataaggccttctccacctgtgggtctcacctgtcagttgtttgctgattttacggaacgggcrttggaggatacttcagttcagatgtgtcatcttccccgagaaaggctgcagtggcctcagtgatgtacacggtgatcaccccatgctgaaccccttcatctacagcctgagaaacaggcatattaaaagtgtcctgcggcggccgcacagcagcaccgtccaatctccgtgtcttcttaactgttccattccttttgtagtgtgggttaacaaaggcagcaaggtcaaataagaatgatatcacagggtgaacacccaaagtgatattaggagtaatactccctaggatatagaatatactgtcacagagtacacacagatggggtac

SEQ ID NO: 928380 - DNA, 656 bp, Homo sapiens
agcacagcatccatgctctatttctgtgttcaatgggtcacctctgcatgattaattcaacaaggattttttttttaatcaactctctgtgccagagcctgtgctgagtactggacacagagggtagacaagatccccagtgtcctggagcttgcattatagcatgtggagacaaacaggtaaacaagcataaataaggttaactgtggactgagagaagcattacagagaaaacaaaagtgaacaatgtgatggagactagctgagcttggaggaaaagaggttagctacttggagtgggtgttcagggatggcctggcctcactgagaaggtgactgtgacatcatggtgaattacataatgtgactttccaagggaagcatattccaggtaaatagacagcacaaagagcctgaagctaaaataagcttggtgygttcaggagcggagaggtagctagggaggccagaggggagtaagcaaggcaaagagaggtaggaggtaatgttaggtagcaggtgatggcagagaggtatccagggacagaccaggcagaagcttgtaggccatagtgtgctgttagaattttattccaaatgtggtataagagttttaagcaggagagaaacaggagatggtttaggttttcacaaga

SEQ ID NO: 928381 - DNA, 772 bp, Homo sapiens
ttctgtaaatgtcaggtccattttgtctagagtgtagtttaactctgatgtttctttgttgatttttctgtctggatgatctgtacattatatatatatttgggtgcatatatatttacagttgttatatcctcttgctgaattcacccctttatcgttatatagtgaacctctttgtctcttttacaacctttgacttgaagcctataactggtataaggttagctactcctgctcttttctcatttccatttgcatggaatagctttccttcctttcactttcagtmtatgtgtgtctttataggtaaagtgaatttcttgtaggcagcttatagttgggttgtgtttttcaaaaatctactcagccactatatgtcttttagttggagaatttagtcaatttacattcaaggttgttattggatatgaaagtacttaccactgtcatattgttattttctggttgttttgtgactcctctctttcttcctgtgttactgtcttcttcctctgtggatatgtgatttttttctctggtaatatgttttaatttgttgcttttcagtgttagttgtatctattataggtttttgcctcgcagggtttaccatgaggcttacagaaaacttcttatagatataacaagttattttaaataaacgataagtgattacaaagaaaagaaacaaacaaatgaaaaacaaaaaccctgcactttaacttcatcccttccacattttgacttttcgttgtctcaattttcatctttt

SEQ ID NO: 928382 - DNA, 772 bp, Homo sapiens
ttctgtaaatgtcaggtccattttgtctagagtgtagtttaactctgatgtttctttgttgatttttctgtctggatgatctgtacattatatatatatttgggtgcatatatatttacagttgttatatcctcttgctgaattcacccctttatcgttatatagtgaacctctttgtctcttttacaacctttgacttgaagcctataactggtataaggttagctactcctgctcttttctcatttccatttgcatggaatagctttccttcctttcactttcagtatatgtgtgtctttataggtraagtgaatttcttgtaggcagcttatagttgggttgtgtttttcaaaaatctactcagccactatatgtcttttagttggagaatttagtcaatttacattcaaggttgttattggatatgaaagtacttaccactgtcatattgttattttctggttgttttgtgactcctctctttcttcctgtgttactgtcttcttcctctgtggatatgtgatttttttctctggtaatatgttttaatttgttgcttttcagtgttagttgtatctattataggtttttgcctcgcagggtttaccatgaggcttacagaaaacttcttatagatataacaagttattttaaataaacgataagtgattacaaagaaaagaaacaaacaaatgaaaaacaaaaaccctgcactttaacttcatcccttccacattttgacttttcgttgtctcaattttcatctttt

SEQ ID NO: 928383 - DNA, 772 bp, Homo sapiens
ttctgtaaatgtcaggtccattttgtctagagtgtagtttaactctgatgtttctttgttgatttttctgtctggatgatctgtacattatatatatatttgggtgcatatatatttacagttgttatatcctcttgctgaattcacccctttatcgttatatagtgaacctctttgtctcttttacaacctttgacttgaagcctataactggtataaggttagctactcctgctcttttctcatttccatttgcatggaatagctttccttcctttcactttcagtatatgtgtgtctttataggtaaagtgaatttcttgtaggcagcttatagttgggttgtgtttttcaaaaatctactcagccactmtatgtcttttagttggagaatttagtcaatttacattcaaggttgttattggatatgaaagtacttaccactgtcatattgttattttctggttgttttgtgactcctctctttcttcctgtgttactgtcttcttcctctgtggatatgtgatttttttctctggtaatatgttttaatttgttgcttttcagtgttagttgtatctattataggtttttgcctcgcagggtttaccatgaggcttacagaaaacttcttatagatataacaagttattttaaataaacgataagtgattacaaagaaaagaaacaaacaaatgaaaaacaaaaaccctgcactttaacttcatcccttccacattttgacttttcgttgtctcaattttcatctttt

SEQ ID NO: 928384 - DNA, 772 bp, Homo sapiens
ttctgtaaatgtcaggtccattttgtctagagtgtagtttaactctgatgtttctttgttgatttttctgtctggatgatctgtacattatatatatatttgggtgcatatatatttacagttgttatatcctcttgctgaattcacccctttatcgttatatagtgaacctctttgtctcttttacaacctttgacttgaagcctataactggtataaggttagctactcctgctcttttctcatttccatttgcatggaatagctttccttcctttcactttcagtatatgtgtgtctttataggtaaagtgaatttcttgtaggcagcttatagttgggttgtgtttttcaaaaatctactcagccactatatgtcttttagttggagaatttagtcaatttacattcaaggttgttattggatatgraagtacttaccactgtcatattgttattttctggttgttttgtgactcctctctttcttcctgtgttactgtcttcttcctctgtggatatgtgatttttttctctggtaatatgttttaatttgttgcttttcagtgttagttgtatctattataggtttttgcctcgcagggtttaccatgaggcttacagaaaacttcttatagatataacaagttattttaaataaacgataagtgattacaaagaaaagaaacaaacaaatgaaaaacaaaaaccctgcactttaacttcatcccttccacattttgacttttcgttgtctcaattttcatctttt

SEQ ID NO: 928385 - DNA, 705 bp, Homo sapiens
gttttatcctaagtgcattgaaataatgctgagaggtttttaaaattcactgtaactgctgcatggattggagaggccagaataccagttatgagaaactgcagtcaatcaagggaatagctggagggagctgcttctagcttggtggctgcgggaatgaaaagcagtggaagagatgtcctgggagtttgtggagggagaatgagcagtacttagtagtgacagattagatcttggagggaggagggtgataggaagaaaagtatcaaaggcaagcaactgagtagagggatttgccctttcctgagatgataacagttgcgagaaaagtaacaaattcagtggtgaaaatcaagagccgaattgtggccatgtgggttttgagactgttggatacacaaacctggagttgaagactggtctggccaggagataaaagggaagttatcaacatgcccagggtactagacgccccgggagcatattaggaagcttaaggaactgcccccttccctccaggccatcttctatttcttcttacttctatgctcccaaaagcgtcktcttcttttttttttttctttttttcttttcttttttttttcttttttagacagagtctctctctgttgcccacactggagggcagtggtgcaatcatggctcactacagccttaaattcctggactcaagtggtcctcctg

SEQ ID NO: 928386 - DNA, 744 bp, Homo sapiens
tagcatgaattaacacaatcaacccctctactcctttaacagatagatattgagcaccttcttttctccagactctgggactccaaagtgaagtctgtgccttgaaaagctcatgatctcttaggggaggcagacataygatggcaataccagaaatggcctttgttgagcatcttctctgctttgggcactggatttaaaaaaataaaaatcagttctaactaactctccctcttcatggtattatctccaggtagataattcagtactgcaatagactgaatatctgtgtccccatgaaattcacatgttgaaatccaacccccaaggtaattgcatttaagaggtggggcctttaggagatgattggatcatgagaacagaaccctcatgaatggaagtgtgcccttataaaagaggctaagagagcttcctcatcccttccaccatgtgaagacacagtgagaagacaccatctatgaaccaggaagcgagccctcaccagacacacctgccactgccctgatctaggacttcccagagtctagaactctgagaaatcattttttgttgtttgtaagccatccagtctatggaactttattatagcagcccaatcaacctaagacaaacatcttcccaaggccacatagctagtgagttgctagaattcggagccagacctgtctgattcccaagcctgagtgttttctaccacttcacacagtggctcaaagcctaact

SEQ ID NO: 928387 - DNA, 584 bp, Homo sapiens
cagtccctggttcgtggatagcacctcatgactaacctggggcctgggggaaataactgcccaggtagccaggtagttgtttcagcaggtgttgggcaagatcctggcttcaggtatgacccagcacagtcccagtgaccacaggggtgcttgtgtcacctcatccccagttgcaggtggctcagaaagagagagaaacatttttttgtgagaaagtaagggaagagaataagagtgtctgcctggcaatctatagatttcttctggatcttattcaagacgatcaaggtggtacctctatgactgtgcaagaaccacrggataactgggcttggggtggcccccaacagaaacacaacttataacacaacaccttattccttttgaatatttggaaagctttcccaagaaggacaggtacaaacaagcccagactgtgaagaccacagtaaataccaaacccttcaatgctcaggcatagatggacatacacaataatcaagatcatccaggaagatatgaactcaccaaatgagccaaataaagtaccagggaccaatcctagagaacagacatatgtgacc

SEQ ID NO: 928388 - DNA, 634 bp, Homo sapiens
gatcttttgcccatttttttaaatcaaattattagactttttcctatggggttatttgagctccttatatattctggttattaatcccttgttagatgtgtaatttgcaaatattttctccaattctgtgggttttctcttcactttgtttattgtttcctttgctgtgaagaagctttttaacgtgatctatttgtccagttttgctttggttgcctgtgcttatggagtattactgaagaaatctgcccagtccaaggttctggagaatttccacaatgttttctttcagtacattcataagttaaggacatagatttaagtctttaatccattttgwtttaatttttagatatggtgaaagataggggtctagtttcattcttttggatatggatatccagttttcccagcacaatttattgaagagactgtcttttcctcattgtatgttcttggcatctttgtaacaaatgagctcactgtagatgtatggatgtgttactgaattctctattctgttccattggtttctgtgtttgcttttatcccagtaccatgctgttttagttatagtagctctgttgtataatttgaagtcagttaatatgatttctacagttttcttcctttt

SEQ ID NO: 928389 - DNA, 604 bp, Homo sapiens
ctgtaagtagatatttggagtgctttgaggcctattgtagaaaggaaatatccatctgcatttccatctgagctttgaagagagcagtggttctcccagcatgcagctggagatctgagaatgggcagactgcctcctcaagtgggtcccagacccctcacccccgagcagcctaactgggaggcacccgccagcaggggcagactgacacctcacaaggccgggtactccaacagacctgcagctgagggtcctgtctcttagaaggaaaactaacaaacagaaaggacatccacaccaaaaacccatytgtacatcaacatcatcaaagaccaaaagtagataaaaccacaaagatggggaaaaaacagagcagaaaaactggaaactctaaaaagcagagcacctctcctcctctaaaggaccagagttccttaccagcaatggaacaaagctgcatggagaatgactttgatgagctgagagaagaaggattcagatgatcaaattatgccgaactatgggaggacattcaaaccaaaggcaaagaagttgaaaactgtgagaaaaattaagaagaatgtataactagaataaccaatac

SEQ ID NO: 928390 - DNA, 616 bp, Homo sapiens
atgaaatgaatgaaatgaagtgagaagggacgtttagagaaaaatgaataaaaagaaatgagcaaagcctccaagaaatgtgggactatgtgaaaagaccaaatctatgtctgattggtgtatctgaaagtcacagggagaatggaaccaagttggaaaacactctgcaggatattatccaggagaacttcaacaatctagcaaggcaggccaaccttcagtttcaggaaatacagagaacaccacaaagatactccttgagaagagcaacaccaagacacatagttgtcagattcaccaaagttgaawtgaaggaaaaaatgttaagggcagccagagagaaaggtcgggttaccctcaaagggaagcccatcagactaacagcagatctctcagcagaaaccctacaagccagaagagagtgagggccaatattcaacattcttaaagaaaagaattttcaacccagaatttcatatccagccaaactaagcttcataagtgaaggagaaataaaacactttacagacaagcaaatgctgagagattttgtcaccaccaggcctgccctaaaagagctcctgaaggaagcgctaaacatggaaaggaacaaccg

SEQ ID NO: 928391 - DNA, 618 bp, Homo sapiens
ccaaatatccacttgcagatttacaaaaagtggtttccacactgcccaattaaaagtaaggttcaactctgtgagatgaatgcacatatcacaaagaagtttctcacaatgcttctgtgtagttattaagggaagatattttcatttccaacctaggccacaaagggctcygaatatacacttccagattctacaaaaagagagtttcaaaactacacttgcaaaaggtaggttcaagtcagtgagttgaatgcacacatcacaaagaagtttatcagaatgttactgtgtatttttcatataaagatatttccttttccaccataggcctcaaagcactccaactatccacttcctgattcaacaaaaagagtgtttcaaaactgctctatcaaaagaaagtttaagcactgtagttgaatgcacacatcacaaagaagtttatgagaaagtttctgtctagtttttatgggaagatattccctcttccaccataggcctcaaagctctccaaatattcacttgcagattctacaaaaagagggtttcaaaactgctgtatcaaaagaaattttcaacacttttatttgaaagcacacatcacaaagaagtttctgg

SEQ ID NO: 928392 - DNA, 618 bp, Homo sapiens
ccaaatatccacttgcagatttacaaaaagtggtttccacactgcccaattaaaagtaaggttcaactctgtgagatgaatgcacatatcacaaagaagtttctcacaatgcttctgtgtagttattaagggaagatattttcatttccaacctaggccacaaagggctctgaatatacacttccagattctacaaaaagagagtttcaaawctacacttgcaaaaggtaggttcaagtcagtgagttgaatgcacacatcacaaagaagtttatcagaatgttactgtgtatttttcatataaagatatttccttttccaccataggcctcaaagcactccaactatccacttcctgattcaacaaaaagagtgtttcaaaactgctctatcaaaagaaagtttaagcactgtagttgaatgcacacatcacaaagaagtttatgagaaagtttctgtctagtttttatgggaagatattccctcttccaccataggcctcaaagctctccaaatattcacttgcagattctacaaaaagagggtttcaaaactgctgtatcaaaagaaattttcaacacttttatttgaaagcacacatcacaaagaagtttctgg

SEQ ID NO: 928393 - DNA, 613 bp, Homo sapiens
actttggaatcactttagtccttgaaataaaccttggaggaaggtactgtgatcatcgtcttcttataccaatggagcaatcgaggctttcaaggttgaggaaggagcttccctcaagttcttccaagatgagccagatccaatcttccaactcgggttgtcctgaccccagaatccaggccatttaaccactgtgctagactcctactctgaagtccaggccatcactccatcttggtacaggtccatataagattggcagctctcttttccctccctccctycctccctccttctctctctctctctttctctttgcctttctttcttctttctttcttcctttctttctttctttttcttttctttctttcttttctttctttctttctttctttctttctttctttctttctttctttctttctttcttcctttcttctttctttctttcttcttctcgggcgtgcttgctctcttgctttggtcagcagttgtttggctccccctctgcaacaggctctgttcattatatgttcattttcactgtcctgggagataagaaccttgaaatacctgttctgcttctcctgaccctggctgcatggagagg

SEQ ID NO: 928394 - DNA, 596 bp, Homo sapiens
catattttattttattttatttttcttttcttttttttctttccttcttttttttttttttttttttttttttttttttttttttgagacagagtttttttttgtccccaggggggggggcgggggcaagatcttggttcactgcaacctttgtttcccgggctmaagggattctcctgcctccctcctgagtagctgggattacaggcacccgccactgcacctggctaatttttgtatttttagtagaggtgaggtttcgccatgttggccagactgctcttgaactcctgacctcaggtgatctgcctgcctcagcctctcagagcgctgggattacaggtgtgagccaccacacttggcccattttaaccgtttttaaatatagttcagtgggattaaatgtgttcacattgttgtgccaccatcaccaccatttatctccggaactcttcatctcacaaaacagaaactctgtactcactaaataataacgcctcattcccctttccccccagcccctggcaactaccattctaatgtctgtcccgatggatttgactacggtaattgcctcatgaaagtagaatcacgca

SEQ ID NO: 928395 - DNA, 596 bp, Homo sapiens
catattttattttattttatttttcttttcttttttttctttccttcttttttttttttttttttttttttttttttttttttttgagacagagtttttttttgtccccaggggggggggcgggggcaagatcttggttcactgcaacctttgtttcccgggctaaagkgattctcctgcctccctcctgagtagctgggattacaggcacccgccactgcacctggctaatttttgtatttttagtagaggtgaggtttcgccatgttggccagactgctcttgaactcctgacctcaggtgatctgcctgcctcagcctctcagagcgctgggattacaggtgtgagccaccacacttggcccattttaaccgtttttaaatatagttcagtgggattaaatgtgttcacattgttgtgccaccatcaccaccatttatctccggaactcttcatctcacaaaacagaaactctgtactcactaaataataacgcctcattcccctttccccccagcccctggcaactaccattctaatgtctgtcccgatggatttgactacggtaattgcctcatgaaagtagaatcacgca

SEQ ID NO: 928396 - DNA, 826 bp, Homo sapiens
atcatcgtggaggtaaaataattaattatgtaattggttgttatgatcaatgctggacaatgaaagcaggaactgtgtcctattaaccactgcatctcagcatcttacacagcaccaggcacaaagtagaaaatttatagtatttgttgactgtaagaagaaataaaacatttttaaagtgtgtttggccaggcacggtggctcacacccataatcccaacactttgggaggccaaggcaggaggatcacttgaggtcaggagttcaagaccagcctgggcaacatagtgagaccccatccctacaaaaaataattaaaattagccaggtgtggtggtgctacttgggagactgaggcagaattatttgagcccaggagttcaaggttataagtgagctatgatcgtacaaccatacttcagcctgggtgacacagtgagacagtctctctgaaaaaaaaaaaaagtgtggtttcctctctctacaaagccagactcttttttttgttttgttttgttttgttttgtttttccttttttaacttttattttagattcaggggatacatacgcaagtttgttacctgggtatacagcatgatgctgaggtttggagtacaaatgatcctatcacacaggtactgagyatagtacccaatagttaatttttctactctagctcccctccctccctttcctctctactagtccccagtttctattgttgccatctttccatccatgagtctactgttcagctcccacttaggagtgagaacgtgtagtatttggatttctgttcctgcactaattggcttaggataatg

SEQ ID NO: 928397 - DNA, 564 bp, Homo sapiens
ggtccttggtcaattcttccattgcaccatgcttccccccacccccgaccgtgcctttgcacatgccatccctcctgcctgaaatgctcccgaccttctttacctggttagctcttactcttccttcaaatttccttctttacctggttagctcttactcttctttcaaatgtcttatcacttctaggaagccgtccttcttagtattcatgattaagccaaatctccccatgatttgctgtttacaggcatttattttgcctttatagcacttacccsacttgtaattttacctttggtttctagtgatttgaccgttgtgtcgattgctctggaatgtaaactccctgagggcaggcgttgtgcttgttttgatcacctagtccttgcacttcacctgaaacatagtaggtgttcagcagagacttcttggatagataaaagcatggatggatggatggatgggtggatggatggatggatagatgaatggatggatgggagcaagatttcacttcaggccaggcatggtggcccatgcctataatcccagcactttgagag

SEQ ID NO: 928398 - DNA, 564 bp, Homo sapiens
ggtccttggtcaattcttccattgcaccatgcttccccccacccccgaccgtgcctttgcacatgccatccctcctgcctgaaatgctcccgaccttctttacctggttagctcttactcttccttcaaatttccttctttacctggttagctcttactcttctttcaaatgtcttatcacttctaggaagccgtccttcttagtattcatgattaagccaaatctccccatgatttgctgtttacaggcatttattttgcctttatagcacttacccgacttgtaattttacctttggtttctagtgatttgaccgttgtgtcgattgctctggaatgtaaactccctgagggcaggcgttgtgcttgttttgatcacctagtccttgcacttcacctgaaacatagtaggtgttcagcagagasttcttggatagataaaagcatggatggatggatggatgggtggatggatggatggatagatgaatggatggatgggagcaagatttcacttcaggccaggcatggtggcccatgcctataatcccagcactttgagag

SEQ ID NO: 928399 - DNA, 634 bp, Homo sapiens
atgcaagagttgtggtggctcacgcctgtaagcccagcactttgggaggctgaggcaggcggatcacgaggtcaggagatggagaccatcctggtcaacatggtgaaaccccgtctctaccaaaaattcaaaaattagctgggtgtggtggcacgtgcctataatcccagctacttgggatgctgaggcaggaaaatcacttgaaccacggagtcggagattgcagtgagccgagattgcgccactgcattccagcctgggcaacagagcaagacttcatcaaaaaaaaaaaaaaaaaaaaaaaaaaaaaaaggacttgcgggacttttacactgataattacaaagcaatgctggggaaattaaraaggacctaaataaatgaaaaaatatgtcctgtttggtttggaaaactcaatatcgttaaaatggggcttttctccaaattaagctacagattcaatgcaatcccaatagaaattttaaaaagtattctagtggaaattgacaaactcgatttccacgagaaagtgggtatagaataacaaaaacaaagggtgtagaataacaaaagcaattttaaaaaaagttggataatctaccctatttgcttttaagacttactataaagctac

SEQ ID NO: 928400 - DNA, 634 bp, Homo sapiens
atgcaagagttgtggtggctcacgcctgtaagcccagcactttgggaggctgaggcaggcggatcacgaggtcaggagatggagaccatcctggtcaacatggtgaaaccccgtctctaccaaaaattcaaaaattagctgggtgtggtggcacgtgcctataatcccagctacttgggatgctgaggcaggaaaatcacttgaaccacggagtcggagattgcagtgagccgagattgcgccactgcattccagcctgggcaacagagcaagacttcatcaaaaaaaaaaaaaaaaaaaaaaaaaaaaaaaggacttgcgggacttttacactgataattacaaagcaatgctggggaaattaaaaaggacctaaataaatgaaaaaatatgtcctgtttggtttggaaractcaatatcgttaaaatggggcttttctccaaattaagctacagattcaatgcaatcccaatagaaattttaaaaagtattctagtggaaattgacaaactcgatttccacgagaaagtgggtatagaataacaaaaacaaagggtgtagaataacaaaagcaattttaaaaaaagttggataatctaccctatttgcttttaagacttactataaagctac

SEQ ID NO: 928401 - DNA, 634 bp, Homo sapiens
atgcaagagttgtggtggctcacgcctgtaagcccagcactttgggaggctgaggcaggcggatcacgaggtcaggagatggagaccatcctggtcaacatggtgaaaccccgtctctaccaaaaattcaaaaattagctgggtgtggtggcacgtgcctataatcccagctacttgggatgctgaggcaggaaaatcacttgaaccacggagtcggagattgcagtgagccgagattgcgccactgcattccagcctgggcaacagagcaagacttcatcaaaaaaaaaaaaaaaaaaaaaaaaaaaaaaaggacttgcgggacttttacactgataattacaaagcaatgctggggaaattaaaaaggacctaaataaatgaaaaaatatgtcctgtttggtttggaaaactcaatatcgttaaaatggggcttttctccaaattaagctacagattcaatgcaatcccaatagaaattttaraaagtattctagtggaaattgacaaactcgatttccacgagaaagtgggtatagaataacaaaaacaaagggtgtagaataacaaaagcaattttaaaaaaagttggataatctaccctatttgcttttaagacttactataaagctac

SEQ ID NO: 928402 - DNA, 797 bp, Homo sapiens
aatgagataccagccagggtgatcaagacatgcgtgcaccacccctcccacaactccaggcaacacagctcacagctccaggagagaatccttccttctgcttggggagagaggaagggagatttcataaagagggctttgtcttccgacttaggtaccagctaagccacagtaggatagggcaccaggtggagtcctgaggcccccatttcaagccctagcacccagatgatgtttctggacataccctgacccagaaggaacctgttaccttgaaaggaaggacccagtcctggtagcattcatcacctgctgagtaaagactatttgggccctgaattattmgcaatggtaaaaaaaggtagtacctaccatgggaggtaggtgagactctgagacttcatggcttcagatgtgactcagcacattccaagctgtggtagagttggggagagactctgcttgagaaaaggagaggaaagataaaagggtactctgtcttgcatctcaggtaccagctcagccacagtagggtagagaaccaagtgggctctggagctccccaaatccaacccttcgtccttggatggcatttctggacctgacccaggtcagagaggagccaagtgacctgaaggcagattcccagaccacaagctaactgaagagcgcttggccttgagtgaatattggtggtagccaggaggtacctgtcatgggcctggggcagtggtggccatgtgggaagacccctctgcttgtggaaagaggagggaagagtgagaaggacattgtct

SEQ ID NO: 928403 - DNA, 565 bp, Homo sapiens
gagcttaaacaattgaacaagcaagaaccaaataacctcgttaaaaattgggcaaaggacatgaacagacacttctcaaaagaaaacaggtaagaagccaacaagcatatgaaaaaatgctcaacatcactaatcatcagaagaatgcaaatcagtaccacartgagataccatctcacatcagtcagaatggctatttttcaaaagcaaaaaaaataacagttgctggcaaggctctgaggaaaagggaactcttacacactattggtaggaatgtaaattattcagccaccttggaaagcagtttggagatttctcaaaggacttaaaacagaactacatttgacccagcaatcccattcctcagtatatttccaaaagaaaataaatcactctaccaaaaagacacatgcacttgtatgttcatcactgtggtattcacaagggcaaagacacataatcagtctaggtgcccatcagcagtggactagataaagaaattatggtacatatacaccatggaatactatggagccataaaaaagaacaaagtcatgtcctttac

SEQ ID NO: 928404 - DNA, 541 bp, Homo sapiens
atacatgaattcagtaaagttgcaggatccaaaatcaacacacaaatatcagttgcatttctatacactaacagtgagcaatctggaaggggagttaagaaaaaaattccattaaccaaggaagcaaaaaaattgtacacagaaaactacygaacattgctgagagaaattaaagaagacaccagtaaatggaaagacatggaatgtttttagattagaagacaatattgttaagatgtcaatactacctatattagtccattctcatgctgctaatacagacatactcgagactgggtaatttacaaaggaaagaggtttaatggactcacagttccacatggctggggaggcctgacaatcatggttgaagatgaaggaagagcaaagtcatgttttacatggcagcaggcaagagagcttgtgcaggggaactctcatttataaaaccatcagatctcatgagatttattcactaccacaagaacagtgtgggggaaccaccccccatgattcagttatcgctacctggccccaccct

SEQ ID NO: 928405 - DNA, 681 bp, Homo sapiens
gctggactaggaggctgcaagcgagggcccctctcttttgagaaaagcacaccccaactgcaagtctgcaatgtgtggcacattctgccttgcctggaggaaatcagcccgggaagaggagcatgagcatgatccttcctctcctgctcctgagcagaatcaaaggagacgctgctgggcaaaaggcagacatcctaggtggaccaaagtctcactccagaagagggagtccccacatgggtcttctggccaaagcgccagaaaatggcattacttcaaagcagggagggggaactaaatctcctgctgtttaaacagaagaaaacagtgggcaataagccagtgccaaggaccccggggtttgccccaggccttgtgacaccaactattttgatattttctgtatgaggaggattggaaaagctctagcatttactaaatgaccaggtgacaaacaaatgactcgatgtcaatcctttttttttttcttttgagatggagtttcgctcgtgttgcccaggctggagtgcaatggcaygatctcggctcactgcgacctcttgcctcccgagttcaagtgattctcctgcctcagcctcccgagtatctggaattacaggcatgtaccaccatgcctggctaattttttgtatttttagtagagacggggtttctccatgt

SEQ ID NO: 928406 - DNA, 617 bp, Homo sapiens
aattctgcagccacaagcacatcatggtgaatagctgacgactatgtccttcttataaactacatcttttacttctaaggaattattcggtagaaaaagtgttcaggcagctatttcatttctggctagtgtcactgtataagatttttactgctgctataacaaattaccacaaatttagtggcttaaaatgaaaccagtttatctcttacttctcaagttctggaagttagaagtccaaaatcagtttcactgtgctaaagtcaaggtgtctgctggctggcttcttcaggagtctctgaagggagaatcttccttacctttttcaccttctagttgccgcctatattctttggtctgtgatcccctctaccttcagttagcattgttycaatccctgcttccattagtacatggctttctcctctgacgctgatgcctcctgcatccctctttgaagaactgctgtgtttccattacatccacttggataatcaaggataatctccccatctcaaggtccttcacttaatcacacatgctaagtccatttttctgtattaggtaattcaccgattctggcaattaggatatggacctatttgagaggccactat

SEQ ID NO: 928407 - DNA, 631 bp, Homo sapiens
gccaacttattagcatattagaagactttggagattctaaggattcaattcaattctctaactcaattcagttctcacactctacctcgtagcaaatgagccacaggttgaaggctcagtttcatgagattgcctcccattggccaccagtgatcattttaaccttcagccccaactcatccctagagccttggtctatctggcaaccaactgtcatcatctgtgggggctaacagctatcagccaactcattagcatatgaaaagactttggagattctaaggattttaggagttgtattccaggaaatggggtcaaagaccaaatrtatatttcataataccacactttgaagaaaaatttaagtgaaattaaatcaatatcaatatttcagtggaaagcttcagtgaggaagataatttaacaaaggaattaactttttgctttacgttaatgatcttcacgatatagcagagctgaattacaatggtaggctacaagcctttatttaaattttccccttagacatgaacaatgtgttttatgctagcagaagacatgagactcctgggccagagacaaaagaccttattacttatggcttaacaggcagcataaatatcattctcct

SEQ ID NO: 928408 - DNA, 593 bp, Homo sapiens
ggatgggatactggcattgagtggggtaagtgtgattaggttttaatgggatagtaatgggtgtgtgatttgttgccagagagggagtagaggtgtcccacacttgtgggttaaggtgggggtgatacaagaggaagacatgaaggaggctttgagttggggagaagagcagcaatgagatgggctgcagtacaggaatagtcagtgtagcagataattttgttaaaacgtctcaacctcataaggcaactgggaaggtggggataactgaaaaggactgcataaaagaatgttgtccctagcaakactaataaagaagaaaagagagaagaatcaaatagacacaataaaaaatgacaaaggggataacaccacccatcccacagaaatacaaactaccatcagagaatactataaacacctgtatgtaaataaactaaaaaatctagaagaaatggataaattcctggacacatacaccctcccaagactaaacgaggaagaagttgaatccctgaatagaccaataacaggctctgaaattgaggcaataattaatagcttaccaaccaaaaaaagtccaggactagatg

SEQ ID NO: 928409 - DNA, 588 bp, Homo sapiens
atgcttttccatacaatgtctggaatctatagctaacataactggttaggtcatgggtcaatctttaaccaggcccagggtgcggcgctgggctgtctgcctgtggatttcatttctgccttttagtttttacttcttctttctttggaggcagaaattgggcataaaacaatatgaggggtggtctcctcccttattccccccctttgagaatctcactcaatagtggggrttctcagttttattcttattacccatgtcttcttgcaagacagattgatagtgattcatatagtacacttgtgctgaagcattttgatgaactaaggtagtgataaagctttctatcatttgaagaagtacaggtagcaaacaaaggagcagtaagcaggtttccattactattataactcctattataacagttttaaatctttttagcactggcaaccactttccaaacatggccccaggattaaatccatgccacacttgcacaggcacatgtgccagttttgtcatatttctatgtcttcaactacttgcccttgatcatctatgtgaagacagcaattagtaaggttaatt

SEQ ID NO: 928410 - DNA, 553 bp, Homo sapiens
aaggtcaccaacatcaaagacgaaaggtagataaatccacaaagatagggagaaaccagcacaaaaagggtgaaaattccaaaaaccagaacgtctcttctcctccaaaggatcaaaactcctcgccagcaaggaaacaaaactgcatggagaataagtttgacaaattgaccgaagtatgcttcagaaggtgggtaataacaaactcctcagagctaaaggagcgtgttctaacccaatgcaaggaagcaaagaaccttgaaaaaaggttagacgaattgctaactagaataaccagtttagagaagaacataaatgacctgaaggagcwgaaaaacacagcatgagaacttcgtgaagcatacacaaatatcaaatagccgaatttatcaagcgaaagaaaggatatcagagattgaagatcgatttaatgaaataaagaagacaagattagagaaaaaagaataagaaggaatgaacaaagcctccaagaaatatgggactatgtgaaaagaccaaatctacatttgattgatgtgcttgaaagtgacag

SEQ ID NO: 928411 - DNA, 645 bp, Homo sapiens
agtgcacaaccatgtatgtatgtacgtatctatttttgagaaggagtttcacttttgttgctcaggctggagagcaatggcacaatctctgctcactgcaactcccgcctcctgggttcaagcgattctcctgtctcagcctctgagtagctgrgattacaggtgcccgccactatgcctggctaatttttggtatttttagtagagacagggtttcattatgttgcgcaggctggtctcaaactcctgacctcagatgatccgcctgccttggcctcccaaattgctgggattataggcgtgaaccacctcacctggccacaaccatgtatttttgtttgtttgtttgtttgatgtggagtctcgctctgtcgcccaggctggagtgcagtggcgcgatctcagctcactgcaagctctgcctcccgggttcacgccattctcctgcctcagcctcccgagtacctggggactacaggcacctgccaccacacccggctaattttttgtatttttagtagagctggtgtttcaccgtgttagccaggatggtctcgatctcctgacctcctgatccgcccgccttggcctcccaaagtgctgggattacagacgtgagccaccgcacatgtatttttaagcaaa

SEQ ID NO: 928412 - DNA, 645 bp, Homo sapiens
agtgcacaaccatgtatgtatgtacgtatctatttttgagaaggagtttcacttttgttgctcaggctggagagcaatggcacaatctctgctcactgcaactcccgcctcctgggttcaagcgattctcctgtctcagcctctgagtagctgggattacaggtgcccgccactatgcctggctaatttttggtatttttagtagagacagggtttcattatgttgcgcaggctggtctcaaactcctgacctcagatgatccgcctgccttggcctcccaaattgctgggattataggcgtgaaccacctcacctggccacaaccatgtatttttgtttgtttgtttgtttgatgtggagtctcgctctgtcgcccaggctggagtgcagtggcgcgatctcagctcactgcaagctctgcctcccgggttcacgccattctcctgcctcagcctcccgagtacctggggactacaggcrcctgccaccacacccggctaattttttgtatttttagtagagctggtgtttcaccgtgttagccaggatggtctcgatctcctgacctcctgatccgcccgccttggcctcccaaagtgctgggattacagacgtgagccaccgcacatgtatttttaagcaaa

SEQ ID NO: 928413 - DNA, 613 bp, Homo sapiens
aggtgacgtgtgagttaagatctgaatggtaatccggagccagccagagtgaagatgaggtcgaagagcacagtcccgggggagaagaaagcaaaggcagaggccaggtgagaggaagcagcatggcctctctcaggggcattcatttcatctatgaagccctaagggattctgaagtcaaacatcaggttgggsctagttgtaaggtttagggcaaaacacccctcctactccctgttgttagagaccagaggcggcgtttgcccccacctggccccgctccagaaggaggggttattatacgtctgattgaatcagcttccagcatccttattggtccttggaggtaattagggcactgtcgcttcaaagtcccaaattcaggcgccccactggggactacagtgaccgctccccaccccacccaccgcaagctcagaggttggagagaactgcctccccgaaggaacccagacccaggcttgagactttgcaaagagacacaagatgcgggttgccatgtgaagtttccggattttttaaaatgttagaacgatgaattggaaaagctttaaaacactgcacaggccaaacaacatgtctatgggcagga

SEQ ID NO: 928414 - DNA, 671 bp, Homo sapiens
acagtacagagtaattttggggagcttcagatacgtgctctgggaagacctttctaaggaggtgacgtgtgagttaagatctgaatggtaatccggagccagccagagtgaagatgaggtcgaagagcacagtcccgggggagaagaaagcaaaggcagaggccaggtgagaggaagcagcatggcctctctcaggggcattcatttcatctatgaagccctaagggattctgaagtcaaacatcaggttggggctagttgtaaggtttagggcaaaacacccctcctactccctgttgttagagaccagaggcggcgtttgcccccacctggccccgctccagaaggaggggttattatacgtctgattgaatcagcttccagcatccttattggtccttggaggtaattagggcactgtcgcttcaaagtcccaaattcaggcgccccactggggactacagtgaccgctccccaccccacccaccrcaagctcagaggttggagagaactgcctccccgaaggaacccagacccaggcttgagactttgcaaagagacacaagatgcgggttgccatgtgaagtttccggattttttaaaatgttagaacgatgaattggaaaagctttaaaacactgcacaggccaaacaacatgtctatgggcagg

SEQ ID NO: 928415 - DNA, 626 bp, Homo sapiens
ctcaaattaccagctttttacatgggcctggctggtgacagaggctcaaccagttggcatcagccagcctctgtctgcaaactatatgtgggatcaacagcaaaggctcttcttaccagtgctaatcaaactgctgttaatttcaaatatttaattttctagcaactgagatcagtgatgagttcccagaatggaaccatccattgaggagaccaatcagtacccttaaattctatgaaattgtttgagttgtgtatgctgtcatttcagcaaagaactcatcctaaggactgataaactggactccacaaatattgttctggatataaacgtggtaatcctyaggattgtcaatagccagagcaacatgtagaaagttggtaattcatgtttactgacaatgttctctttttctcttttagattatttagccaagctatctgtcactgcccatgagtttgtatgtacactaaccattggccacttctcttcccactctgcctgaaactttgcccatatcagtaatctttccaatttgctgtctttcaaagctatccctgtttggggatgatttggaacagccgtaattttttggtttatctacatagtaagccaactcatccttt

SEQ ID NO: 928416 - DNA, 635 bp, Homo sapiens
ctttaaattttagtgccaatgaaccagaactgaaagtgaactgaaatgatttaaaataataaacatttacaacttgtttatctctatttttgtttctatgattttaatcacttattaaattaaattacttatttgatttcataatactttgggaaaatgttttcagggccatagaattttagtttgattatttgtcaggaaaaaacactacttgatggatttttcagaaatgtttctatcagagtaacatggaaatgcttacgatgactttatttatgtaacacaatcttctttcacagagtccttgtgatcatgctcacaagagctttcctttctcagcgctcattaagcactggtgggttttacattcagtcttgacactcatggccttgaggtactgaccagggcaggtgggcctgcacctggrgaggggtgcatgtgttgcaaattagaagaaaatcgtgacactcatggccttgacgtactgaccagtgctggtgggtctgcacttcaggaggggcgcatgtgttgcaaattagaagaaaatcacaaaaagttttggacactgatgtattcacttatcaatacaaatgaaaggctgcttgccagagggcaggtggatttcttcaggaggc

SEQ ID NO: 928417 - DNA, 586 bp, Homo sapiens
gattatatgtgaccttttatctggaataccctctgactttttttgcccaagttttatttttctcaagtcactgtttcagatccggctcagtcctcacctccttgggatatctttttctacacccaggcttgggtaggtgttttctgctctcctttgctgtaacttacctcgttgtattctatttatgctgatttgctgattcaccaggtgttctgtcgaggatctgtcmcggcctggtgatgtcctgttggttctgggtcagtggctgacacagaggaggtccctgtgcttgaggagcttgtacagaactggggtgaatggatggtaaacacgctagtggacagaataatttcagattctggaaggttctagagaaaaaacaaaacaaagtaatgtaccgaggggaagcaagggacagctagagatacggggcccaggggggcaatagctgagctgagatctgaaagaacaggagtcggtcatgcaaagatctgcaaaagaaaatcccaggtgggggaagagcaaagtgcaaaggcccagaggagggacctgtcctggtgtgttcaggatggagtgcttggagaat

SEQ ID NO: 928418 - DNA, 581 bp, Homo sapiens
gcccttagagaatgataactctttaaaacttaatatggtctgatttcgggagattgctttcattatcttcccaccctgctcctgtgtccctttctccttaccctgttgtggacattctcaaagttatttcaaagccaccttgagctctcccttctggagaggcttggcagactaacttatctaaggaaaagaaatccttgaaagacattgctcccagaaaggagagggctgagagtttaaactttttccatctcttatgatctcatcaaagcctctcatccactgtgaggatgtcctgaccacctcagctcagattcatcgtctcctcctttgwacacctctggtaatactttaaactcaagaagtgtgttatatctctgttgattaatagatgccatatcaaagaaacatttaataatactttcatagtacaatgatgagaaaatcagggttcctgtcctgaggaagcatgtaacctagagtcagagatgcatgtgcagatagaaaattatagtctggtgagtagcaaaattggaggtatgtacaacaagttaggggaacatagattaagggaaaatcag

SEQ ID NO: 928419 - DNA, 569 bp, Homo sapiens
aagcgtttgtgtataagtctttgtatagtcatatattttcatttctcttgggtaaatacataggaatagaattgctggatcatatggtaattgtatgtttaactttataagaaactgccaaactgttttccaggatggctgtactatttcatattcctaccagcagtgtataaaagttcctgttgctctacatctttgtcaacatttggtattgtcaggttttaaaaattgtagtcattctgacaagtgggtggtagtatctccctgaggctttaatttcacatccctgaagactaatgatgttatttatcatctgtatattttcactgacaaagtgaaactttcaacraagtgatactgtacacatcttttgcccattttaaaaattagattactttctttttactgagtcatgagactcactacatatatatgtcttatatatattgtatattctggatacgagtcctttggcaaacatgtgatttgtaaatattttcactcagtctgtagcttgtcttttcatttccttttttttttcctttctaagaaaaatagagaatcttttc

SEQ ID NO: 928420 - DNA, 574 bp, Homo sapiens
acatggcatggccactgtgccttggtggctccatcagctataaccgctccagtgtagagtttattggtgccagggtgagagagaaagccttgtgcgctccccagcaccctctgttagcctgagctggcctgactccttggcactgtgggctttcctctctgcccccaccttcagcaactgcagctccagagttaactggctcttttagtacatgcacaggcacatgcagtcacctacactcgcatagatacactcacacatccacagatgtggatatacatgctcacgcacatacatgcatgcatgcatactcacacacgtctayacaatatacacacaagtgcgtgcacacactcacatacacacaaatacatgcacactcacacacatacataaacttacacacataaacacaaatgcacatacatgcacatacacacattcacatatatatatgctcactcacacattgactccataataccacacacaagcacacacaaaccttccaaaggctgtgaagggaaggaagactgtgtgtacgtttctatgtgggggaaccttggagtgagtt

SEQ ID NO: 928421 - DNA, 796 bp, Homo sapiens
agggaaaccatttatattagatacatattttcatctctcccaggatcaatattcagtgactcagaagacaaatctatgacttacctagcacaagcaccaactcctattccttgtctttaaaaaaatctttccctggaggcataaagtaggcagaataatacacccctctcccaaaggtgtcctcattctgagagaatctgtgaatgtattaccttacatgtcaaaagcaactttgcaggccgggcgcagtgctcacgcctgtaatcctagcactttgggaggccaaggtgggtggatcacctgaggtcaggagttcgagaccagcctggccaatgtggtgaaactctgtctccactaaaaatacaaaaattagccgggcrtggcagcaccctcctgtaatcccagctacttgggaggctgaggcaggggaattgcttgaatccaggaggcggaggttgcagtgtgccgagatcgcgccactgcactccagcctgggcaacagagagagactctgtctcaaaaaaaaaaaaaagagtcttgattaaggtgaaggatcttgagataggagattatcctagattatctgggtaaacccaatcttgtcattgttagtccttaaaagcagagaaactttcctgcctgggttagagatgaaaggggagacaaaggagagatttgaagtgtgagagggattcaacctactgttgtcaactttgaacgtggaaaaagaagtcatgagttaaggaacgttgatggcctttagaacagctcttagctgacagccagcaaggaatca

SEQ ID NO: 928422 - DNA, 602 bp, Homo sapiens
agccaggcatgcaaaccaaacaaaatattgaaccaaaattgaaataaaagaacaaaaaatgaattcacaagaaaagacacatctcacagatagaatgtaattctggtgaaaccataatacattccaaaggacatggcttgacagcaaagtcttctatagtcctaagacggatgcaaggtcctttacttaaagcagccttataaccaaacagatcctgaataaagtcaaaagaacccacccagccaggcgtgctggctcgtgcctgtaatctcagcactttgggaggctgaggcaggtggatcacgaggtcaggagatcaagatcatcctggccaacatggtgaaaccccatctctactaaaaatacaaaaattagctgggcrtggtggcacgtgcctgtaatcccagctactcgggaggctgaggcaggagaatcgcttgaaccagggggttggaggtcacagtgagggcaactgcactccagcctggcggacagagcaagactccatctcaaaaacaaaaaacaaacaaacaaaaagaacccatcaaagggtgggagtctgagaatccaaaataaaattcagcagggcagaacaggtgact

SEQ ID NO: 928423 - DNA, 636 bp, Homo sapiens
tgtctgttgctgtgttcattttggttccaaatccacatcatgttattctgaactcgcaggccagcaagccgcaacacagaataaatcctcaagtactgacgtgctaaagtaaacagtctccttgtttcaggcattataggttctctactgagcatgctatggctgtgaatattttgtattgctttaaggatttaatagtttctgggtgcttctggttttaaaaatcacaaggacagccaaagcctagtagaccccaatatctggactccatagatgttcaagaaatacatttttgagtaaatgtttagttatcaaagttattaaaattattaaaatgcaaagtagttgtgttatgcaagaggattcatcactttgactataggttgtgatgccaatcccaaatctacatgactatcaaactccagaccaaactgagaggagttaagacagtgtttccasaacacaccatgtggaaagagctgcaaggcgtcctccaggcttttgagcatcagccataactcacaaggtccatgttaattccttcctactaagattagtccttatcttagtccagtcctgctgctataacaaaataccttggactgggtaagttaaaaacaacagaattcaagccgg

SEQ ID NO: 928424 - DNA, 616 bp, Homo sapiens
tccccctggcctgaacttccaatagtatgttgaataggagtggtgagtgagagcatccttgtcttgtcctggttttcaaggggaatgcttctagcttttgcctattgagtatgatattggttgtgggtttgccataaatggttcttattattttgagatatgttccctcaaaacctagtttattgagcgtttttcacatgaagtgatgctgaattttatcaaagacattttctgcatctattgagataatcacatgtttttgtctttagttstgtttatatgatgaattatgtttattgatttgcatatgttgaaccagcctttgcatcccagggatgaaaccaacttgatcatggtggataagatttttgatgtgctgctggatttgatttgccagtactgtattgagaatttttgcatcaatgttcatcagtgatattggccctgaagtgttttttttgttgttgttgttgtcgttgttatatctctgccaggttttagtatcaggatgatgctggcctcagaaaatgagttagggaagagtccctcctttgcaattgtttagaatagtttcagaagaaagggtatcagctcctgtttgtaactctggtagagt

SEQ ID NO: 928425 - DNA, 562 bp, Homo sapiens
atttcccaggcccccctgcatctcgaaggggacatgtgactgagttcaggccaaaggaatgtcacatggccatgacaatctccaaagggactcttcacactcggttttccttgtctgctttctggagtgttcctagctggggcagccctggaagtcacctttttggttctggttgtgttttgtcttgctttttgtttttgagataggctctcgctgtgtcacccaagatggagtgcagtggtgtgatctcagctcactgcagcctcarcctccggtgcccaagtgatccttctacctcagcctcccaagtagctgagactaaaggcacacatcaccacgcccagctattttttgtattttttgtagagatggggtttttccacattgcccaggctggtcctgaactcctaaactcaaggactccatctgccgtggcctcccaaaatgctgggattacaggcatgagcccttgcacccagccaaatcacttcttgaagatggcaatgactccttcagcctggatactttaataactctctggagccaagcatcttacccactc

SEQ ID NO: 928426 - DNA, 562 bp, Homo sapiens
atttcccaggcccccctgcatctcgaaggggacatgtgactgagttcaggccaaaggaatgtcacatggccatgacaatctccaaagggactcttcacactcggttttccttgtctgctttctggagtgttcctagctggggcagccctggaagtcacctttttggttctggttgtgttttgtcttgctttttgtttttgagataggctctcgctgtgtcacccaagatggagtgcagtggtgtgatctcagctcactgcagcctcagcctccggtgcccaagtgatccttctacctcagcctcccaagtagctgagactaaaggcacacatcaccacrcccagctattttttgtattttttgtagagatggggtttttccacattgcccaggctggtcctgaactcctaaactcaaggactccatctgccgtggcctcccaaaatgctgggattacaggcatgagcccttgcacccagccaaatcacttcttgaagatggcaatgactccttcagcctggatactttaataactctctggagccaagcatcttacccactc

SEQ ID NO: 928427 - DNA, 577 bp, Homo sapiens
ctggtacaatgaacttctggagcaccttgtatttctaaaatcttaccatggatgaagtcttattgggatgacttactgatgcttccctcgtcccctctaaacatccactttcctttgtcagacttgcttactggatacctcccaatatccgttagctagcagtacgtgctgaccgacggggtaactccagatggattcccacatacaaagtgtgcttgacgagaagaggagtgggcgggtactttttgatagatctccttgctgtcctaacaaccctttcctatagggttgaaatagataccgcaaactgctcaaggtgcaatcaggagggattttttttttttttttggagtcctctcacrgttacctaggggttttgggagtggctccttttgctgggaagggcccaggaagagctggctgtgctcactgccctgagtgaggactccaagctgttaccacttctcccaacctgtagcagcttcaagtgccccagtcaagtgaggccttgctccaggctaacactggtggacagggccagggaagaaaggggacggagcagtttcccagaaaacca

SEQ ID NO: 928428 - DNA, 605 bp, Homo sapiens
cattgcctacaatcatactgaaattctagaagcgaaaatggttaagttctagaaaacaatgacatgctgtgtttcatcaaatttaaatcagatgtcttggccatatagaactaacatttgtatggtgtgttctaatgtaggataattacataacaatagtaacaaaggctgttattcagtgatttctatattttagacattgcactagrtgctttaccagggattcattgaattctttcaacatcctttgagggaggtaccattattattttcattcattgaattctttcaatatcctttgagggaggtgccattattattttcattttatagctaaggaaactgaaacttgcaaagatttactaaaaatcattttcatataaattattatcttaattatacagaaactcatgttcaatgagatttaatgaccttccaaagagcactcagcggaaaatgttagggtaggtctactggtagtaatcctgttatgttcaccacgctacactgagaatgcgttgtaagatgggaagagagagaaacatacatggagatttgactactgggcttgtgccagcccccgttttgtcacaagatttgttttt

SEQ ID NO: 928429 - DNA, 612 bp, Homo sapiens
cagtggcattgcctacaatcatactgaaattctagaagcgaaaatggttaagttctagaaaacaatgacatgctgtgtttcatcaaatttaaatcagatgtcttggccatatagaactaacatttgtatggtgtgttctaatgtaggataattacataacaatagtaacaaaggctgttattcagtgatttctatattttagacattgcactagatgctttaccagggattcattgaattctttcaacatcctttgagggaggtaccattattattttcattcattgaattctttcaatatcctttgagggaggtgccattattattttcattttatagctaaggaaactgaaacttgcaaagatttactaaaaatcattttcatataaattattatcttaattatacagaaactcatgttcaatgagatttaatgaccttccaaagagcactcagcrgaaaatgttagggtaggtctactggtagtaatcctgttatgttcaccacgctacactgagaatgcgttgtaagatgggaagagagagaaacatacatggagatttgactactgggcttgtgccagcccccgttttgtcacaagatttgtttttt

SEQ ID NO: 928430 - DNA, 730 bp, Homo sapiens
agcaaactgattcacatagaaaatccaggattgtgactacttattttttcctctctacacatgaaacagattccctggaaacacagttatcttaagtagctggaattgtctaacttcggttactttattatttacaaatcagccaggtgagaacaagaaagtgaaaagcaggaaacaagataggcagagaaacaaagggctcgatcgcaagagcagcaagatgcctgagcagatccacagggttctcagggctgcagcaaaaatcaaagaacagtcgtggtctcagarctcgccatagatcagaccacagcttccaaccatgccacaggctgtctgtgtgttccctgcacaccattcatttttgtccttctattttaatgatctgaaaccaagtttgggccatgtgtagacaggccattcggaggaggcttcgggaaggagggcgcatctgagactagttgtaaaagatgaggaggatttccacaatcgctcaaaggaaaggggcatttcagaaagagagaagagcacgttcacgtgagcccagataggagcacggggcacacgcatgaaacttcctgatgctggagttcacgcgcacgatggacgcaggcttggcagcccgcaaggcagaaggggaggtggtgcgggaaccgtggctgctctaacaaacttgagctccattctgcaggctcaaggagacatggagtaagaggaaggactccttgggtgc

SEQ ID NO: 928431 - DNA, 598 bp, Homo sapiens
aagaccctagatttaaaaataatcagagaaaaatgttgtaaaacagctcttctcataacgtccaaagctagaacacacttgaaacaatctcagcaaaagaaagctgtcaaatatgcagccataaaaaaggatgagttcatgtcctttgtagggacatagatgaagctggaaaccatcattctcagcaaactatcgcaaggacagaaaaccaaacacggcatgttcttactcataggtgggtactgaacaatgagaacacttggacacagaaaggggaacatcacacaccasgagctgtcgttgggtagggggaggggggagggataccattaggagatatacctaatgtaaatgacaagttaatgggtgcagcacgacaacatggcacatgtatacatatgtaacaaatctgcacgttgtgcacatgtaccctagaacttaaagtataataataataataataacaataataataaaagaaagctgttaaaaatgaccagcatagaatctctcttccccactgtcagacaacatttcagtggtccctgtaactattgctctggtcctgaataaaatctttctcgccatgcttgaaaaa

SEQ ID NO: 928432 - DNA, 605 bp, Homo sapiens
gctgaggtgggaagatcgcttgagccgggttgcagtgagccgggatcaggcaactgcactgtggcctaggtgacagagcaagactgtctcaagacaaaaaaagaaagaagaaaagtggagtggacaatggaggaggacaaattattttacaaagaacaacaacaacaaaaataccttgaaatcttcataaacactaaatagccaggcatgggccaggcatggtggctcacacctgtaatcccagcactttgggagtctgaggtgaatgggtcacttgaggtcaggagtgtgagacctgcctggccaacacggtaaaaccctgtctctactaaaaatacaaaaactagggcccggcatgatggctcacacctgtaatcccagcaytttgggagactgaggcagttagattacctgaggtcaggagtttgagatcagcctagctaacatggtgaaaccccgtctctactaaatatacaaaattagctgggcgtggtggcgcacgcctataatcccagctactggggaggctgaggcaggagaattgcttgagacggggagacagagtttgcagtgagccaggactgctctccagcctgggcgacagt

SEQ ID NO: 928433 - DNA, 564 bp, Homo sapiens
caggagtttgagagtagcctggccaacatggtgaaaccctgtctctactaaaaaatacaaaaattaggctgagcgcagtggctcctgcctgtaatcccagcattttgggaggccgaggcgggcagatcacctgaggtcaggagtttgagaccagactggccarcatggtgaaaccctgtctctactaaaaatacaaaaattagccaggcatggtggcaggtgcctgtaatcccagctactcgggaggctgaagcaggagaattgcttgaaccctggaggtggaggttgcggtgacctgagatcgtgccactgcactccagctgggtgacagagcgagactccctctcaaaataaataaataaatacaaatacaaaaattagctgggcatggtgacgtgggcctgtaatccgagctactcgggaagctgaggcaggggaatcgctttaacacgggaggcagaggttgcagtgagcctagattgcgctactgcactccagcctgggtgacagaataagagtctgactcaaaaaaaaaaaagtattctttaatgtttggtcacaatg

SEQ ID NO: 928434 - DNA, 583 bp, Homo sapiens
aaattagatatacattcatggaaaagatagaccctctttatggatgagaatattaaatgttgtaaagatggcaatttacctaaaaataatttaaaaatttaaagaatagtaaattttcaagcaaatattttgagttaacaattatttagaaatatttcagtaaaaataaacattttagactaggtagaatttttttaaataaaagatgttgactttctctgtcaggtaatgaatatactataaaaccataattataatagtttagtcctggaaataagaacaaggcaacagatcaacagagcagaataaaagaactccaatctgctataccagaatctattcatatttctatcttatttctctataatcaactactattaatcttatttagaatggaartgaaaaaccatgccaaacatttagaaaatagtattattcaataagtactagaactgttcagctctatagaagaaaaattcttacctctatagcaagaaaaaatcatttgttaaatagtaatttgtggaaaaataaaccacaaaaattgttgaagactgtatttaaaggggagtaatttctaaat

SEQ ID NO: 928435 - DNA, 652 bp, Homo sapiens
tacaagccagaagaaatttgaggcctatattcaacattcttaaagaaagaaatcttcaactaagaatttcatatccaggcaaactaaacttcctaagtgacggagaaatagaatctttttatataagcaaatgttgaggaaattcattatcactagacctgccttacaggagatcttraaaagagcactaaataaaaaaaggaaagattggaaacagctaacacaaaaacacacttaaatgtgcagactagtgtcatggtaaagcaactacacaaaccaacagaatagccagctaacagcacaatgacaagatcaaatccacccatatcaataaaaccattaatgtaaacaagataaatgcctcacttaaaagacagagtggcaagctggataaaaaagcaagactcaatggtatgctgtcttcaagagactcatctcacacataatgacactcataggctcaaaataaaaggatggagaaaaatctatcaagcaaatagaaaacagaaaaaagtaggggttgcaatcctaattttagacaaaacaggttttaaatgaacgaagatcaaaaaagaaaaagaagggcgttaaataatagtaaagcattcaattcaacaagaagacctaactatcctaaatatatacgcaccca

SEQ ID NO: 928436 - DNA, 576 bp, Homo sapiens
tggagaagcaaattgtggtatatccttataatgaaatgttatttgcccataaaagtaagtaaaatactgatttgtgttataatatggacgaatcttgaacatgtactaagtgaaagaaactaggttcaaaaggccacttactgtatgatttcatttatataaaatgtccataattggcagatcaatagagacagaaagtggatgagtgctttccaaaggctgggggtggtttgagggtggggagcggctgctaataggtacggggtttcttttggggggtgataaaagggttccaagtatccaagattagataaattgtggtgatggttgtgcaaccctaragtatactaaaaactacttaagagtagaaatgaaacttcagaaactttaaagagtgttgagaggctgggtgcagtggctaacgcctgtaatcccagaactttgggaggctgaggtgggtggattgcttcagccagaagtttgagaacatcctaggcaacatgcaaaaccctatcttcacaaaacaaaaaaatacaaaaattagccaggcgtggtggcgcctggtcccagctattt

SEQ ID NO: 928437 - DNA, 583 bp, Homo sapiens
ccgcccccgtgattcagttacctcccactgagtctctcccatgacatgtggggattatgggagctacaattcaagatgagatttgggaggggacacagccaaaccatatcagatgtggaacccagcttggctcctgccgattagcttgcaaattaaattgctgtgctgtatgtggaacaaatggcagcttccgtcacttccttatcatgaattaaaagactrtcacattcttcagtgtaataaagctgatatgacaatgaaaatgaactttcttttattttccagatggtaaaacttgttgcagtgtagcagcaaattattactggctttttccagagtgtgtaccctgcctttgccctatatactcactctgaatctattatttaaaaaggcattcaactttgtcttgtgtctcaattcttaaataatttaaggacacctctgacttgtacaattctgcctttgtagttttccatgtcttcacctaggaaaccatacatttctaggtattggacagagtttaaaatgaaaaaaatattttacctgatattgttctgcatgtgagcttgtaagtgggctcgat

SEQ ID NO: 928438 - DNA, 547 bp, Homo sapiens
aacaaacaaacaaacaaacaaaaaattatgagatttttaaagcagtttttttaagatcatcagctattgttattgttagtgtattttctgtgtggcccaagacaattcttcttcttccaatatggcccagggaagccaaaagattggacacccctgctctaaacccaggaaaagatcgaagattatagaggactgtgacacacaagagcctagctgctacttggagctggagctaacaaaagtgtgagacttgggccgggtgcggtggctcacacctgtaatgccagcactttgggaggctgaggtgggtggatcacctgaggtcaggagtttgagaccrgcctggccaacgtggtgaaaccccatctctactaaaaatacaaaaaaaattagccaggcgtggtggtgggcgcctgtagtcccagctacttgggaggctaaggcaggagaattgcttgaacctgggaggtgaaggttgcagtgagccgagttcgtgtcattgcactccagcctaggcagcaagagcaaaactctgtctcaagttttc

SEQ ID NO: 928439 - DNA, 547 bp, Homo sapiens
aacaaacaaacaaacaaacaaaaaattatgagatttttaaagcagtttttttaagatcatcagctattgttattgttagtgtattttctgtgtggcccaagacaattcttcttcttccaatatggcccagggaagccaaaagattggacacccctgctctaaacccaggaaaagatcgaagattatagaggactgtgacacacaagagcctagctgctacttggagctggagctaacaaaagtgtgagacttgggccgggtgcggtggctcacacctgtaatgccagcactttgggaggctgaggtgggtggatcacctgaggtcaggagtttgagaccggcctggccaacgtggtgaaaccccatctctactaaaaatacaaaaaaaattagccaggcrtggtggtgggcgcctgtagtcccagctacttgggaggctaaggcaggagaattgcttgaacctgggaggtgaaggttgcagtgagccgagttcgtgtcattgcactccagcctaggcagcaagagcaaaactctgtctcaagttttc

SEQ ID NO: 928440 - DNA, 622 bp, Homo sapiens
tcttccctctccctccaaagacaaggcaactggtgtccgagtcatactctgaggataaacctatttcctaagcaaaagcctctccatcatggaaaagcatccaccagccacggtcctccccaggctacctgtggggcccaggaaggcctgcatgaagtcgggagcggagcttgttgggcgcctggtatttatcaactcctgtgctccagcctgggcgacagagtgagactctgtctcaaaaataaataagtaaaaaagtaaataacctgatcctgtctttatctaggtttaaaaaaatctcttgctcatgatgacttgtttgcattaatttgtatttttaaaaacactgcactaaaatattatttatgttgaatagttttttttttgacacccctcytttaattttgcacccacagcctcaccctagtccctggcctgagccacatccgctttccccaggtctcccattttattttgagacaggggctcactgtcacccaggctggttcaatggcatgatcatggcttactgcagcctcaacccactgggctcaagtgatcctcctgcctcggcttcccaaagtgctgggattacaggctggagccatcgctcccggccctg

SEQ ID NO: 928441 - DNA, 673 bp, Homo sapiens
aaaatgagggagatgaatggctgattatttggattttgacctcctagatcctatacaccttcagataccagaataaagaggctcttagtggagcacacaggcaagggacaagaatgtgtttgcccaaggactggctgtgcacggagcaagctttaaactgcatattgcagagaagggaggacgctctggggagtccatggcttgggttgctgtggaggacasccgtacagcgtataaagtcctataagatgggaagggcctggtgattcctgtggggaacagttagggcagaggtcaaaaataacatgtgtggcccagaagtagggactcaccagtcagaggtttcagaggttgtggaatgagactaagaatgaagtaagtggaggaagatagtgccccattcaaaacggggagacccaaccgtgagtctaaggcgagtgggacatagagggacttacagtgaccacgagagaaagacagaagttctgctgttatcagagcatacctgtacacacgaggaattctgtcctgatttagacacagctccctggatgggcagtggtatgattttgttgtgtccccacccaaatctcatattgaattgtagctctcataatccccacatgtgatgagagggacccagcggagataatttaatcatggattggcttcc

SEQ ID NO: 928442 - DNA, 769 bp, Homo sapiens
ccgtccggtccctctctccacggtaaggggtaagtgatgcgatcggctgctcggtgtaggcgccgcagccgcagccaccgccgcggctgctttccacatcctgctcctcgggtttgcggcgaggactcgggcgccgcccgccgcggggcggggggtgcggggctggaccgcgaagggggcgcttcccgggtgctccgcgcggcgccgccacccccaccctctgcccgcctgggacccggggcttgacgggaccaccctttcccatcccccacccgccgccccccggagctccagtcctgcggccccccgkctttcccgagccccttgctgccgcctccgcatcccctaagtgcattgaatcattttcagctttcgactggctttgtgcagccctcccccctccgccgtagcagtttgcgaggggtgcgggcggagcattggagggaatggctgcgctgccgctggggaagggatttttcccccattggagcagctccccgggccaatcccttttgtgtgattggttttggggtgtgaggcggttggcgaggtcaggcgagcaaccttttggacgcgttgggagggcgtggaagacgcggtgtcatgcaccctgcctggcgactgcaccccgtggaggctctggctctgtagtaaacccgggggaggagagagtggcttcctgtcggcttcattgtcctaggattcagatgtagggttttggtacgtttcgcttccattttatgcaagcgatgaaaaaataacatttgca

SEQ ID NO: 928443 - DNA, 586 bp, Homo sapiens
gaggaccacttgaggccaggagttcaagatcagcctgggcaacatagggaggccctgtctctagaaaagttttttaaattagccaggcatcagaggttgcagtgagctgagatcacatcactgcactttagctctttgttttgaggtagagtgagaccctgtctcaaaacaaaacaaacaaacaaacaaaattagccagacacaatggcactttgcttatagtctattcaggaggctgaggtaggaggatggcttgagcctgggaggtggagactgcagtgagctgtcactgtgccatggcactccagggtgagactcygtctcaaaaaaagaaaaagaaaaaagcaaggtgaacagtacagataatataccccttgctacagtttggatgtgttttatccctgacaaaactcaggttgaaatgtgatccccaatgtggctgtgatcggaggtgggacctagtgggaggtgtctgggtcatggggatgaaccactcacagactaatgccatggaggagggggccagtgggtgggtttccctctcaggggaatggattagttccctagatgggggaggctgttaaaa

SEQ ID NO: 928444 - DNA, 708 bp, Homo sapiens
cagcaggagccttgtggcagtgtggggtggggactggtcaggcatagagaaaattcttcagtcgctgactcagattagttccccaagatcctgactctatctgtgtaagtcactcccggaagcaacactatttcttaactaattttcttaaaaggagaggaaaaccacagaagcacccccagcgagtggaactatttaatcagttaactcttacttgtcatgggatctgaagatggcaaaaatcaaattccctagctttctagaagtaagctgaataattctttcattgtaaggggccgtcatcctgtgtattgtaggttgtttcgcagcacttactagatgccagtagcagcttttccagtcataacaataaaaaatgtctctgggccaggcactgtggctcattcctgtaataccagcactctgagaggctgaggtaggcagatcctttgagctcaggagttcaaggccggccttggcaacatggtgaaactctatctctacaaaaaatacaaaaattagccaggaatggcagcatgcmcctgtaattccagctacttgtggggctgaggcaggaggatcacttgagactgggaggtcgaggctgcagtgagccatgattgtgccactgcactctagcctgggtgatgggagtgaaactgtttaaaaaaaaaaaaaaaaaaaggagtggcggggagtgggagtctc

SEQ ID NO: 928445 - DNA, 565 bp, Homo sapiens
tgattaaaatgtctcctaaatataaatttagcagaaagtcaacgttcattcaagccctacatatcttacagtactattgtatgaagcagggttttgtcccgagactattttttcctctgcagcagtatgtgtgagagctgagagctcagactctggagccaacctagctgatctggaatcttgactccacaattggttagctcatgaccttaggcaacttacttaacctttctgtgcctcagtttcaccactcaataaaaaagtggtgagaatgacaactstctgccagggttgtcctgaggagtaaatgagtacatatttgtaaagagtttagatttgtaaagggtttagaattgtgctttgcaaaaaggaagcacaatatatgaatgctagttcttattaccccgagagagacacatttatgggaacctatacagtttctcactgggtctggatagccactctctcccatatttattttacctcattaatctcaattactgaccatgaatgtctgctccttaagtttgtttactagtggggttttctttagcctttgaaacaa

SEQ ID NO: 928446 - DNA, 598 bp, Homo sapiens
gcgagttactcaagaagctgctagagaccagatgactgacagtgagaggctgcacctctcctggccgcagcaggtatgaagagccaggctgctggctcctggtcctaaagctctgctccgtttgcagccagaaatcaaacacagggaaaccaccttgtttcctagaattaaaacatttacttttcagcaaggttgttttcattttttttttgttaatccttattatacaaataactatttgtttttaaaaatcaacaagcaaaaaaaaaaaaaaacaaaaacaaaaaaaacctggacatcttactccttttgatgtattttaatatatttccctccagacacttttctctgtaaatattaaaacatggttttttcaaattgtcttccttgtcttctccattaaaatttgaagtgatatccttgtcctcctcctcttcctcttccccagrcataaaattttttatctttttctagggagaaagaagcattaaactcccaatccgaacagtcaagagccatttgctgttttattatacaaatgtcacataaaacgtcccctcacgccagggaaccacgtctccaggtgggtggcatcacg

SEQ ID NO: 928447 - DNA, 598 bp, Homo sapiens
gcgagttactcaagaagctgctagagaccagatgactgacagtgagaggctgcacctctcctggccgcagcaggtatgaagagccaggctgctggctcctggtcctaaagctctgctccgtttgcagccagaaatcaaacacagggaaaccaccttgtttcctagaattaaaacatttacttttcagcaaggttgttttcattttttttttgttaatccttattatacaaataactatttgtttttaaaaatcaacaagcaaaaaaaaaaaaaaacaaaaacaaaaaaaacctggacatcttactccttttgatgtattttaatatatttccctccagacacttttctctgtaaatattaaaacatggttttttcaaattgtcttccttgtcttctccattaaaatttgaagtgatatccttgtcctcctcctcttcctcttccccaggcataaaatttttwatctttttctagggagaaagaagcattaaactcccaatccgaacagtcaagagccatttgctgttttattatacaaatgtcacataaaacgtcccctcacgccagggaaccacgtctccaggtgggtggcatcacg

SEQ ID NO: 928448 - DNA, 558 bp, Homo sapiens
aatcataaaggtcatgtttatcctgctctggacatgtgctcagtggacagtctccgaatagttccagaggctttctggcctctaatccccatagtctgcctacgcaaaaatctgagaacctcatcagaggttccttacaaagactgagtttgccttgatttaaattcctaggatgctgcccggcaagtgggagccccgggctcggtccaggaagcctgagtctcctgtgaaagttcagcaaatgtctacactgcaggctgcttgtcaggtctggggcracatttccacagggctggcatggccgagtgtgaggtggggccggtcagctcacagccgtcggtggtacttgctgacaggccaggctgtggatgtttgatgaatgatgaccgtgaccttgagttctgagagctctggatcccaggacctgttttcagtgatatgaaaactgatatggctgagctgtgtccccacccaaggttattaccttgaactgtaatcatccccatgtgtggtgggagggacccggtgggaggtcactgaatcacgggggcgggtttt

SEQ ID NO: 928449 - DNA, 558 bp, Homo sapiens
aatcataaaggtcatgtttatcctgctctggacatgtgctcagtggacagtctccgaatagttccagaggctttctggcctctaatccccatagtctgcctacgcaaaaatctgagaacctcatcagaggttccttacaaagactgagtttgccttgatttaaattcctaggatgctgcccggcaagtgggagccccgggctcggtccaggaagcctgagtctcctgtgaaagttcagcaaatgtctacactgcaggctgcttgtcaggtctggggcgacatttccacagggctggcatggccgagtgtgaggtggggccggtcagctcacagccrtcggtggtacttgctgacaggccaggctgtggatgtttgatgaatgatgaccgtgaccttgagttctgagagctctggatcccaggacctgttttcagtgatatgaaaactgatatggctgagctgtgtccccacccaaggttattaccttgaactgtaatcatccccatgtgtggtgggagggacccggtgggaggtcactgaatcacgggggcgggtttt

SEQ ID NO: 928450 - DNA, 843 bp, Homo sapiens
aagagctagggcatatttcacttaatttttttttttttttttttttttgagagagtctcgctctgtcgcccaggctggagtgcagtggcgcaatcttggctcactgcaagctccgcctcccgagttcacgccattctcctgcttcaacctcccgggtagctgggactataggtgcccgccaccacgcccagctaatttttttgtatttttagtagagacggggtttcaccatgttagccaggatggtctcgatctcctgacctcgtgatccgcccacctcggcctcccaaagtgctgggattacagrcgtaagccactgcgcccggccatttcacttaattttaaaagctctttatagcctgataagccatttcacatagagtaagtcatttgatccttagaacacccttgtatggtaagttggccaactattgttcccattttcaaaggaaaaaatctgagtttcagaaagattaaacaattttctcaagaacaaagagtctgtaagaaacaaaggcaggatttgaacccagacgatttgattctagggccaattttctgtctattacatggttcttggaaatgcatcctgttgtcttcacctctcattgcatgatgactgagtcatttcctaggccttcagggtctaaaatagaattgtgacgacttaaatattcttttcctatctcattagaaagcaagtgtatttatcttcaaagcctgggcagatttatgttaactgaacagacaaggcatttggaatgacctccacacgattcaggtaccagttaaaactgatttggccagttcgtgtaccccacacctgatgtgccagcacagaag

SEQ ID NO: 928451 - DNA, 745 bp, Homo sapiens
agaatgtgttgggcagtttattcctcactttttggaaaaggaactagggatgtcacggttgctctgggtgtccaggatggggtgcatggagtgggagccgggcgggagcagtggcttcttttgagcgttacggtgtcaccagccctgccctctcccttcccataggacccctgtctcggctccctctcctctgacaggttcctagctcggccctccaagaccatcctaggtgaccagagatggcttcttgttcctgtagaccttcaaaaccagccctggygggcagggcaaagggcagggtacagtcacagcctgggtggagttcaagtagagagttttcctggaaccagagagactcctgggggagactcccagcagagctggtggccactgccaggctatgctctcggacatggcccctggccacctgtggcaatgtaaatttaaattctcataaaaaaggatgagttcatgtcctttgtagggacatggatgaagctggaaaccatcattctcagcaaactatcgcaaggacaaaaaaccaaacaccgcatgttctcactcataggtgggaattgaacaatgagaacacatgggcacaggaaggggaacatcacacactggggcctgttgtggggtgggtgggggcagggagagcattaggagatatacctaatgttaaatgacgagttaacgggtgcagcacaccaacatggcacatgtatgcatgtgtaactaacctgca

SEQ ID NO: 928452 - DNA, 624 bp, Homo sapiens
aaatcccttcctcttatgagtctgtacaataaaaaacaagttagttacttctgagatacaatgggggtacaggcattgggaaaatgctcccattgcaaaagggaaaaattagccaaaataaaggggctacaggccctatgcaagcctgaaatccagcagggcagtcattaaatcttaaacctccaaaataatatccttttactccatgtctcacatccagggcacactgatggaagaggtgggctcccatggccttgggcagctccttaatgggctgacattgagtgcctgcagattttccagatgcatagtgcaagctgtcagtggatctactattctggggtgtggaggacagtggccctcttcctacagatccactaggcagtgccccagtggggactctgagtgggagctccaatcctacatttcacctctgcactgccctagcagaggttctccatgagggctctgmccctgcagcagacttctgcctggatatctgctcatttccataatcctctgaagtctagctggaggctctcaaacttcaactcttgccctctgtgcacctgcaggcacaacaccacatggaagctgccaaggcttggggcttgcaccctctga

SEQ ID NO: 928453 - DNA, 748 bp, Homo sapiens
gaggatgggaagactgcaaggtgggggctgggcctgctccagtggacaccagcctgccttggggaaaatctcgaagaacacaagctttctctctccttgctcggaacacgccatcctgcctggagctcactcaggccagtccctactttgagggacctcaggtggatgttcagagtattccaggttgtggagaagggagcggggcatgcaatggctcggtggactttayaaagcaaagtgtgccacatccccacatccccggggggatctgagcactccaggcctgaccaagtccccattcactgggaatgagaccagcacagccacggagggaacctgcatgcttcctgggtgagtgttgatgctgacagattcagtgccagggaagggggaaatgtttaaacatcaagctgataatgaatgctttcactccatccaagagcagaatgcagaaaagatactgcttgaggatgcagactgtttactagtcttgaattgtgatgttaacctagtgtgtgaaagggaaggggaaggagagaaaaagggcaggtcagaactaatgggatacaaggggcactgcaaagtctgtgcatgaagaatatgcagttgagaccactgcccctcggagtccatgggaatccagtgaaaaaaaagagcaccagaaaacggcaacgtgggtgccagggaaagaaactcccccagtgggagagtccacagccttctgcaactgtgccccacccagcgcccg

SEQ ID NO: 928454 - DNA, 563 bp, Homo sapiens
ggcccaactccaggggaagaccaccttcccactccatcccccacttcctgctccccatccgtctctcggagagccacctccaccgctcagtaaaacctcgcactcatccctcaagcttacatgtgatccaatttttcaatacgttgggcaagaactcagaatacagaagcctgtcacactggccttgctcttgggataaggcagagggttcattgagctgattaacacacaagctgtctgcaaacagcaaatctaaaagggcttggtaacacatgcccacttgggctttgggagtcaaagacacccacccctagaggctgccgtggggccagagtccagaagtgctccccacggcctctgcasctgcccatctgcatgcttcccctaggggtttgagcagcgagtgaccgaaggagagggccacacccctgtcggatgtcctgcaagggggataagggaactgtcccatttcatcactataggtaactgccagcgacagtcactcctaactttgttctaaaatgccacctggagggcctgtttcccatggtaattagttcata

SEQ ID NO: 928455 - DNA, 606 bp, Homo sapiens
accttagaaggaatatctcaacaggcctgacatcactggatccctagaaattttaccgaggtaacaggtgtccctgaattttagttagatttatttcccatcccctggcatgcaaatgtctcaccaataagtccagtgtgtttgctacttcttgctcactggatctaatcagcataatgtcatcaatgtcatggaccagtatgatatcttgcagaagcaaaaagcgatcaagatctctctgaataagattatgtggctcacacctgtaaccccagcagtttgggaggccgaggtgggtagatcacgaggtcaagagttcaagacaagcctggccaagatggtgaaaccccatctctactaaaaatacaaaaaattagcagagcgtggtggcacacgcctgtaatyccagctacttgggaggctgaggcagaaaatttcttaaacctgggaggcagaggttgcagtgagctgagatcatgccactgtactccagcctgggtgacagagtgagactctgtctcaaaaaaaaaaaaaaaaaaaaatctgacacaaagccagagagttgttatacccctgaggtagaatgataaagatatactgctggcc

SEQ ID NO: 928456 - DNA, 445 bp, Homo sapiens
tttcctgaatacagcacactgatgggtcttgactctttatccaatttgccagtctgtgccttttaattggagcacttagcccatttacatttaaaattagtattgttacgtgtaaatttgatcctgtcattatgatgttagctcattattttgctcgttagttgatgcagtttcttcctagcctcgatggtctttacaatttggtatgtttttgtagtgcctggtaccagttgttcctttccatgtttagtgcttccttcaggagctcttgtagggcckgcctgggggtgataaaatctctcagcatttgcttgtctgtaaagtattttatttctccttcacttatgaaacttagtttggctggatatgaaattcttgattgaaaattcttttctttaagaatgctgaatattgtcccccagtctcttctggcttgtagagtttc

SEQ ID NO: 928457 - DNA, 771 bp, Homo sapiens
atgaccgggacatacagggacatatgtagctcatgatagggctggacgtgccactggccctggaatatgtggagttccttggctacaacctcctgcatctttctcacatttgagatggctttacaaatggtttggttcactgaaaatggctcctttagtgggtgatgtttggctagacactactagtgttggtcttttttttttttccaagaatgatgtatttttttattttttatttcattttatgtatattttttgagatggagtctctctttttcatccatgctggaaggcagtggcgcaatctcggctcactgcaacctccgcttcctgggtttaagcgattctcctgcctcagcctcctgagtagctgggattacaggtgcccagcaccacatccagctaactkttgtatttttagtagagatggggcttccccatgttggccaggctggtattgaactcctgatctcaggtgatctgcccgcctcggtctcccaaagtgctgggattacaggtgtgagccaccatgaccggcctaagaatggtgtattaatcagggttttccagagaaaccgataaaggtatagttatatatagaaagacattgaatatatatagaaaggaattggctcacttggtgatggaggctgacagattccaagatgtgcagtttgcaatccggagacccaggaatgcccatggtgtagtcctaatctccaagctagcaggcttgagacccaggggagctgatgtctcagttcaagtcta

SEQ ID NO: 928458 - DNA, 771 bp, Homo sapiens
atgaccgggacatacagggacatatgtagctcatgatagggctggacgtgccactggccctggaatatgtggagttccttggctacaacctcctgcatctttctcacatttgagatggctttacaaatggtttggttcactgaaaatggctcctttagtgggtgatgtttggctagacactactagtgttggtcttttttttttttccaagaatgatgtatttttttattttttatttcattttatgtatattttttgagatggagtctctctttttcatccatgctggaaggcagtggcgcaatctcggctcactgcaacctccgcttcctgggtttaagcgattctcctgcctcagcctcctgagtagctgggattacaggtgcccagcaccacatccagctaacttttgtatttttagtagagatggggcttccccatgttggccaggctggtattgaactcctgatctcaggtgatctgcccgcctcggtctcccaaagtgctgggattacaggygtgagccaccatgaccggcctaagaatggtgtattaatcagggttttccagagaaaccgataaaggtatagttatatatagaaagacattgaatatatatagaaaggaattggctcacttggtgatggaggctgacagattccaagatgtgcagtttgcaatccggagacccaggaatgcccatggtgtagtcctaatctccaagctagcaggcttgagacccaggggagctgatgtctcagttcaagtcta

SEQ ID NO: 928459 - DNA, 548 bp, Homo sapiens
caagccagaagagattgggggcctatattcaacattcttaaagaaaaaaatcttcaacctagaatttcatatccagccaaactaagcttcctaagcaaagcagaaataagatcctttacagacaagcaaatgttgggggagtttgytaccatcagaactgccttacaagagatcttgaaaggagcactaaatatagaaaggaaagactgctaccagcaaatacaaaaacaaacttaaacacacagaccattgtcactggagagcaaccacacaaataagccaacataataaccagctaacaacacaatgacaggatcaaatccacacatatcaatactaaccttgaatgtaaatgggctaaatgccccacttaaaaggcacagagtggcaagctgaataaataagcaagacccaatggtatgctgtcttcaagagatccatttcacacaaaatgacacccataggctcataataaagggatgcaggaaagtcaacaaagcaaatggaaaacagaaaaaagcagggattgcaatcctaatttcagacaa

SEQ ID NO: 928460 - DNA, 548 bp, Homo sapiens
caagccagaagagattgggggcctatattcaacattcttaaagaaaaaaatcttcaacctagaatttcatatccagccaaactaagcttcctaagcaaagcagaaataagatcctttacagacaagcaaatgttgggggagtttgttaccatcagaactgccttacaagagatcttgaaaggagcactaaatatagaaaggaaagactgctaccagcaaatacaaaaacaaacttaaacacacagaccattgtcactggagagcaaccacacaaataagccaacataataaccagctaacaacacaatgacaggatcaaatccacacatatcaatactaaccttgaatgtaaatgggctaaatgccccacttaaaaggcacagagtggcaagctgaataaawaagcaagacccaatggtatgctgtcttcaagagatccatttcacacaaaatgacacccataggctcataataaagggatgcaggaaagtcaacaaagcaaatggaaaacagaaaaaagcagggattgcaatcctaatttcagacaa

SEQ ID NO: 928461 - DNA, 466 bp, Homo sapiens
cgaagagaaggtgaaaaagaagaggatgaaggagactctataaacctttttctatgaataattagcatgatatttgagtaataatactccaagaagaattctgcagtcattgcatgatacatatactatatctccgaagccattgctttaccacaattctagtagtatgggtcgggatttgtaattttaactyttaaaatcaaactctatataagtaaattacattctctaatgaagtctttctctcatacttatttttgatattgcaaattctgactcttactctttcttttctccctctcctgctcctgacttcaccttgtgtagatttcttcttttcttgaacacatatatactaaagccatttggtcagggttaggtgggcatccacatctggttgggtgacagggagctgtgatggcccacaattatgagagcccacgcacaatggaaaacacgttcacat

SEQ ID NO: 928462 - DNA, 466 bp, Homo sapiens
cgaagagaaggtgaaaaagaagaggatgaaggagactctataaacctttttctatgaataattagcatgatatttgagtaataatactccaagaagaattctgcagtcattgcatgatacatatactatatctccgaagccattgctttaccacaattctagtagtatgggtcgggatttgtaattttaactcttaaaatcaaactctatataagtaaattacattctctaatgaagtctttctctcatacttatttttgatattgcaaattctgactcttactctttcttttctccctctcctgctcctgacttcaccttgtgtagwtttcttcttttcttgaacacatatatactaaagccatttggtcagggttaggtgggcatccacatctggttgggtgacagggagctgtgatggcccacaattatgagagcccacgcacaatggaaaacacgttcacat

SEQ ID NO: 928463 - DNA, 549 bp, Homo sapiens
tacctccattggctaagtattgtttacttacttcttcttcttcttttttttttttttttttttttttttgagatggagtctcactctgttgcccaggctggagtgcagtggcgcgatcttggctcactgcaacctccacctcctgggttcaagtgattctcctgctgcagcctcccaagtagctgggactacaggcgtgtgccaccacgcctggctaattttttgtatttttagtagagacggggtttcaccatgttagccaggctggtctcgaactcctgacctcaggtgatctgcccgcctcggcctctcaaagtgctgggattacaggcatgagccactgcacccggccatgtttacttacttctgtacttgtttatcatctatttckccaaggagaaggtgagttccagcagagcattgttccaagttacagcagcttactcactgctgtctctagggactagaacacagagtaagtgctctgcaaatgtctgtccagcagatgggcctacttcccatactgctttgccttctcatttcctagat

SEQ ID NO: 928464 - DNA, 513 bp, Homo sapiens
agtgagacacctaaagctctcagcacagtgctaggcttggggctggagctcgagcccttatactttttcttcctccaggggagactagaccatactggtttctagtgactctatctgatagaatgtaaacctcatgagaatttgkttttttttcattattttgtttaggttgtatcccctgcaccagagtggtgcctagcacatcatagagactcaatccatgctttttgaattgagttctgtatttctgtgactgtgattctgtgagatgggactggcagtggtttcctaggtgctggttggaatgggaggtggaagggatccaggaacaaagctttgtgagaaggaagggagagatgtcccagtcaacagtgccctgggagctgggctgcatggcttgccatgttgataatgtctcatccattgctgcccagcctgggagggcagctcaggggttgctagagatgcccgttgagtgtactgggagcacagtctgtgcactgggctccaccc

SEQ ID NO: 928465 - DNA, 608 bp, Homo sapiens
atgcttttcatacttttagatttaatctgcataaatttcaaaaatttgtaattttaaaaaaacttcaggcgggcagatcactacctcaggagatcaagaccatcctgaccaacatggtgaaactccgcctctactaaaaatacaaaaaattagctgggtgtggtggcacatgcctatagttccagttactcgggaggcaggacaatcgcttgaaccctggcgggctgaggttgcagtgagccgagatcgcggcactgcactccagcctgggtgatagagctagactcagtctcaaaaaaaagaaaaattatatatatatatatatatattcaaacttatagatgagttgaagggaaagtatatatgtcactcaaattccccaactgttaatattttgggaactagtggtatcattttctttatctgtccattggagagtaaattgtcytttcctccttaatatttcagtgtgtattttctattacttaaccacaataaaatgattgaaatctggaaattagcatgatacagtattatcgtcttgctacagttcttattctatataccaataatgcatcccaaaatatattttatagcatattgtcatc

SEQ ID NO: 928466 - DNA, 734 bp, Homo sapiens
cccaagatgcaagacaaagccctctttactcttccctctcttttcctcaagcaggagtctcttcccatggccaccacacctgggaatgtgctgggtcataactgaagctagcacagctctagatctcacccaaggctcatggtgagaagtgtctgggtgccaatgatgtttattcaagtccccagggctctttagacagcaggtgataaatcgttccaggactggatccttaccttcaaggaagcaggttccctctggccaagagtatgtcttgaagtgttgctgggggatagggcctggaataggggcctcaggattctgcctggtgccttattctactgtggctgaactgatatccagtttgtaagaaaaaggtctcttttctcttccctctccttgcttcaaggggaaggaaagkgtctctcctggagatgtgagctgcattgtagggggtttaggaaaggggtggtgcaagcgctcccttggccacgctggctggtaactcattaggtcatgtgcattccaaatccactggctgtgagcccagcacagcaccaagacttgcccaggattgcaggccttgtggagtagactgcctttcaagtttacttagaactctagagcactttatcctctggtggtagggcttgctggagcttaggtttcaactgctatgatgggcaattcctctttgactgggtgagtgattcctctctggcctaaatgcttcctct

SEQ ID NO: 928467 - DNA, 711 bp, Homo sapiens
gcctgcatattttgcagaatcatctgtgaaccaggctctagtcttctcttcctttgtcaactgatcataggggattcttcatgaggccattggtgtgggctgaaggagagaaggcagggtggcaggagtggcaggagtggagaccrtggtcatttgagccacttcctcaagtaatttacctgtgccttacgtacttcaggacctgctcgaccctgatcacatatataccacttccatttgatgttggaatgctgctgtccaaaatccactttatggctagatgggtcagaaagcacccagttcatgataggcagatcaggtctcatggtgacttgatgacccatagtcaaacattcagtttccaccaaagcccagtaacaggccaagagctgtctctcaaaaggagagtggttatctgcagaagatggcaggaccttgctccaaatcctaaaggcctccactgtgattcacctatggggacctgccaaaggctccagacagcatccctgtctgccactgacacctcaagcaccatttgatcttccgggtcatatggccaaagaggcagagcagcttgcacaggagcctggacccattgcagagccttctcctgttctggactgtactcaaaactggcagcctttcaggtcactcaataaatgagccagagtaacatacccaaatgaggaatgtgttgcctccaaaatccaa

SEQ ID NO: 928468 - DNA, 890 bp, Homo sapiens
acttttgggtggtgcctgcatattttgcagaatcatctgtgaaccaggctctagtcttctcttcctttgtcaactgatcataggggattcttcatgaggccattggtgtgggctgaaggagagaaggcagggtggcaggagtggcaggagtggagaccgtggtcatttgagccacttcctcaagtaatttacctgtgccttacgtacttcaggacctgctcgaccctgatcacatatataccacttccatttgatgttggaatgctgctgtccaaaatccactttatggctagatgggtcagaaagcacccagttcatgataggcagatcaggtctcatggtgacttgatgacccatagtcaaacattcagtttccaccaaagcccagtaacaggccaagagctgtctctcaaaaggagagtggttatctgcagaagatggcaggaccttgctccaaatcctamaggcctccactgtgattcacctatggggacctgccaaaggctccagacagcatccctgtctgccactgacacctcaagcaccatttgatcttccgggtcatatggccaaagaggcagagcagcttgcacaggagcctggacccattgcagagccttctcctgttctggactgtactcaaaactggcagcctttcaggtcactcaataaatgagccagagtaacatacccaaatgaggaatgtgttgcctccaaaatccaaatagatccactaggtgttatgcctctttcttggttttagaaggggccaaatgcagcaacctgtgctttactttatcacttatccttggtgtggagcctgtcaagatagaaggactatctcgacagtccccataccactggacccctagaaattttactgaggtaga

SEQ ID NO: 928469 - DNA, 767 bp, Homo sapiens
ataaaaagcattgaaaacactgcttgataatgtggatatatcaaagcacataaatttcctcatataatttttaacatattgatttttagttatttccttacattttattttatttttccaggaaacaaatttctaacattttagaaaaaagtcatttgttactggcacaatgtttttctctgagttttgtgttatggtcaaggtatcccactctgtgtgaaagccctaaccccaaatattactatctttggagacaggacctttaagaggtgattaaagttacacaaagtcctaagggtgcagccctgctccgctccaatagaattaatgtgcttgttctttttttttttttttctttttgagatggagtttcactcttgttgctcaggctggggtgcagtgactcgatcttggctcactgcaacctctgcctcctgggttcaagcgactctcctgcctcagcctcccgggtagctaggattacaggcatgcgccaccacactcagctaattttgtatttttcgtagagctggggtttctccatgttggtcaggctggtctcgaactcccaacctcaggtgatccgcccacttcaccctcccaaagtgctaggattacaggcrtgagccaccatgcctggcctaatgtgcttgttcttataagagacactagagagctccctttgtctttctccctgccctgtgaagacatagcaagaagggccaccatctgcaagtcagagagagagagcactcaccaggacctga

SEQ ID NO: 928470 - DNA, 574 bp, Homo sapiens
catgttgtgacaaaggacaagatttattctttttatggctgtatagtatttcttggtgtatgtgtgccacattttctttgtccagtccaccactgatgggcacctaggttgattccatgtctttgctattgtgtatagtacttcaatgaccatgcgagtgcatgtgtctttttagaagaattacttattttcttttgcctrtatacccagtaatgggactgctaggtcaaatgatagctctgttttaagtgctttgagaaacctccaaattactttccacagaagttgagctaatatagattctcaacaatggtctgtaagtgttcccttttctctatagccttgccaacatctgctgttttagttttgtttctttttttttttcactttttaaataatagccattctgattggtgtgagatgaaatctcattgtggttttgatttgcatttctctgatgattagtgatgtagagtatgtttttggccacttgtatgtcttcttttgagaagtgttgtacatggcttttgcccatttttagtggagttgtttttctttcttgttggtttaaatt

SEQ ID NO: 928471 - DNA, 549 bp, Homo sapiens
tttggggtccctaacttcccgcaacaatagaaagattacattgtataatctgtattgtatgaagttcaataaatagaaaaacaggcaaaagcaaagccttaaaagggatggtattaaatagttggaaaacagggagcaaataaatttcttctcctgatagtttgacttatagtgtaattcaaagcaaaagtcacatgggggcaaatagccaatggaggcctgttgctgggaataaagtgaccatggcatgtaacttttaatgcatctcaagatgccrtatgggtgggtaaggaaggcactggaaccagaatcagaatgccatcatgcccagaagagttatttaaatacagttgacatccatagtaagaaataaaataagatttttattcactttatgatcttttgataaatgttgaatatttcattaaaacttaacatgcagtttgggaaataataataggtagttagtaaatgagaatttctttccccttctgtgctcttgcaaagttagtttttaaattaatatcctatgaatttttgattcctggt

SEQ ID NO: 928472 - DNA, 586 bp, Homo sapiens
actttgaaagcctcagagtagttaatatatactcatagactgcatatcatttgcttcatagatggtctgataatgttcacaattaaaatgtttgggaacgccataaaatttttttcacaaatctctttggtcaatacaaactaccttatgtgtaactatcaacaatgaaactgtttcaatccaaagagaaggcaattgtaaaagtctgggatactgcagaaaacataagccaaggtgactttcaatctttagtccctactaatgggtttatgtaacacagaccttttttgttctttcttcaattataataattatatgtcggccgggcgctgtgactcacgcctgtaatgccagmactatgggagaccgaggcgggtggatcacttgaggtcgggagttcgaggccagcctgactaacggggagaaaccacgtcttgactaaaaatacaaaattatccaggtgtggtggcacattcctgtaatcccagctacttggaaggctgaggcaggagaatcccttgaacccaggaggtgggggttgtggtgagccaaaattgtgccatggcactccagcctgggcaacaaa

SEQ ID NO: 928473 - DNA, 595 bp, Homo sapiens
gctgaagtgtggagactgctgattggccaaagggaacagggtgaaatcattggacagagagagaagcagctgtattctcatgctgattccattcctctgttggtgtcttcaaacttgttggtgtcagctgtttcactggaatttgtgatctgaaaaacattttaagcaatttttttttttgagacagaattttgctattgtcgcccaggckggagtgcaatggtgtgatcttggctcactgcaacctctgcctcccgggttcaagcgattctcctgcctcagcctcctgagtagggaggctagggaggctgggattataggtgcccgccaccatgcctggttaatttttgtatttttagtaaagatgaagttttaccatgttggccaggctggtctcgaactcctgacctcaggcaatccgcccgcctcggcctcctaaagagttgggattacaggcgtgagccactgggcctggccttaaacaattcttaagcaaaagccttatgattccaatgtcagaaatcctacctgtaggagcagtggagatgcaaatggtcagtatctagtgctacatgacttttggctacaaggaagt

SEQ ID NO: 928474 - DNA, 599 bp, Homo sapiens
tattgctcattaacatccttttctttctgattgaaaaactccctttagcattttgtgtaggacaggcctggtggtcatgaaatccctcaatttttgtttgggaaggattttatttattcttcatgtttaaagaatattttcaccatatatactattctatgggtaaaatttttttttcttaataattttaaatatgacacactactttctgctggcctatgagatttccatggaaaagtctgctgccagatgtattggagctacattttatattatttgtttaytttctcttgcttctgttaggattatttctttatccttgacctttgggagtttgattattaaatgccttgaatgaatcttctttgggttaaatctgcttggtgttctatgatcttcttatacttggatattggtatttttaggtttgggaggttctctgttatacttttgaataaatattctatacctgtctctttctctatatcctctctaaagccaataactcgtagattttgtccttttgagtctattttctggatcctgtaggtaggcatcattgtttttttatttgttttgtttgtctccccgactgtgta

SEQ ID NO: 928475 - DNA, 651 bp, Homo sapiens
atctctaggaggtgatgaacaaccattctaaggtgataatcacaatgttctttccctttgccatatagtcattttttcactctcctttgcaactaggagggatattttctaataaaagagaccaatggagctggactctccccttccctctttcttcttcttcctgcatggatatgatgcctggtgttgtggtagccatattaaaaaccgtggggccttcagccaaaggggaaaaagccagcaaatgaaggaaggagaatgcaaggtagaaagagcctatatccttgacagcatcatgaacaatgggagcaatgccagcaattttctatattcttacttcttgctctgtaggaaaaaataattccttatttactaaagccactgttggattgtggctggcaagatgtctgaataggaacagctccggtctgtagctcccagcragatcaacgcagaaggtgggtgatttctgcatttccaactgaggtgcacagctcatctcactggaactggttagacagcgggtgcagcccatggagagtgagctgaagcagggtgggatgtcacctcacacaggaagcacaaggggtcagggaactccctcctctacccaaggaaagccctgagggactgtgctgtaaggaacagtgc

SEQ ID NO: 928476 - DNA, 581 bp, Homo sapiens
agccaagacaatcctaagcaaaaagaacaaagctggaggcatcatgctacccaatttcaaactatactgcaaggctacagtaaccaaaacagcatggtactgctaccaaagcatatatacagacaaatggaacagaacagagccctcagaaataataccacacatgtacaactatctgatctttgacaaacctgacaaaacaagaaatggggaaaggattccctatttaataaatggtgttgagaaaactggctaaccagctagccatatgtagaaaactgaaactggaaytcttctttctaccttatacaaaaattaactcaagatggattaaagacttaaaagtaagacctaacaccataaaaaccctaggagaaaacttaggcaataccattcaggacgtaggcatgggcaaagacttcatgattaaaacgccaaaagcaatggcaacaaaaatgacaaatgagatctaattaaactaaagagtttctgcacagcaaaagaaacaatcatcgaagtgaataggccacctacagaatgggagaaaatgtttgcaatctgtccatctgacaaagggctaa

SEQ ID NO: 928477 - DNA, 624 bp, Homo sapiens
ctccctcttctgaaatcacaaatcagcatacctccatcatagtagagggagctctgtacattatgtgactctagttacattatgagttcttcaaggaatttgcctttgaaactcttatcatgactagcaatatgagatcaataaatgtttgctgytgttggaagtcaggcatagcagcttaagatcatgtgcagcctaccaatgtatggggagaggcttagatgcaagctgctaattttttttcccctctctatgatcagtaccctctctcctggaaagaaaaaatatagatttggaagcaaagagaaattcagggaatattatttcctcaaagatgagatcattaatgtatttgtgagacgaccataaagccagctttgagagctctctattcaactataaattgttcatactggccctgctatcttgtagctctgtttttatattcactgctgtgcttcctgaaagcaacaatttctgctaatgcactgaccaagcagcagcataataatcctgtcagccaacaatggatgggagctgaggattgaaaggaggtaaaccttctaatgttttcatcctcttgactgaagtaattttagcaatgacatatgatagtacttgggc

SEQ ID NO: 928478 - DNA, 634 bp, Homo sapiens
gcaggagaccaagaaaagaaaatattttgaaatatgctacagtagtctgttctttttaacaaggtatgcccccagtagaaacgagttaaccagatcctaaccttctgcggtgtttcttatcagagcccaactgacctgggagatagaaatatccaactcggctgggcgccgtggctcacgcctataatcccatcactttgrgaggcagaggcgcgcggatcacgaggtcaggagatggagaccatcctggctaacacggtgaaaccctgtccctactaaaaatacaaaaacaaaattagccaggcgtggtggcgggtgcctgtagtcctagctgctcagaaggctgaggcaggagaatggcatgaacctgggaggcggagcttgcagtgagtcgaaatcatgccactgcactccagcctgggcgcgacagagtgagactccgtctcaaaaaaaaaaaaaaaaaaaaaaaaattccaactctagtgagctctagctttctaagtaagagaagggaaatacccaatttcagctcattatagctatcccgttccacctaaggcaggaaaaaactgagaaacacttgtgaaattcacagtccaggacatgggcttactaaaagactgagatcaaatca

SEQ ID NO: 928479 - DNA, 597 bp, Homo sapiens
tggcagtgtgcctacacaggcattttagttttcaggccagaaattggagtgcctgctctagagctggatatggacccccacagccagaactctggaaagtgccccagcagtaggaagtggaattgtgttctgtctcatcacaggcctggagcaggaggagagctgctacagctgcagtttctcctgaattatgagacttgcagcccaggacaaacttggcaatgtggaactggtctgtatgtgtcattgctggatgccccagcctgttcccctgagattgtggtgcagtggggccctctccactccatccacaggcatagatccaggcatttagggtactcacttacctggaccaacagcctgggctgccctacccttgctggacattgagcatggtgcaggagggccctttgcttcatgmctaggcagatctcaaagcacctagtagcccagatttgtaaccttggctaccattcctgtgcatagatatgggtgaaggggggccctccctgcttcatgcccaggcagatgtccagccattcagagcacctgtttgcctagatcaacagccagagtccatgcccaggcatatctcca

SEQ ID NO: 928480 - DNA, 612 bp, Homo sapiens
ccatagtgtattccataatgtctgaatgtctgttctaatttacattcccaccaataatgttcaagcgttctcttttaaaagtgaaagaaatcagacacagaaagaaaaatattgcatgatgttacttacatgtgaattctaaaacagcagaattcacaaaaacagagcatagcatagtggttaccaagggctagggtagaagtacgggtgaggaaaatgggaagatgttggtatatgagtcaaagtttaagttttgtartatgaataagctctacagggctaagaacagcatggtgactatagttgataatactgtattttgtgctttttatacttagagtagatctttagtgccttcacaccacacacacacacacacacacctgtgaagagacagctatgtaaattagcttgactgtagcacttagttcactatgtataaatacctcaacatgtcacatattcttaaatacatacaatttgtataaaaacttttaaaataaaactatttagcaaagaaggaaaggagaaagtttacagtcatttacaagtaagtggttagtggaaagaagatggagaattgatttattagaaatggctcatgagaaatat

SEQ ID NO: 928481 - DNA, 612 bp, Homo sapiens
ccatagtgtattccataatgtctgaatgtctgttctaatttacattcccaccaataatgttcaagcgttctcttttaaaagtgaaagaaatcagacacagaaagaaaaatattgcatgatgttacttacatgtgaattctaaaacagcagaattcacaaaaacagagcatagcatagtggttaccaagggctagggtagaagtacgggtgaggaaaatgggaagatgttggtatatgagtcaaagtttaagttttgtagkatgaataagctctacagggctaagaacagcatggtgactatagttgataatactgtattttgtgctttttatacttagagtagatctttagtgccttcacaccacacacacacacacacacacctgtgaagagacagctatgtaaattagcttgactgtagcacttagttcactatgtataaatacctcaacatgtcacatattcttaaatacatacaatttgtataaaaacttttaaaataaaactatttagcaaagaaggaaaggagaaagtttacagtcatttacaagtaagtggttagtggaaagaagatggagaattgatttattagaaatggctcatgagaaatat

SEQ ID NO: 928482 - DNA, 597 bp, Homo sapiens
cacttaagttgcttccaaatcttggctattgtgaacagtgctgcaataaacatagaagtgcagatatcttcaatgtactgattttctctcttttaagtatataacctaacagtgcaattgctggatcatatgatagctctatttttaggtttttgaggtaccttcacactgttatttatttatagtggttgagctaatttacattcccaccaacagcgtataaggattcccctttctcaacatcctcactagcattttttttttcctgtcttttggatataagtcattttaaatgagatgagatgatatytcactgtagttttttgatttgcatttctctgataatcaatggtgttgagcaccttttcttatacctgtttgccatttatatgtattctattgagagatgtctatttgggtgttttgcccattttttaatcggattattagattttcttccaaaaagttatttgagcttcttacacattctggttatgaatcccttgtcagatagatagtttgcaagtattttctcccttcagtgggttgtcgcttcacttttctgattctttcctttgcaatgcagaagctttttaa

SEQ ID NO: 928483 - DNA, 564 bp, Homo sapiens
tagttccaaagagaggcatgctcccagaaaaggcacaacaatgatccagttgacctggaagttaagaatgtcacctggccacactgacacttctcatgcctctgaatcaacaggcaaagaaggcagttactgtgctggccagggtgattgatcctaactaaccaagggagaactttgactactactccccaaaagaggtaaggaagactatgtgtggaacacaggagatcccttagggaatattgtagtattaccatgccctatgattaaggtcaatgaaaaactataacaacctaatttaactgaactactaatggcccagacccttcaggaatgaaagtttgggttctttaacactagcaaaagaggattctgataatcaaatggataraatgacccattctgtggatactagtcagtctctttccccagataaccctgccattgtccagtggattcatggataaattcaccatggtggcagggatggagcgtatgcatgggcccagcaacatgcacttcaactcaccaaggctgatctggttatggcaactgctgaatgtc

SEQ ID NO: 928484 - DNA, 629 bp, Homo sapiens
gcatgacccaggtggtcacagggggccaggtgagtggagcactgccccttgacaaggcccatgtgctctttggacacctgggctgcttcactcatttgtgtcagcgctggactccaagggtgtatgagcagaaagaaattgtgcctgactcctaaacggcttacrggacagagaagggggggaagtgatactggggttaagggttgtgtcctgggagcctgatctggaggcagcctgcagcatctgcaggaatagcaccctgttctctctctggaagcctctgtggccagtgcaggaatcccagcccctcccagccacaggatgggctctgctttccctggtgccatcgtgtgctggcaaaagggaacagcagaggtggatgcacgggctccaggcttggcaggaagactggctgaccccgctctgggactgcacgcccttgaggatatgaatatcagagggagggggtggcccagcaggcctgcgctctctgatgaggcatgcgtgtggtgcagtgatgaaacgagtgggcaagggctgaaaccacctctcccctcagattttctggagcatcattcccggcacaggtgcaaagaggctcaggatgcttatgactccagtgtagattg

SEQ ID NO: 928485 - DNA, 670 bp, Homo sapiens
tctgaggatattttccgaatcagcttgtcagctcatgtttgccaaactctgtgctccactccacaactagctgccaccccaaaaccgactggagccatataggggtgaacaaaggaaataaaactggctgcctggcaaagccaggacagacccaaagcttcagctctaggcagatgcacaagacttccaggcatgctgggggccccctagacggagcttttcctgatgggctttccctcccacagcctcccctaccactgcatctccagcctcacatttccccagcaggactgcaagcctcctgagggtggagagccatctgaccaccactgtcccctcagcccccagcacagtgcccagccctgatgcagcatgtaattattattattattwttttttttgagagggagtctcgctctgtcgcccaggctggagtgcagtggcgcgatctcggctcactgcaagctccgcctcccgggttcaccccgttctcttgcctcagctccccgagtaactgggactacaggcacccgccactatgcccggctaatttttttgtgtttttagtagagacggggtttcaccgcattagccaggatggtctcgatctcctgacctcgtgatcggcccgcctgggcctcccaaagtgctgggattacaggtatgagcc

SEQ ID NO: 928486 - DNA, 631 bp, Homo sapiens
aagtgaagggattcagaatatccaaaagaatctcaaaaaagaacaaagttagaggattcacatttcctgataccacaactttactatacagccacaataatcaagactgtgtggtgctggctaggagagacatatagatgaatgaaatagcactsaaagttcagcaacaaacccttacatttgtggtcagttgattattgatgagggagccaagacaattcaatggggaaaggacagtctacaataagtggtgctgagacagcatgagatattcacatgcaaaagaatgaagttgtaccccatcttcataccacatacaaaaactaactcaaaatggatcatagccccaaacattgaagttaaaactatgaaactcttaagtgaaaacaccgacataaatctccatgaccttggattaggtgatgatgtattagatatgacaccaaaagcacaaaacaacaaaattttaaaaaatagataaattgaactacatcaatattaaaaaacatttgtgcttcaaagcacactatcaagaaggtgaaatgacaatccgtagttgggagaaaatatttgcaaattatctctctggtaaggaactagtacccacaacgtatggagaactcttacaatg

SEQ ID NO: 928487 - DNA, 604 bp, Homo sapiens
cttgtggaaagtgaagggattcagaatatccaaaagaatctcaaaaaagaacaaagttagaggattcacatttcctgataccacaactttactatacagccacaataatcaagactgtgtggtgctggctaggagagacatatagatgaatgaaatagcactgaaagttcagcaacaaacccttacatttgtggtcagttgattattgatgagggagccaagacaattcaatggggaaaggacagtctacaataagtggtgctgagacagcatgagatattcacatgcaaaagaatgaagttgtaccccatcttcataccacatacaaaaactaactcaaaatggatcatagccccaaacattgaagttaaaactatgaaactcttaagtgaaaacacygacataaatctccatgaccttggattaggtgatgatgtattagatatgacaccaaaagcacaaaacaacaaaattttaaaaaatagataaattgaactacatcaatattaaaaaacatttgtgcttcaaagcacactatcaagaaggtgaaatgacaatccgtagttgggagaaaatatttgcaaattatctctctggtaaggaa

SEQ ID NO: 928488 - DNA, 625 bp, Homo sapiens
attaggtgatgatgtattagatatgacaccaaaagcacaaaacaacaaaattttaaaaaatagataaattgaactacatcaatattaaaaaacatttgtgcttcaaagcacactatcaagaaggtgaaatgacaatccgtagttgggagaaaatatttgcaaattatctctctggtaaggaactagtacccacaacgtatggagaactcttacaatggaacaacaaaagacaactcaattttttaaatgggcaaagaatctgaatagacatttctccaaagatatacctacagcaataagcacatgaaaaggtgcgcaacatcactagccattagtgaaatagaaatcaacaccatgaggatggttatttaaaaagacagtaaataacaaggatgtggagaaattggagccctcatatattgctggtggggatgtaaagtggtgcatccatgagggaaaacagtttggyggtttcttaaaaagctaagcttagaattaccatgcaacccagcaattcctctcctaagtatgttcctagaactgaaaacttgttcacacaaaaacttgttcacaaatgttcccatcagcattattcatgatagccccaaaatggaaacaacccaaa

SEQ ID NO: 928489 - DNA, 633 bp, Homo sapiens
cagggtggtgctgcagcaggtgcctgggtgtccctgtgagctcagtgggacaacaaatcttctgtagaatccagtgtggacttggtttggctttccaacaattttaacccaaccagatccctccctttagaattccttcccttggacaaagcaactgcaactataatttcagattcagaggaagcctgcaagctctggcttcccttctttgcttccttttttttttttttttttttttgcgatggagtttcactcttgttgccaaggcattggagttcagtggtgtaatctcggttcacttcaacctctgcctcctgggttcaagkgattctcctgcctcagcctccagagtagctgggattacaggtgtctgccactatgcctggctaattttttgtatttttagtagagagggggttttgccattttggccaggctagtcttgaactcctgacctcaggtgatccacctacctcagcctcccaagtgctgggatgacaggtgtgagccaccatccccggccccttccttacttctaacccaatctggatgttgtacttttacatacttctaccattgagggtttggatctaagtctcttccccttgaatctggttgggcttgtgactgctt

SEQ ID NO: 928490 - DNA, 773 bp, Homo sapiens
gaatgccaggaagataatccttgggtctatcatcgtcttttgtattttttctcccttcagtacattctgggttcaggccagcacatagacaacatgttcagaaagtttagaaagtctctctagggagacttgatgtctctggaggtcttttatgccgattttactggcctcgttgagaaggcagtttcttgacttcttggcaaagggattgaccttaagtctgtttctagagggcaaatgtctgtcaagatgaagccgtggctgaggctcaccactcagggattcacctgatctgaattctctttctccatccctgagatagctcccatggatggtgagtgaaactctgaaccaggaattatagatttggtcatcttataactagaaaaagaccctagaggacatttagcttagcactctcccttccaacgtattggtgacccccactgtccagcagaaatgagttttctagaaaacaaaatgctttctctcaatacacatgttcaaaatctcatgcatattttaatacttatgacttcatatttcatttgaatgagtgcgatgattaaatttgggacagagagaaaaagaatcctgtgtgtttacacaaacctastataaaatcctgaggtcagcccttccctcaaatcttcaaaacacagttcgctgatgatgctgcttcttaaaccttcatcatctgtcagagaaaaaaaagactgttactagaagaggagacagaggagcatacaatatggacatgggactggaaaaca

SEQ ID NO: 928491 - DNA, 586 bp, Homo sapiens
ggattgaagtgggcccggaatctaatgtccttaagaaagaagaaaaacacacagagaaggaagtgctgtgtgaagtcacagacacacaaggaagaagccgtgttgacaagggagacagaaactggaaaggtgcaggggcaagccaaggattgctggcttccaggggcagctaggaagagggagggaaggattcttcccttgagccttctgagggagtatgggctgtggacacgtgggtttctggcctccagaaccgtaagagtgcacgtctgctgtgtatttttgttgttgttgtttgtttgtttgtttgtttgttttttgagatggagtttcgctgtgtcaccaggctggagtgcagtggcatgacctcagcwcaatgcaacctctgactccttggttcaagcatttctcctgcctcaacctcccaagtagctgcgactacaggcgtgcaccaccacacccagctaattttgtttttttagtagagatggggtttcaccgtgttggccaaatggtctcgatctcttgacctcttgatccgcccgcctcagcctcccaaagtgctgggattacagacatgagccac

SEQ ID NO: 928492 - DNA, 512 bp, Homo sapiens
tggtcctcttctgacttcctagacgcagtcattctccttgattttctttttcttacttcagtccttgcctcttcccgttccacgtatttactccttcttagaaatccctactcttggagctgaaggtaactgcccatcccagtgtttacaccttctccmtgacagactcatgtggattatggatattgaggggagtgggctttaggtccctttaaagtgtcttagttcttttaatttcccaagttcttttgggaaatgagttgacaggatgatacattccaacaagcattgtttttctcaaacatgattgtaaagccctggtccatttccacattttactcattttgatcattctttttttttttttccctttagatggagttttgctcttgtttcccaggctggagtgcagtggcacgatcttggctcactgcaacctctgcctcccgggttcaagcaactctcctgcctcagcctcctgagtaactgggattacaggtgcctgccatcac

SEQ ID NO: 928493 - DNA, 756 bp, Homo sapiens
ctccactttctccaggaagctgtcccctcctgcttcctcccctactaattttagcagtgacccatcccttttctccgcagtttccaagggctccatctgcattgctcaagtggaacagatcactttatgtctggagttataattacttctgtacttggtcatttctcacactgtgttggttcctccttagagcagagackgactctttcttggtcccatagttcccatgggaagtacttggtaaaatatcttttttggttttttaaaaaatctttaatgagtgcatgtgaaaaagctgatgtcaaaagctgctgctttcaaagatcctagtttagttagctcaggctgttgtaacaaaatatcctagcttaaacagcaaacatttatttctgaaggttctggaggcaagaaagtcccagatcaaggtgctaatttggtgtttgaggaggggtctctttctggtttgcagaaagctgccttctcactgtatcctcacatagcagagagatatggtctcttcctcgtcttataggaacactcatcctatcacgggagctctagcctcacgaactcatttaaacctagctacctcccaaaggccccgcctgcaaatgccatcacactggggattaggcttcaacatatgagggggacataaacattcagtccataggagaccccatcttatgatcataacaacctctgaattaaatgttggggatttggttcaaaacaaccctcttttgagcacctgct

SEQ ID NO: 928494 - DNA, 714 bp, Homo sapiens
ggggtcggggaccgcgctgatgcagagcgcgggggcgcaggttaaacctaaaggagggaagcttttgggggcggaacagacaacggagaacgctgcacactgcccttcccacccgaattgtgctttgcctttttttttttttttttttttttttttttgagacggagttttgctcttgttgcccaggcctggagtgcaatggcctgatctcggctcacygcaacctccgcctcccgggttcaagcaattctcctgcctcagcgtcccgagtagctgggattacaggcgtgcgccaccacgcccggctaattttgtatttttagtagatactgggtttctccatattggccaggttggtctcgaactcctgacttcaggtgatccaccggcctcggcctcccaaagtgctgggattacacgcgtcagccaccgcacccggcctgcttgcttttttttttttttttgcagagtctcgctgtccaccgggctggagctgcagtgatctcggctccctgcggcctcgacctcccgggctcaggcgatcctcccgcctcagcccacggagtacatgggaccacaggaggccaccacgcccgactacttgctgtaatttttgtagggatggggtctagccccgctgcccaggctggtccgcactgctgggctcaagagctccgcccgcctccgcctcacaaagcgcagggatcccaggtg

SEQ ID NO: 928495 - DNA, 823 bp, Homo sapiens
gcatggtgactcacacctataatcccagcactttgggaggctgaggtgggcggatcatttgaggtcaggagttcgggactggcctgaccaacatggtgaaatcccgtctctactaaaaatacaaataaataaataaataaataaataaataaataaataaataaataaattagccgggtatggcggtgcatgcctgtaatcccagctactcgggaggctgaggcagaagaattggttgaactcgggaggcagaggttgcagtgagccaagatcgcaccactgcactccagcctgggtgacagagcgagactccataaaaaaaaagaaaaagtaaaaaaagatgaccaccttccaatatataggtaatcaaaaattaaaccattcaactaaaatactaaatgttgaaattcagcaaatatttactgagcatatactacatgcaacaaatatatgtgtcaggttgtgctgtaactgaaacaaaagtaaaatayggtcccttttctaaataagtttaaaagtactgatggaaacagacatgcaaatagcaaatacaaaattaaacaagtgccataataaaggtatagtacaaaaaatactaatgactcacctctagcaaagtacttcaagttaccttatttttctttctacactgatctaagcctcattacttccaaacatacttccaaactgccccaaggtaattcacaaacaaaaatacacaacagaacaaggtgaagaccagaaaactaaatgtactccagattcccatttatatctgttaaaagaggttactagaagccaaaaatactcatttaagaaatat

SEQ ID NO: 928496 - DNA, 666 bp, Homo sapiens
cttgagcaagacttggtcttggacacccagaggcccttggttgagggtttacctcctggcgtggccactgacacatccacgtttggctcccacacggctgggcggccccgagacctgctgtgcctgcccttctcattggtggcatttctcaagtttgtcccctctcaagtctgccccatccggaaaaccaaacacctctctctcctacatggaaacccccgtcagcacctcctcctgactcacagggcatcccgtcaacatcacagtcccaaccttcccacacggacaagctcatgggaccccytgatggaccaggacagcgccagcactaagacgtgccctggaactcacaggaagagcggaccaagaagccgggaacagcacggggcactgggagctgcaaacgcccacgatactgtgagagacggagaaaggtatgacaggtggagcggaccaagaagacgggaacagcacggcgcactgggagctgcaaatgcccccgataccgtaagagatggagaaaggtatggccatggcggtcacaaaatgttactcaacatttattaaaggcctaaatggagaacctaacgctatcaaacccttagctaaaaacacaggggaaaattcgtatggcctggggttaggcgaaaagttcttagacatgac

SEQ ID NO: 928497 - DNA, 677 bp, Homo sapiens
acaggtgcatgccaccacgcctggctgctttttatatttttagtagagacggggtttcaccgtcttggtcaggctcttcttgaactcctgacctcaggagatccacctgcctcggctgcccaaaatgctgggattacaggcgtgaggcactgtgcccagcgagaatttttaagagtctttaatgtctattgccaaactggcctcacagagccacttttgatattaaccaaaggagatctcccattgacccacccacccacccagccacccactttctgtccattcatcttcctctctgtgcatacagcatttgttggcctgctgactatgtacccattaagaaaaatagctattatgtttctattcctgttattgattgtggctgggtaccaagttcataactttcccaggtccaaagatactacttatagtagctagcatttattgagagtttactgtgtgcttggccttttgctatgagtttcacttgcattatgtggkttaatcttcattctgtgaggttgttgctttatcccatcttacaaaagaaaatgagaaacaaaaaagctatgtgagctgctccccaggccacacagctagcaagtggcagagctggaaaaccaggtagagccaaacacagtttgtaactagactgcgactgtcatgctgttgtttaa

SEQ ID NO: 928498 - DNA, 620 bp, Homo sapiens
catggagcctccagtctacatgtgggagacaactaacagcgcatgaacacataactccagcagtgatcaggatggatataaaattgtgaagtgggccgggcgcagtggctcacgcctgtaatctcagcactttgggaggccgaggtgggtggatcacgaatcaggcgtttgagaccagcctggccaatatggtgaaaccccgtctctactaaaaatacaaaagttagccgggcgtggtggcgtgtgcctgtaatcccagctactcaggagggtgaggcaggagaattacttgaacccgggaggtggaggttgcaatgagccaaagattgtgccattgcactccagcctgggtgacaagagtgagactctgactcaattaaaaaaaaaaaagaaaaagaaaaamaagaaaaacgcaaaggtcggcctctgaagcctgcaggttcgcaatccgtctcctgcctgccacttactgtgagaccagagccaattccttctgtccttgtgcctcagttttctcaactgtagaatggggatcttcacagtagtgcctgtaggaataattgagctaatagttgtttacaaatagaaaaggtctataacagggctgggcacacagaaac

SEQ ID NO: 928499 - DNA, 754 bp, Homo sapiens
acatcagccaacagatgtgtgaaccacgcccacaggctacgcagatggcaggtgtgatacgatcacatgtatattggttttcatccgcaattcctggctcataactcccatagcccttattacaatgttttgttatcatgttgggtgagttaggcctcaggagcaggccccaggaaacagagtctctctctttgaccttctcctgtcctcctgtcacctgcctaaggcaggactctaatctgattgtgggtcaagagaccgattccagaggggtcttataggaaggcatgccacacagagaggccaagaaaagtctgaggctgggcacagtggctcacgcctgtaatcccagcacttagggaggccaaggcgggcagatcacgaggtcagaagttcgagaccaccctggccaatatggtgaaaccccatctctactgaaaatacaaaaagattagctgggcatggtgacatgtgcctgtggtcccagctattcgggaggctgaggcaggagaatggcgtgaacccgggaggcagaggttgcagagagccgagattgtgccactgcmctccagcctggacgacagagcaagactctgtctcaaaaaaaaaaaaagaaagaaagaaaagtctgagcagcaggtcttgctgggtttagaccgtgcacttttttttccaatcacgtctctgtacacggttgtcagtcatgcctgtgtaacgaagtcttcataaaatcccaagaggatagggttcaggg

SEQ ID NO: 928500 - DNA, 697 bp, Homo sapiens
ggcacgcgtctctaggttcctaaaaaacggaagaaaataaaaataaccggccgggtgcggtggctcacgcctgtaatcccagcactttgggaggccgaggcgggcggatcacgaggtcaggagatcaagaccatcctggctaacacggtgaaatcccatctctactaaaaatacaaaaaaattagccaggcatggtggcgggcgcctgtagtcccagctactcgggaggctgaggtaggagaatggcgtgaayccgggaggcggagcttgcagtgagccgagattgcgccactgcactccagcctgggcgacagagtgagactccgtctcaaaaaaaaaaaaaaaaaaaaaaaaatatatatatatatatatatatatatatataattttaatatacataaatttggagctatacacagcaaacccgtaaatgtttagttgtcagtattatagtttttaatctgaaaaataatgagtttttaataagcaacatgactttggtaatcagaaaacacacacacacacacacacacacacacacacacgagagtagctagagtcctgtacacaatttggaataagacccacaaaaaggagaattaaggtccttcctaatcctgccagaataaaccaccactctccgtgggcttccctccaagtctttttttgtctgcagaaaagtcggatcagatagtgg

SEQ ID NO: 928501 - DNA, 697 bp, Homo sapiens
ggcacgcgtctctaggttcctaaaaaacggaagaaaataaaaataaccggccgggtgcggtggctcacgcctgtaatcccagcactttgggaggccgaggcgggcggatcacgaggtcaggagatcaagaccatcctggctaacacggtgaaatcccatctctactaaaaatacaaaaaaattagccaggcatggtggcgggcgcctgtagtcccagctactcgggaggctgaggtaggagaatggcgtgaatccgggaggcggagcttgcagtgagccgagattgcgccactgcactccagcctgggcgacagagtgagactccgtctcaaaaaaaaaaaaaaaaaaaaaaaaawatatatatatatatatatatatatatataattttaatatacataaatttggagctatacacagcaaacccgtaaatgtttagttgtcagtattatagtttttaatctgaaaaataatgagtttttaataagcaacatgactttggtaatcagaaaacacacacacacacacacacacacacacacacacgagagtagctagagtcctgtacacaatttggaataagacccacaaaaaggagaattaaggtccttcctaatcctgccagaataaaccaccactctccgtgggcttccctccaagtctttttttgtctgcagaaaagtcggatcagatagtgg

SEQ ID NO: 928502 - DNA, 697 bp, Homo sapiens
ggcacgcgtctctaggttcctaaaaaacggaagaaaataaaaataaccggccgggtgcggtggctcacgcctgtaatcccagcactttgggaggccgaggcgggcggatcacgaggtcaggagatcaagaccatcctggctaacacggtgaaatcccatctctactaaaaatacaaaaaaattagccaggcatggtggcgggcgcctgtagtcccagctactcgggaggctgaggtaggagaatggcgtgaatccgggaggcggagcttgcagtgagccgagattgcgccactgcactccagcctgggcgacagagtgagactccgtctcaaaaaaaaaaaaaaaaaaaaaaaaatatatatatatatatatatatatatatataattttaatatacataaatttggagctatacacagcaaacccgtaaatgtttagttgtcagtattatagtttttaatctgaaaaataatgagtttttaataagcaacatgactttggtaatcagaaaacacacayacacacacacacacacacacacacacgagagtagctagagtcctgtacacaatttggaataagacccacaaaaaggagaattaaggtccttcctaatcctgccagaataaaccaccactctccgtgggcttccctccaagtctttttttgtctgcagaaaagtcggatcagatagtgg

SEQ ID NO: 928503 - DNA, 602 bp, Homo sapiens
ctatactgttaagtgaaagtaagaatgaccagtgtatacagtttaatcccaattttgtaaagtatggaagaatatatttgtggccagagagagtataatgagtgaatatttctagactttcactctggacccagcctattctattctattctattctattctattcattttattttattttaagacaagagtttcactctgtcgctcaggttggagtgcagtaacgcgatcttggcttactgcaacctctgcctcacgggtccaagtgattctcctgcytcagcttcctcaagtagctgggactacaggagtgtgccaccatgcccggctaatttttgtatttttagtagagatggagtttcactctgttggccagactggttttgaatttctgacctcaggtgatccacctgtctcagcctcccaaagtgctgggattacacatttgagccaccatgcgcagccaaggacccagcctcttctaagcgcctttcacgtataactcattaaatgctcacaacagcttctggaggaggagcggttacatcttcattatgtaaaggtataaaaggctgggaagtgaggacaaagaagtcccctca

SEQ ID NO: 928504 - DNA, 701 bp, Homo sapiens
ctccaggtgttccacagagccagtagcactccatttgtgagccctgcttctgccatcttggcctcaccctccggcagccactctgaaggagtggcaagatgggctacaagacccttcagcctttcattctaccgatttagcagcgccagagaaagaaaaagctgctgtcctgataacttcagcaaaaatgcaaacaactggccgagcgcagtggctcacgcctgtaatcccwgcgctttgggaggccaaggtgggcggatcacttgaggtcgggagttcgagaccagcctgaccaacatggagaaaccccgtcgccactaaaaatacaaaaacagccgggcgtggtggcgcatgcctgtaatcccagctactcgggaggctgaggcaggagaatcacttgaatccgggaggtggaggttgcagtgagccaagatcgcaccattgcactccagcctgggcaacaaagagggaaactccgtctcaaaaaaaaaaaaaaaagcaaacaaccaaaaacaaatttaaagagccacccaggcacgaccctgttggcctgccttgggaccatgcccaggcatctctgaaccaatgactgtgacaagtttcattttcaggcgcccttggttcagtcctctgattagctgggcctggggtatgccccggcccagggtgaggtcaacccgctatgaatcccttggactcag

SEQ ID NO: 928505 - DNA, 701 bp, Homo sapiens
ctccaggtgttccacagagccagtagcactccatttgtgagccctgcttctgccatcttggcctcaccctccggcagccactctgaaggagtggcaagatgggctacaagacccttcagcctttcattctaccgatttagcagcgccagagaaagaaaaagctgctgtcctgataacttcagcaaaaatgcaaacaactggccgagcgcagtggctcacgcctgtaatccctgcgctttgggaggccaaggygggcggatcacttgaggtcgggagttcgagaccagcctgaccaacatggagaaaccccgtcgccactaaaaatacaaaaacagccgggcgtggtggcgcatgcctgtaatcccagctactcgggaggctgaggcaggagaatcacttgaatccgggaggtggaggttgcagtgagccaagatcgcaccattgcactccagcctgggcaacaaagagggaaactccgtctcaaaaaaaaaaaaaaaagcaaacaaccaaaaacaaatttaaagagccacccaggcacgaccctgttggcctgccttgggaccatgcccaggcatctctgaaccaatgactgtgacaagtttcattttcaggcgcccttggttcagtcctctgattagctgggcctggggtatgccccggcccagggtgaggtcaacccgctatgaatcccttggactcag

SEQ ID NO: 928506 - DNA, 701 bp, Homo sapiens
ctccaggtgttccacagagccagtagcactccatttgtgagccctgcttctgccatcttggcctcaccctccggcagccactctgaaggagtggcaagatgggctacaagacccttcagcctttcattctaccgatttagcagcgccagagaaagaaaaagctgctgtcctgataacttcagcaaaaatgcaaacaactggccgagcgcagtggctcacgcctgtaatccctgcgctttgggaggccaaggtgggcggatcacttgaggtcgggagttcgagaccagcctgaccaacatggagaaaccccgtcgccactaaaaatacaaaaacagccgggcgtggtggcgcatgcctgtaatcccagctactcgggaggctgaggcaggagaatcacttgaatccgggaggtggaggttgcagtgagccragatcgcaccattgcactccagcctgggcaacaaagagggaaactccgtctcaaaaaaaaaaaaaaaagcaaacaaccaaaaacaaatttaaagagccacccaggcacgaccctgttggcctgccttgggaccatgcccaggcatctctgaaccaatgactgtgacaagtttcattttcaggcgcccttggttcagtcctctgattagctgggcctggggtatgccccggcccagggtgaggtcaacccgctatgaatcccttggactcag

SEQ ID NO: 928507 - DNA, 680 bp, Homo sapiens
ccagattaaatgtgattgtttatgcacatctgctgaataaagatactcagtaatgaagagaaaaataattaactctatagaaaaaaatctgtcacagagttcattaatcaagtgagttattaacatcaagtgcatgaagacaaatgtgctgatgcacacagaaggacacggcatcactgctatgatattgcccagccaaaagtaaattatagtctgaatttaatcataaagaaacactggttttatgtaaagttccagataccaatatctgccatgttctgtaaattttaatagtgattttaagtagtctttctttcacaccctaaagagcaagtatctcctaattattattatttttaaactttytgcgtaataaatgccatcccatttaaataagcattttcttaatcttatttgtttacagctaatggagaacagagatggaacctcaaaattacatgctctccatctttattaaggaccccagcttttccccaataggaatcttgagtatctacaccttcccatgttccatagccacgaaggaaacattcttaatattgcagttcataaattcatggtgagaattcttgatgacatgtaagaagccatgatgttgagaatgtagagaagactctggtatgtaggaaagaaatatttttcagagacctttgactatt

SEQ ID NO: 928508 - DNA, 680 bp, Homo sapiens
ccagattaaatgtgattgtttatgcacatctgctgaataaagatactcagtaatgaagagaaaaataattaactctatagaaaaaaatctgtcacagagttcattaatcaagtgagttattaacatcaagtgcatgaagacaaatgtgctgatgcacacagaaggacacggcatcactgctatgatattgcccagccaaaagtaaattatagtctgaatttaatcataaagaaacactggttttatgtaaagttccagataccaatatctgccatgttctgtaaattttaatagtgattttaagtagtctttctttcacaccctaaagagcaagtatctcctaattattattatttttaaactttctgcgtaataaatgccatcccatttaaataagcattttcttaatcttatttgyttacagctaatggagaacagagatggaacctcaaaattacatgctctccatctttattaaggaccccagcttttccccaataggaatcttgagtatctacaccttcccatgttccatagccacgaaggaaacattcttaatattgcagttcataaattcatggtgagaattcttgatgacatgtaagaagccatgatgttgagaatgtagagaagactctggtatgtaggaaagaaatatttttcagagacctttgactatt

SEQ ID NO: 928509 - DNA, 680 bp, Homo sapiens
ccagattaaatgtgattgtttatgcacatctgctgaataaagatactcagtaatgaagagaaaaataattaactctatagaaaaaaatctgtcacagagttcattaatcaagtgagttattaacatcaagtgcatgaagacaaatgtgctgatgcacacagaaggacacggcatcactgctatgatattgcccagccaaaagtaaattatagtctgaatttaatcataaagaaacactggttttatgtaaagttccagataccaatatctgccatgttctgtaaattttaatagtgattttaagtagtctttctttcacaccctaaagagcaagtatctcctaattattattatttttaaactttctgcgtaataaatgccatcccatttaaataagcattttcttaatcttatttgtttacagctaatggagaacagagatggaacctcaaaattacatgctctccatctttattaaggaccccagcttytccccaataggaatcttgagtatctacaccttcccatgttccatagccacgaaggaaacattcttaatattgcagttcataaattcatggtgagaattcttgatgacatgtaagaagccatgatgttgagaatgtagagaagactctggtatgtaggaaagaaatatttttcagagacctttgactatt

SEQ ID NO: 928510 - DNA, 552 bp, Homo sapiens
caatgttggcaaagagactgtctttcccacactcttcattgcctctttccttgatattatgttaaaatcaggtaatatgatccctcacctggtttttttgttctgctcaacgtgctttcttgggtggagagttgtttaatttggcrttctgttggggtacaatctccagtgggttctattcagccatcttggtctgtctccctgctctgtacttttctatgagcaactgcaatatttcaatttctttccttttttcttttttcagtccaggagtgaaagtttattaaaaagctttaaagcagtaaggaaaataaggaaaagaaaggaaggaaagtacactttgaagagggccaagtgggtgacttgagagaccaagtgcaccccaatttccttgactgtttaaatggatttgaatccatttaatgtattcattaaatccattttaatgtattcaaatcaaaatgttttaaataattagaatccccaatttgcagcacatatgtgtcttggtggaccagtaacctggaagtttgtctggattatattaaacgg

SEQ ID NO: 928511 - DNA, 597 bp, Homo sapiens
caaaggctgaatagatttgctaacagtccccttataaaagcctagaatctttttttttttaaaatactttaagttctgggatacatgtgcagaatgtgcaggtttgttacataggtatacacgtgccaaggtggttttgctacaccmatcaccctgtcatctatattaggtatttctcctaatgctagccctcccctactcccccaacccccaacaggccctggtgtgtgatgttcccctccctgtgtccatgtgttctcattcttcagctcccatttatgagtgagaacatgcggtgtttggttttctattcctgttagtttactgagaatgatggtttccagctttatccatgtccatgcaaagtacatgaactcatccttttttatggctgcatagtattccatggtgtatgtgtgccacattttctttatccagtctatcattgatggacatttgggttacttccaagtctttgttattgtaaatagtgctgcaataaacatacgtgcacatatgtctttatagtagaatgatttataatcctttgggtatatacccagtaatgggattgctgggtcaaatggtatttctggt

SEQ ID NO: 928512 - DNA, 620 bp, Homo sapiens
acagacacacaccgccacgcccagcaaattttttgtatttttggtagagatgaggtttcaccatgttagccaggatggtctcgatctcctgaccttgtgatctgcccgcctcagcctcccaaagtgctgggattacaggcacgagccactgcgtcccacctcaggtatttctttataacaatatgagaacagtctaacacaggtcttaagcatccacggattttggtacttgaggggagtcctagaaccaatccccttacaggtactgagggacaactattacttcaagaaaggtataacaaagctggggaaaatctaggtasggcaagaaaattcaacagtatgcaaccgattttatgacatataattaaaaataccaaaccaatccagtctgtctacctctcttgtatgcttcatagcactctgtttagggcaatgtattactggctgactcactcattcttcaaactagaaagaagagaacttagaagagttattagtgaactctaaaatttgaaaactttatagaaaaggcaacctcctgagagttaaaaaaagatgctcataggaaaaattaaaataatagtgctctcattaatgaacacacaggatgtgaaaat

SEQ ID NO: 928513 - DNA, 620 bp, Homo sapiens
acagacacacaccgccacgcccagcaaattttttgtatttttggtagagatgaggtttcaccatgttagccaggatggtctcgatctcctgaccttgtgatctgcccgcctcagcctcccaaagtgctgggattacaggcacgagccactgcgtcccacctcaggtatttctttataacaatatgagaacagtctaacacaggtcttaagcatccacggattttggtacttgaggggagtcctagaaccaatccccttacaggtactgagggacaactattacttcaagaaaggtataacaaagctggggaaaatctaggtagggcaagaaaattcaacagtatgcaaccgattttatgacatataattaaaaataccaaaccaatccagtctgtctacctctcttgtatgcttcatagcactctgtttagggcaatgtattacwggctgactcactcattcttcaaactagaaagaagagaacttagaagagttattagtgaactctaaaatttgaaaactttatagaaaaggcaacctcctgagagttaaaaaaagatgctcataggaaaaattaaaataatagtgctctcattaatgaacacacaggatgtgaaaat

SEQ ID NO: 928514 - DNA, 564 bp, Homo sapiens
ccatggtgtatatgtgccacattttctttatccagtctatcattgatgggcatttcggttagttccaagtctttgctattgtgaatagtgctgcaataaacatatgtgtgcatatgtctttatagtagaatgatttataatccttgggtatatgcccagtaaagggattgctggatcaaatggtatttctggttccagatccttgaggaagcaccacattgtcttccataatggttgaactaattgacactcccaccaacagtgtaaaagtattcctatttctccacatcctctccagcatctgttgtttcctgatttttaaatgatcaccattctaaygggcatgagatggtatctcattgtggttttgatttgcatttctctaaggaccagtgatgatgagcattttttcatatgttggccgcataaatgtcttcttttgaaaagagtctgtctgttcatatacttcgtccgctttccaatgacaaaaaccacatgattatttcaatagatgcagaaaaggccttcaataaaattcaaaactcacttcatgctaagaactct

SEQ ID NO: 928515 - DNA, 602 bp, Homo sapiens
tgcatactcacaacccaatcagcatgcactctcccattctgagccacactggcaaactacctgcctcctggtgggggaccacccgccttgagtcagctctccactgagagcttgttccatggctcagtaaaactcttctcctcccttctcatcctctggttgtctgcgtaacctcattcttcttggatgcaggacaaaaactcgagacctgccaaacagcagtgacaaaggagctactgtaacactgtaactctccaccctccgctggtgtccagcagccccatgcaacgggaagcagtggcagggccaggccagccccagtgccgcaagccagagtggggcagcaggactgaaagagctatagcacaaataggctgaaatactgccttgctccccattcaccgtgctgtgagcagcaggaaggaaagaagagctacaacccttctgggggcytagactttggggctccctgagccaaaactgcagcatgctgtaacacccactttggggcttcagggttgctggcatctccaagatttttggccaccaccacattcccctcatccagacgccggcacccaaagcagaagcaggttgcggca

SEQ ID NO: 928516 - DNA, 570 bp, Homo sapiens
gaaatttttgacgacaaatattgcagactgcaagagacgcttcttgttcgtggaaatagaaataaagcatggtgtctgcgcccggctttccgctgtaagctgaagtacttcacggcagcaggaattgggcaacccaccgtttacactccaccctttgaaactgggctgaatggggtgggggcccgcctttggggagaaaagcaaattttatttaagcccctgaaagaggagagggttggccaggctcggtggctcacgcctgtaatcccagcactttgggaggctgaggtgggtggatcacttgaggtcaggagttcgagaccagcctggccagcacgatgaaacccagtctctactgaaaatacaaaatgaaccaggcgtggtggcacatgcctgtaatcccagctactggggaggctgaggcaggagarccgcttgaacccgggaggcggagtttgcagtgagccaagatcattccattgcactccagcctgggtgacaagagcgaaactctgtctcaaaaaaaaaaaaaaaaaaaaatgcgtattccccagccaccggaaaatgaga

SEQ ID NO: 928517 - DNA, 690 bp, Homo sapiens
ctagggacctcgttcaatgtggtgattcctaaccccttccattctgatctgataggactgggatgtagtacatttttaacaaattcaggcaatgtgactcaattagatccagagagcacacttcgagaaatcgtgctttattcaagtgtcttctggcttctgattttcagttaattaagctattcaagtaattgatccagacgtgaaagckctttgaaaagttgtataaatgtacctccagtgtgtcctaactggtacgcctcactcctcagtgtacttctccattcacagtatgatccatggagaagcagcatcattatcacctgggagcttgttagaaatacaggatcttggctgggcgcagtggctcacacctgttatcctagcactttgggaggctgaggcgggctgatcatgaggtcaggagatcaagaccatcctggctaacatggtgaaaccctgtctctactacaaatacaaaaaattagccaggtgtggtggcacgcgcctgtagacccagctcctctggaggctgaggcaggagaattgcttgaacctgggaggcggaggttgcagtgagccgagatcgtgccactgcactccagcctgagcaacagagcgaaactctgtctaaatacaggataggatctcaagcctctccccacacctactaaatcaaagcctgtattt

SEQ ID NO: 928518 - DNA, 556 bp, Homo sapiens
ccagcaataaataagagaaatttgaaattaaaattatatttattatcatttacagtggttctcaccaaaataaaatatttagataaatatctaacaaaatacatataatatctatgtcaaaaaacccacagaactctgatgaaataaagaaataaaaagtgggatgtcccatgtttatggttagcaagattcaatwttatcaagatgtctggtttttccaacgtgatttatagattcccagccaaaatctcagcaagttattttacggctatcaacaaactgatcctaaacattacatggagagacaaaagaccctaatagccaactcgatattgaaggagaagaacaaagtgagagaattaaatttacctaacttcaagacttactagaagtctacaataatcaagacagtgtggtattggcaaaagaataaacgaatagatcaatggaacagaatagataactcagaaatagactcacataaatatagtcaactggtctttgacaaaggaacaaaggcaatgcaatggagaaaagacagtcttttcaacaaacg

SEQ ID NO: 928519 - DNA, 778 bp, Homo sapiens
tgggcacacaattattctgcaatgggaatttcaatagggtgaataaaatgtttgaaaaggagacacagagctatgatgaaggagaggtagaaagacattctcccatagcaaaatcttaattaatgacaccatatcccccaagaaagattttagttgaaaaagtcggtttatttctttcttttttttttgagtctcgytctgtcacccaggctggagtgcaatggcgtgatctcagctcactgcaacctccgcctccagtagctgggactacaggcgcccgccaccatgcccggctaattttttgtatttttagtagagacagggttttactgcgttggccaggatggtctcgatctcctaaccttgtgatccacccgcccgctgggattacaggcatgagccactgcgcccagactggcctgaaaacatcagtttcttatgactcggctagaatcctggaagggaaaactcttactgaaatgctcacctgcatgaaccgatcaataatggagacagtcatgtacatggtctcctgcaacaacctgaatttcatttgaacctgtactagccagtcaattaggatggctctcatgtttccagtgacttcccgacccagtaggtattttggtctgactgcttgctcttcctgcaaaagaaaatgctgattattcttagaaacatgactccatgtgacacatttatgtccagaaagatcagttagttcctacagtagcactggggcatttataatctatatcagttcttaattcaattattc

SEQ ID NO: 928520 - DNA, 460 bp, Homo sapiens
ttgcccactttctgctgctgctgctgctgctggttcatgctggccgccgccgccgggggccggggctgcgggcaggtgggcgggaggcggcagcggtggcggggcggcctcctcctcctcctcccgcgcgtcatcggcagcaattttattgatcttttcaaagaaccaactttcggttttgttggttttctctgttgattttctgttttcaatttcattgattttgactctaattcttactagtttttctcttctgcttactttggattttatttgctcttcttttgctarttttccaaggtagaaacttagattattcattttgaatctttcatcttttctaatatctacctttaatgctataaatttccctctacacacgacttccaccacattccacaaattttgataagttgtgcttttgttttcatttaatttaatatatttttaaatttctctt

SEQ ID NO: 928521 - DNA, 616 bp, Homo sapiens
acccttcagtggggaaagggcagtcttttcaaaaaatggtatttggaaaactgaataccacatgcagaagaatgaagttgagcccttctcttacaccagatacaaaaaattaactcaaaaaggatcaaaggcattaccataataactaaatgtaaaaaaactacaaaactcttagaagaaaacatagggggaaagcttcacaatgttggactcggcagtggcttcttggccacgacacccaagaacaggcaagaaaaggaaaaacaattaaatccatgcaaacacgtgtgcacaaatgtcctcagagcgctattcctaacagccaaatgctgagagcaacgaaaatgttcattgacaggagaatggataaacaaaacgtggtccatccatacagtggaatattattcagccttaaaaaggaaggaagttctgacacctgctatgacatgagtgagccttgasgatatggtgccgagtgaaacaaaccactcataaaaggacaaacattgtataattccacagacatgacttgcctaatgtcagcaaattctcagagatagaaaatagcaggtggcggagggctgctcagggttacggggatgggggtggtgtttaa

SEQ ID NO: 928522 - DNA, 617 bp, Homo sapiens
cacactcttgggacacagcacaataaaaatagaagtcaagactaaaaaaatacctcaaactcaggcaattacatggaaattaaacaacatgctcctgaacgacttttggataatgaaattaaggcaaaagtcaagaacttatttgaaactaatgagaataaagatacaacatgagtgaatctctgggacacagctaaggcagtgttaatagtgaaattcatagcactaaatgtccacatcaaagagttacaaagatctcaaatgaacagcctaacattacaactgaaagaattagagaagcaagagcaaataaacccraaagctagcagaggacaagaaataaccaaaatcagtgctcaactgaaggaaatcaagaaacataaaaccgttcaaaagattaacatatccataagttgtttttttgaaaaaattaataagattggccactagctagaataataatgaagagaggagagaagactgagataaacacaattagaaatgacaaggaggatgttaccactgcccccacagaaacaaaaataaccattagaaactactacaaaaacctccatacagacaaactagaaaaccttagaagagatgaataaattcct

SEQ ID NO: 928523 - DNA, 556 bp, Homo sapiens
ttgcacttcaattaaaaggcaggtaccggcataatggatttttaaaaaaacatgatctagctatattctgtccacaagaaacttgcatgagattgaaagacgaagattgagttgtgaggtggaaaaagccattacctgcaaatagtaacagaaagagagtagagatggctatatcagacaaaataagctttaaaacggaaattataataagaaactaagaaggacattatatattttgaatgagtmattccatcaaggtgatataacaattataaatacattacctatatttttattttatgtattttttgtttttttaaataagtagtgtacacacctaacagtagaaccataacatacatgaaataaaaggtgacagaattaaatggagaaatagttttatagtgatagtcaaagacttaaatatcccacttttgaaaatggatggaacaagtagacagaagacaaaaaagaaaatagaaaatttgaacaatataaaccatttagatctaagatatacacagaacatttctctcaacagcagtagaatacgcat

SEQ ID NO: 928524 - DNA, 777 bp, Homo sapiens
cattacatcccctctctgggacatctctgaagaaaagtggtgaagaaaattcttctcaatgggcagaaacttcacctgattgtacactttgtttgaaagtagaaatggccatatgtgcaattatatattgacacacaggctgtagctaatgattttgccagatggtcagggacttgaaaggaaggggattggaaaattggtgaaaagtaatttggggaaaacatatagggctagatctgagtgggcaaaagatgtggagatatttgtgtcctacgtgaatgytcaccttctcagcagaggactttaatcatcaggtgaataggatgatccattctgtgcatactagtcaatctctttcctcagtcactcctgttataacacagtgggcccatgaacaaagtggccatggtggcagggatggaggttatgcatgtgtattagtctgttctcatgctgctaatagagacataccagagaccgggtaatttataaagaaaagaggtttagtggactcatggttctacatggctggggaggcctcataatcatggcagaaggcaaaggagaagcaaaggcacatctgtcctacgtggcagcaggcaagagggagcatgtgcaggagaattcccctttataaaaccatcagatcttgttagacttattcactatcatgagaacagcatggggaaaacccatccccatgattcaattacctcccactgggtccctcccatgacatgtgaggattattacaattcaaggtgagatttgggtggg

SEQ ID NO: 928525 - DNA, 723 bp, Homo sapiens
gaccgggtaatttataaagaaaagaggtttagtggactcatggttctacatggctggggaggcctcataatcatggcagaaggcaaaggagaagcaaaggcacatctgtcctacgtggcagcaggcaagagggagcatgtgcaggagaattcccctttataaaaccatcagatcttgttagacttattcactatcatgagaacagcatggggaaaacccatccccatgattcaattacctcccactgggtccctcccatgacatgtgaggattattacaattcaaggtgagatttgggtggggacagagagctaaaccatatcagcatgggttcaacaaagtggacttccactcactaaggccaacttggctattgccacctctgagagctcagtctaacagcagagaccaatactgagtcttcartatagcatcatttcctggggtaatcagtcagctccctggtagcaggttgattacattgaactgcttccaccatggaaggggcagcattgtgtgcttgctggaatagacagttactctggatatggatttgccttgcctgcacacaatgcttctgctgaaactaccatctgtgaatgccttatctattgttatggtattccacagaaagagcactgcttctgatcaaggaactcacttcatagacaaagaaatgcagaaatgggctcatactcatagaactcactgttctcaccatgt

SEQ ID NO: 928526 - DNA, 738 bp, Homo sapiens
agacataccagagaccgggtaatttataaagaaaagaggtttagtggactcatggttctacatggctggggaggcctcataatcatggcagaaggcaaaggagaagcaaaggcacatctgtcctacgtggcagcaggcaagagggagcatgtgcaggagaattcccctttataaaaccatcagatcttgttagacttattcactatcatgagaacagcatggggaaaacccatccccatgattcaattacctcccactgggtccctcccatgacatgtgaggattattacaattcaaggtgagatttgggtggggacagagagctaaaccatatcagcatgggttcaacaaagtggacttccactcactaaggccaacttggctattgccacctctgagagctcagtctaacagcagagaccaatactgagtcttcaatatagcatcatttcctggggtaatcagtcagctcyctggtagcaggttgattacattgaactgcttccaccatggaaggggcagcattgtgtgcttgctggaatagacagttactctggatatggatttgccttgcctgcacacaatgcttctgctgaaactaccatctgtgaatgccttatctattgttatggtattccacagaaagagcactgcttctgatcaaggaactcacttcatagacaaagaaatgcagaaatgggctcatactcatagaactcactgttctcaccatgttcc

SEQ ID NO: 928527 - DNA, 570 bp, Homo sapiens
taagcagaagtgggtcatcataaaggtcttcatccttgtgtcttcacatcatataggctgagaaggaggaagaagaggagaggttggtctttgctgtctcagaggtggatgagggggaggttgggggggaggcagaaaaggcaggcatgcttggtataacttttattgaaaaaaatccatatgtaagtagaccagcacagttcaaacctgtgttgttcaagggtcaaccatatatggagaaagagcttgaaagaaacattagtagtggttatttctagtggttgagataactgtgtgtttttttctttcctgctgcttaattttctytactttacaactttttaatatttatgtagcggtataaatattaaatagtatatttaagatagatatatatatatatatacacacacatacacacacactactcttaaaacccatagaaatagagttgatgtatatcaaagagaaagcaagtactgctatttttgatgagacatcaattacaaagatggacaagatcttagggatgatccactcatttcttttattcattgattcattcagtca

SEQ ID NO: 928528 - DNA, 570 bp, Homo sapiens
taagcagaagtgggtcatcataaaggtcttcatccttgtgtcttcacatcatataggctgagaaggaggaagaagaggagaggttggtctttgctgtctcagaggtggatgagggggaggttgggggggaggcagaaaaggcaggcatgcttggtataacttttattgaaaaaaatccatatgtaagtagaccagcacagttcaaacctgtgttgttcaagggtcaaccatatatggagaaagagcttgaaagaaacattagtagtggttatttctagtggttgagataactgtgtgtttttttctttcctgctgcttaattttctttactttacaactttttaatatttatgtagyggtataaatattaaatagtatatttaagatagatatatatatatatatacacacacatacacacacactactcttaaaacccatagaaatagagttgatgtatatcaaagagaaagcaagtactgctatttttgatgagacatcaattacaaagatggacaagatcttagggatgatccactcatttcttttattcattgattcattcagtca

SEQ ID NO: 928529 - DNA, 588 bp, Homo sapiens
tctccatatttgctgcaggtatggctctcagcaacttctctacctgcaccctgttcctaccttttatacaggaatttctatctctgttcctgggcctctacacaccactgctcacctcaccggattggtcttttggttttatttgggttggggaagagtactcagatgagggggagagagcgcacatcaaaggatattgggggacctgycccgataatcacgtaggttcttttctatttttcctaagcgtcggccggcttgagaaataaagggacagagtacaaaagagagaaattttaaagctgggcatccgagggagacgtcacacgttgttaggatccgtgatgccccacaagccacaaaaaccagcaagtttttattagagattttcaaaaggggagggagtgtgcgaataggtgtgggtgacagacatcaagtacttaacagggtaatagaatatcacaaggcaagtggaggcagggcgagatcacaggaccacaggacgaaggcgaaattaaaattgctaatgaagtttcgggcaccattgtcattgataacatcttatcaggagacagggttttgggatca

SEQ ID NO: 928530 - DNA, 563 bp, Homo sapiens
gtcacagatggcagtcactgacctgctgtgatttgagagatggagagaaaaccttccactcttcttattctccctaatagcctcagtctctgccttcagttccacatttccctttggcgtaagctatgattgtcgtccaaggcccctcctagataggcaaggactcatgataccaagagtgtgatcaggggatagagatgagatgtctgggttggatgcgggagtggggtattttctaactaatggggtgcaaggggtacctgagcatgctctcaaaatgtgttataccctaaaaaatgtttttaaggtagtgtgttgatatamcagttgttaagaccatgatgctagaggcaagatcgtgagatccatagagaaggtagttgaagggtagggccttttattcacatatatgctgccttctccaccaactgatgtgatatccttttatattcgtgactccagtgaacccacgcctctgaggatttacacccttgtatttgtactcctcttgagtctgggctggcctgtgactttaatcagtgcaatgcagaagtggttcagtg

SEQ ID NO: 928531 - DNA, 632 bp, Homo sapiens
aactctaagaaaacttgcttataagttaaggagtatatttttagacctaatgtaaaaatacaaaaaaaaaggtatcattaaaaagacaatgaaggaaatagaatggaatactaataatattctgtaaaccaaaatgaagacagaataatggcaacacaaaaagagatgaatggaaaacaactaccataatggtatgttaaattcaaccataaaaataattacattagttgtaaatggtctaaatacttcaactaaaacacagaaaaagcaggacccaattatatgytttttactatgcatgcacattatatataatgatgccattatatataatggtgaaactaagttgtaactaaaagaatgaaaaaagatataccatatgaacagtaaatataagaaagctgaaatcactgaaataatatcaaacaaaagtgacttcaagaaggataatattattagatttatagaaagacatttcataatgacaaaggggacaatttatcagtaaaacataataatcctaaatgtgcatgcatgaagtaatagtttcaaaatacacgaaggaaagtgaaaaggcaaaaattaaagaaaaaaataaaaccatgattagagttgaagattttaacaccttt

SEQ ID NO: 928532 - DNA, 614 bp, Homo sapiens
cctgcaaccttaaacatctgttctgtgactgacacttttagccccaagaaacatccctttcccacccaactcttgccccatgtcctccaaaccaaaggcagctgtgttggcattccaggcaggtgtgtgctgagaggctgcaacctcagaggccgacagtgctctggaagattgggagggtatgagctgcaraagcctttccgtaagcaaaaagagaaattaattaacttgtcgaatcctccctctcagatagcttgagaacaattgatttctgcataaagaggacgatccaattcttgcttatttggttgcaatgtgtggttctgatgaaactcatgacttgctgcagtattcacaaaaccgcaaacactgtacatggtggctgaagatcatgtagcaataataaccaaaattcatccttttcttaaatgtgtgtgtgtgtgtatatatgtgtgtgtaggtactgtatatgtaacatctggggaagtgtgataccaattcttaacattattgtcatatgagtatagatattgctaccagagccagtgagaagcttaatataagtgatagagattttgtaatgagattcacatattcaatattttttgagaaaa

SEQ ID NO: 928533 - DNA, 596 bp, Homo sapiens
caaggggctttccatggacccagccttaaagacataataaggcatccttgattcttcctttaccttcctataacaccctgttcgtcagaaattccttttgactccacttgtagatataacttgagtgcctcccatttcttcttctctggcccagctcaagccaccggtggctctcttatagatttctgtaggaacctcccctgcatggtctccctgcctccaatctggcctcttgcaatgcattctcccacagcaggcagactggcttttatatattccagatagaagttctttgtctgatcggtggtttgcagatattttctcccagtctgaagcttatcttttcaaccagggtcttttgtagagcaaacatttttaattttaatgaagtccaatttatacattttttcttttacagataatacttttgtgtatgtccaaaaactctgcctarccctcagtcctggggcctttatcttatttttttcccctataagcttcaaagtttaacatttttacatttacatctgtggtcctctttgaattagtttttgtaaagtataaggtttagattgaagttcctttttttttttttt

SEQ ID NO: 928534 - DNA, 682 bp, Homo sapiens
agagtagttatctgcagaatatggcagggccttgctctaaaatcctagaggcctccactgtgattcacctatgggggcctgacaaaggctccaaacagcatcatatctgccactgacacctcaagcaccattggatctgctgggtcatatggcccaagtggcagagcagcttgcacagcagcctggacctgttgcagagccttctccttttctggaccacattcaaaactggcagcctttcgggtcacttaataaataggccagagtaacacacccaaatgaggaatgtgttgcccacaaaaatccaaataagcccaccaggtgttgtgcctctttctttgttgtaggagggggcaaatgtaacaacttttccttctccttagaaggaatacctcaacaggccacacaccactggacccctagaaattttactgaggtagaaggtccccaaattttaatcagatttatttcccatcgyctggcatgcaaatgtctcaccaataaggccagtgtgtttgctacttcttactcactggatccaattagtataatatcatcaatgtaatggaccagtgtgatattctgtggtagtgaaaagagatcaagttctctccaaataaaagtatgacacaaagccaaagagttaatatagccctgaggtaggacagcaaaggtatattga

SEQ ID NO: 928535 - DNA, 599 bp, Homo sapiens
ctgggtacatggtagttctatttttagttttttgagaaatcttcatactgttttccatagaggctgtactaatctacattcccacctacagtgtataagatttcccatttctcaacatcctcaccaacatttgttatttttgtctttttagtaatagctattctaactgggataagaggatatctcattgtggtttcgatttgcayttccctgatgattggtgatgttgagcattttttcacacaactgtaggccacctgtatgtctacttttgagatctgtctattcatgtccttaccccatttttaatgggattatttgggttttcttttctttttcctgttgagttgtttgagtttcttgtatattctggatatgagtcccctgtgaaattagtaggcaaatattctctcttattcaacaggctgtctcttcattctactgattgtttcttttgctgtggagagctttttaatttaatatagtcccacttgtctatttttggttttcttgcctgtgattttgagatcttagccataaaatctttgtctagacctatgtcctgaagagtttttcctatgttattttctagtaggttt

SEQ ID NO: 928536 - DNA, 605 bp, Homo sapiens
ctttaaccccagctctgcaacttacctgccatgtgaatgttttcgttagctattgttgtataataaaccaccctaaaagtttgtgatttaaagcaataatttactattagctctcatggttctgtgggcacactgggtttagctgggtggttctggagtctctcgtgcagttgcagtcagtatttaactggtgctacagkaatataaggctcaactgggcttatgacatcacttgtgctgtatttccttggtcaaagtttagtcacagggccagcagagattccaggaagactcaactttggagacaagctaccatagcaaccttgggcaattcatttatattgtgcttcatttttttccctccaaaaaaatgaaggtgataaaagtgcctatttgataagatgttataagaatcaaatgaggtagtacatggaatgtggtaagaagagaacctggcacataacagatgctcaatgaaagttactactattactctttctgaggcataccatgctagatactggggcgctattgctttataccccctaaatgccttaatcacactacactacacactacactactactaatgccttaaccacact

SEQ ID NO: 928537 - DNA, 714 bp, Homo sapiens
gagaatggcgtgaacccgggaggcggagcttgcgctgagctgagatcgcgccactgcactccagcctgggcgacagagcgagaccccgtctcaaaaaaaagaaaagaaaatgtttctgttttgaaaaacgatgaaataaacaaaatgtgacatattcatacaatgaaatattatttggccttaaaaaaaaaatggtgacccagcctaggcaacacggcaaaatctcatctctacaaaaaatgaaaaaattagcgggtgtggtagcctgtagtcccagctactcgggaggctgaggtaggaggatcgcttgagcccaggaggtcgaggctgcagtgagctgtgatcacaccactgcactccagcctgggtgacagaacgagatcctgtgtcaaaaaaaaaaraaagaaagaaagaaagaaagatagagaagaaaagaagaagaaagaaatggcattctgacacatactacaacacaggtgaacctggaggatattatgttaagtgaaacagggcacacacaaaacgagaaatattatgattctccttatatgaggtacctaaaatagacatagacaaattcatagacaaaaagtagacattggttaccaagggctggcaatagagggaatgggagttagtgtataatggggagagatctccattttgggaagatgaaaaagttctggagatggatggcagtgatggctgtgtgaa

SEQ ID NO: 928538 - DNA, 624 bp, Homo sapiens
tgggtcttaagttctacctgagcctcaatttcttttctttaaatttattttgaacagtcttgctctgtcacccaggctggagtaaagtggtgtgatcatcgatcactgcaacctctacctcccaggcttaagctatcgtcccacctcagcctccccagtagctgggactacaggtgtgcaccaccattcccagctaatttttgtattttttgtagagatggggtctccctatgttgcccaggctggtcttgaactcctggcatcaagcaatcctcctgcctcagccycccaaagtactgagattacagacatgagctgctgtgcctggctgctcaatttctttctttctttttttggagacagagtcttgctctgtcacccaggctggaatgcaatggtgcaatctctgcttactgcaacctccacctcctgagctcaagcgattctcatgcctcagcctcccgagtagctgggactacaggtgcccgtcaccatgcccagatactttttttgtatttcagtagagatggggtttcaccatgttgcccagggtggtctcaaactcctgggctcaggcaatctgcccacctcagcctcccaaagtggtaggattgcaggcgtgag

SEQ ID NO: 928539 - DNA, 818 bp, Homo sapiens
gggaaagggggtgggagggggcaggtgccaggctgagtgccccccctacaggcctgggaggctctgtctgccccccccaagcctaccacccctaatgaagcccactggacaaggatgagcccagccctggcaccctmcacaatggagcaagatgctggctctgcctgccccctctctggcccaggcacaagccccatgctggatgcccacccctcacataagccccgtgtctgttgtctggtgctgccacattttttttcttttatcagaatgcaaaagccattaccaggcaaccttgagacgaagacctgccacagccctggattgctgtcaggaaatgtggcagatgctggccccaccctccacctcggtgccatgggggcagggtccttggggacactgtcggcccggacggcctgagatagtctgaagtcatggaggggaggcgggcacagggtggccagagcggggtcagcacccaatttggggaaggagcaagagaaagaatcagccagaactaagcaggatttaaggctcttcttccagggccagttctggcaacctccacccccacccaggccacttgggacctgaagaatttctgacactacccaacaatacccactggagagttggaaaaactgaggcccaggcaagaaaagggacttgccaaaagtcagtcagttaattactaattagttttgttgagtggatttgttccacaagcaaacattgagaatttgctatgtgccatgctctgcgctgggcactggggacacagaccttcatgattagtagggaagacagaaatcataaac

SEQ ID NO: 928540 - DNA, 674 bp, Homo sapiens
ctggcaggtagggctctctcttctctgggggactacccatgttccatgttgggtggcagcatgtgtgaccctgaggatgtcaaatacctcatccataaaacaaggataatactgcaccatgcaaagggcgaccaccttcaaggccctgcatgtcggtgggggacacagcggtgggccgcagcaagatcgtccccgtgatccccacttgccaggcccacctggtgccagaacacaggatgcactccgcagttgctcagtcctcccctcccgcagggccgggggctgcattctccgagtgggctgggtccgggaaacacccctcccttccccgcgggccatccctggtggagactgcccaggaacttcccagcgcctgccgcccccagccctggcatggccccgccgccgcctgggccctccccccgcattagctcttaagctgtgcaaatagacatcggagggakccctgtttaaagtatttagacgaaatgaaaaaaggctttcatcggcactaatgagccattcaggatgcctccccggtggattctctcccgctcccgcctccctgcccgcgccgccccgctatggcccctcttgggattggaggccccttcctcccaaccccagcctgggactccctgggaggaccgcttaccccgcctcacttcccaggg

SEQ ID NO: 928541 - DNA, 674 bp, Homo sapiens
ctggcaggtagggctctctcttctctgggggactacccatgttccatgttgggtggcagcatgtgtgaccctgaggatgtcaaatacctcatccataaaacaaggataatactgcaccatgcaaagggcgaccaccttcaaggccctgcatgtcggtgggggacacagcggtgggccgcagcaagatcgtccccgtgatccccacttgccaggcccacctggtgccagaacacaggatgcactccgcagttgctcagtcctcccctcccgcagggccgggggctgcattctccgagtgggctgggtccgggaaacacccctcccttccccgcgggccatccctggtggagactgcccaggaacttcccagcgcctgccgcccccagccctggcatggccccgccgccgcctgggccctccccccgcattagctcttaagctgtgcaaatagacatcggagggagccctgttkaaagtatttagacgaaatgaaaaaaggctttcatcggcactaatgagccattcaggatgcctccccggtggattctctcccgctcccgcctccctgcccgcgccgccccgctatggcccctcttgggattggaggccccttcctcccaaccccagcctgggactccctgggaggaccgcttaccccgcctcacttcccaggg

SEQ ID NO: 928542 - DNA, 646 bp, Homo sapiens
cttctttcaaaagcaaataggagaaatattgctgaattctttttctcagcaaggaacagccctgagaaagagaatgtgttcccaaggggaggcctctgaaatggccgctttgggaacgtctgtcttttacagttgtagattagggatggaataagccccggtctcccgtagagctcccaggcttattaggaagaggaaattcccacctaataaattttagtcagaccggttgtctgctctcaaaccctgtctcctgataagttgttatctgtgacaatgtgtgcccaaaacttcactagcaattttaatttcgccctggtcctgtgatcttgccctgcctccatttgccttgtgatattttattaccttgtgaagcatgtgatctctgtgacccacaccctatttgtacactccctccccttttgaaaatcactaataaaaactttctggctttgtggtttggggkcatcatggaacctgcagacatgtgatgtctcccccgaacaaccagctttaaaatttctctcttttgtactctttccttttatttctcagaccagccaacacttagggaaaatagaaaaggatccacgtgaaatattgggggctgaatttcccccgatatgttctcaggatctccagaggg

SEQ ID NO: 928543 - DNA, 594 bp, Homo sapiens
taatggcttccaggtccatccatgttccgacaaagacatggtctttttctctgttatggctgcatagtagtccccggtgtgtgtaccacattttctttatccgatctgtcattgatggtcatttaggtttatcccatgtctttgccattgtgaatagtgctgcagtgaacattcatgtgcatatgtctttatggtagagtgatttctagtcctgtcggtatatacccaataatggggttgctgggtcaaatgatagatcatttttgagctctttgaggaatcaccatcctgctttccacaatggttggactaatttccactcccatcagcagtgtataaatgttcccttttctccataacttcaccaacatctgttatttttgacyttctgataatagaaatggctaactttacgttattgaattttactgctccacagccatctttccttgtccagatttttgacacttttacttagtgcctggtgatattgggaagctaattagaaacacatgattcagttttcttatctgtaaaatggagataatactagtatccaccttaaagaatttctataatatatacacaaattaa

SEQ ID NO: 928544 - DNA, 590 bp, Homo sapiens
ccagatttaaaggccagtaaaaaggcgagcgtggatttaaagcaaaagtcaaataaacctaatactttctcccctcaatgctcatcatcgtacattgttagagttaatgttgaatctctaaaatataagatttgttggcaatggttctcattattgtgtcttcccaaatcctttggagatcttaatagctaatgagactcacaaggaaaaacttccatgttataatattttcaattccttcctctttagcctacattaatcctttctmtctactcccttctacccccaattttgccttcttctcttcaaaaataactgtccttgcttaaaatcaaacattttgcaaattgctgtagactcctacacggttcctgtttccagattcttctccctatatttatcgtccatattgtcaccatggctatttttctaaaatatacttttgcttgaacaatttctttattttaaaatctgagggaattcttctttgccttgttagattttaagtgtagactccttaggaaggtattcaatgcctcaacctctctttccagcttcagctctcacttttcctggctaaggctgcctat

SEQ ID NO: 928545 - DNA, 598 bp, Homo sapiens
ccccattgttgcaagcccctccccctcagattgaagcaagttccacaggatttaaagggctggcactattttacccccatctcttcatttaactctgttccccttttgggaagcagactttaaagattaagacattataaaacatctgtgtgtatatagggaaaattagaaagtcactgtacatggacaaagaaaagcagaggctcagaaaagacctgagaagaccttaagtttacacttcaggctgatctttgatataaaaacagcctacaacaattaaagcaaaagaaaaacaaaaaccagcacactctggtgaagagggaagaatctgattactagagttaccacattattagtgcagagttttggttaccaacaacaaacaaaatcacaaggcatacaaataaatgggaaaaatgtggttcattcaaataaaaatcaracaaacagaaactttccctaaaaaagaccaaagggcagacctactagacaatctttttaaaaaactgtctaaaagatgttcaaagagctaaatgaagatttggagaaagtaatgacaatgatggatgaataaaatggaaatatcaacaaagaaaaa

SEQ ID NO: 928546 - DNA, 493 bp, Homo sapiens
ggcctggttttgctgctacagtaagggcaacactgagttcaatgcctcatagatgctggctctccctctccctagtgcatagaaatgtgctctgcaccacgccactgctgcccgggggatgggggaggggtggcatcagtgattcaaaactgtktttcttacctcttcagagcctctttctgcaatatgaagttaaaatcaggtactatcagtgctcacctaatttttggttcttatgaaggtgttttttgtgtgtagatagttcttaaatgggtatccttgtagcaggaagattggtggaggctgtctattatcaccatcttgttccaccctttcttctatgtgataagtattttcatgtgtcaactcggctgggccatattgtccaaatatttggacaaacactttttggatgtgtctgtgagcatgggttgggatgagatatacactcacaacacacaattttgaggaaagcacattgccctctgtgaca

SEQ ID NO: 928547 - DNA, 648 bp, Homo sapiens
agcctggagttaaagaaggaggtctggactataaatatacatttggaatgtgttggtgtagcagtgtatatataatgttaaaaccatgagacttggtgagattaactagaatagagaagaggtctaatgactcagcyctggagtactctaacatttagaagcagggaaaatgaggaggaatcagcaaaggagactgaggagaaacagccagtgaggttggagaaaaaccaggacagtgtgttatcctggaaaccaagcaaataaagttttcaaaggacgagggaatgaacaactcggtcaaatgcgactaatagggcaactgtttcagtcagactttttctgaaatagaaccaataggatgtgtgtatagagacttttttttaaggaaattagctcatgcaattatggaggctagcaagtccaaaatctatagggtaggtggacaggctagatatccaggaagagctcatgatgtaattcaagtccaaaggtcatctgctacacaattccttcttgctcaaggaaggacagtcttttgttctattgaggccttcaattgattggatgaggcccgcccatgttacagagggcaatctgctttcctcaaaattgactgttgtaagtgtaaatctcataccaaaccatgct

SEQ ID NO: 928548 - DNA, 571 bp, Homo sapiens
aacaaaattaccatggactgggtgttgtagacaacagaaatttattttctcacttttctggaaatggggacatctaagatgattcagtttcttgtgagaactctttctagcttgcagatggcctcactgtgttctcaggagagaaagggagagatcatcctcttctcattggattagggacacatcctcatgacttcattaaaccttaattacctcctaaaattcctayctccaaatttagtcatattgaggattggagcttcaacatgtaagtttaaggggaacacaattccatctacagcccattgttaccaaaatgacctcagtgccttttacagtaatcccccgttatccacagagaattccaaggtttctggtggattgctgatgacagataatactaaaccctatatatgtatttttttctatacattcatacgtatgataaagtaagataggtacagtaagaaattaacaactataaataaaacaaaatatactgtaataaaagttatgtaaatgtgatctttttttctcaaaatatctgaatatcttctgactactgttgata

SEQ ID NO: 928549 - DNA, 564 bp, Homo sapiens
aaaatacaaatgattatcagaaactggtatgaacagactagaaaatctagaggaaacagataaattcctggaaacataatacctcccaatattaaagcaggaagaaatacaaatactgaacagaccaagaataagtaataaaattaaatcagttataaaaaaatcttccaacaacaacaaaaaagccccagaacagacagattcacaggtgaattttttcagacatacaaagaagagctagtgccaatcttaatgaatctatttcaaaatattgaggagttaggtttcctccataacttattctgtgacaccaatatcaccctgaaatcaaaatcaagtaaggaggcacaacattgaaaacaatagtccaatatccctggtgaacattggtgcaaaattcctcaacaaaatactagcaaaccaaatccaatagcatttcaaaragataatttctcacaatcaagagggttttattctaggatgtaaggatggttcaacctatgcaaatcaatacatttgatttaccagaaaaacagaattaaaagcaaacaaacaaaatgatca

SEQ ID NO: 928550 - DNA, 456 bp, Homo sapiens
aaacaaaaaattcattggatggattgtgccaccgaatggagatgacagagtgaaagagtgtatgaatttgagcttaggacaacagaaattcaaggtaaagaacaaaaatgaaaaatgaattgtaacacaagaacacagtattagggcctgttarataataacagaaagcccaattatgtttcattaggaaacaggagacaataagaatcaacatgtttgaaaaaataatgatcccacatttcccaaatgtaatgaaatccagaagtttgcagatacaggatgctaagaaaaaccaagtggactaaacacaaaaaaagtttatgccaaggcacatgtcttaattcttttgtgttgctgtaaaggaatacgcaaggctgcaaaatttctaaaaagaagatgattatttggctcacaattctgatgtctggaaaagactaagattgagcacctgcatct

SEQ ID NO: 928551 - DNA, 585 bp, Homo sapiens
ggagattcacttgaacctggaggggaaggttgcagtaagctgagatcgcaccactacactccagcctgggtgacagagactccatcttaaaacaaaaacaaaaagtccattttctctctataaacatagaatgtatcaatattgtttatcattatagcttccgtgccttattataatggttgcacatttttggtcctgacaatttgagtataaataaaaggatgtatcataatgtagggaaggcatttcctgatgttcaagaatatgattatatattgaatgtgccagaaagttctggtcatgagataatcttattttttcttttatcaaattagaaaaytgggtcataatacagatttcaattacgactttctttaagtagtcaactttatatgaatttctctatttttgagaagttttcattgccattatgatctcatatttcacaaaagagtatgtgatatatagatttttttctctacataattttgtagcatattgaaaagatgaatttggtggcgtatttatcataaagtgaatgatagtagtctaagagaatggcaaatgtgtaacctatgtatatgg

SEQ ID NO: 928552 - DNA, 577 bp, Homo sapiens
ataattgggctttttttactttttggctacttgaataaaactactataaacattcacatacagatttttgtgtggacataggttatcatttctcttgggcatttatcttaggaatggaatttctttgtcatatggtaagtctatgtttaacattttgaaaaaactaccaatctgtttcccaaaatgactgtaccattccacaatcccaccagtgatgtatgagtgttctaacatttctacctcctcacaacacttgttattgtccttattttagccatcctaggagatgtgcagtagtatctcattattgttgtgacctgcttttctctaattactaatattgctctcaggtggttactggacatttgtataccttctctacagaaacatctattgaaatattgtgcctatttttaaaarttacatatatgtgtatatacttttattacattttaagttctggggtacatgtacagaatgtgcagttttgttacataggtatacacatgccatggtggtttgctgcatccatgaacctgtcacctaaatgaggcatttctcctaatgttattcctcc

SEQ ID NO: 928553 - DNA, 754 bp, Homo sapiens
  misc_feature 1, 2, 3, 4, 5, 6, 7, 8, 9, 10, 11, 12, 13, 14, 15, 16, 17,18, 19, 20, 21, 22, 23, 24, 25, 26, 27, 28, 29, 30, 31,32, 33, 34: n = A,T,C or G
nnnnnnnnnnnnnnnnnnnnnnnnnnnnnnnnnngcttagggtatagttgttagtggaggctgtagtgaagttttgctggggatggggtcatcaagaaggccagtccttggacttcactggtggcagcagcaggctgagtgtgcctgtccttgggcttcagtgcagtatatgctggcactggtgttagtgagtccaagcatgatgaatcttgggcctccaggtgactggcctgcttgggtgctggcagtggcagtggtagaccactggtctggatggctgggtcttcaggcccctggacagcaggtatggcatrggaaatggcagtagcagtggcaggacaatcctctggtttccaagaagtctgcattggtgttgacagtggctgcaacaggctgggcacactagtccccaggcccgtaggtggcacatgcaggcagatgttagctgtggtagtagctgcaggtttagtgggcctgtcctcaggctcctgggaggagtgctgaggtaccaacagtggtggatggggcagggtcatccccaggcttccagaccatttgctcaggcactgagtgggagtgtagagccagggcaggcctgtcctcagacccctctagtggtgcatgtgggagctggctgtggtaggcaggcataggatgatatccagaccactggtggaatgcttgggtgggggcagtagtgactgtgctgctgccctgctcctggggaggatggggttgctttcagtggcagtag

SEQ ID NO: 928554 - DNA, 735 bp, Homo sapiens
gagcagacattgtctctacaaaaaataaaaaaaattagccatgtgtggtggtatatgcctgtagtcccaagtattcggaggctgaggtgggattataaccgcccaataaattcaccttgcctgctgcctagacagagctgatttatcaagacaggggaattgcaacggagaaagagtaattcaggcagagctggctgtgtgagaaaccagagttttattattactcaaatcagtctccccagacgttcagcatttgggatcaaattttttggtttttttttttcgagatagagttttgctctgttacccaggctggagtgcagtggcgcgatcttggctcactgcaacctccrcctcccaggttcaagtgattctcctgccttagcctcccgagtagctggtactacaggtgttcgacaccacgcctggcttattttttgtatttttggtagagatggggtttcactgtgttagtggggatggtcttgatctcctgaccttgtgatccacccgcctcagcctcccagagtgctgggattacaggcgtgagccaccatgctgggtgggatcagagtttttaaagataatctggtgggtaggggcttgcaaagtggggagtgctgattgatcaggttggagatggaatcatagggggaacgaagtaaggttttcttgctgtcttctttcctgagtgggatggcagaactggttgagccagattaccagtctgggtgg

SEQ ID NO: 928555 - DNA, 565 bp, Homo sapiens
ctggccctagtcttctgttactctgtcaactgatcatagggaactccccatgaggccatcagtgcaggctgggggagagaaggcaggtggcaggagtgaagaccctgggcatttgagccatgtcctcatgtaacttacttggccttcaggacctgcttgagcctgatcacatayataccacttccacttgatgatggaatgctgctgtgcatgacccactttatggctagataagtcagaaaacacccagttcatgacaggcagttcaggtcacatggtgacttgatgacccatagtcaaacgttcagtttccaccaaagcccagtaacaggctaagagctgtctctcaaaaggagagtagttatctgaactagatggcagggccttgctccaaaatcctagatgcctctgctgtgattcacctatgggagcctgccaaaggctccaaacagcatccctatttgccactgacacttcaggcaccactggatctgctgtgtcttatggtccaagtggcagagcagcttgcacagcagcctggacctattgcagagccttcccctgt

SEQ ID NO: 928556 - DNA, 653 bp, Homo sapiens
tccctctacccacaggatcacaccaaccccttccttacatatccctaactccatcttaaagagaagagtacagaactaagagactgagcagtattcctccaaactaatcatgacctaaagggactgtttaattttatcactcaagtttataaactagttggacgtttgttatcttatcccctgcctcctaggcagtgggaatgcctaaggaaaatcagagcagtaatagacaaaataaataaacatttcccttgcccttggyattatgatgaagtaaatctgtggtgttttccccacacattgagcatgggcacttaaataacatggcaaaaatgtgggacacacagatgaaattcttatttgttctccacttttaacaagtaataggtgtatttttctactgtttgtgactagaagcaggggcagtgctgaaccaagttctcattttgttaatgtggtcctttccatgcagatcatacttttttttttcacatgcctagtatgcagtggtgctcaatgcaatgaatgaacaaacaaggcatcttctactacaatagttcatttaaacttaatggttccaggcctctggatgcctttgcacttcctgaagtctagttcccagtgtattaagctgcgtaacttaagaacagcat

SEQ ID NO: 928557 - DNA, 775 bp, Homo sapiens
gtgccaaataggaggcaaaaatgctggaatatctcctctcttaccaacctttttccttcttttcctttctccagcaatcccaccctaagcccaaaaaattctacatttcttaatttctactattcagaaaggtgagtcaactaaactcactctctttttttattttttaagtagggatggggtttcaccatgttggccaggatggtctcaatctcctgacctcgtgatccgctggtcttggccttccaaagtgctgggattatgggcatgagccactgtgctcggcttaaactcactttcaaaataaggatgttaatacccataagactatttgcaatgtataaaagcattataaatatataaatatatcaaaggtgataattaggaaaaatcataaaaattttaatgggaaattctgcagacagaaacagccttaaaatagatgcttctatcctatgactacatcccaaatgatgatttggaatcgttgagatttagagaaggttgccccctctaaaatagagtcttcccagctttcctgaagtactatgtataacgtgtcaagcttacactattccaaggtccaccagatgttkccatgtcttattttaaagtggaaaatccaaataaattcagtcatttcttttttctttttctttctttctttctttttttttttttttgagacagagccttggtctattgcccaggctggagtgcagtggcacatcttagttcactgcaacctccgcctcctgggttcaagtgaccctcc

SEQ ID NO: 928558 - DNA, 601 bp, Homo sapiens
caatccaattcatttcagacactatctgaaaacagtgtgagattccacaggctgagggctcagtcccagaagactgcccctacttcagacagcagtcacacaagtcagggcctccagaacttctcaacggcgggcttcaagctgcagttcccaagacctcctctttaggcttcattaatttgctagaatggctcacaaaacacctacttaggtttactggtttatttaaaggatattaccaagcatacagatgaagtgrtgcacagggtgagggatagagagggggcgcagagctctatgccctccccaggcataccaccctccagaaacttccacctgttagactatccagaagttctcttgggcgttttgtagagatttcattagagagatgattgaagcatggccaacctcacagtaattgactggacagagagtgtgatctaatactaagactgagtgcagacacccagcaaggcccatccagattctccctggcctctgtgtgtggtattccttcctactgggtaaggggcaggaccccctctgaaacaatcagacgagataggtcagagaatttctttacaaccagctctaagac

SEQ ID NO: 928559 - DNA, 650 bp, Homo sapiens
gctcatctcactggggcttgtcagacagtgggggcaggacactgggtgcagcccactgagcatgacccaaagcagggtgaggcatcacctcacccgggaagtgcaaggggtcagggaattccctttcctagacaagggaagcagtgacggacggcacctggaaaattgggtcactcccccttaatactgcgcttttccaatggtcttagcaaacggcataccaggagattatatcccacacctggcttggagggtccyacacccatggagcctcgctcattgctagctcggcaatctgagattgatctgcaaggcagcagcgaggctgggggagggacgcccgccattgctaaggcttgagtaggtaaacaaagcggccaggaagttcgaactgggtggagcccaccacagctcaaggaggcctgcctgtctctgtagactccacctctgggggcagggcatagctgaacaaaaggcaggagaaacctctgcagacttaaatgtcgtccctgtctgacagctttgaagtgagtagtggttctcccagcacagagtttgagatctgagaatggacagactgccccctcaagtgggtccctgacacccgagtagcctaactggggggcaccctccaggaggggcagactgaa

SEQ ID NO: 928560 - DNA, 650 bp, Homo sapiens
gctcatctcactggggcttgtcagacagtgggggcaggacactgggtgcagcccactgagcatgacccaaagcagggtgaggcatcacctcacccgggaagtgcaaggggtcagggaattccctttcctagacaagggaagcagtgacggacggcacctggaaaattgggtcactcccccttaatactgcgcttttccaatggtcttagcaaacggcataccaggagattatatcccacacctggcttggagggtcccacacccatggagcctcgctyattgctagctcggcaatctgagattgatctgcaaggcagcagcgaggctgggggagggacgcccgccattgctaaggcttgagtaggtaaacaaagcggccaggaagttcgaactgggtggagcccaccacagctcaaggaggcctgcctgtctctgtagactccacctctgggggcagggcatagctgaacaaaaggcaggagaaacctctgcagacttaaatgtcgtccctgtctgacagctttgaagtgagtagtggttctcccagcacagagtttgagatctgagaatggacagactgccccctcaagtgggtccctgacacccgagtagcctaactggggggcaccctccaggaggggcagactgaa

SEQ ID NO: 928561 - DNA, 650 bp, Homo sapiens
gctcatctcactggggcttgtcagacagtgggggcaggacactgggtgcagcccactgagcatgacccaaagcagggtgaggcatcacctcacccgggaagtgcaaggggtcagggaattccctttcctagacaagggaagcagtgacggacggcacctggaaaattgggtcactcccccttaatactgcgcttttccaatggtcttagcaaacggcataccaggagattatatcccacacctggcttggagggtcccacacccatggagcctcgctcattgctagctcggcaatctgagattgatctgcaaggcrgcagcgaggctgggggagggacgcccgccattgctaaggcttgagtaggtaaacaaagcggccaggaagttcgaactgggtggagcccaccacagctcaaggaggcctgcctgtctctgtagactccacctctgggggcagggcatagctgaacaaaaggcaggagaaacctctgcagacttaaatgtcgtccctgtctgacagctttgaagtgagtagtggttctcccagcacagagtttgagatctgagaatggacagactgccccctcaagtgggtccctgacacccgagtagcctaactggggggcaccctccaggaggggcagactgaa

SEQ ID NO: 928562 - DNA, 500 bp, Homo sapiens
gcaaataggatgatatattcaaactacttaagaaaaaaaaatattgccatccaagaataatatatcaagtaaaactgtttttcaaaaattaagaagaaataaagtatttcccagataaacaaaaactgaagtatttcataaacaccaggcctaccttacaagaatgctaaaaggggtccttcaagttgtaatggaaggacaccagacagcaacccacaagtaaacaaaagtgtaaagtatgctggtaaagatagatataaagataaatagagaatgctgtaattctgtaacagtgatgcatgaagcttctctgagtgaagcataaagaagaaagtatgaaaaatactaatraacggaattcaggggcacaataaaatgatcatataccatcaccaagtgggatttacccatgagatgcaaaagtttttcaacatatgaaaatcaatcaatgtgatacactgccttaacaaaacaaataataaaaaatacatgatcatctt

SEQ ID NO: 928563 - DNA, 500 bp, Homo sapiens
gcaaataggatgatatattcaaactacttaagaaaaaaaaatattgccatccaagaataatatatcaagtaaaactgtttttcaaaaattaagaagaaataaagtatttcccagataaacaaaaactgaagtatttcataaacaccaggcctaccttacaagaatgctaaaaggggtccttcaagttgtaatggaaggacaccagacagcaacccacaagtaaacaaaagtgtaaagtatgctggtaaagatagatataaagataaatagagaatgctgtaattctgtaacagtgatgcatgaagcttctctgagtgaagcataaagaagaaagtatgaaaaatactaatgaackgaattcaggggcacaataaaatgatcatataccatcaccaagtgggatttacccatgagatgcaaaagtttttcaacatatgaaaatcaatcaatgtgatacactgccttaacaaaacaaataataaaaaatacatgatcatctt

SEQ ID NO: 928564 - DNA, 583 bp, Homo sapiens
acccgccaaaggagagtctgagttcagacatgcctagccttgcccccacctaatggtccttcctacgtattctggtaactgaacacaaagggcatatactcttggaagttctagggcctcacccaccatctgttcctccccctacygccacaatcctaaacatatatgtgcctaatactggagcttccaaatttataaaacttttactgatatacctaagaaatgagataggcagcaacacaataatagtgggggacttcaataccccactgacagcactagacaggtcatcaagacagaaagtcagcaaagaaacaatggatttaaactacaccctgcaataaatggatttaacggatatatacagaacattccatccaacaatcttagaatatacattctgttcaatagcacatggaactttctccaagatagaccatatcataggccagaaaatgagcctcaataaatttaagaaacttgaagttatgtcaagcactctctcaggccacagtggaacaaaagtggaaatcaatcccaaaaggaaccttcaaaaccatgcaaatacatggaaattaaataa

SEQ ID NO: 928565 - DNA, 687 bp, Homo sapiens
actcaaactttctccatattagcaataaggcagctttgctttctcaatatttgtgtgctcactggaatagcactttttatttccttcaagaacttttccttttcattcataacttgtctaactggcacaagaagcctaactggcacaagaggcctagcttttagcctaccttgccttttgacatgctttcctcactaagcttaatcatttctagcttttggtttaaagtaaaagatgtgcaattcttcctttcatgtgaacacttagagggcatattagggcgattaattggccagatttcaatactgttgtgtctcatggaatagggaggtctgaggagagaaagtaagatgggggaacatcyggtcaatggagcagttagagcacacacagtatttatcaattaagtttgccatcctatatggccacggttcatggcatctcgaaataattacaacagtgatatcaaagatcacttatcacggatcaccataatagataataattatgaaaactctgaaatactgggataattattcaaatgtgatatagagacaggtgagcacatgctgttagaaaaatggcactggtagacttgttggattcagggttgacaaaccttcaatttgtaaaaagtgcaacatgtgtttagtgctatacaagcaaaaaagcatagtaaaataaggt

SEQ ID NO: 928566 - DNA, 581 bp, Homo sapiens
ataccatcccagctgttgtgggggggtcagccttgacgtctttcagcctaaatggcttaatgtaggtgagaatagggaattacttttaagagtaaaggacaaaatgaataaaatcaattgagcttgcattgttgtagtttagataaaagtactacttagagtgaaccttcatgagcragaggtcactattaactagatctttgaatttgtcttagtacaactgctcagagggattttaaatatttaacatttccgttttaaatatcatctttcagaaatgattcaccattcaagaattaagatttaacacagaatcatgggattagatttttggaagtttagtgattttctgccttttttagaaaaaacaaactgaaaatgttctaggttgtgctttgataagattgccccttctgtttaatttactgtgtttctactgagaacgaatttactatgatcctactatttttctatggagaactaacctaacatgctcctattaaaaactaattccccatgtgtgtgtgattgtagccagagaaaaatatttgaagatgaaaatttatttaccattcttttta

SEQ ID NO: 928567 - DNA, 455 bp, Homo sapiens
ttcccacaatcttttctggaaacccaggaaaactggtgatgtaattcattccacatctcaatgtccaagaaccaggggagtcaatgatataacttccagtctaaggccaaaggcctgagaacagagaggcaggggcagtgggggcaatatgagccccaaagtctgaaggcctgagaaccatgggtttcagtctccaagggcaggaraagatggatatcctagctcaaaaaaaggaagtgaattcatccttcctctgccttgttgttctattggggccctcaatggattggatgatgtctgatcacattggtaaggcctgatcttcttcactcagtcaacagattcaaatactgatctccttcaaaacacccacagagacacatccagaaataatgttttaccagctatttgggcatcctttagcccagtgaagttgaaatataaaattaaccatc

SEQ ID NO: 928568 - DNA, 557 bp, Homo sapiens
ctgcatgtaatgtgatctttaacaacgtaacaacgttggtgctataacttgcatccccaaaattcagatgctggaatcctaacgcccaagatgatggtattaggaggtaggggctttggggaggtgattaggccgtgaatgccagggccctcatgagtgggactartgcccttacaaaagagtcccgagagagaactctcgctccttccaccgtgtgaggatgtagaaggcaccatctatgaagacgcaggctgctatggcttagatatggttcgtccacaccaaaactcatattgagatttgatgcccaatgtggcagtgttgggaggtggaacctagtggaaggtgtttgggtcattggagttgatccctcatgaatagcttaacaccctctggcaagagtgagtgagttcttgctctcatgggactggattggttctcactcgagcaggttggtaaaaagagtgtcgtccatttctctctcttgcttcttctctccccatgtgatctctttgtgcacgtctgctccccttctgctttttgtggtgagtggaagt

SEQ ID NO: 928569 - DNA, 526 bp, Homo sapiens
gaaaacagcatggcaattcttcaaaaaattagtttaccctgtaattttcctgctaggtttacccaagggaattgaaaacacaagtacacaaaaatcttaaacacaagtgtttataacagcattatctataatagctaaaaatgaaaacaagccaagtatccatgaacaatgaacaaatgaayaaagtatgatataaccataaaataaattaagcactgacatatgatgcaacataaatgatccttgaaacattatagtaagtaaaattggcaaaacacagaaaaccaaatattgtatgattcaatttttatgaaatgttcagaataagcaaatctttcgataccgaaagtaaatttgtgattgcctagggctgagtgtagggagagagggcagtggggagtggctgcttatcagtatgaggtttctttagaggatgataaaaatgttctggaattaaataattatgacacttgcagaactttgcaaacagtgaaaactgctgaaattgtatgcttaaaaataataa

SEQ ID NO: 928570 - DNA, 610 bp, Homo sapiens
gaccatgttaccttacatggtaaaagacactttgcagatgtgattaaggttaggagctagagatgaggaaattactttagattaggcaggtgggctcagtttaatcacatgaatccttaaaagtgaaagaagaaaacagtagagtggtcagagagttgagactgtagtagaggcagtagagattcaaagtgggataaagacttgacccaacatttgctggtttggaaaatggagaaaggggaatatgagtcagggaatgcttgkagcctctaaaagctggaaatggctgtaagctaacagccaccaagaaaatgaagacttcactgctgcaacatcaggaaacttaattctccctacaacctgaaaaacaaagaaacagatctccagaaaagaatcctgaacctctgacacattgattttaatccagtgagacactgtgttaattttatactgttgctataaccaattaccacaaacttagtggctaaaaagagcaaaaatttattatccttcaattctgtatgtcagaagctcagcactggtctcatcagactcaaagcaaggtgttgataggctgtgtccctttttggaggttataaaggataattaa

SEQ ID NO: 928571 - DNA, 559 bp, Homo sapiens
cactacctatagcatatgaatagctagagaaaaaggaggagcaaacctcaatccataaacaaggctgaggcctagatcccacccttctgagatcactatggatggagggtgggcctaccttctgctgcagaagcagccaagtacctctttcagtctgatggtgtagttctcttctagaaatggctttaagaagtagcaagaagaagaaagcaagctacaacagccacagaagctgttagccagattaaaaaaaaaaaaaggaagaggggaaagacaggtttttaaaacccayacaggcattcattcaacaaatatttatgaaatcttcactgtatatacaaaaggccctggggaaacagtgggagagagggaaagacatggttctgccctagtgtctcttccaatctagagaatcagatgtagaacaagtaatcaattcttttttttttttttttgaaacagagtctcactctgccgcccaggccgaagcaccgtggtgcaatctcggcttaccgcaaccttcgcctcccgggttcaagtgattctcccacctcagtct

SEQ ID NO: 928572 - DNA, 559 bp, Homo sapiens
cactacctatagcatatgaatagctagagaaaaaggaggagcaaacctcaatccataaacaaggctgaggcctagatcccacccttctgagatcactatggatggagggtgggcctaccttctgctgcagaagcagccaagtacctctttcagtctgatggtgtagttctcttctagaaatggctttaagaagtagcaagaagaagaaagcaagctacaacagccacagaagctgttagccagattaaaaaaaaaaaaaggaagaggggaaagacaggtttttaaaacccatacaggcattcattcaacaaatatttatgaaatcttcactgtatatacaaaaggccctggggaaayagtgggagagagggaaagacatggttctgccctagtgtctcttccaatctagagaatcagatgtagaacaagtaatcaattcttttttttttttttttgaaacagagtctcactctgccgcccaggccgaagcaccgtggtgcaatctcggcttaccgcaaccttcgcctcccgggttcaagtgattctcccacctcagtct

SEQ ID NO: 928573 - DNA, 662 bp, Homo sapiens
atattgatctagcattcctgagactctttctatgcaactgactcccccacacccgtgttataaaagtaatacacacttgtgaaacagagagacacacttgtagagcatatgggtcaagggctcaacatcaagattagattagccataatcctattgaccagtggaaaagattgtttccattttaaagcagttccttacaaccttttttctctacttttgcattttccactctaacacacatctaaaacaggtaatctcagtaaaagctggcctttttgctgagatttttatgtgggagactaaaatattagaygagatgattatgtgtacagaattttatttaaaatacatctgagagaatcattcagatacttgggtagtgttaaaggatgaagcatgtatctgggggtatttcttctttttctttctttcttttttttttttttttctttgagacggaatctcactctgtagcccaggctagaatgcagtggcaggatctcggctcactgcagcttccacctcctgggttcaagtgattctcatgcctcagcctccccagtagctgggattacaagtgtgtgccaccacacccggctaatttttgtatttttagtagagacacggttttaccatgttggccaggctggtcttgatctcca

SEQ ID NO: 928574 - DNA, 568 bp, Homo sapiens
ggcatactgcaagcagcttccacagctggcattgggaaatgcagtggcacccgaaagcttggagatgccaggaaccacaaagccccaaagagtgtgtcacagacttggcctggggagctcctacatctgggctcccagaagagctgcagctcttctctccttcactcttttctccttctcatggcccataatgtggcaagcaaggggtatgtctcagccctgtttgtgttatygctctttcagtcctgccattcagcaggcctagagttcttgtcctgcatccaggagaaatgaggtacctgaacaagaggagggtgagcaaggcaaagaggtgctttatgtcgagcaaaagaacagctcagaggagacccaaagtggatcactcctctccacaggtaggtcatccccaagtgtccagctctcagtggagcggagacccacaatacatatttcctctctgtaagcatttcatcccttcatttgcctgagtctggctgactatgatgttttcaagggcttcagaggggaggaagtacatgctgattggtccatgggcagccatgggtgg

SEQ ID NO: 928575 - DNA, 510 bp, Homo sapiens
ggcctagaaagagcaccataatttctaactccagtccatggaactggcagcccagcccccaggtctcaggccgtccctggcctgaaggtggggtttcactgaggacctatccctttcttcccaggagcctgtctgcttcctgccaacattaacctgccgtccatggtgcccatggcacccaggctktttgtgccgaggggtgtctgcaggctcacaccaagccattcacagcccccttcagcctccgtcctgtgctcgtcagggttcaatgtccagagggggctgaggtggcaggggctggcttgtcagcactgcctcgaatgcgtgcacaccaagccagattgtgacagcacctgggctcagccacaactttgctccaaaatcggtggggtcgtcagaagcagggagaggccaggcaacgggagcaggcacttttgaacctgagggggcagaggtgcttcctgggtccccaagagtacagagatgccctggtccactgccactgctggg

SEQ ID NO: 928576 - DNA, 791 bp, Homo sapiens
ttatcctctggtaagtattggatatctgagtttggttaatattcacttccgggagttcgtttacacaattggaaaatatactagaaggttttgggtacttgaggaaagagcagtgggagcagagaaaaatcttctggttgaacaaataaaatttcatgttcttattttgtctgccattatgatagaacaatagtctgcaagactgaatagttttgcatctgaaaacttctttctcactgttatggactgaatctttcttccatctccccagttcatgtgttgaagccctaaccctsaatgtgactgtatttggaaacagggcctttaggaaggcaattaaggttaactgaggccataagggtggggccttaatccaacaggacttgtatccttgtaagaggaagacaccagagcttgctctctctgtaggcacggagcaaggccatgtgaggatacacagagaatgtgtccacctacaaagcaggaaaagaggccacaccagaaacgacactgtgggcaccttgatcttggattcctagccctcagaaacatcagaaaatacatttctattatttaagccacccattcgatggcattttgttatggcagcccaagcagattggtatactcaccattaagagaaagcttcaagaatccttcaatcttatcattggagttaggcccaattcctgctgaccaatgagctgaagtacatcaatttattttttctttaaaataattcctaggatattttaaaagggactgcttagctgaaatacatgatgtcaact

SEQ ID NO: 928577 - DNA, 719 bp, Homo sapiens
aaaaacttcaaaagtctgccttaggcccagagcaaaacttagaaaccctgttgaacttagcaacatccgttttttataagagagatcaggaggagcaggtggaacaggacaaacaggatttaaraaaaaaaaaggccaccactttagtcatggccctcaggcaagcagattttggaggctttggaaaagggaaagcctgggcaaacagaacgcccgatagggcttgcttccagtgtggtctacaaggacactttaaaaaagattgtccgaatagaaataagctgccccctcgtccatgtccctcatgacaatggaatcactggaaggcccactgccccagaggacaatggtcctctgagtcagaagccactaaccagatgatccagcagcaggactgagggtgcccagggcaagcaccagcccatgccatcactctcacagagcgccggctatgcttgaccattgaggaccaggaggttaactgtctcctggacactggcacagccttctcagtcttactctcctgtcccggacaactgtcctccaggtctgtcactgtctgaggggtcctaggacaggcagtcactagatacttctcccagccactaagttgtgactggggaacttttctctttcacatgcctttcaaattttgtctgaaagccctgctcctttgttagggagagacattctagcaaaagcaggggccattatacatc

SEQ ID NO: 928578 - DNA, 681 bp, Homo sapiens
aaaaacttcaaaagtctgccttaggcccagagcaaaacttagaaaccctgttgaacttagcaacatccgttttttataagagagatcaggaggagcaggtggaacaggacaaacaggatttaaaaaaaaaaaaggccaccactttagtcatggccctcaggcaagcagattttggaggctttggaaaagggaaagcctgggcaaacagaacgccygatagggcttgcttccagtgtggtctacaaggacactttaaaaaagattgtccgaatagaaataagctgccccctcgtccatgtccctcatgacaatggaatcactggaaggcccactgccccagaggacaatggtcctctgagtcagaagccactaaccagatgatccagcagcaggactgagggtgcccagggcaagcaccagcccatgccatcactctcacagagcgccggctatgcttgaccattgaggaccaggaggttaactgtctcctggacactggcacagccttctcagtcttactctcctgtcccggacaactgtcctccaggtctgtcactgtctgaggggtcctaggacaggcagtcactagatacttctcccagccactaagttgtgactggggaacttttctctttcacatgcctttcaaattttgtctgaaagccctgctcctttgttagg

SEQ ID NO: 928579 - DNA, 719 bp, Homo sapiens
aaaaacttcaaaagtctgccttaggcccagagcaaaacttagaaaccctgttgaacttagcaacatccgttttttataagagagatcaggaggagcaggtggaacaggacaaacaggatttaaaaaaaaaaaaggccaccactttagtcatggccctcaggcaagcagattttggaggctttggaaaagggaaagcctgggcaaacagaacgcccgatagggcttgcttccagtgtggtctacaaggacactttaaaaaagattgtccgaatagaaataagctgccccctcgtccatgtccctcatgacaatggaatcactggaaggcccactgccccagaggacaatggtcctctgagtcagaagccactaaccagatgatccagcagcaggactgagggtgcccagggcaagcaccagcccatgccatcactctcacagagcsccggctatgcttgaccattgaggaccaggaggttaactgtctcctggacactggcacagccttctcagtcttactctcctgtcccggacaactgtcctccaggtctgtcactgtctgaggggtcctaggacaggcagtcactagatacttctcccagccactaagttgtgactggggaacttttctctttcacatgcctttcaaattttgtctgaaagccctgctcctttgttagggagagacattctagcaaaagcaggggccattatacatc

SEQ ID NO: 928580 - DNA, 622 bp, Homo sapiens
cactctcacagagcgccggctatgcttgaccattgaggaccaggaggttaactgtctcctggacactggcacagccttctcagtcttactctcctgtcccggacaactgtcctccaggtctgtcactgtctgaggggtcctaggacaggcagtcactagatacttctcccagccactaagttgtgactggggaacttttctctttcacatgcctttcaaattttgtctgaaagccctgctcctttgttagggagagacattctagcaaaagcaggggccattatacatctgaacataggagaaggatcacctgcttgttgtcctctacttgagaaaggaattaatcctgatgtctgggcaacagaaggacagtatggatgaacaaaggatgcccatcccgttcatgttaaactaaaggattccacctcctttccctaccaaaggcagtacccccttagacctgaggcccaamaaggactccaaaacattgttaaggacctaaaaaaagcccaaggcctagtaaaaccatggaatagcccctgcaatactccaattttaggagtacagaaacccaacagacagtagaggttagtgcaagatctcaggattatcaatgaggcca

SEQ ID NO: 928581 - DNA, 825 bp, Homo sapiens
taacccttatactctgctttcccaaatgccagaggaggcagagtggtttatagtcctggaccttaaggatgtctttttctgcattcctgtacatcctgactctcaattcttgtttgcctttggagatccttctaacccaatgtctcaactcacctggaatgttttaccccaagggttcagggatagccctcatctattcggccaggcatcaacccaagcccaacacttgagccagttctcatacttgaacactcatgttgtttggtacatggatgatttacatctagccgcccctgcagaagccttgtgccatcaagccacccaagtgcttttaaacttcctcaccacttgtggctacaaggtttccaaaccaaagtctcagctctrcttatagcaggttaaatacttagggttaaaattatccaaaggcaccagggccctcagcgaggaatgtatccatcctatactggcttatcctgatcccaaaaccctgaagcaattaagaggtttccatggcataacaagcttctgccaaatacggattcccaggtacagcgaaagagccaggccattatacacactaattaaggaaactcagaaagccaatactcatttagtagaatggacacctgaagcagaaacagcttttcaggccctaaagaagccttaacccaagccccagtgttaagcttgccaatggggcaagacttttctttatatgtcacagaaaaaaacagaaatagctctaggactccttacacacgtccaagggaccagctcgcaacccgtggcatagctgagtaaggaaattgatgtagtggaaaa

SEQ ID NO: 928582 - DNA, 555 bp, Homo sapiens
catgaattctttttccatgccaatgttcagaaaagatttttcctgttttcttctaataatttaatattttcaggtcttgagcttaagtctttaattcatcttgagctaatttttgtatttggtgagagacaggagtcccttttcacacttctgcatatggcaatccaattttcccagcaccaggtattacatagggtgtcctttccccagtgtttttttcaactttgtcaaagaacagttgactgtaagtatgtacctttatttctgtgttctctattctgctcctttggtctacatgtttatttttattccattaccatgctattaaatctagccttgtagtataatttgaagtcagataatgtgatgtctccagctttgttctttttgcttagaattgctttggtgattcacaytctttttttgtttcttatgaattttaggattatctttaaattatgtgaaaaataacattgatgtttttataggattgcatttaatctgtagattgctttgggcagtatggctctttaaaggatattgattcttcccatc

SEQ ID NO: 928583 - DNA, 756 bp, Homo sapiens
agcccccgcctcccgggcaggaaccacagccttctttgctgtctctcgtccctcctcgggtcggtcccacacgcgcggccaggccacccttacgctttcaggacaggtcaggttgagtagggaaaagctcagagcagaggttctgcaagtgtagattctggtcttggccccgccattaactagctgtgtaacttcacgggtgtagaagttgtcatccascattgaagttttgcgatttatattcagcagccctttttcctagcgatgcacatccaaaatgaatcagcacctgaaggaagacgagggaaagggtggtgctctgttgttttttgatgctgtcttgtgatgccagagaattgcataaggcgacaatagtttggatctctgaggattggcaaaaactggaaaagtcaaatcttaaaaacttaaatgtggtgaagaaattcttctttgctctgggtgaagggattcatttgggacttttggaggtgactctgcgccctccagagagtttaagaaaacaaaaagttgcctgtaccttggtctgagagacttgcttaaacttcgtttcagtgagatgtgtggtgttcttaacaaatttcacctgattatgaatatcccctgtgataatttgcaaaagcagagattccttggacttcatttcagatcttttgaaacactgtgtctagggagagggacctgagaatctgtatttttaactagcatcgtaagtgattctcaaccggtaagacatct

SEQ ID NO: 928584 - DNA, 702 bp, Homo sapiens
gccatgcttcctgttcagcctgtggaaccatgagtcaattaaacctcttttctttataaattatccagtctcaggtattcctttatagtagtgtaagaatggcctaatacaagaaattggtactgaggagtgggggcattgctatacagatacttggaaatgtggaagtggttttggaactgggtaacaggtagatgtcagaagagtgtggagggctcagaagaagacaggaagatgaggaaaaatttggaacttcctaaagacttgttaaattgttatgaccaamatgctgacggtgatatggacaatgaagtctaggctgagatctcagagggagatgagaaatttagtgggaactggagtaaaagtcactttttctatgctttagcaaagagactgggtgcattgtgcccccttctctagggaagtgtgaaattttaaaagttagaatgatggtttagggcatctactggaagaaatttctaagcagtaaagccttcaagatatgacctggctgcttctaacaatctatgtttatatatgtgagcaaagaaatgatctgaaacttgaaattatatttaaaaatgaaccagagtgtaaaagttaggaagatttgcagaatggccaaatgatagaaaagaaaagcccattttcaagggaggaattcaagcaggctacaaacaattgcataagttaaaaaaa

SEQ ID NO: 928585 - DNA, 607 bp, Homo sapiens
acggagaaagaatgagcacagaaatcccagctccccatgttataatgacatgaacttgaaaaataaccctaaattctctcattgtaggtgatgctgtgaaccctccccaagggaggtaccaaaagcctgcatgaagcaaaaactggaaacaaataaaggagagtatggtgactttgcactaagttactcatttattcacataattaatgagtttctattagtgttaggcaccgttctagatgatggtataattagttaacaaaaacctcaaaactctcgccccccrtggagcttacatttccagggagggagagagatgatacaacaataagaaaatacagagctaatgtcattctatattgtataattatgtaaaatcaagcctgagtatttgacagcttctcagataccacagatctgttgtttaatgaaatcagcctaaaagataaaattgtgtatttgcatgtacacatcaccttgcctgtattatgagtcagcgtttcttcttataagaaaccacagcttggtaaaaggtagaagctcaatttcctaataaagagatatgttttactaggcaggctgttgcactgcatattactctctctga

SEQ ID NO: 928586 - DNA, 635 bp, Homo sapiens
taataggtatttgttaaaaaaaataaatgagcacatataatgagttaaaaaatgcttgggaccagaggtatttcagatttcaaattattttcagatttcagaatatttacattatacttacaaattcagtagtgctaatccagaaatccaaaatctgtaatgcttaagtgaacatttccttgagcatcacgtcagctctcaaaaagtttcagcttttagagcatttcagatttcagatatctggataaggaacactcaacatgcacttttmtatattaaccttatttgctataaatttcatatatatatatattatttagttctagtagcttttgaaatgtattccttagtttttttccataatcatctcattttcaagtaaagacaattttgtttttcctattcaatcattatgccctttatttttcttttataatggttagtgcttacagtaatgtgtagaagaatagtagtgagatgaacattctttcttttttcctgattttatgtggaatttttcaatattgcacctttaaatagtaccctgcctgaagattttttgtaggttgtggaaataaataacacctaataataacagagagaatctatatttattcagacgttttataacaaga

SEQ ID NO: 928587 - DNA, 635 bp, Homo sapiens
taataggtatttgttaaaaaaaataaatgagcacatataatgagttaaaaaatgcttgggaccagaggtatttcagatttcaaattattttcagatttcagaatatttacattatacttacaaattcagtagtgctaatccagaaatccaaaatctgtaatgcttaagtgaacatttccttgagcatcacgtcagctctcaaaaagtttcagcttttagagcatttcagatttcagatatctggataaggaacactcaacatgcacttttctatattaaccttatttgctataaatttcatatatatatatattatttagttctagtagcttttgaaatgtattccttagttttttyccataatcatctcattttcaagtaaagacaattttgtttttcctattcaatcattatgccctttatttttcttttataatggttagtgcttacagtaatgtgtagaagaatagtagtgagatgaacattctttcttttttcctgattttatgtggaatttttcaatattgcacctttaaatagtaccctgcctgaagattttttgtaggttgtggaaataaataacacctaataataacagagagaatctatatttattcagacgttttataacaaga

SEQ ID NO: 928588 - DNA, 618 bp, Homo sapiens
cacacaccttccttgaacagttaggcttctccaaaaaatcttaaataatcactgatatgggttggttgtgtgtcttcacccaaatctcattttgtagctcccataatttccacgtgttgtgggagggacccagtgggagatgactgaatcatgagggcaggtctgtcccatgctgttgccgtgatagtgaatgggtctcacgagatctgacggtgttaaaaatgggagtttctctgaacaatstctttttttgcctgctgccgtctatgtaagatgtagcttgctctttcttgccttccaccatgattatgatgcctctccagccatgtggaactgtaagtccaacaaaccactttcttttgtaaattgcccagttgcaggtatgtttttatcagcagcatgaaaatgaactaatacagtaaattgttacagtagagtggggtgctggtgaaaacatatccaaaaatgtggaagcgacgttggaactgggtaacaggcagaggttggaacagtttggaggactcagaagaagacaggaaaatgtggccaagtttggaacttcctagagacttgctgaatggctttgaacaaaatgctgacagtgatatggacgatgaa

SEQ ID NO: 928589 - DNA, 454 bp, Homo sapiens
aacttgttgggaaccggagtaaaggtgagtcttgcaaacacactggtggcattttgcccggccctatagatttgtagaactttgaacttgagagacatgatttagggtatctggcagaagaaatttctaagcaggaaagcacttacratgtgacttcggtgctgttgaaagcattcagttttataaggcaagcagagcataaaaatttggaaaatttgcagcctgacaatgcaatagaaaagaaaatcccattttctgaggagaaatccaagccagctacagacatttgcataagataatggggaaaatgtctccaggacatgtcaaaggtctttacctcagcctctcccatcacaggcacagagacctaggaggaagaagcggttttgtgggctgggcccagggttcctttgctgtgtgcagcctagggacttcatcccctgcatcacagcaa

SEQ ID NO: 928590 - DNA, 454 bp, Homo sapiens
aacttgttgggaaccggagtaaaggtgagtcttgcaaacacactggtggcattttgcccggccctatagatttgtagaactttgaacttgagagacatgatttagggtatctggcagaagaaatttctaagcaggaaagcacttacgatgtgacttcggtgctgttgaaagcattcagttttataaggsaagcagagcataaaaatttggaaaatttgcagcctgacaatgcaatagaaaagaaaatcccattttctgaggagaaatccaagccagctacagacatttgcataagataatggggaaaatgtctccaggacatgtcaaaggtctttacctcagcctctcccatcacaggcacagagacctaggaggaagaagcggttttgtgggctgggcccagggttcctttgctgtgtgcagcctagggacttcatcccctgcatcacagcaa

SEQ ID NO: 928591 - DNA, 557 bp, Homo sapiens
ttgttttgcttttcaactcctctaaaaaaattcacatatatgcatgccactttcctgaaaaatatctgcctcataattgccataagaaactgtatggacaactcttaaacattctgaaagtagtcagggatgggggaaagcatttgctattttagtctgttcctggtcttataacaaataccacagactgggtaatttatgattacagagatgcatttctgaaagttccaggagttgggaagytcaagattatggcaccaacatattcattgtctgatgagggcctgtttcatagatgtcattttgcatgacttaatcacagggtaggaaaagcaaagggacaaaatggacaaatgccatgttgtcacatggcagaagaaatggaagagccaggaagctctcagagaagcttcctctattaggatattaatctcattcatgagtgcacagccatcataacttaattgcctccagaggccccacttcctcatcacttagaggattaaacttaaacatgaatttggaggaaatatattcaaactctagcactagtttaa

SEQ ID NO: 928592 - DNA, 629 bp, Homo sapiens
aaaagaaatcaaatgtaatcctgaataatctaagcctttctgccagattgtctagtgttgctgttgtttctggcactgcttcgcttctgtcttcttcctcatcatctggcactggttcagaactcatcttcatcaggccctcttctgttaattcctctggtgtggtgtccrttaactcttgaatctctccaatatccatatcttgaaaccctttaccccacaacaccttttttttttaaatttttttgccatatccacaatctctttcatgactttcttgattagctctgttgtaaatcctgtgaagccatgcacaacatctggacacagtttcctccagcaggaatttcttcttgaagatttgatggctttcatgactttttctgtaacaagaatggtatcttcaatggtgtaatccttgcagattctcatgatgttttctctatcagatttctcttccattgacaattctttctgtagagtaccgcgtgtaatgagccttaaaggttcctatgatttcccgatttctaaaggctgaattagagatgatgtgtttgggagaaagtagacactttgacaccgttggtgttgaactcctggggttcttcgtggacaggggcattgtccaa

SEQ ID NO: 928593 - DNA, 629 bp, Homo sapiens
aaaagaaatcaaatgtaatcctgaataatctaagcctttctgccagattgtctagtgttgctgttgtttctggcactgcttcgcttctgtcttcttcctcatcatctggcactggttcagaactcatcttcatcaggccctcttctgttaattcctctggtgtggtgtccgttaactcttgaatctctccaatatccatatcttgaaaccctttaccccacaacaccttttttttttaaatttttttgccatatccacaatctctttcatgactttcttgrttagctctgttgtaaatcctgtgaagccatgcacaacatctggacacagtttcctccagcaggaatttcttcttgaagatttgatggctttcatgactttttctgtaacaagaatggtatcttcaatggtgtaatccttgcagattctcatgatgttttctctatcagatttctcttccattgacaattctttctgtagagtaccgcgtgtaatgagccttaaaggttcctatgatttcccgatttctaaaggctgaattagagatgatgtgtttgggagaaagtagacactttgacaccgttggtgttgaactcctggggttcttcgtggacaggggcattgtccaa

SEQ ID NO: 928594 - DNA, 629 bp, Homo sapiens
aaaagaaatcaaatgtaatcctgaataatctaagcctttctgccagattgtctagtgttgctgttgtttctggcactgcttcgcttctgtcttcttcctcatcatctggcactggttcagaactcatcttcatcaggccctcttctgttaattcctctggtgtggtgtccgttaactcttgaatctctccaatatccatatcttgaaaccctttaccccacaacaccttttttttttaaatttttttgccatatccacaatctctttcatgactttcttgattagctctgttgtaaatcctgtgaagccatgcacaacatctggacacagtttcctccagcaggaatttcttcttgaagrtttgatggctttcatgactttttctgtaacaagaatggtatcttcaatggtgtaatccttgcagattctcatgatgttttctctatcagatttctcttccattgacaattctttctgtagagtaccgcgtgtaatgagccttaaaggttcctatgatttcccgatttctaaaggctgaattagagatgatgtgtttgggagaaagtagacactttgacaccgttggtgttgaactcctggggttcttcgtggacaggggcattgtccaa

SEQ ID NO: 928595 - DNA, 598 bp, Homo sapiens
acacggaacccagaattaggctctctgctcaagcagccctgggccttgcgtgtgctctctgtggcccggtttccccacgaggggcagagatgaaagggcccagttatgcttaccccatgctccttccaactcaccaatgagagaagcagggagcaggggtgagacggctcttggcactatctccacaagcaggaagcatcaggcccgagggataagtcgacaagtcgtgcccctcagagagccaagcctatgtccgctatccaggcttatggatgaatayggcctgcaaagatcagaactccctccaggccagaaggagcacataatctcttccagtcacagcaaaggttcccatcagcattccctggccagtgcttcctttgcccaataaggggctggacaaaagggaggatggcctgtgtgatggttaatactgagtgtcaacttgattggattaaaggatacaaagtattggcctggtgcagtggctcacacctgtaatcccagcactttgggaggctgaggtgggtggatcatctgaattcaggagttcgagaccagcctggccaacatggtgaaaccccgtgtctactaaaaa

SEQ ID NO: 928596 - DNA, 631 bp, Homo sapiens
cagttaatctcaagaaatgccctcactataaactttcccaaagcagtgtattctggtgatcaatacttagtgtttaaaattttgcttgtatatcaaataagagctggtatgtttggaaacaagggttatggatcatgtgactaccaccttgccctcttttagaatatgccactaaccacattgtaagccctcatttggggatccagttaggctaaggagcacctctttaattgtgtaaggcagttagttcccaagcattyttcctccatatatacattaaccccatcaccaattctgactaattttattagattggaaaattcccagctaggctaacatttcaacactaagacataaaaacaaaatctaatatcacaatttagcatgcccttcaagaacacataaatcaatagcctttggagatgctgaaatggcagacacctggttccaacgtcctgaatctaaccaaaaggaatatccacttgtagattagctggagctacccaaccagtcactgggcaccccattcctataggctactaagagaacaccatggtatgttcaacaaatactttccccaataatcaaagtagtaattgttttaaaggttttttttttgtttgtttttagt

SEQ ID NO: 928597 - DNA, 583 bp, Homo sapiens
caatctatatatacctcatttcttcttgcttatcactctatctcaaacttccaggatgatgttgaataggaatggtgaaagaagacatcttgccttgctcctgatcttaggaagaaagcattcagtcttttaccaccaagtatgatgttggctgtaagctttttctctagattctctttattaggttaggaatgctccttcttattcctggtttcctctgagtttttatcatgagtggayactgaattttgtcaaaagcttttactgcatctattgagatagttaaatactttttattacccagtttattgatatcatgaattacttcattagattttcaagtgtgtaaacagtcttgtattctcaggataaaccacacttggccatgatgcattattattattaattatttttatttaagtaatgtatgttagctttaatttgctgatatttttgttaagcattcttgcatctatgttcactatgttcataatgaacttgggttttctttttgtaccagtgaaattctggcctcataaaatgagttgttaaatgttgccttctcttctatctttttgaagaa

SEQ ID NO: 928598 - DNA, 583 bp, Homo sapiens
caatctatatatacctcatttcttcttgcttatcactctatctcaaacttccaggatgatgttgaataggaatggtgaaagaagacatcttgccttgctcctgatcttaggaagaaagcattcagtcttttaccaccaagtatgatgttggctgtaagctttttctctagattctctttattaggttaggaatgctccttcttattcctggtttcctctgagtttttatcatgagtggacactgaattttgtcaaaagcttttactgcatctattgagatagttaaatactttttattacccagtttattgatatcatgaattacttcattagattttcaagtgtgtaaacagtcttgyattctcaggataaaccacacttggccatgatgcattattattattaattatttttatttaagtaatgtatgttagctttaatttgctgatatttttgttaagcattcttgcatctatgttcactatgttcataatgaacttgggttttctttttgtaccagtgaaattctggcctcataaaatgagttgttaaatgttgccttctcttctatctttttgaagaa

SEQ ID NO: 928599 - DNA, 738 bp, Homo sapiens
tttggaactgggtaataggcagaggttggaaaaatttggagagctcagaagataggaaaatgtaggaaagtttgttacatcctagaaacttgttgaatggctttgaccaaaatgctgacagagatatggacaatgaagtccaggctgaggtggtctcggatggagatgaggaagtttttgggaactggaataatggcaattmttgctatgctttaacaaagagactggtggaattttgctcctgccctagagatctacagagctttgatcttaagagagatgatttagagtatctggcagaagaaatttctaaggagcaaagcattcaagatgtgaaaagtttggaaaatttgcagcctaatggtgcaaaggaaaagaaaaacccattttctggggagaaattcaagcaggctgcaaaaatttgcagaattaatgaggagacaaatgtaataaccaagacaatggggaaaatacatctaaacggcatgacagaggtctttgcagaagcccctcccattataggcccagaggcctaggggggaaaatggttttgtggtctgggcccagggcctcgctgctttgtgtagtcgcagaacttggtgccctatattccagccatggctaaaaggggccaatgtatgcctcaggctgttgcttcagaggatacaagccccaagccttggcagcttacatgtggtgttaaatctgtgggtgcacagaagtcaataattgaggttt

SEQ ID NO: 928600 - DNA, 775 bp, Homo sapiens
tactgctataaagatacctgaaaatgtggaattgactttggaactgggtaataggcagaggttggaaaaatttggagagctcagaagataggaaaatgtaggaaagtttgttacatcctagaaacttgttgaatggctttgaccaaaatgctgacagagatatggacaatgaagtccaggctgaggtggtctcggatggagatgaggaagtttttgggaactggaataatggcaattcttgctatgctttaacaaagagactggtggaattttgctcctgccctagagatctacagagctttgatcttaagagagatgatttagagtatctggcagaagaaatttctaaggagcaaagcattcaagatgtgaaaagtttggaaaatttgcagcctaatggtgcaaaggaaaagaaaaacccattttctggggagaaattcaagcaggctgcaaaaatttgcagaattaatgaggagacaaatgtaataaccaagacaatggggaaaatacatctaaacggcatgacagaggtctttgcagaagcccctcccattataggcccagaggcctaggggggaaaatggttttgtggtctgggcccagggcctcgctgctttgtgtagtcrcagaacttggtgccctatattccagccatggctaaaaggggccaatgtatgcctcaggctgttgcttcagaggatacaagccccaagccttggcagcttacatgtggtgttaaatctgtgggtgcacagaagtcaataattgaggtttg

SEQ ID NO: 928601 - DNA, 737 bp, Homo sapiens
ttagtgcaaccatgttaggaaaagctatgtgctaagtgtagtgagcacgccaaatacagtgagaggaaaaaaaataaaagaaatctgacctgttagtagcatggtgggccacagcactgtgctgtgctgtgagcctggtctgtctccatctaagtttctttaatgagaaaacaaataaaatattcaaaaaagaaattttttttttttttttttgagacagagtctcgctctgtcgcccaggctggagtgcagtggcgcgatctcggctcactgcaagctccgcctcccgcgttcacgtcgttctccacctcagcctcccgagtagctgggactacatgcgcccgccatcacaccaggctaattttttgtatttttagtagagacggggtttcaccgtgttagccaggatggtctcgatctcctgacctcgtgatccacccgcctcagcctcccaaagtgctgggattacaggcgtgagctactgcgcccggcctaaaatatatattatgtgtatatacatagatttttaatttaataatattccattgcttagatgtaccacagttcattcatcagttgaaaggcctttgagatgytccctctttgggcaattatgaataatgtcacaatcaacatttgcatgcagattttgtgtgaacataagagtaatttctcttggactggcatgcctgctttgtatggtaagtgtgtgtttaattttgtaagaaactatgagg

SEQ ID NO: 928602 - DNA, 662 bp, Homo sapiens
aaaaatgttccctttgcttgatttccagcacattccttgtcttggtttttctcctatgtcactgactgtttcttctcagtctaatttgctaattttttgtctcctcccagttgctttatctgcaaagtgttagggatcagtcagtcttcttctcttctcttaactacattcactccctaggggatctcattaattcatgactttaaaaatcccacatgttgctgactcccgtatttacatcttcaacyttgacaccttcaccagctccaaagttatggtatcctgttgcctacttgatgtttccactgagaaggccaacagtgtttctaacgaatatacccctattcttcttccttgagcctgccttccagcagtattctccatctcagttcaaaagggacacatccttttctagtatctcaaacattattggcaatctcatctcttatatctcaatctgtgaggaaacactgttgtgctctactttcaaaatatttacagacagcaacaccttctcatctcccacccctttaccattgtttacctgaattgttaccaaagtatgcacagtttattccccacatggcagccagagggctccttttagaatggaagtcagatcatggcactcctctttcacaaccccagaacagctctctctt

SEQ ID NO: 928603 - DNA, 730 bp, Homo sapiens
attaattatctgacctctataagtccctactttaactggaggaccacaatgacattttgggtcccctggaatcaacatcagctcagagccagtgtcaagtagtccccaaaatgtctgattattgccctttctccaatgcacagctaccctggtaaaaggttggaggtctccttagggaaggatgggagaaagattcactgcataaactgtccataatgtagtggggtcctaacctcaaggggacccagcctccccttcattcaaggagtactgggtctgtaaactggctcaagtctggaaattgattgaggggccatgattctccgtttttataattcaaattagccttttgtccattcaacctagaagttttctgcttgtatgaattaagtaggaatgcagtaggcttcctaycaatttcacttctaggaacaccatgattaattagccaatgccagagctctacacaagtcagattattctgattgctgctttgtctctactgtccattacaatagctacatccactttgcctttgatggttgagtgctgccacttggcccctgccaccttgggatcccattattcccattgtacttaaattttatagttgagtgactgtggttctcactgttagatctgacatataaagaagagcaattatagggctcttcaaagatgcaggtgctgccctcacacatctattttgcaaggcattggtcaagggtat

SEQ ID NO: 928604 - DNA, 781 bp, Homo sapiens
agagtacaggtgcatgccaccatgcccagctaatttttgtattttttgtagagatgaggttttgccacattgccgaggctggtcttgaactcctggactcaacaatctgcccactttggctttccaaatgctgggattactggtgttaactaccatgcttgctcctctatcccaatttaaaccacaatcacacaatctggtgtcaatggaaattaaggctgttgagggagaaataatttgataaaagtttgttggaagctgaatgtgagaattgacccaggaacatacagcaacaaagagggtgtgttccaaagtctgttataagttggaatgctttcatgagagagtgtagaaggcagtgggactcctcatagctgagttgtccttcttcartgatgggtacaacacagaggttacaatcattggccaaggttgacaatgaacaggccaaaatgcttgatgtgctagacagtcaaacttcatgatcaaaatcaaatcagtgtccttctcaatgtcagaaggtgaagacttcatcagtacttgaagagtttgagaagctcacgatcagatgatttactcagggacaagaagtaagccatgaatcctaagtcccgagatggttggtttgaaagcccgccaactgtgatttgcaggtttttgtttttgtttttgtttttgctttttgagatggagtttcactctgtcacccaggctggagtgcaatggcgcagtcttggctcattgcaatgtctgcctccctggttcaagcaattctcctgcc

SEQ ID NO: 928605 - DNA, 633 bp, Homo sapiens
ataaattaattggaatagcagtaatcataggttgaactgtactttcttgattatcaggtcctagacaatgtaaaatcatggtgctttgatacacttttgaggcgctgcccacaccgacaagtcctgtaacaggcttttgtttaggccaattttttggccattgatttaaggcgataatggaaacatcagcatcggtatccamtaatcctataaactgctttccctgaatagtgactgtacacacagatctattctctgagacctgacgagcccaatgagtggcttttccggcagagttggtacttccaagccctcctgtcctttccgttttattttccccaattttaatataaggcaaaagcaataattgagcaattctattacctggattggcactccagggaacagtggagctgatcactaactgaatttcccctttataatctgaatcaattaccccagtatgaatttggactcccttcaaatttagacttcatctccctaaaatgaggcctactgtccctcctggcagtgggccatatacccctgtaggaatcttttgcggggtctctccagggagtaaagaaaccttttgagtggaacataaatctactgctgtgctgcctgctgtgg

SEQ ID NO: 928606 - DNA, 633 bp, Homo sapiens
ataaattaattggaatagcagtaatcataggttgaactgtactttcttgattatcaggtcctagacaatgtaaaatcatggtgctttgatacacttttgaggcgctgcccacaccgacaagtcctgtaacaggcttttgtttaggccaattttttggccattgatttaaggcgataatggaaacatcagcatcggtatccactaatcctataaactgctttccctgaatagtgactgtacacacagrtctattctctgagacctgacgagcccaatgagtggcttttccggcagagttggtacttccaagccctcctgtcctttccgttttattttccccaattttaatataaggcaaaagcaataattgagcaattctattacctggattggcactccagggaacagtggagctgatcactaactgaatttcccctttataatctgaatcaattaccccagtatgaatttggactcccttcaaatttagacttcatctccctaaaatgaggcctactgtccctcctggcagtgggccatatacccctgtaggaatcttttgcggggtctctccagggagtaaagaaaccttttgagtggaacataaatctactgctgtgctgcctgctgtgg

SEQ ID NO: 928607 - DNA, 633 bp, Homo sapiens
ataaattaattggaatagcagtaatcataggttgaactgtactttcttgattatcaggtcctagacaatgtaaaatcatggtgctttgatacacttttgaggcgctgcccacaccgacaagtcctgtaacaggcttttgtttaggccaattttttggccattgatttaaggcgataatggaaacatcagcatcggtatccactaatcctataaactgctttccctgaatagtgactgtacacacagatctattctctgagacctgacgagcccaatgagtggcttttccggcagagttggtacttccaarccctcctgtcctttccgttttattttccccaattttaatataaggcaaaagcaataattgagcaattctattacctggattggcactccagggaacagtggagctgatcactaactgaatttcccctttataatctgaatcaattaccccagtatgaatttggactcccttcaaatttagacttcatctccctaaaatgaggcctactgtccctcctggcagtgggccatatacccctgtaggaatcttttgcggggtctctccagggagtaaagaaaccttttgagtggaacataaatctactgctgtgctgcctgctgtgg

SEQ ID NO: 928608 - DNA, 604 bp, Homo sapiens
ctggaccttttccttttaatggctttatggctggttgaaattctggatttgacttttgataagccattatttctacaataactttttgggcattatcatccgaaacagatttttcagaggcatcttgcaaccttgccacaaagtctggatatggctctttgcagccttgtctaattgaattagaagaagggcaagcggtgcctgggcaagtgrtgcgtggggcacccaggtgcctgggtcctgaattttttcccagtccctgaggcaaagagcccttagatgttcaataccctcattctgcattactgactgttggccaattgtgctccaatttggacctgttcctagcaatcgatctgcatctatattaacagcgggataaatagcctgattttttcgtgcctgttcttgtactccatcaatccaccaggttttaaattgtaggaactgagagggtgaaagggaagatttagccaacatttcccaatcatagggaataagtctatttccatgagcaatgggatctaataaagttctcatataaggggagttgggtccatattgtttaactccttccttcatatcttttaacattttcatggtg

SEQ ID NO: 928609 - DNA, 604 bp, Homo sapiens
ctggaccttttccttttaatggctttatggctggttgaaattctggatttgacttttgataagccattatttctacaataactttttgggcattatcatccgaaacagatttttcagaggcatcttgcaaccttgccacaaagtctggatatggctctttgcagccttgtctaattgaattagaagaagggcaagcggtgcctgggcaagtggtgcgtggggcacccaggtgcctgggtcctgaattttttcccagtccctgaggcaaagagcccttagatrttcaataccctcattctgcattactgactgttggccaattgtgctccaatttggacctgttcctagcaatcgatctgcatctatattaacagcgggataaatagcctgattttttcgtgcctgttcttgtactccatcaatccaccaggttttaaattgtaggaactgagagggtgaaagggaagatttagccaacatttcccaatcatagggaataagtctatttccatgagcaatgggatctaataaagttctcatataaggggagttgggtccatattgtttaactccttccttcatatcttttaacattttcatggtg

SEQ ID NO: 928610 - DNA, 537 bp, Homo sapiens
gtgccagaccccatgccaagccctaaacatgaaccatctcattggatcctaccaaggtcccataagctgttggacatcatcatcctcattttacaggaagctgaggctcttggctaacatccctgacagcaacaccagcccctgagtactcagcaggatccttcacttgggtgcccattatgcaggcttcctcaacacagggaaggtcactcatcacccacaggcccttgatcgttatccaccctttgatgctgtcagattccagaacacgctgcactagtctcttccttcatagggagagaggggakgtgttatgagaaaatctctcatcaatctgacctagctccccaaaaagatgtaacttttaaaatgtcagatggaaatatttaaaaagtgttacatgcctgtatagttttagtattttacttaaagggaatgtggctgtctttactggctacaaccagtttaattcaagaagggctgctggtcatcaggagaacaagcaagggttgatgctgcccagagtctccagctaat

SEQ ID NO: 928611 - DNA, 515 bp, Homo sapiens
agcagctggtccaggtggccttcgaggaaagaaacagagttcatataaagcttttggaggcagcgcagcttgaggaactgagtggtgaactgggtaacaatctccttcttctgctctggggaaacgtagcgagagacatccatgtgggagagaacgagyttctgaagattcctcatgtggcccaggtatggggtaaactgtgtcaggatgggcagtacccacttgcaattcacttccacctcctggatacagtctaggttcaccattttcaggatgcttctgatattgcggaagggcattcccaaaattttcagcttcttacagcacaggtgtagtaaatctttcctctgcttgacccatagaaggaggtaggtgaggtattcatccagagtcctgttcttgagccaaagttctacgaacacagtcaagggctgccgtcctctcatccttggacagtcctgcactggttttttgttcctcttggcattgaggaagcacccatgggccatagcttc

SEQ ID NO: 928612 - DNA, 781 bp, Homo sapiens
gattttagtatatggactttattgtgttgaggaaaagttccttttatgcctattttgttaagagttccatataaatgaatgttttgaataaaatgagttttgagaaatgtttttctgcatctattgagataatcatgtgttttgttttctttcatcctgttaatgtggttgattgatttgcatatgttgaggcatctttgcatataagagataaatctcagtcattttatgtaatgcttttttttatgtaatgcttttaatgtgctgttgaatttgctatcttataaattaggccattatcccacactgtattaaaaaatcaactaaaaataggctagagacttaracactagacctgaatccacaaaactagggaaaaagttaaataaacctaggggaaactagataaacatagggaaaaagtttcttgacattgggttgggcaatgattttttttggatatgacaaaaaaaagcacaggcaacgaaagcaaaaacagacaaaaaggattgcttctaactaagaggattcttcacagacaaaggaaacagtcagtacagtgaaaaaagcaacctacagaatgaaagaaaatattgacaaacatagaaaaggtgttaatatccaaaatatataaggaacgtatgcacctcaatagcaaaaacaaaataaaacaacaaaaaacaacctgattaaaaaatggataaagggcctgaacagacacttcttaaagaagacatataaatggccaataaatgtatgaaaaagtattcaacatcactaa

SEQ ID NO: 928613 - DNA, 581 bp, Homo sapiens
cgttgtgggcatgacatgatggtggccatggggaaagattcctctgcctgtggaaaaaggagacaagagtgggaagaactatgatttgtggttttggtaccagctcagccatattgtaatagagaaccaggtagattcttaagggttcyaattccaggctctggttctaagacaccatttccagacttgaccaagaacagggggacctcgaagccacgaagaaaaggactgaagcctggctagattcatcatctgctgattgtagaatcctagggtcttgaacaaacataggtggtagccaggcagtggttaccaggggccatgagcaagacccagtgctgtgtggccttcaggtctgacctagtggtggtggcaacaggggtgtttgtgtcccccttcacccagcaccaggtagctcagtatagagacaaggagtctgttttggagaaagtaaggaaagagtacaaaagtctctgcctggtaatccagagaattattccagattttacccaagttcaacaaggtgatacctctacaagtcttcaacagccacatcattattgggcttgcagtgttcgcta

SEQ ID NO: 928614 - DNA, 662 bp, Homo sapiens
actctttgttaagtaccacaattaccattgttcctggcccggacttcaatccagcctcccacattattctggataccacacctgaccctcatgactgtatctctctgatccatctgacattcaccccatttccccatatttccttctttcctgtccacaccctgatcacacttggtttattgatagcagttccaccaggcctaatcgccacacaccagcaaaggcaggctatgctatagtacaagccactagcccgcctcttagaacctctcatttcctttccattgtggaaatctatcctcaaggaaataacttctcagtgttccatctgctattctactactcctcagggattattcaggccgcctcccttccctacacatcaaagccgaggatttgcccccacccaggactggcaaattagctttactcaacattccccaagtcagataactaaaatacctcttgggctaggwagacacttttactggataggtagagtcctttcctacagggtctgagaaggccaccacagtcatttcttcccttccgtcagacataattcctcagtttagccttcccacctctatacagtctgataacagaccagcctttattagtcaaatcagccaagtagtttttcaggctgttagtattcagtg

SEQ ID NO: 928615 - DNA, 662 bp, Homo sapiens
actctttgttaagtaccacaattaccattgttcctggcccggacttcaatccagcctcccacattattctggataccacacctgaccctcatgactgtatctctctgatccatctgacattcaccccatttccccatatttccttctttcctgtccacaccctgatcacacttggtttattgatagcagttccaccaggcctaatcgccacacaccagcaaaggcaggctatgctatagtacaagccactagcccgcctcttagaacctctcatttcctttccattgtggaaatctatcctcaaggaaataacttctcagtgttccatctgctattctactactcctcagggattattcaggccgcctcccttccctacacatcaaagccgaggatttgcccccacccaggactggcaaattagctttactcaacattccccaagtcagataactaaaatacctcttgggctaggaagacactttyactggataggtagagtcctttcctacagggtctgagaaggccaccacagtcatttcttcccttccgtcagacataattcctcagtttagccttcccacctctatacagtctgataacagaccagcctttattagtcaaatcagccaagtagtttttcaggctgttagtattcagtg

SEQ ID NO: 928616 - DNA, 546 bp, Homo sapiens
tgattatagggaatctttgcatgatgggtttgtcatatgccggttgtagtagcaatgtgctcagtgtgtgagcaagttcactgtcttctatagggttggaatagtagaggtctcttgaagctttttctcataccctgtggcatgcackttcttatttatttatttatttatttatttttcctcagtatttattttattggcttgatggttcgggctttaggccaataggggagatgtccctgtgtaggaactagttgtagctaattcaggtaggtaaatgcaatacccaatatgggcagaggtcccagccttgatggaggtggctggaggagctatcagtgagtcttaatgagggcttatcaggagaaagggttcgagccacctcagctcccctgccaggacagtaggaaagctatccatgtcccagacatacttctgtcccagtgatatagctattcagatcagacaggcacctcttttcatttgtaggaatgttgatgttccaagtagagaggaattgtgaacctttgcagatgtagtcacgct

SEQ ID NO: 928617 - DNA, 546 bp, Homo sapiens
tgattatagggaatctttgcatgatgggtttgtcatatgccggttgtagtagcaatgtgctcagtgtgtgagcaagttcactgtcttctatagggttggaatagtagaggtctcttgaagctttttctcataccctgtggcatgcactttcttatttatttatttatttatttatttttcctcagtatttattttattggcttgatggttcgggctttaggccaataggggagatgtccctgtgtaggaactagttgtagctaattcaggtaggtaaatgcaatacccaatatgggcagaggtcccagccttgatggaggtggctggaggagctatcagtgagtcttaatgagggcttatcaggagaaagggttsgagccacctcagctcccctgccaggacagtaggaaagctatccatgtcccagacatacttctgtcccagtgatatagctattcagatcagacaggcacctcttttcatttgtaggaatgttgatgttccaagtagagaggaattgtgaacctttgcagatgtagtcacgct

SEQ ID NO: 928618 - DNA, 547 bp, Homo sapiens
gtcattcttcttatctgcacatggcacatactctaaaatcaaccacacaattggccataaaataatcctcagcaaattcacaaaaactgaaattatatcaaccacactcatagaccacagtgtaatacaagtagaaattaataccaaaaaaatcacttaaaaccacacaattacatgkaaattaaacaaccttcttactgaataaattgggtaaaaaatgaaatagagaaagaaatcaaaaaatcctttgaagctaaggagaacaaggatataacatacgagaatctctgggacacagcgaaaacattgataagaagaaagtttacagtgtaaaacactcacatcaaaaagttaaacatctcaaactaagaacccattttcacaactagaggaactagagaaataagagtaaaccaaccccaaagcaagcggaaaacaaaaaataatgcaaaacagagttggacagaataaaattgggaggtgaaaaaccatacaaaagattaacacacttattaattggttgtttgaaagagtaaatacgatgggt

SEQ ID NO: 928619 - DNA, 611 bp, Homo sapiens
ctcttggcagaaactctacaagccagaagagagtggggaccaatattcaacattcttaaagaaaagaattttcaacccagaatttcatatccagccaaactaatcttcataagtgatggagaaataaaatcctttatagacaagcaaatgctgagagattttgtcacaaccagtcctgtcctacargagctcctgaaggaagcactaaacatggaaaggaataaccagcaccagccactgcaaaatcatgccaaattgtaaagaccatcgatgctaggaagaaactgcatcaactaatgagcaaaataaccagctaacatcataatgacaggatcaaattcacacataacaattttaaccttaaatgtaaattggctaaatgctccaattaaaagacacagactgtcaaattggataaagagtcaagacccatcagtgtgctgtattcaggagacccatctgacgtgcagagacacacataggctcaaaataaagggatggaggaagatctaccaagcaaatggaaaacaaaaaaaggcaggggttgccatcctagtctctgataaaacaggttttattgttttttccttaaggatatgactgtgatgtat

SEQ ID NO: 928620 - DNA, 718 bp, Homo sapiens
agttggccttcctgatcgcagggacccccagtggctgcagtcctaagccctgcaggccacagggacacatgccctggaggggccgggagcgacgctgtaggtcccgctgccatcctggcctgacccagcagggcctggcagtggggtgtaggttggagaaaccatggagtgcttgagaaagaagmgccatccaatacagaggtgccccctccgcccccaggcccagagactgtggctcaagccttggcccagggattctagcggatccactgctcctggggagaaggagagcttcactgtttctcacttgtccccatgaaccacatccgtatgatgctggcgttgtggccctcagagtctgtgagcactcttgtcccaccttgctctgaggcagcatggacattagggaaactgaggctgggctcatcccacccactgcatgaggccgcctttcaggctcgttagagagactccaccagccacccctgagctccaaccttggggggatgcagagatcggggaggcccaaggccacctcctcaggcccaaagggaggccactgcaggcaagatgaggtggcccagaggagccacatggggcctggaggcatctgggcgaaggcagagccaccgtcacacgtggatctcagagacccacaggaagaggatggtggctgggagggctgaggcagtcccccagagaactgtcctgccaggcc

SEQ ID NO: 928621 - DNA, 777 bp, Homo sapiens
caggcgcagtgcctcatgcctgtaatcccagtactttgggaggccgaggcggcaggatcacttgaggtcaggagattgagatcaacatgtactaaaaaatgcaaaaattagctgggcatggtggtgcacgcctgtaatcccagctactcgggaggctgaggtaggaaaatcgcttgaactctggaggtggaggttgcagcgagctgagattgtgccaccgtactctagtctggtcgccagagcaagaccctgtctcaaaaaaaaaaaaaaaaaaaaggacaccagtcatattgggttagaatccactctcatgacctcattttaacttagtcatctctacaaagaccctatttccaaatacaagtacattttgaggtactgggggttaggacttcaatgtatgaagttgttgggagacaaaattcagctcgtatcagtcatcacttctcctgcatctcctgcaaatgctgacaggtttcttgtctttcacgatattgacagatttgaagagtattcatcaggcatgtattgagtggtccttgatttggatttttctagtgttctccaatggttagagcgaggttgttagtttggagttaagaatatcacaggccargtgcagtggctcatgcctgtaatcccagcactttgggaggccgaggtgggcggatctcctgaggtcaggagtttgagaccagcctggccaacatggtgaaaccctgtctctactaaagatacaaaaattacccgggcatggtggtgccggacctgtaatta

SEQ ID NO: 928622 - DNA, 680 bp, Homo sapiens
taaagtctatattctctgtcatggctactgaagtctttgctcagttagcttcatggttagctagtggttggacagagatttccttgaatgtctggaatcggaagtctgccagtctttgccagggagctctgtgtacttattagggacacaccttcaacattcacccaggaaatttacaactgtgctttagctctcacttcctgcttacacagagcctcgaagtcggccagcggtgtgagcttagggctgtctcaggtctttcctaagcatgtggccttccatatccccagaaatatgtcagaatttttcaaaagtccctccgaacatctaatgtcttcatttttccttctaagatttttttttttttttttttgagacggagtctcgctctgtggctcaggctggagtgcagtggcrcgatctcggctcactgccagctccgcctcctgggttcacaccattctcctggcttggactacaggcgcccgccaccacacccggctaattttttgtattttcagtagagacggggtttcaccgtgttagccaggatggtctcgatctcctgacctcaagtgatcctcccgcctcgacctcccaaagtgctgggattacaggcgtgaaccaccgcgcctggcgcttttccttctaagatttttagttaggctattatttcccca

SEQ ID NO: 928623 - DNA, 615 bp, Homo sapiens
acggaaacagtttcatgttcttcttagtaccatccatgaacttcagcaaacattggaaagtaagtagaaatagtctcaaagtaaatgcttatgaagattttttaaatgacccagggatgtaccttttgaaatatacatcttggagagacagtataccttcaatttctgaacagtgtagctggatgacgttagaaggtactcatgttcaactttcttgaatacatgtagaaaagtcttaatttgtagtaatataggatttaaacatatacatagtggtttaaattaagaaaaattcaaggatgatagatttggaatctttcttggttcactgtagttgactactataatataacaactcaggacccaggcaggcaataataagaaatcagtacatamgaacatttgcatacccactgagtagtgggtgctttggggaactggagacttgctctttatattcactataggcaagtggaaatttttgtgttacctgatcttctgattgttttaaagaatagcctaagacccattttttcttttcttttttttttttttaagacagtcttgctctgtcacccaggctggagtgcagtggcacaatcttggctcactgca

SEQ ID NO: 928624 - DNA, 568 bp, Homo sapiens
  misc_feature 548, 549, 550, 551, 552, 553, 554, 555, 556, 557, 558, 559,560, 561, 562, 563, 564, 565, 566, 567, 568: n = A,T,C or G
gaatgcagggatagtttaacattcacaactcaataaatgtgacacattacataaaaagaattaaaaacaaaaatcacatgatcatctcaatagatgcagaaaaagcatgtgacaaaatccagcatccttttatgatctaaaaccctcagcaaaattggcatcgaagggacataccttaaggtaataaaagttatctatcacaaacccacagccaacattatactgaacaggaaaaagttgaaagcattccccttgagaactggaacaagacaagaatgcccactttcaccacttctatttaacatagtactggaagtcctagccagaaaaatcagacaagagaaagmaataaaggacatccaaacaagtaaagaggaagtcaaactgttgctgtttgctgatgacatgactgtatacttagaaaaccctaaagactcatccagaaagtcctagaactggtaaatgaatttggcaaactttcaggatacaaaattagtgtacactaatcaacaccctgctatacaccaacagcaaccaagctgagaatnnnnnnnnnnnnnnnnnnnnn

SEQ ID NO: 928625 - DNA, 438 bp, Homo sapiens
aggatttttactgctcctctcaaagtatgccttaagttgatatggaagcacagccctattttagggattttataagatctgggtaaattccaggtcctgaaagcagccatttgcctgatgtcaaagcccctgccttcttgtgattctaaaagatatgtcggaaagcaatttctaaacgaartagggaccacgttatgcccccaggagattacctagtgtattagaactttctcacacttctaataaagactttcccgagactgggtaatttataaaggaaacaggtttaattgactcacagttccagatggctggggaggtctcacaatcatggtggaagacaaaggaggatcaaagtcaagtcttacatagtggcaggcaagagtggtaggcaagagagcatgtgcaggggaactcccctttatgaaaccatcagag

SEQ ID NO: 928626 - DNA, 592 bp, Homo sapiens
tctttcaaaaatgaagaaaaaagaaagacatttttcagacaaccaaaaagagggaattcattactagcagacctgtactgcaagaaatgctcagggacattccttaggtggaaagaatgtgataccagacagaaacttgtgtctacacaaagaaataaagatctccagaaatgattgaaatggaggtaactataaaagattttttcttatttttaattactctaaacgttaaatgactactgaaagaagaaattgtagcaatatatattgaattacagtttatataaaagtaaaatgtatgacaacaaaaatgtaaatattctaaatataccaattaaaagacagagattgtcagatcagtttaaaaagctgagaagaggcccaggcatggtggctcatgcctgtaattyaagcattttgggaggctgaggcaggcagatcacttaagcccaggagttcgagacaagcctgggcaacatagtgagaccctgtctctacaaaaattagccaagcatggtagtatgcaccagtagtcccagctacttgggaggctgaggcaggaggagcacttgagcctgcggggagcggaggt

SEQ ID NO: 928627 - DNA, 574 bp, Homo sapiens
acaaacacaacagtctcaggtacttctcctgcttccttaggaggcatgccagaccagcgctggccccctagccagcatccaaaccagactagccttcctggcctcacacagagctgtagggtgtcttggaaggagctattttgggtgaggtctattttggtttgtttacctatgtgcacactgaatgcagtcctgattggagagggatgggatgtcagactccctgtcccagacacaactaagagaaggtcatttcccctaagtcatgtttcagcttcccacagaccttcacattaagatacaaggtygcagctcatgacacggaaggaaacttccaaaagatgtaacaagagttatgaaactgacccagacccttattttagacaaattgtttttctgtcactttagcttcccagtaaataaaaactttacaagctgtgaatgtgtttgcttctcttaactggcatgcccaaattagtatgcatttgcccactctttggggtttctgtctcagggaaaggtgattataccctgaaccaaatgagtgctgttgaagactagactggcttcaggg

SEQ ID NO: 928628 - DNA, 548 bp, Homo sapiens
tttttggatgagagataaacatgtataaaagccacactactagtgtagtatattggtttggctggagaataaggagtgagtggagaagtgatgatagatggatctgaagaaataggcaccgattttttaattttattctgtaggcaagggattgatagtttttatgaattaggaagataacattgctggttatttttctaaagatgtgttaagttgctgagaaaaaaaaactagatatggtgagtgtaattaggaggttgttgcagtcaatcaggccagggatgatggatattgaaaagcaagagtagagttgaagaggaaggaatatacttcagaaatggggactctcagagaaatttttcagtgttagtataaaaagagaataggaagaatattaataaatgaaccamaattggcccagcacagtggctcacacctgtaatcccaacactttgggaggccaaggcaggaggatggcttgagcacaagagttcaagactagtctgggcaacatagcaaaaccctgtctacaaaaataaagttaagaa

SEQ ID NO: 928629 - DNA, 679 bp, Homo sapiens
ttcttttttcttttttgaagtggagtctcgctcttttgcccaggctggagtacagtggcacaatctcagctcactgcaacctctgtctcctgggttcaaatgattctcctgcctcagtccactgagtagctgggataacaggcacccaccacctcacctggctaatttttgtatttttagtagagatggggtttcaccatgttggccaggctggtcttgaactcctgacctcaggtgatctgcccaagtcggcctcycaaagtgttgggattacaggtgtgaaccaccgcctgctgtcttttctctgttattgcccgacaggcctggggcacccttctgggggctcagtgtgagggaggggagaaagggctcacactgacacagaaattggggaattcctcctcctcctccccctgctcttactatggagtgctaggctgttctgcctgactccttctctgacaacaggacctgggtctgctgtcctcccagactcagtgggaaaggtcctaaccccgccagtgttgtaggaacagccagcagccagtggcacgggtgctgtacaagtcatctggggggaaagtcaagtgcatgttaggcctttgtcaggaagcaacagaccttgcaggggaaaggagagctcctgttaattatggaggggcaaggcagcctcctgggc

SEQ ID NO: 928630 - DNA, 679 bp, Homo sapiens
ttcttttttcttttttgaagtggagtctcgctcttttgcccaggctggagtacagtggcacaatctcagctcactgcaacctctgtctcctgggttcaaatgattctcctgcctcagtccactgagtagctgggataacaggcacccaccacctcacctggctaatttttgtatttttagtagagatggggtttcaccatgttggccaggctggtcttgaactcctgacctcaggtgatctgcccaagtcggcctcccaaagtgttgggattacaggtgtgaaccaccgcctgctgtcttttctctgttattgcccgacaggcctggggcacccttctgggggctcagtgtgagggaggggagaaagggctcacactgacacagaaattggggaattcctcctcctcctccccctgctcttactatggagtgctaggctgttctgcctgactccttctctgacaacaggacctgggtctgctgtcctcccagactcagtgggaaaggtcctaaccccgccagtgttgtaggaacagccagcrgccagtggcacgggtgctgtacaagtcatctggggggaaagtcaagtgcatgttaggcctttgtcaggaagcaacagaccttgcaggggaaaggagagctcctgttaattatggaggggcaaggcagcctcctgggc

SEQ ID NO: 928631 - DNA, 784 bp, Homo sapiens
acagcagcccggacctgttgcagagccttcttctgttctggatcccactcaaaactggtagcctttcaggtcacttgataaataggcctgagtaacacacccaaatgaggaatgtgttgcctccaaaatccaaataggctcactcagcattgtgcctctttcttggttgtaggaggagccaaatgcacaacttatccttcaccttagaaggagtatctagacaggccccacaccactgggcccctagaacttttactgaggtagaaggtccctggattttagtcagatttatttcccatcttctggcaagcaaatgtttcaccaataagtctagtgtgtttgctgyttcttgctcactggatccaatcagcataatgtcatcaatgtaacggaccactgtaatatctggcggaagtgaaaagcgatcaaagcctcgccgaataaggttatgacataaagctggaacttccacatggtgttgagcctgcaggtgcacagaagtcaagaattgagttttgagaacctccgcctagacttcagaagatgtatggaaacgcctgtatacccaggcaaaagtttgctgcaggggcagggccctcatggagaacctccactagggcagtgcagaagggaaatgtggcgtgagtgccccccacacagagtccccactgggcactgcctagtggagctgtgagaagagggctaccgtcctgagcccagaatggtagatccaccaacagctttcaccatgctcctggaaaagccacagacactcaatgccagc

SEQ ID NO: 928632 - DNA, 641 bp, Homo sapiens
tcagaaattccagaagcccagatttgtgactagtgtgtgtgttgggggcgtgctgtcttggggaacccttaacctgtgggatccgacactatctcagggtagatagcaacagaactgaaagatagtatcagaactgaattagaatactggtatcaactgatattcactgcttggcgtgtgggggaaatacccacacacatttagtcacagaagtcttcttctgtgttgatgattgttgtggcatgagagtgaaaccacctttgcaaaaattataactcagtgaattattacagtgaaagagatctgacctaaccgactccatcttrcttctaacctccaagctgtccttgttcatccctggccgtaggccaaactaactccgggagggaattagtttatagtttaattttgaaacaaagataataacaatcatttcccaaaacaaaaccccttcctgcctgggaactagactgcctttacgggacttacaaattagccacacaattagaagttatggttaggggtcacacagccggaagctgcaaaattctcaacctccccaaattattcctggagataacatcactattgtaaaacctaacatcaccagtgcttgagatattttgccgacactgcactca

SEQ ID NO: 928633 - DNA, 737 bp, Homo sapiens
aacagtttctcagaccacagtacaataaaattagaactcaagattaagaaactcactcaaaaacacaaaactacatggaaactgaaaaacccactcctgaatgactgctgggagataatgaaattaaggcagaaatcaagaagttctttggaaccaatgagagcaaagagacaacatgacagaatctctgacactcacctaaggcagtgttaagagggaaatttakagcactaaatgcccacatcaaaaagctagaaagatctcaaattgacacctaatatcacaacaaaaagaactagagagccaagagcaaacaactcccaaagctagcagaagaatagaaatcaccaagatcagaccagaactgaaggaggcagagacacaaaaaacccttcaaaaaatcaatgaactcaggagctaggttttagaaaaaaataaaatagatggaccattagctaaactaaaagagagaagaatcaaatagaaacaataaaaaatgataaagggtatatcatcactgattccacagaaatacaaacaaccatcagagaatactatgaacaactctatgcaaataaactaaaaaatctagaagaaatggataaattcctggacacatacaccctccctagattgaacaaggaagaagttgaatccctgaatagaccaataacaagttctaaaatttaggcagtaataaatagcctaccaaccaaaaaaagcccagaaccagatgg

SEQ ID NO: 928634 - DNA, 757 bp, Homo sapiens
acttttttcattacaggtttgttctaaagaattaagtccaggatccagactaggtgaggtgaggacagcgaagtgcctagagcacacaatatcaggaggcactcactgtcaggccaaacgagttgtacaacccttctaggaggaagaaaacaggtgcctcctaaaattttatggcttagctgtttccctcttcttaccctagtctggtccctccttgcccagataaatcacatgcacttgaatttctgctttagcctctattcgtcagcaacccaacctaaggcaagtggcagtataatggattgttacctattgattgttttaaggactaaatgagttaaggtatgggaaacagcaatgattgaaacagtaatggggaatgaacaaatacatgtatagatagaaatggtgatgagacagatcactcctgtgcctttgtatgtactcttctccctaccttcagtgcatgctckgtttctattggcttatctaaatgccattgtccccctcctccctccaaaaccctattttgtctataaaactcttactggctacagcattctaaatgacattaatttactctacataattctccaatccctgactccgtttttttttttttaaccaaataatttttttccttccattgtgtttatgtcctataaatcatcatctgtataacttacttgaatagattgacaaatgtggtaaaatcaatataacgatattgcaaaaatgatccttagaagtgtgaaaa

SEQ ID NO: 928635 - DNA, 757 bp, Homo sapiens
acttttttcattacaggtttgttctaaagaattaagtccaggatccagactaggtgaggtgaggacagcgaagtgcctagagcacacaatatcaggaggcactcactgtcaggccaaacgagttgtacaacccttctaggaggaagaaaacaggtgcctcctaaaattttatggcttagctgtttccctcttcttaccctagtctggtccctccttgcccagataaatcacatgcacttgaatttctgctttagcctctattcgtcagcaacccaacctaaggcaagtggcagtataatggattgttacctattgattgttttaaggactaaatgagttaaggtatgggaaacagcaatgattgaaacagtaatggggaatgaacaaatacatgtatagatagaaatggtgatgagacagatcactcctgtgcctttgtatgtactcttctccctaccttcagtgcatgctctgtttctattggcttakctaaatgccattgtccccctcctccctccaaaaccctattttgtctataaaactcttactggctacagcattctaaatgacattaatttactctacataattctccaatccctgactccgtttttttttttttaaccaaataatttttttccttccattgtgtttatgtcctataaatcatcatctgtataacttacttgaatagattgacaaatgtggtaaaatcaatataacgatattgcaaaaatgatccttagaagtgtgaaaa

SEQ ID NO: 928636 - DNA, 571 bp, Homo sapiens
ccccagtgtctacagcagtgtgtggtccacagtatgcatttagtacaygtttgttgattgacttcacgaacctctcctgaggtttctccaaagagaataagaacttcccactccccgggtgggcctgaaggatgctggctggatgtctgtggtctctggtcggggctggagcctttgccgtgggagagacttgagtctgatggcagagctgtggttcttccagttctgagtgggacacggctcctgccttcaagaaacccagtctgagaggggagacagcccagtccactggtgatggcagtaggaacacaattcccgtctgtggaagtttgctctgtgtagggagaggctgacagcgttcatgcaccatctcatttaagtgcagtgcccagtgcggtggctcccgcccgtaatcccagcactttggaaggccgaagagagaggcttgagtccaggagttcaagaccagcctgggcaacatagtgagacgcccccctactccatctctgcaaaaaattaaaaaattagctgggcgtggtggtgcacacctgtagtcccagctactggagaa

SEQ ID NO: 928637 - DNA, 571 bp, Homo sapiens
ccccagtgtctacagcagtgtgtggtccacagtatgcatttagtacatgtttgttgattgacttcacraacctctcctgaggtttctccaaagagaataagaacttcccactccccgggtgggcctgaaggatgctggctggatgtctgtggtctctggtcggggctggagcctttgccgtgggagagacttgagtctgatggcagagctgtggttcttccagttctgagtgggacacggctcctgccttcaagaaacccagtctgagaggggagacagcccagtccactggtgatggcagtaggaacacaattcccgtctgtggaagtttgctctgtgtagggagaggctgacagcgttcatgcaccatctcatttaagtgcagtgcccagtgcggtggctcccgcccgtaatcccagcactttggaaggccgaagagagaggcttgagtccaggagttcaagaccagcctgggcaacatagtgagacgcccccctactccatctctgcaaaaaattaaaaaattagctgggcgtggtggtgcacacctgtagtcccagctactggagaa

SEQ ID NO: 928638 - DNA, 571 bp, Homo sapiens
ccccagtgtctacagcagtgtgtggtccacagtatgcatttagtacatgtttgttgattgacttcacgaacctctcctgaggtttctccaaagagaataagaacttcccactccccgggtgggcctgaaggatgctggctggatgtctgtggtctctggtcggggctggagcctttgccgtgggagagacttgagtctgatggcagagctgtggttcttccagttctgagtgggacacggctcctgccttcaagaaacccagtctgagaggggagacagcccagtccactggtgatggcagtaggaacacaattcccrtctgtggaagtttgctctgtgtagggagaggctgacagcgttcatgcaccatctcatttaagtgcagtgcccagtgcggtggctcccgcccgtaatcccagcactttggaaggccgaagagagaggcttgagtccaggagttcaagaccagcctgggcaacatagtgagacgcccccctactccatctctgcaaaaaattaaaaaattagctgggcgtggtggtgcacacctgtagtcccagctactggagaa

SEQ ID NO: 928639 - DNA, 571 bp, Homo sapiens
ccccagtgtctacagcagtgtgtggtccacagtatgcatttagtacatgtttgttgattgacttcacgaacctctcctgaggtttctccaaagagaataagaacttcccactccccgggtgggcctgaaggatgctggctggatgtctgtggtctctggtcggggctggagcctttgccgtgggagagacttgagtctgatggcagagctgtggttcttccagttctgagtgggacacggctcctgccttcaagaaacccagtctgagaggggagacagcccagtccactggtgatggcagtaggaacacaattcccgtctgtggaagtttgctctgtgtagggagaggctgacagcgttcatgcacyatctcatttaagtgcagtgcccagtgcggtggctcccgcccgtaatcccagcactttggaaggccgaagagagaggcttgagtccaggagttcaagaccagcctgggcaacatagtgagacgcccccctactccatctctgcaaaaaattaaaaaattagctgggcgtggtggtgcacacctgtagtcccagctactggagaa

SEQ ID NO: 928640 - DNA, 610 bp, Homo sapiens
cagaagtaggtgtaaggcagagggagagactcaggcaagttttagagcaggagtgaaagtttattaaaaagtcttagagcaggagcaaaagggagtaaaggacacttggaagagagccaagtgagtggcttgagagagtcaagtgccctgccctgttcggcccttgagttggcgtttatacattggcatggttccggggtttgtgtgccttctcccttgattcttcccttgtggcaggctgtccacatgctcagcggcctgtcagcacttgggaggggccacatgcgtagtgtgtttactgacgttgtgcttgtgcttacatgaggtgtttttcccttaccagttgagccttctgccattttgccccttaatgtacatgcttgaccccacttgcccaactcctaagatcttatcataaagctgccgatcaacagcttcagatrttttctatctaatgagaaactctctttccctggtgacagcggtgaccagttatcattttagaaagacagtttaacaactgtctaaccatcacctgatagttgcctgacatttctggagaagtcctctcctgccctgctcacgtctgcctgacaacctactgtaacac

SEQ ID NO: 928641 - DNA, 541 bp, Homo sapiens
gaaatatcattgaaacatacagattgctgtcactttatatttacaatcagcaatctcaactaagccctcaacagtgtccactaatcttattatatgtctacagtagtatagtacattttctaccctttcatactttttgcaatttcctcaaaattcccactacctattatctctctctctctctctctctctgtgtgtgtgtctctctctctctcagacaaaatctcrttttattacccaggccagagtgcagtggtgctatcacggctcactgcagccttaacctcccaggctcaagtgatcctcccaccttagcctcctgagtagctgagactacaagcacacaccatcactcctggctaatttggttttttatatatttttttgagagacagggcccctctatgttgcctgggctggtctcaaactcatgagctcaagtgatcctctcgccttggcctaccaaagtgctggggttacaggcgtgacgccacacccagcccaccacccattctcaagtaatgatttgtctccaatttca

SEQ ID NO: 928642 - DNA, 569 bp, Homo sapiens
tgacactaaaggttggaggagagagaggaaattgtgtaaatgttattttgaagagtcagagagtaaacagaacattcaaggaaagccaggaagtgtcaagtgctgatttgaaaattaggagaatagttagtttactggtattagctattccaaccccattcaggtgctcaaagtgggcaagtagttggctttcataatggtagggtttttgttttcactttagttttatttttgttagtttgtttgttttgccaagtaaacactatgaaggaagacaggaaggcaagacagttaacttaaactcctaatttcccaggggttaattacagtgacagaacatagcgtcracaccttcaacatgggaaatctcgtgctctaaaccaagcaggggggacatttgcaaaaaaacagaaaggaaataaaaagcattattcagattttcaaaggaatgtgcttttaagtaaatctaagctggatgaagagagaatgagactggaaagcttgataatgaaatgctgaataatgaaaagtggtggggttagtagatggggatccccatgaaatagaag

SEQ ID NO: 928643 - DNA, 633 bp, Homo sapiens
aatcaaaagcaaattagttacttcctagatacaatgtggttacaggcattgggtaaatgctcctgttccaagtgggaggaattcgccaaaacaaaggggttacaagccccatgaaaatctgcaatccagcagggcagtcattaaatcttaaagctccaaaatcatctcctttgactccatgtttcatgttcttggcatgttgatgcaagatgtgagctcacacagccatggcagccttttcatgggctagcattgagtgcctgcagcttttcaaggcacatggttcaaggtgtcagtggatctacaattctgggttctagaggatggtggccctcttctcacagctccctaggcagtgccctagtggggactccgtatggggcctcacaccccacatttcccttccacactaccccagcagagtttctccatgagggccctgccttgaagcagacttctgcctggacatccaggcgttttcatataacctgtgaaatytaggcagaggatcccaaacctcaattcttctgtgtacccacaggcccatcaccacgtggaggctgccaaaagttggggcttgcatcctctgaagcacaggccgagtggtaccttggctccttttagccatggtgg

SEQ ID NO: 928644 - DNA, 636 bp, Homo sapiens
taaaggcagctcagataaggcggagggatgagaagtctgaaggccaagggcttcaccggaaccagtaaacaagggaggggtctgtgaaaggcccccacccccaagggagtcagcagcgctgaccctaatgccctgggcactgggtaactgcccctctgctgcaggtgaccccagagtgccccggcccagcccctactgcagagaccagggaggaagggaagggccagccacgcccggctccaggagtccccgtcacccacccccttagcygggctgccatcctccaagctctgctggggctcaggttccagggaccgcaaggtgccatcctctgacacctgggacttctcggtcagcttgtcaatgcctgggcagggcacaggtgggagtgaggactccctgccacagtgacccttctagcccttcctccacccacttttttatttttatttgttttactcctgcttccctctggaacctccaccggctctagaggcagtgtctgatcactgtaacgccctctcctgcgcccatccctccagagtctacactcgccctgaggctctgcccccaacaccaagctacacatgctaagcccatccagtaccctcccccatccctgtgcccatccctcca

SEQ ID NO: 928645 - DNA, 593 bp, Homo sapiens
aaagtggcacacacctgtaattccaagcactttgggagccccaagtgggcggattgcttgagcccaggagtttgagaccagcctaggcaatatggagaaatcccatctctacagaaaatacaaaaattagccaggcatggtggcccacacctgtggtcctagctactcaagaagttgaggtaggaggagcaattgagcctgggaggttgaggctgcaataagctgtgattgtaccactgcactccagcctgcaagacagagcgagatgctgtcttaaataaataaataaataaaattaaaaaaccccagctagactaacatcatactgaataggtgaaggctcaaagtatttaccttgagaaccagaaaaagacaagaatgcccactctcaccactcctattcaacacagtactggaagtcctagccagagcaatcaggcaatagaaagaaakaaaaggcatccaaataaagacaggaagtcaaactatctctgtttgcagatgacatgattccatacctagaaaatcccagagtctctgccccaaagctcctttagctaataaacaacttcaggaaagtttcaggatacgaa

SEQ ID NO: 928646 - DNA, 647 bp, Homo sapiens
ttctaaaaaacattgaattgcacactgtaaaatagttaaaatgatgacttttgttatgggaattttgtctaagagaaatacatcccagttggcaccatttctataaaaaggaatagtgagagataaagcttataatatggtttcgctgtgtcactacccaaatctcattttgaatggtaattcccacaatttccatgtgttgtggcaggaacctggtgggaggtgactgaattatgggggcggatctttcctgcgttgttctcctgatagcgaatgagtctcatgagatctgatggttttaaaaaggggagttyccttgcaccagttctgttctcttgaccgctgccatatgagacatgccttttaccttccaccaggattgtgaggcctccccagccacgtggaactgtaagtccaataaacctctttcttttgtcaactgcgcagtcttgggtatgtctttatcagcagcctgaaaatggactaatacagtaaattggtaccagtagagtggggcactgctgaaaagatccctgaaaatgtggaaatgactttggaactgggtaacaggcagaggttggaacagtttggagagctcagaagaaggaaaatgtgggaaagtttggaacttcctagagacttgttga

SEQ ID NO: 928647 - DNA, 603 bp, Homo sapiens
tagtccaaatggaccggtggttgtggtggacatggaagcagactcctctgccagggaaaggaaagagaaaagaaaagtgggaatgactttgtcttatggtttcagtattagctcagtcgcagtagaatagagcatcaggtagatttctgagattccaacttcaaaccatggcttctggatggcatctctggacctgcctggggcccaaggaaacttgttgcccraagggaagaaaagaagtctggttggcttcataacctgctgattatggagccttagggctctgagcaaacataggtggtagtcaagtggtggttacagtgcaccttgggtgagactcagtgctgtgctggctttaggtctgatccagcacaatcccaatggtggtggccacagggttgcttcttacacgacttccccagctccagacagctcagcagagagaggagactctgtttcctctctgtttggaagaacgtaagggaagataacaagagtttctgtctggtaatccagagaattcttctggatcttatccaagatcaccaagacagtacctcaaccagtctgtaagaatcacagctttacagggcctggggtgcc

SEQ ID NO: 928648 - DNA, 587 bp, Homo sapiens
ggtggacatggaagcagactcctctgccagggaaaggaaagagaaaagaaaagtgggaatgactttgtcttatggtttcagtattagctcagtcgcagtagaatagagcatcaggtagatttctgagattccaacttcaaaccatggcttctggatggcatctctggacctgcctggggcccaaggaaacttgttgcccgaagggaagaaaagaagtctggttggcttcataacctgctgattatggagccttagggctctgagcaaacataggtggtagtcaagtggtggttacagtgcaccttgggtgagactcagtgctgtgctggctttaggtctgatccagcacaatcccaatggtggtggccacagggttgcttcttacacracttccccagctccagacagctcagcagagagaggagactctgtttcctctctgtttggaagaacgtaagggaagataacaagagtttctgtctggtaatccagagaattcttctggatcttatccaagatcaccaagacagtacctcaaccagtctgtaagaatcacagctttacagggcctggggtgccacctaatg

SEQ ID NO: 928649 - DNA, 662 bp, Homo sapiens
tttttaagataaaagaatagtgtattttcatattgatgagaaatacccagtagagaatgaaaaatgatgtatcaggagagaatggaaggaactgttacaggatggaatgggactaaaaagaggacagagcaaaggtataagtggaagggaaggccactgcaaagagaacagatgtttatccagaggtaaaggagtgatggcagagcrtatgactacagatccaggcagctagggagatatcacagagggagtttttgaaagttcatgttgatcgcttctacttttatagtcagagttatctcctgagaatacagatgagagaaagctattaaaccttaagggaaagtatgaaagaatcatccagtgggttgagagaaggtataagtcagggaaacataatatgattattttgtagcattaagaactcactggaggctgatgctaatgaatttaaaataaaacaagccagtatggaagtctgaacaaacatattaagtatgttcacctgtaggggtgcaggcctgaagtaggagaattgcattatataactagagttgacattttgttcatcaattgataaagaggaaaaaacgtttagggtatatgcaaagaagtgattatagtggtgctatggtctgaatattagtgtccatgtcatattc

SEQ ID NO: 928650 - DNA, 710 bp, Homo sapiens
ttcacacattccacaagtaatctgggaggatagcactgccccacattctttgagagatgccaagatggcttagaggtctttccagctctcaagggtcccacagttgactaaaaagacacagacacacaatatggggtttatccaaaaacttcctgttgaaggagttttttttctttaagttccctaaaagatttctttgccttagcaaagccaggggattcagtcaagttttttttttcttctttttgttagcttcaagaaatagagatccaagtttccttatcctgatagtagagaaaaaatagcaatgtgtttttttttaaactaattccaagattsagctcacctttccttccttccttctttccttccttccttccttccttctttctttttcctttcctttcctttcctttcctttcctttcctttccttcctttcttccgtctttctgtcattttctttcctctctctctcgccttcctgccttctttttctctttctctcttcctctctgactgctttcctgccttcctgccttccttctttacttttttcttttcatttctcttctcttttctctctcccttctttctcccctcccctccctcccctccccttcccttccctcttccctttcctttttccacagggtcttgttctgttgcccaggctgaactgcagtggcacaatcataactcactgcagcc

SEQ ID NO: 928651 - DNA, 681 bp, Homo sapiens
tgacaaatacattcaaattataatgtcaaatgctggtgaattaagcgatacaacactttttatgaagtataaatatttataaagcagtggtccctaatctttttggcaccagggatcagttttgtggaagacatagacaaagtcggtagggtatgattttggaatgaaagaattccatgtcacacactagttagattctcacaagaagcatgcaacctagatccctcccatgcacagttaataatagattcccactcttaggagaatcaaatgccaccattgatgtgacaggaggtagaactcaggtgataacgccagctctctggccgcttacctcctgctgtgctgccccgttcccggcagggcaaagacgtgtagtggtccgtggcctggtaggggtgggggcccctgttataaagtattcatcaaaggtaatttggtaaagatatacaaatattaaacaatgagtatatcctttaacccttttcccatttgtcttgagaatactcaccagcagtacttgtggttgyagtgattatcctgagataagtttgcaatgaaatatctctcttttattgttatttttgcaccggtccagtatgtcaactttggaaataaatacataattctgtttataccattttgtttttagtagtggtattgatacttacaaaatatagt

SEQ ID NO: 928652 - DNA, 681 bp, Homo sapiens
cacagagtgagactccatctcaaaaaaataaaaaggacaaagaaggacattacataatgataaatggttcaactaaataaacagtcttaactatcttaagtatatttgcacccaacactggtgtgcttagatcaataaaacaagtttgtaagagacctatgaagagacttagataaccacacaataataatgggagacttcaacatgtcactgacagtgttagatcatcgaggcaggaaagaaacagatactagggacctaaacttgacacttaaccacatggatctaaaagacatctatacaatatgccacccaacaacaacagaatgtacattcttctcacctgcacatggcacatactctaacrttgaccacacatttggccataaagcaattctcaacaaaaacaaacacaaaaccctaccaaccagtctttcagacctcagtgcaataaaaatagaaatcaataccaagaagatcccccaaactgtacaattacttggaaattaacctgtccctgaatgacttttgtgtagagtgaaattaaggtacaaatcaataagttatttgaaattaatggaaacagatacaactcacctgaatctttgggatgcagctaaagcagtggtaagaggaaagtttatagtgctaaatgcttacatcaagttagagctcagatta

SEQ ID NO: 928653 - DNA, 737 bp, Homo sapiens
attcttatacaagattgatggcactatatatatatatatatatatatatatatatatatatatgtatgtctgtatgtgctgcacacgtatggatatatatgtgtatatatatatgtatctgtatatatctatatatctatcgtgagatatctgtatgtcagtatatatctgcatttccatctgaggtaccgggttcatctcactagggagtgccagacagtgggcgcaggccagtgtgtgckcgcaccgtgcgcgaccgaagcaggggaggattgcctcacctgggaagcgcaaggggtcagggagttccctttccgagtcaaagaaaggggtgacggacgcacctggaaaatcgggtcactcccacccgaatattgcacttttcagaccggcttaaaaaacggcgcaccacgagactatatcccacacctggctcagagggtcctacacccacggaatctcgctgattgctagcacagcagtctgagatcaaactgcaaggcggcaacgaggctgggggaggggcgcccgccattgcccaggcttgcttaggtaaacaaagcagccgggaagctcgaactgggtggagcccaccatagctcaaggaggcctgcctgcctctgtaggctccacctctgggggcagggcacagacaaacaaaaagacagcagtaacctctgcagacttaagtgtcctgtctgacagctttgaagagagcagtggttctcccagcacgc

SEQ ID NO: 928654 - DNA, 594 bp, Homo sapiens
ctgaattctaccagatgcacaaagaagagctggtactatttctactgaaattattccaaaaatttgaaaaggagggattcctccctaactcattctatgaggccagcatcatcctgataccaaaacctgacatagacacacatacacaaaaggaaactttaggcyaatatccttgatgacccatagattcaaaaatcctcaacaaaatactagcaaacagaatccagcagcacatcaaaaacctaatccacaatgatcaaagtaggctttatccctgggattcatggttggttcaacatgtacacatcaataaatgtgattcatcacataaccaaaccaaagaccaaaacacatgattatcgcaatcgatgcagaaaaggctttcaataaaattcaacattgcttcatgttaaaaaccctcaataaactaagccttaaaggaacatacctcaaaataataagagctatctatgacaaacccgtagccaacattatactaaatgggcaaaagctgaaggcattccccttgaaaaccagcagaagaaaatgatgcccactcttaccactcctattgaacatagaattggaagttct

SEQ ID NO: 928655 - DNA, 769 bp, Homo sapiens
acgtggcagagttcaataagcctgtggtagaattctcgacttgtacccacatcctaaacatcactggtgagtcaggcaatggcaattactcagccctcacataccctgggctaatgtctggtggtattgtgggaaaaggaacctccataacctgttaccctccaattggactgggacttgtgctatagtccaattggccattcccttcaccttggcattccataagataccacaaaatacacatggccaccaaaascagagagatttgacaaattcttttaatctcaatatatgtgttgactcaataggagtccgtagtgcggtgcctagtgaatttaaggcccaaaaccaaatagtggctgagtttaagtgaacactcttctggtggtcaactattaataagaatgtgaattggattaactacatctattataatcaacagagattcatcagttatactcgggacaccctcaaaggggtggttagcctattaaatgccaccagccaaatggcctgggaaaacaggctttcactagacataatcccagcagaaaaagggggtatatgtgttatgctgggtaggaaatgtactttcattcccagcaatactgccccagatgggaccatcacaaaaactttacgaggactgacaactctagccaacaaactggcacaaaatgcttgcattaataacacatttatgggttggctaaaaggttggtttgaaaaataaaaaggcttcaatttttacatctctcataattgtagc

SEQ ID NO: 928656 - DNA, 760 bp, Homo sapiens
ccctaccttttcttgtctactgcccccacacccccatctaggctctctctagactgcctctcctctcgccccaccccacctgcaccaattcctcctgctgggtccagttctctcacccccgcaatcgtaggactttcgacaagcgtgaacctcctttttgcagttcttgcaccagatcagagtttgcaacatcacacctggaggggcagggtcaaggcttgtatttgcccactaaggggcatggctaaaaggagaggtcagggctaagggctggggccagrtcatctatgacattcctagatggtcagacgaaggcacaggaccaggacgcaggtaagtagtaagtgggctccaacaaggctcagtaaagattgtaagtagaggccggatgcggtggcttactcctgtaatcccagcactttgggaggccgaggcgggcggatcacaaggtcaggagttcaagactagcctgaccaacatggtgaaaccccgtctctgctaaaaatacaaaaattagctgggtgtgatggcgggcacctgtaatcccagctactcagggggctgaggcaggagaatagtttgaacctgggaggtggaggttgcagtgagccgtgatcgtgccactgcactccagcctgggtgacagggtgagactgtctcaaaaaaaagagtgtaagtagaatatgacctgctccccaagaaatccatggtgcagaaagaatactggagacccaggaacctctccaaggcagagaatgac

SEQ ID NO: 928657 - DNA, 594 bp, Homo sapiens
taagcaagggtgagggaaaggctttgatgtgtgttcttctccttcgttttttttttagatagagtcttgctctgttgcccaggctggagtgcagtggtgcaatctcagctcactgcaacctccatctcccaggttccagcaattctcctgcctcagcctcacgaggaattgggattacaggtgctcaccaccatgcccagctaattttttgtgtatttttagtagagacggggtctcaccatattggacaggctggtcttgaactcctgatgagtgatccacccgccttggcatcccaaagtgctgggattacaggtgtgagccaccgtgaccaacccttctccttccttttttttttctttttttttttttgagacggagtctcgctctattgcccaggctggagtgcagtgrtgcaatctcggctcactgcaacctccgcctcccgggttcacgccattctcctgcctcagcctcccaagtagctgggactacaggagcccgccaccgcgcccagctaattttttgtatttttagtagagacggggtttcaccgcgttagccaagatggtctcgatctcctgacctcgtgat

SEQ ID NO: 928658 - DNA, 636 bp, Homo sapiens
tagatggtgcccaccagattaagggtgcgtctgccttccccatcgcactgactcaaatgttaatctcctttggcaacaccctcacagacacaccgaggatcaatactttgcatctttcaatctaatcaagttgacactcagtattaaccatcacaagtccaccccttgtctacttgagcccatacacacctcctgagatcagacataatcttcaaataaagacaatagtaaggtcgtaattacagctaacataatacaactatccttcctgcaaccggaaacgcaccaatccccaacccaaatactattacataaagttaacaatgcttaaatcctgatatgaagtcagtaaatcctatgtcacatgataaaggaaaaggaaataaaattaagatattagtacaagtgtatacctgcacaaacatgtttttaacaaaaggaggaagtactcatgacagttacagtccgcttttctgccactgtcacgtggtcatagcyggtattgatgactaccttcttctgctacccattctgtattcccttcaccttcagcacgcacctcagcaggtcgtgtttttcttcctggttgagtgacccaaagcattcctgaggggtctggatcatttgtagtcctgt

SEQ ID NO: 928659 - DNA, 691 bp, Homo sapiens
tcttctgctacccattctgtattcccttcaccttcagcacgcacctcagcaggtcgtgtttttcttcctggttgagtgacccaaagcattcctgaggggtctggatcatttgtagtcctgtctggtttgggctgttgtagtttcccattgaccttaatcacagggcatagtaacactaagagacgccctaatggatctcgtgtattccatgaatactcttccttacctctattgtggaatagtagactgatttcatcttgatagtccgggtcagtcaccccagccaacactgtaactcccttcttagcctgttggcttaaaggtaggaggagcccaaagtgtccaggtggcaatcttaatttccagtttaatagaatcattgtattcctagtggcagtgttcctccctctggaactaagacctctaggccagcagaacgtaatgttgtgrgaacaggaagcaaaaattttgctagtggatcactaggagtgatggtgagtggtgccacttccacttctaccccttgattcctggacttgtgaatcctggctatgggagaaacagtactatatattggatactgattaagagcatacacggccttctggagaactttgccgcagccctgcaaagtattgtcacctaattggcattgtaattgtaacttcaaaaggccatttcaccattctgt

SEQ ID NO: 928660 - DNA, 801 bp, Homo sapiens
gaggacccaggtgagaggcggaccttgtccccgcccggggactccctgtcacggctatcccgtccaaccccgccggggtatccggactcagaactgaacctactccgtctgggagcccaaggacggcgagggcggcgcatggctcccccaagtcgcccccgcctggccccaagctccacaggacctgccagaccagcttccgctcggagtttcgcacccagatccctgcgctgcaggtgccctcgcactggactagcccggaccgcgaagggaatagccggaacccgccaggctcagagccctgccgcccctcactcacccggagcctcggccgcagcgacccggctcacaacatccgcccaacctcttggctacggcgtccgttcagggccaaatcacgcgcacgcttgcgcgctgagcctccagccgcgcacgcgcactggcccgcgcccagcctccgctaggggaccccctccatggcttcccaccgggttgttccaggcctcagcttcgccgaaaggcctcaccacctccgacctccgcctgcyctggggatgctcccagccctgctgcggcagaacgcgacatgctaaccggaatccctaggccgcctgtctcctacccatacttagaggccccgctcagacggtccttaaaacgtctgaaaggccgttcctgccagagtccctgctacctgttacctccacccctatttagtcctagtggacagcctcgctcaccttccctgggatgacacttctggcggctgagatgagcgagcctctctgggctctgccgccg

SEQ ID NO: 928661 - DNA, 655 bp, Homo sapiens
ggaagggtgagggctaccggggcacagccaataccaccacctgcgggcgtaccttgccagcgttgggacgcgcaaatcccgcatcagcaccgatttacgccagaaaaatacgcgtgcaagtgaggtggggggggggggcgggcgttgggacgtgctgctgcgggtgagacgggaggarggtagtcacgggctcaaggctggaggctggcgggctagggctgagtggagcgcctgcttagagaccttcgggagaacttctgccggaaccccgacggctcagaggcgccctggtgcttcacactgcggcccggcatgcgcgcggccttttgctaccagatccggcgttgtacagacgacgtgcggccccagggtgaggcccaagcttgggggctacagagccgggctggaagcctggaaccggagggccggggcgaggtctcggcctgatggctgcccgcacccgccacagactgctaccacggcgcaggggagcagtaccgcggcacggtcagcaagacccgcaagggtgtccagtgccagcgctggtccgctgagacgccgcacaagccgcagtgagtccctggtgctcccggccccgccagggccctaaccctggggcggcatgctttggtgtctgggaccagagcctggaaat

SEQ ID NO: 928662 - DNA, 655 bp, Homo sapiens
ggaagggtgagggctaccggggcacagccaataccaccacctgcgggcgtaccttgccagcgttgggacgcgcaaatcccgcatcagcaccgatttacgccagaaaaatacgcgtgcaagtgaggtggggggggggggcgggcgttgggacgtgctgctgcgggtgagacgggaggaaggtagtcacgggctcaaggctggaggctggcgggctagggctgagtggagcgcctgcttagagaccttcgggagaacttctgccggaaccccgacggctcagaggcgccctggtgcttcacactgcggcccggcatgcgcgcggscttttgctaccagatccggcgttgtacagacgacgtgcggccccagggtgaggcccaagcttgggggctacagagccgggctggaagcctggaaccggagggccggggcgaggtctcggcctgatggctgcccgcacccgccacagactgctaccacggcgcaggggagcagtaccgcggcacggtcagcaagacccgcaagggtgtccagtgccagcgctggtccgctgagacgccgcacaagccgcagtgagtccctggtgctcccggccccgccagggccctaaccctggggcggcatgctttggtgtctgggaccagagcctggaaat

SEQ ID NO: 928663 - DNA, 572 bp, Homo sapiens
gccctggtgcttcacactgcggcccggcatgcgcgcggccttttgctaccagatccggcgttgtacagacgacgtgcggccccagggtgaggcccaagcttgggggctacagagccgggctggaagcctggaaccggagggccggggcgaggtctcggcctgatggctgcccgcacccgccacagactgctaccacggcgcaggggagcagtaccgcggcacggtcagcaagacccgcaagggtgtccagtgccagcgctggtccgctgagacgccgcacaagcygcagtgagtccctggtgctcccggccccgccagggccctaaccctggggcggcatgctttggtgtctgggaccagagcctggaaatggttgagactaccctgccacgattttgctcccgcttccgcctaggttcacgtttacctccgaaccgcatgcacaactggaggagaacttctgccggaacccagatggggatagccatgggccctggtgctacacgatggacccaaggaccccattcgactactgtgccctgcgacgctgcggtgagcactagtgacgcttc

SEQ ID NO: 928664 - DNA, 541 bp, Homo sapiens
tggatcgggtggggacttggagaacttttgcgtctagctaaaggatataaaaacacaccaatcagcactctgtaaaaatgcaccaatcagtgctctgtgtctagctaaaggattgtaaatacaccaatcagcactctgtaaaaataaaccaatcagcgctctgtgtctagctaaaggattgtaaacgcaccaatcaaccctctgtaaaatggaccaatcagcactctgtaaaatggaccaatcagctctctgtaaaatggaccaatcagcaggacgtgggtggggccaaataggggactaaaagctggccaccagagccagcagcggcaaccygcttgggtccccttccgcactatggaagctttgttctttcgctctttgtaataaatcttgctgctgctcactctttgggtccgcactacctttatgagctgcaacactcactgcgagggtctgcagcttcattcctgaagtcagtgagaccaccaacccacagggaggaacaaacagctcctgacgctccacctttatgagctgtaac

SEQ ID NO: 928665 - DNA, 867 bp, Homo sapiens
ttgctgtattcctaggtattttattctctttgtggtaattgtgaatgacagtttatttattatttggctctgtgcttgtctattgttgatgtataggaatgcctgtgatttttgcactgattttctatcctgagactttgctgaagttgcttatcagcttaagaagcttttgggctgagactatggggttttctagatataagttcatatcatctgcaaatagggatagtttgacttcctatctttctatttgggtgcctttatttttttttcttgcctgattgcacgggccaggactttcaatgctatgttaaataggaaggttaagatagcgtatccttctcctgcaccagttttcaaggggaatgtccagcttttgttcatttagtatgatgttggctgtgggtttatcatagatggctctcattatttggagatatgtttcttcaataactagttcattgagagtttttatatgaaaaggatgttaaatattattgaaagctttgatctgcatctattgagtaatcaggtgattttgtctttagttctgtttatgcactgaatcacatttatcaatttgcatatgttggaccaaccttacatctyagaaataaagtctacttgattgaggtagataagctttttgatgtgctcctgaattcagtttgccggtattttgttagggatttttgcattgaagtgtataaaggatattggcctaaaattttcttgttctgttgtatctctgccaggttttggcattaggatgacgctggactcatagaatgagctagagtacctcctcctcaatttgttgaaatagtttaagcaggaatggtaccaattcttatttgtacatctggt

SEQ ID NO: 928666 - DNA, 756 bp, Homo sapiens
cttttttcattacaggtttgttctaaagaattaagtccaggatccagactaggtgaggtgaggacagcgaagtgcctagagcacacaatatcaggaggcactcactgtcaggccaaacgagttgtacaacccttctaggaggaagaaaacaggtgcctcctaaaattttatggcttagctgtttccctcttcttaccctagtctggtccctccttgcccagataaatcacatgcacttgaatttctgctttagcctctattcgtcagcaacccaacctaaggcaagtggcagtataatggattgttacctattgattgttttaaggactaaatgagttaaggtatgggaaacagcaatgattgaaacagtaatggggaatgaacaaatacatgtatagatagaaatggtgatgagacagatcactcctgtgcctttgtatgtactcttctccctaccttcagtgcatgctckgtttctattggcttatctaaatgccattgtccccctcctccctccaaaaccctattttgtctataaaactcttactggctacagcattctaaatgacattaatttactctacataattctccaatccctgactccgtttttttttttttaaccaaataatttttttccttccattgtgtttatgtcctataaatcatcatctgtataacttacttgaatagattgacaaatgtggtaaaatcaatataacgatattgcaaaaatgatccttagaagtgtgaaaa

SEQ ID NO: 928667 - DNA, 756 bp, Homo sapiens
cttttttcattacaggtttgttctaaagaattaagtccaggatccagactaggtgaggtgaggacagcgaagtgcctagagcacacaatatcaggaggcactcactgtcaggccaaacgagttgtacaacccttctaggaggaagaaaacaggtgcctcctaaaattttatggcttagctgtttccctcttcttaccctagtctggtccctccttgcccagataaatcacatgcacttgaatttctgctttagcctctattcgtcagcaacccaacctaaggcaagtggcagtataatggattgttacctattgattgttttaaggactaaatgagttaaggtatgggaaacagcaatgattgaaacagtaatggggaatgaacaaatacatgtatagatagaaatggtgatgagacagatcactcctgtgcctttgtatgtactcttctccctaccttcagtgcatgctctgtttctattggcttakctaaatgccattgtccccctcctccctccaaaaccctattttgtctataaaactcttactggctacagcattctaaatgacattaatttactctacataattctccaatccctgactccgtttttttttttttaaccaaataatttttttccttccattgtgtttatgtcctataaatcatcatctgtataacttacttgaatagattgacaaatgtggtaaaatcaatataacgatattgcaaaaatgatccttagaagtgtgaaaa

SEQ ID NO: 928668 - DNA, 613 bp, Homo sapiens
aaagcactcaataaacacagaatagaaggaaactacctcaatacaataaaagttgtatatgaaaaatttatggcaaacaacaaacttttcctctaagatcaggaactaggcaaggatgcctatttcactacttctattaaacataatactgaatctcttagccagagaaagtgggcaagagaaagaaataaaagcaattcaaactggaaargcagaagtaaaattatctctgttaacaggtaatataatcttatatgtataaaaccttaagattccacaagaaacttgtaaaaactaataaacatatttataaaagtagcagaatgtaaaggcaacaaaggaaaatcatatgcatttctatatactaacaaggaacagtatgaaaaaacttaaaaaacaattctaaatataatagcattgaaaaaatgttaggaattattattagtccattctcacaatgctataaataactgcctgagactgagtaatttacaaacaaaaaaggtttaattgagtcacagttccccatggcttgagaagcctcaggaaacttacaataatggcagaaggcaaaaaaaaaaaaaaaaaagtaaggcatgtcttctcatctcat

SEQ ID NO: 928669 - DNA, 619 bp, Homo sapiens
attcctattggtaaaaataattttagcatataccctttatatatgtttgtttatgaactatctcatagctcaaggaccgttagagtgatcatctcctcaatgctagtgggtgcaaacccatatttttattttttagagacaggatctctttctgtcacccatgctggactgcagtgacactatcatagctcactgcaacctcaaactctaaggctcaagccatcctcttacatcagcctcccaagtagctgggactacaggtgtgtgctgccatgcctggtaagyttttatttttagtagagacagagtctcactgttgcctagggtggtcttaaactgggctcaggcagtcctcccacctcggcctcccaaagtgttgggattacaggcttgagccactgcacctggcctacctatatatgtatacacacacacacatacacacacacacacacacacacacattatttttttcctgagacggagtctcactctgtctcccaggctagagtgcagtcgcgcagtctcagttcactgcaacctccacctcccgagttcaagtgattttcctgcctcagcctcctgagtagctgggattataggcacacactaccatgct

SEQ ID NO: 928670 - DNA, 631 bp, Homo sapiens
atgtaacagtgattctctaagttctcccccaaaggaacttatagccatttactcaggcaaacttacatgaaggaaaggggagtacactgttggatatggggcaccagttaatgctaactcaggcacctaaaacactattatggtccctctgttaaagcagagatatatatgtgtcaagtagcaattaggtttctagctcatgtctacctcacagacagccctaggattcatcttgtgatcatttcctcacttttcaaataaatagttgtaatggatatactaagcattggtagagtcctcactctgatgctttgataaataaaataagagttattatagtaaggtacagcaagtggaagcctctgagactacctttctactccaccaacataattaatcaaaaacaacattgcaattcagaagaatggcagagattagtaycaacttcaaggatttaaaagatacagggattgcatttcccatatcaccatttaattcacccatttggttttgagaaaagtagatattttgtgacaaatgacagtggactaccataaacctaaccaaatagtaacttcaaacacagcctcaggtacatgatatctagctactgatatggcaaatgcatttt

SEQ ID NO: 928671 - DNA, 734 bp, Homo sapiens
tatgttgctgctttgttttttgtttgtttttgtgacagagtattgctctgtcacctaggctgctatgcagtggccccatgccctgctcactgtagccttgacctcctgagctcaagtgatcttttctcttcagcctcctgggtagctgcaactacaggtgtgagccaccacacccagctaatttttgaaatatttttagagatggggtctccctgtgtttcccttgaactccctatgttggtcttgaactcctgggctcaaacaattctctctccttagcctcccaaagtgctgggattagaggggggagccactgtgccaggccacatctcaatgttttaagtgagacacatggtgcaggggaaaaaaaaatccctgtctctctcccctaatttttttttttttttttttttgagatggtgtctcactctgtcgctcaggctgacaccatctgggctcactgcaacctctgcctcctgggcccaagtgatcctcccgcctcctacatcagcctcccgagtagctggtactacaggtgcacaccaccacacctagctatatatatatacatatatatatatayacacacacacacacacacacacacacacatatttttgtatttttagtagaaacggaaacaggggtctcaccatgttgccaaggcttgtcttgaactcttgagttgaagagatccacccgccttggcctccccaactgctgcaattataggc

SEQ ID NO: 928672 - DNA, 584 bp, Homo sapiens
ttctagaaggcaattgcgtaaagaaaagagtagagagagaactatcctagattaaaaagatagataggccaggggtggtggctaacgcctgtaatcccagcacttcaggaggccgaggtgggcggatcacctgaggtcaggagatcaacaacaacagcaacaacaacaacaaccagaaacagaaaaaaaaaaaaaactctcccaagaaatggaaactctaccagcctggccaatatggtgaaaccccatctctactaaaaatacaaaagtttggctgggcacggtggctcactcytgtaatcccagcactttgggaggtggaggcgggcagatcgcaaggtcaggaggtggagaccatcctggctaacatggtgaaaccctgtctctactaaaaatacaaaaaattagccatgcatggtagcacacacctgtagtcccagctactcaggagactgagacaggagaatcacttgaacccaggagtcagaggttgcagtgagccaagatcgtgccactgcactccagtctgggtgacagagtgagactccgtcacacacaaaaaaataacagatagatatatcgca

SEQ ID NO: 928673 - DNA, 689 bp, Homo sapiens
agactcacgtctccaacaaccaagctcaccggctggataaaaaatgaaaaggatccagtccaccttcagaaagaaaaaatggcccttcctgtactaagggacaatgtaaccccttagagctagtaattaccagtccccttgatccttgctggaagaaaggggagcatgtgtgaccttaggaatcgatggggctggactgaatccttgagtaaatatcttggtttgagaagaagtttacaaatgctctcctgaaccggtgtttcagactttctatgatgaactaaatgtgccagtaccagaaattccaggaaaaacaagaaatttgtttttgcaattagccgagcatgtagcccagtctctcaacatcacttcttgctgtgtatgtgraggaactgtaatgggagatcaatggccacgggaagcctgagaattagtacctacagactcagttcctgatgaattcctggctcaaaagaatcaccctgataatttctaggtcctaaaagcctcaattattggacaatattgcatagctagagaaggaaagtaattcactcaccccgtaggatgacttagttgtctgggacagaaactgtataatggtaccacaaaaacagtcacttggtggagttcaaatcacacagagaggaatccatttagtaaattcccaaagttgcaaaccatgggga

SEQ ID NO: 928674 - DNA, 659 bp, Homo sapiens
gcccgagccacaagacaaagtcatcctcactcttttctatcctttactcaagcaggaggagtctctccccattgccactactgcctcagacccacagcaagtactgcctggctaccattgatgttcatttaagggccaagccattttcagtcagtttgttgtagatgctgccacacctggatatctcccttaagtgtagtgggttccccacttgcccacagctaagtctagagatgctgtccaggagccacaaattggtggtgatctcaggagcacactttgttctccaactcactgtggctgagctggttctcaagctgcaagacaaagtccccttactcttccctttctttttctcgggcagaaagcatctctccttgtgtccaccacagyttgtaatattctggataacacctaaagccagcatcacactggattggatccaagggtcatggctactaatacctggctactattggtattcaaggctcaagggttatttaggcagcaggtgatgtatcctgccagacctgggtccttctcttcaaggcagcaagttctcttctggcccagggtaggtttacgaatgtcagccaggagctaggggtggaaggagtctcaggaccctacctagtgccttattctactgtggctgagct

SEQ ID NO: 928675 - DNA, 791 bp, Homo sapiens
gagcacgatggaatgaattttgtttgttgtaagggcaaagaagcaggctaaagaggatgtggtgaaagattctacttcctgtctattcaaaggatgtgaatagacagtttacataacagaaaattcagtaggctcacatatggtaaatcatacagctttgtttgcaaataacaaaatacacattaaaaaagttatagcgtctttgaaaacctattaaactcacaaaaataaacagaaccccaaaattcaattatttcttgtgagcaatgtgtccagrttgtatgctatggtgaaaagaatgctgcatttggaatgcgaagacttaaatgtaacacaaactgtgagcaagttatttacttttctgaagctcaattattttctcatctataaagggtggataataatatctatcaaccttatgaagtttataacagattcatataggtgaatggaagaaattttcaaatggcaaagcactgtataaatatgtttttgtgtttttaatcaacaaattaataagagaagtgacaaattttagttacttatccttttcagaagcatgtggaatacaatttatgaatgcactaattgtgtttagcaatttcccttttagacactgatgatgaactagctaaataaaccgtctcaaaatgtgggaattactttttaaaaattacaatgttgtgggctctatcagtacactgacattaaactcagatttcactgagtttattttgttgggtgatttcatcaatgttaacataatttaatccacaaaataatcataagtg

SEQ ID NO: 928676 - DNA, 595 bp, Homo sapiens; identical to SEQ ID NO: 927444

SEQ ID NO: 928677 - DNA, 686 bp, Homo sapiens
atttgaaatatgcacatatagcccttcatataatggtatggataaaatacgtgctaaataaatattagcaaataccattacaaacccatacatccagagtcttgtgatccaattaactttggaaatattggggtagattaattttagaaggctttaaaaatatttttcaggaccttttaaatgtgaatgtgcattgtgaatctgtgagaaggtggaagtgtgtagcatttctcaaaatgagttgaacacaatacttatttctcagagcataccaaaagaactagggtgccatggaagctactttaataaatactattgctttctctaggagtttgctataaaattttatcaaagtggccattttgacatagcaattttgatatgatcattttaataaaaaatataaggcttgacataattkcataaaaatgacttttgttttaattacaatgtaatgtgcacagaccatattcctgatcctcccccattacaatagccaccttctactttattaatttccatgtaattttgaaattttttagtctgtattagttttataccccagaaaaatatgttgtctagttttatttaggttatgttatctcagttatcttaaaaccatcatttaaaggttcacttatggcattgtatttttctgaaacagctaaggaaaacatttaattgaa

SEQ ID NO: 928678 - DNA, 686 bp, Homo sapiens
atttgaaatatgcacatatagcccttcatataatggtatggataaaatacgtgctaaataaatattagcaaataccattacaaacccatacatccagagtcttgtgatccaattaactttggaaatattggggtagattaattttagaaggctttaaaaatatttttcaggaccttttaaatgtgaatgtgcattgtgaatctgtgagaaggtggaagtgtgtagcatttctcaaaatgagttgaacacaatacttatttctcagagcataccaaaagaactagggtgccatggaagctactttaataaatactattgctttctctaggagtttgctataaaattttatcaaagtggccattttgacatagcaattttgatatgatcattttaataaaaaatataaggcttgacataattgcataaaaatgacttttgttttaatkacaatgtaatgtgcacagaccatattcctgatcctcccccattacaatagccaccttctactttattaatttccatgtaattttgaaattttttagtctgtattagttttataccccagaaaaatatgttgtctagttttatttaggttatgttatctcagttatcttaaaaccatcatttaaaggttcacttatggcattgtatttttctgaaacagctaaggaaaacatttaattgaa

SEQ ID NO: 928679 - DNA, 623 bp, Homo sapiens
tgaggaatttgaggggatccagttagacataaagcaaagggtacaatcatggtgaaaataaggggaccaggggacactgtaagtaacccaaggggatttttaaaatagcaatttatagcccctagcatatgaaagatgctcaataaatatcaaaggaatggatgccagcgtgtggggtgagagacaattctgccaaragacaaaggaatgacagcaaacctcttcattcctggaaacataccctcataggaaacaagagtgggaaaggaggcatggccatggcaaggcttagcattacagctgcgtggcaggggagggaggtgcagagtggtggttcccagactgcaattcaaagcacatcatgggcctccaggccacaccctgagagcaggtggcccagagctatctcctcatccatttctgagcttaatctctcagacacgccttgttctgagcttgtctagtcttagaacataaagcccaaaccccaaacaaattggacaatgggccaacccatgccctccacatcctggcctcaaccttgctctctagcgtcctctcccaccactccctgccctgtcttgagtgatgctaagctgcttttggtttggtactgcactgag

SEQ ID NO: 928680 - DNA, 580 bp, Homo sapiens
cgctttttgattatgtgaatcctcctccctgcacgtctcctcaatcttactgatttggcccagccatactgcggttttattgacagacaagattcattatcccaaagcatcaggtttgtgttggtttggtggcttgtagaacaaggtttacttcttgttgaagtgaatttggtggttttgtttttggtgtgaaaaatgtgacaggcttttttttttttttttttttttktttttttttttgagacagagtctggctgggttgcccaggctggagtgcagtggcacaatctcggcttactgcaacctctgcctcctggattcaagcaattctctgcccatccttttctttccattcatttattgaaagttggattgagtgccagccactgtctattgtctctaaaaatgttaaaattcccctacatcatgtcgatcctatgttagtctacacagtatgtttagcccctctgagctcataagaaatgagctggtaaaatgagagcacgagctcctgggtatagagagaaaggagactaaaacgtctgtgaaaatgaaacatttaattaagctgactgatttt

SEQ ID NO: 928681 - DNA, 738 bp, Homo sapiens
ctagcgtcagggaacagaggtatgggcatggacgttttcgtaaaggagtttaacatgaagaatactgtatatgctgttgccaagacttggaacatagtgactaaagacagttttgcatgcctggtacaacctgttgtctatggctgtgttcagtgatgatgatgaacaaattggtactttgaaggattcccatatgtcaagtgtgaaaaaaatgattttggacctcctctcatatgcagaaaatatgcattcagagtctatcagtatattaggctgttcatgcattgcaataaagaaacatctgagactatgtaatttataaagaaaagaggcttaattggcgcatggctctgcaggctgtacaggaagcagggtgctggcatctgcttggcttctggggggctctcagggagyctttattgatggtggaaggcaaagggggagcaggcatctcacacggagaaaatgggatcgagagagagataattaggaggaggtgccagacactttttaatgaccagatctcatgtgaactgagaatgagagctcacttatcgctaaggggatggcccaagccattcatgagggatctgcccccatgatccaaacacctccaacactagggattacacctcaacatgatatagtttgacattcaaactatatcaatcagtaagctggtagaagtgcatatcaatgaagtttttttaacattgaggctccatttgtgcattcatt

SEQ ID NO: 928682 - DNA, 552 bp, Homo sapiens
cacttgtaagtgagaacatgcagtatttggttttctgttcctgtgttacttttctaaggataatggcctccatctccatccatgttcctgcaaaggatataatctcattctttttatggctgcatagtattccatgatgtatatgtaccacattttctttttttttcccttcaacttttattttaagttcaagagtacatgtatgtacaagatgtgcaagtttgttacataggtaaatgtgtgccatggtagtttactgcacagatcatcacatcgcctaggtattaaggccagcatccattagctattcttcctgatgctctccctccctcaccacaccccctccgacaagccccastgtatgttgttgccccctcacatgtgtccatatgttctcatcattcagctcccacttataagtgagaacatgtagtgtttgggtttctgttcctgcattagtttgctgaggataatggcttccagctccattcatgtccctgcaaggaacatgatctcattcctttttatggctgcatagtattccatggtgta

SEQ ID NO: 928683 - DNA, 672 bp, Homo sapiens
aggtgctgagcccctcactgcctggggccagtggggccggccggctggctgctccgagtgcggggctgcagagcccacgcccacctggaacttgcgctggcacacaagtgccatgggggccagccccagttcccgcctgygcctctccctccacacctccctgcaagctgagggagctggctctggccttggccagtccagaaaggggctcccacagtgcagcggcaggctgaagggctcctcaagcacagccagagtgggaaccaaggccgaggaggctccgagagcgagcgagggctgtgagggttgccagcatgctgtcacctctcaccaccacacctggttaatttttgtatttttagtagggatggggtttcaccatattagccagtctggtctcgaactcctgacctcaggtgatctgcccacctcagcctcccaaaatgctgggattacaggcgtgagccactgcacctggcccacattgtgaaattcttgtattgtgttattcagctctgtcagaccaattaggttctttttcatactggctatttcatccttcagcacctgtattactttattgtaattcttattttccttggattgggttttgccatcttcctgaatcttgatgatctctttgttcctatccatattttgaattctatttct

SEQ ID NO: 928684 - DNA, 672 bp, Homo sapiens
aggtgctgagcccctcactgcctggggccagtggggccggccggctggctgctccgagtgcggggctgcagagcccacgcccacctggaacttgcgctggcacacaagtgccatgggggccagccccagttcccgcctgcgcctctccctccacacctcccygcaagctgagggagctggctctggccttggccagtccagaaaggggctcccacagtgcagcggcaggctgaagggctcctcaagcacagccagagtgggaaccaaggccgaggaggctccgagagcgagcgagggctgtgagggttgccagcatgctgtcacctctcaccaccacacctggttaatttttgtatttttagtagggatggggtttcaccatattagccagtctggtctcgaactcctgacctcaggtgatctgcccacctcagcctcccaaaatgctgggattacaggcgtgagccactgcacctggcccacattgtgaaattcttgtattgtgttattcagctctgtcagaccaattaggttctttttcatactggctatttcatccttcagcacctgtattactttattgtaattcttattttccttggattgggttttgccatcttcctgaatcttgatgatctctttgttcctatccatattttgaattctatttct

SEQ ID NO: 928685 - DNA, 769 bp, Homo sapiens
cttgggtgaccagctgcattgttgatgaccactaatatattcaagggaatgctttcgcttgagcatttaatcccactgtctcaacagtggaattaaaatattcagtaaaccattctgtaaactgatgtgctgtcatccaggctgtgttgttacatttatagagcacaggtacagcagatttagcataattcttgagggtcctaatgtgtctggaattggtgggttcttggtctcactgacttcaagaatgaagccacggaccctcgcggggagtgttacagttcttaaagatggtgtgtccggagtttgttccttctgatgttcagacgtgttcggagtttcttccttctggtgggttcgtggtctcgctggcttcaggagtgaagctgcagacctttgcagtaagtgttacagctcttaaggtggctcctctggagttgttcattcctgccgtggggagttgttcattcygcccagtgggttcctggtctcgctggcctcaggagtgaagctgcagaccttcgcggtgagtgttacagctcatagaggcagtgcggacccaaagagtgagcagcagcaagatttattgcaaagagtgaaagaacaaagcttccacagtgtggaaaggacccgagcgggttgccactgccggctggggcagcttgcttttattcccttatctggccccagccacatcctgctgattggtccattttatagagagctgattggtctgttttacagagagctgattggtctgttttgacag

SEQ ID NO: 928686 - DNA, 614 bp, Homo sapiens
gagtgtaggtagaaaacccatcctgcaggtgctggtacagagaaccattgtcccagtcaggcaaatcatccaaccattattgagtgatttataaccccaagatccaatcatttctccaaggcagatttttcctaagattgacttcttgggataatcagtcaactatgattgacccttggtagtttgtcaacgttctgtgaggttctatgggagagcccaagaagaaagctgtggtcctgtgcatgacagttgagcatccgtaattgctgagtaggcagcaaaactcatgcaaaagagcaaagaacagttctttgttgtggttgttgttgtttttgatatggagtcttgctctgtcacccaggttggmgtacagcggcgtgatctcagctcactgcaacctctgcctcccaggttcaagtgattctcctgcctcagcctcccgagtagctgggattacaggcacctaccacaatgcctggttaatttttgtatttttagtagagacggggtttcaccatgttggctagggtggtctcaaactcctgacctcaggtgatccacccgcctcaacctcccaaagtgctgggattacaggtgtaagccaccacacctgg

SEQ ID NO: 928687 - DNA, 574 bp, Homo sapiens
attgacactgtcttaatcgaagactccattcaacaatggcagaatacacagtcttcacatgtatatgagatatttacaaagatagatcatattctgggtcataagacaggtttcaataaattgaaaaagattcatgtcttacaaaagatgctctctgaccacaatggcattaatttcaaaatyaatatgtaaagttctaagagacgtgagagagaaaacttcagatatttgatgaaaggacattccaggcagagaacataggagcaaaagtttgagctaggagtgttcctggcatgctcacgcaggaacaagaaggagattatgctggaaaataaggagcaaaagcaggaaaagtagaaatgtcatctgagaggtaacaagagaggctcagatttgcaagtcttttggaaacaacacaagtgttgacatgctgattaagatggaaagctactataaggttttatgtagaagagttaggggatctaatgtgtttgtaaataatccctctggctatatgaagaaaaaagaaataaaaatgaatatagagtgggcaagagagtagcagaggagggga

SEQ ID NO: 928688 - DNA, 574 bp, Homo sapiens
attgacactgtcttaatcgaagactccattcaacaatggcagaatacacagtcttcacatgtatatgagatatttacaaagatagatcatattctgggtcataagacaggtttcaataaattgaaaaagattcatgtcttacaaaagatgctctctgaccacaatggcattaatttcaaaattaatatgtaaagttctaagagacgtgagagagaaaacttcagatatttgatgaaaggacattccaggcagagaacataggagcaaaagtttgagctaggagtgttcctggcatgctyacgcaggaacaagaaggagattatgctggaaaataaggagcaaaagcaggaaaagtagaaatgtcatctgagaggtaacaagagaggctcagatttgcaagtcttttggaaacaacacaagtgttgacatgctgattaagatggaaagctactataaggttttatgtagaagagttaggggatctaatgtgtttgtaaataatccctctggctatatgaagaaaaaagaaataaaaatgaatatagagtgggcaagagagtagcagaggagggga

SEQ ID NO: 928689 - DNA, 617 bp, Homo sapiens
ttacgtggaggttgctatgtgccaggaactattctgggcatttcattttagattcctgaaacaattatgatatagtgtggatatttgtcctcacacagatctcatgctagtgctggaggtgtttgaatcatgggggtggatccctcatgtcttgggctatcttcgtgatagtgagtgagttctcatgagatctggttgtttaaaggtgtgtggcacctccctgcccctcctctctctctcttgctcctgttttcacagtgggatgttcttgctccctctttgccttccgccatgattaaaagcttcctgagacctcatcagaagccaggtatattagtctgttttcacactgctgataaagacatacctgagtctgggtaatctacgaaagaaagaggtttaattcgactcacagttccacatggctggggaggcctcgtaatcatggcagaaggtgaaaggcacrcagcagacaagagagagaatgagaatcaagtgaaatgggttttcccttatcaaaccattggttctcgtgagatccaatctcccatactactaaaagaacagtatgggagtatccacccctatgattcaattatctcgcaccagtcccacaa

SEQ ID NO: 928690 - DNA, 610 bp, Homo sapiens
aggctctcactgaccaaagacaaaaatcgttgagcctcaatagggataagcactggccaggtgaaacacatgaaaatgcttaaatccttgagttcacaaggattctaagaagaagaaaatgctaactgatcacgattggaggatgctaaggagccaactatttttaaaagttggtaaataaagagaaaatcaaacatccctccatgcaagctgtatcgctggtcttcygcatggttgcagacaaaattttttctacagaaatatttcagttgattaatgaaggcagaatgatctaattcaaatatcaccttttctttcttttttttttttttttgagacagagtcttgctctgacgcccacgctggagtgcagtggggcgacctcggctcactgcaagctctgccccctggatttacgccattctcctgcctcagcctcctgagtagctgggactacaggtgaccgccaccacgcctggctaattttttgtatttttagtagagacggggtttcaccgtgttagccaggatggtctcgatctcctgacctcatgatctgcctgcctcggcctcccaaagtgctgagattacaggcgtaagccactgtgcc

SEQ ID NO: 928691 - DNA, 668 bp, Homo sapiens
ttccacttgtttcttctgttgtttctgtggggagagtcaaataaggtgatggagggtggccccctcaactctattccccagaccaggaagcggtaggcaggggccaggaatggattttaaaggcaaagttctcagacataatgggaacacgaactggtaaactctcctcaagctcccaaggacagaggatttgggtctttgtggcttttgcccacagccacagaactcaaagtctgaatctggaatctcttgagaggacagcaacataaacctctagagatggagtttcagaaaggcccctccttctggcagcttgtgatttagaaaagtgggttcattcaataaacacctactgagcaygtatgggccaggtacggttcttcacagcagatataggatagaaaaggacagacaggagcccttagccctgaggtttccattctcgggggcctttaaatctcagactcgagagctaacagagacctttgatactcactacctcctctggaaacacgagcccaaaaaggagaggtggcttgtccagaatcaaagagcaaattagggactgagtcatggcagaaatacggggcccttgacaaccagtcaggctagcacttccccaagaggcaacaaccccagggcgtgtgtagcaaggactcgagcagggg

SEQ ID NO: 928692 - DNA, 560 bp, Homo sapiens
ccacgtgtgttcagattgttatacacacttagttccttgagtgggtattattgcagtccccatttccttgctggccgtcagctgggaccagcctttcctcctagagactgtccctgttccttcttatgcttttttcatgggcctttccagcagcacgaacatttcaaatatctctgcctttccctcctgccccgtctctcagaaatcaactrcacatggtctcagcttttaagggctcatagtgattagattggactcatatacggtcctcattttaatattcataattctaactgcaaagtctcttttgtcaggtaatacagaatattcaggtctcaaggattaaagtgtgagcatctttgggggtttttattctgcttacaacatttacctagagtataaattcaagacataaggcagaatcttatgagaaaaagaaagtactattttgaacatacctgtggcaatcctaaatgggaattagattcagatttggcagttcttgataaaagtcaaggctgaagaaataatttggtagtcatcatgttatacattttgta

SEQ ID NO: 928693 - DNA, 609 bp, Homo sapiens
tttcatgaaatgtaaaatgattaagtcactaattcagtaaatcattgattttattaccgaatgatcgaatacataagggggattgagattttttcccatatcattctttaaaaattgcagtgtgagtgtgagcttatctcrtttatcattgccagcttgcattcacaagagatgggctctgtggtctgtggaatgaaatggttaaagatggagaaattgtatacactggaacagaatcaacccagaacggatagctccctcctggaaaaggtaagggcctttaactagtgttttttatttggtaaagaccattataaaatgcattttatagaaattttgtaatgtgctataggaacaggagctttgagcttaactctttgaagttttgctttttactttggagattgttgtctaaaatggtagttaatacaagctgcccggattttattgttttacgtgaattgaaggcatttttattgcaaaaccgtcttgctgcatttgtggtgttctttgggggtgtattaaacacttattggaagcctttggcctgcaaggaaatgccattgaacaatcttatttagcgttgtagttttgcatgctcaataggac

SEQ ID NO: 928694 - DNA, 524 bp, Homo sapiens
gaattgctgtggcccaggcagcctggccaaatctcttcacatcctgttccatttctttctgcattcctgttggattataaaaataaaatataattacacctcattaaaaagggaaacattgatcatgagctaattctttttttattgcctccatactacctgcagaacatcttttttaaaagaaattttgttttattaattttttattattataaaaataatacatggtcattaatatacgattttaggtattcaatttttaaaaggacaataataagtcatgatctcacctagttgaggcaagtgcttcttatattttggcacacttgcttccatattgtttctatgactagctagtcagacaggytcatatggatagtttgaccaaaaaaccaggatcatcattctgctttatatcttgttgattctgtgcaatatatcagaaactcctgccatttataaaaaaaaaatcaagaatcatgcttaatagctatgtagttttctcttttatgaatgtaccataa

SEQ ID NO: 928695 - DNA, 682 bp, Homo sapiens
tcacctcacctcctgcagctacacaattctgagggaggctatccctaaggagtaaattgcagtctgactaaatggataacagcacagagttatcctggagtcagacagttgcagttggacttctggctccaccacttctgagctgtgtgaccttcatcaggttactaaatgtctytgtgcttcaaaatcctctactgtagaatcaggataataatagtttctacttcataagattgctgtgaggccgggcgtggtgactcacacccataatcccagcactttgggaggccgaggcgagtggatcatatgaggtcagaagtttgagaccagcctggccaacatggtaaaaccccatctctactaaaaatacaaaaatttgctgggcatggtggtgcgcacctgtagtcccagctactcgggaagctgaggcaggagaattgcttgaacccaggaggcggaggttgcagtgagccaagttcatgccactgcactccagcctgggcgacagagcaagactctgtctcaaaaaataagaaaaatagattgctgtgaaaattaaattagctagtacatgcaaagtatggagacaccagcagcacccagtgcctctcccatgtgtctgctatcatcatcattcttagggaccaaagagtaacaaaatctgtgacacacaaaaaaagca

SEQ ID NO: 928696 - DNA, 627 bp, Homo sapiens
tggagtgagaaattatgtttccctcttccaaaatttactacaatgacaatgtaggaatttaaaaaaaactgcagagtaggagaagaaatgacagaacatgagaaatttttaatgcaattttagaaagcaggttgaggaacggggatggtcatagtttcagctttctttgttgtwttgactttttctggagcacgtaataagaaggaagctaaactctacctctggatcccaataatgctcagggatgagaagctcaggatttctgaaggcaagggagaagaggaatgaaagagaaaaatgatcctccaatggaggatcagtagaaatctttcacaatgagttgttaggccaccaggtatcttccctgatgcaatgaaacctggaaatgactttcaccccacctaacttagatgggatatttgctacatgaagaagttcaagcctggaatgaggtaccttaatgagaaggagctttaaaatacaaagggtgtgtgtgtgtgcgtacatacacatatgagtcccatcatccacaatgttatttgtctaggttaaagacagaagtttcatctaaaaaaaaaaaaaaaaacctgagcagcccctcccgcttaaaaaaggcttattaacaat

SEQ ID NO: 928697 - DNA, 627 bp, Homo sapiens
tttctggattggtcccatcagtgcattgttcctgaagtcaggaagtaccttgccagtaagggactgccttttaaaatctttttgatattagacaatgcatctggccacccaaaacctgtgagttcagcaccaaaggtgtcgaagtggtctacttgcacccaagcacaatgtctctaattcagtctctagattagggggctgagaacctttaagtcttgwtacattagatgctatgtagaaaagattattaatgctgtggaagagaaccttggaaagcaaggacatcatgaaagtctgcaaggattacaccgttgaaggcaccatcattattatagaaaaagccaggaacgttatcgagcctgaaacaataaattccttcttggagaaaactgtccagatgttgtgcatgacttaacaggttttacagcagagccactcaaggaaattgtgtatatggcaaaaaaggtggaggttgaagggtttcaagatgtggatcttggagaagctcaaaaactagtaaacaccacatcagaggagttaacagaacacaacttgatggagatgagtgcttaaccggtactggtgatgaggacaaagatatagaagtagtagtgccagaaaacaaat

SEQ ID NO: 928698 - DNA, 606 bp, Homo sapiens
caatgtctgtaccccattgtatctaggaagtaactgacttgcttttgattttacaggctcacaggcaaaagggacttgccttgtctcagatgagatgttggactgtggacttctgagttaatgctgaaatgagttaagactttgggggactgttgggaaggcatgactggttttgaaatgtgaggacatacgatttgggaggggccgggagcaaaatgatatggtttgactgtgtccccacccaaatctcaatcttgaattgtaactcccacaattttcatgtgtcatgggaggaacccagtgagaggkgattgaattatgggggtgggtctttcctgtgctgttctcatgatagtgaatgagtctcacttgagatctgattgtttttaaaatgttttttttgtaaaaccattgaaagtgcgtggagtttccctgcacaagccctctcttgcctgccatcatccatgtaagatgtgacttgcttctccttgccttccaccatgattgtgaggcttccccaaccatgtggaactgtaagtccattaaacctctttcttttgtaaattgccctgtcttgggtatgtctttagcagcagcgtgaaaatg

SEQ ID NO: 928699 - DNA, 599 bp, Homo sapiens
gtctcctggggaggcatcagtgggatatcatgcctatcctggggaccctagatggcatacactgccactagtgttagcaggtccagttgggtctattcttgggcctccaagtggcttacttggatgccagtagtgacaaccatgggctggacaggtagaagggttctcatgcccctgagcagctggtatgtttgagtgatggtagtggcagttgtaggactaacctctaagtcccaagtaatgcatgctggtgttggtggtggctgcaatgggctaggcacactagtytccaggcctgcaggcagcacatgctggtaggtgccagctgtggttgtagtggcttggtgggtaagctcaacttcaggcccttgggaggagggtttaggtgccagtggtggtagactaggctgggcaatcccctggcccttggactgtatgctctggcatggaggggagggtgaagctgggctaggctggctggtcctcagggccctgcagttctgtgtacaggtgttggccatggtaggcaggaatggggcaacctctaggccactggcagaatgccactgggtggtgttggtggagaggcaatgttttta

SEQ ID NO: 928700 - DNA, 645 bp, Homo sapiens
agtcatgtgccacataatgatgtttcagtcaacaatggaccatatatacactagtggccccataagataataattgagctgaaaaattattattgcctggtgatgtcttgatgatcctgaccttgtacaggccaggctaatgtgtatatttgcactttagtttttaatgaaaaggtttaaaagtaaaaaaaaattttaaataaaaaaagcttataaaataaagatataggaataggaacagctccggtctacagctcccagcctgagcgatgcagaagacgggtgatttctgcatttccctctgaggtaccgggttcatctcactagggagtgccagacagtgggcgcaggtcagtgggtgcgcgcaccgtgcgcgagccgaagcagggcgaggcattgcctcacccgggaagcgcagggttcagggagttccctttcctaatcaaagaaaggggtgacsgatggcacctggaaaatcgggtcactcccacccgaatactgcgcatttccgacgggcttaaaaaatggcgcaccacgagattatatcccgcacctggctcggagggtcctaccccatggagtctcgctgattgctagcacagcagtctgagatcaaactgcaaggcggcagcgaggctgggggag

SEQ ID NO: 928701 - DNA, 645 bp, Homo sapiens
agtcatgtgccacataatgatgtttcagtcaacaatggaccatatatacactagtggccccataagataataattgagctgaaaaattattattgcctggtgatgtcttgatgatcctgaccttgtacaggccaggctaatgtgtatatttgcactttagtttttaatgaaaaggtttaaaagtaaaaaaaaattttaaataaaaaaagcttataaaataaagatataggaataggaacagctccggtctacagctcccagcctgagcgatgcagaagacgggtgatttctgcatttccctctgaggtaccgggttcatctcactagggagtgccagacagtgggcgcaggtcagtgggtgcgcgcaccgtgcgcgagccgaagcagggcgaggcattgcctcacccgggaagcgcagggttcagggagttccctttcctaatcaaagaaaggggtgacggayggcacctggaaaatcgggtcactcccacccgaatactgcgcatttccgacgggcttaaaaaatggcgcaccacgagattatatcccgcacctggctcggagggtcctaccccatggagtctcgctgattgctagcacagcagtctgagatcaaactgcaaggcggcagcgaggctgggggag

SEQ ID NO: 928702 - DNA, 659 bp, Homo sapiens
atatatatttaggatagttagctcttcttgttgaattgatccctttaccattatgtaatggccttctttgtctcttttgatctttgttggtttaaagtctgttttatcagagactaggattgcaacccctgcctttttttgttttccatttgcttggtagatctttctccatccctttattttgagcgtatgtgtgtccctgcacgtgagatgggtttcctgaatacagcacactgatgggtcttgactctttatccaatttgccagtctgtgtcttttaattggagcattaggccatttacatttaaggttagtattgttatgtgtgaatttgatcctgtcattatgatgttagctagttattttgctcgttagttgatgtagtttcttcctagccttgatggtctttaygatttggcatgtttttgcagtggccggttgttcctttccatgtttagtgcttccttcaggagctcttatagggcaggcctggtggtgacaaaatctctcagcctttgcttgtctgtaaagtattttatttctccttcagttatgaagcttagtttggctggatatgaaattctgggttgaaaattcttttctttaagaatgttgaatattggtccccactctcttctggcttgtagagtttctgctga

SEQ ID NO: 928703 - DNA, 557 bp, Homo sapiens
aatgcgtattctactgctgttgagagaaatgttctgtgtatatcttagatctaaatggtttatattgttcaaattttctattttcttttttgtcttctgtctacttgttccatccattttcaaaagtgggatatttaagtctttgactatcactataaaactatttctccatttaattctgtcaccttttatttcatgtatgttatggttctactgttaggtgtgtacactacttatttaaaaaaacaaaaaatacataaaataaaaatataggtaatgtatttataattgttatatcaccttgatggaatkactcattcaaaatatataatgtccttcttagtttcttattataatttccgttttaaagcttattttgtctgatatagccatctctactctctttctgttactatttgcaggtaatggctttttccacctcacaactcaatcttcgtctttcaatctcatgcaagtttcttgtggacagaatatagctagatcatgtttttttaaaaatccattatgccggtacctgccttttaattgaagtgcaa

SEQ ID NO: 928704 - DNA, 721 bp, Homo sapiens
aacatggtgagaacagtgagttctatgagtatgagcccatttctgcatttctttgtctatgaagtgagttccttgatcagaagcagtgctctttctgtggaataccataacaatagataaggcattcacagatggtagtttcagcagaagcattgtgtgcaggcaaggcaaatccatatccagagtaactgtctattccagcaagcacacaatgctgccccttccatggtggaagcagttcaatgtaatcaacctgctaccagrgagctgactgattaccccaggaaatgatgctatattgaagactcagtattggtctctgctgttagactgagctctcagaggtggcaatagccaagttggccttagtgagtggaagtccactttgttgaacccatgctgatatggtttagctctctgtccccacccaaatctcaccttgaattgtaataatcctcacatgtcatgggagggacccagtgggaggtaattgaatcatggggatgggttttccccatgctgttctcatgatagtgaataagtctaacaagatctgatggttttataaaggggaattctcctgcacatgctccctcttgcctgctgccacgtaggacagatgtgcctttgcttctcctttgccttctgccatgattatgaggcctccccagccatgtagaaccatgagtccactaaacctcttttctttataaattacccg

SEQ ID NO: 928705 - DNA, 721 bp, Homo sapiens
aacatggtgagaacagtgagttctatgagtatgagcccatttctgcatttctttgtctatgaagtgagttccttgatcagaagcagtgctctttctgtggaataccataacaatagataaggcattcacagatggtagtttcagcagaagcattgtgtgcaggcaaggcaaatccatatccagagtaactgtctattccagcaagcacacaatgctgccccttccatggtggaagcagttcaatgtaatcaacctgctaccagggagctgactgattaccccaggaaatgatgctataytgaagactcagtattggtctctgctgttagactgagctctcagaggtggcaatagccaagttggccttagtgagtggaagtccactttgttgaacccatgctgatatggtttagctctctgtccccacccaaatctcaccttgaattgtaataatcctcacatgtcatgggagggacccagtgggaggtaattgaatcatggggatgggttttccccatgctgttctcatgatagtgaataagtctaacaagatctgatggttttataaaggggaattctcctgcacatgctccctcttgcctgctgccacgtaggacagatgtgcctttgcttctcctttgccttctgccatgattatgaggcctccccagccatgtagaaccatgagtccactaaacctcttttctttataaattacccg

SEQ ID NO: 928706 - DNA, 739 bp, Homo sapiens
tcacatgtcatgggagggacccagtgggaggtaattgaatcatggggatgggttttccccatgctgttctcatgatagtgaataagtctaacaagatctgatggttttataaaggggaattctcctgcacatgctccctcttgcctgctgccacgtaggacagatgtgcctttgcttctcctttgccttctgccatgattatgaggcctccccagccatgtagaaccatgagtccactaaacctcttttctttataaattacccggtctctggtatgtctctattagcagcatgagaacagactaatacacatgcataacctccatccctgccaccatggccactttgttcatgggcccactgtgttataacaggagtgactgaggaaagagattgactagtatgcacagaatggatcatcctattcacctgatgattaaagtcctctgctgagaaggtgarcattcacgtaggacacaaatatctccacatcttttgcccactcagatctagccctatatgttttccccaaattacttttcaccaattttccaatccccttcctttcaagtccctgaccatctggcaaaatcattagctacagcctgtgtgtcaatatataattgcacatatggccatttctactttcaaacaaagtgtacaatcaggtgaagtttctgcccattgagaagaattttcttcaccacttttcttcagagatgtcccagagaggggatgt

SEQ ID NO: 928707 - DNA, 644 bp, Homo sapiens
tcaagcctgtttccatactggttataggcttgagaatcctatggagcaagtctttctggatttgaatcccagctcttccattccagcttagccgtgtgacttaaattgagatagttgctgtaaagactggaaacaataatgcatgtgggagccttagaacagagccttagacagtgctcaataaatgttaaatcattaatagtaacatcatttcccagagcctttattaatctaagttgaggttcattgtgaattaccaacgggatagagtttgcagtttctcaaacttattggatgatggaacccactttttcatagaatatccctcgagaaaactggttaatgtctttaaaacaaacaaaactcttcgaaacaatagagaattccatcaccaaaataaaatgttgttttttgtttttttkgggttttttgagacagggtttccctctgttgcccaggttggagcgcagtggcacaatcacagctcactgcagcctcaacttcctgggctcaagagatcctcccacctcagcctctcaagtagctgggactacaggtgcatgccaccatacctgactaattttttgtattttttgtagaaacaaggttttgccatgttgcccaggctggtttcaaactcctgg

SEQ ID NO: 928708 - DNA, 590 bp, Homo sapiens
agagttggttcaacaacttggtaattaaaacaaatatcttgcatttccaacaaacttaacggcataaaacggaaggcaattactcatctctgatttaggcttaatatccagcatcccttaatttattctaatttaatattcaaaagaatatccttaaggtaatatccttgcacaactcgcaatgactgcaacacaccaaattaagaccagcatccatcaagtgtacagaagctgaaccccyggagcaaaaagtgaacctcagatctaaggaaatgcccgcagtcagcctgacgcaggcaaaatactcttgcgcattgagaagaaaccctcttgccattatccaaacttagctcattagcccccagatatgcaatcactgcctgagtgtaagcaaagcagacatattcacacatcggcacagattggtccccagtcacacaaacccaagggttccattagcaaccgatgtgcaggctagcatccctcctttctaggatctagaccacaggtatcctggccccggataaactctgtggcatgccttagagacatgcatgctctgtgcttgacagtccacctcgcctctacaa

SEQ ID NO: 928709 - DNA, 605 bp, Homo sapiens
tacaaatataagggaatcgctgaaagattaatattagatttctcagcagaaaccttacaggccaaaaaagaacgggataatgtattcatgttctgaaagaaaaagaaaagaacctgctagccaagaattctatacccatcaaggctatccattagaaataaaagataaataaagcctttctcaggcatgcaaacttgaggaaattcaaaatccctagactaaccctacaaaaatttttaagtgagttttacatctagaagaaaaaggataatatatactgtcatgaaaacatacaaaaatataatactcactaataaagctgttacacaaatgagaaagagaaaggaatcgaatctgataactatagaaatccatcaacccacaaaaataaattaaaagagagaaacaaaggctgtatgaaacaaccagamaacaattaacagaatgaaacatgtaactcttcaactatcaataaaaattttgaattcaaatggtttaaattcctccaattaaaaaatatagactggctgaattaataaaaatgaaataaaatacaacaagatgcaactgtatgctgcctataagaaattctcttcccaaaaaga

SEQ ID NO: 928710 - DNA, 640 bp, Homo sapiens
atatggaaacatagcatacacaaatttatgtgaatcaaataagcagttctaagatggaaattcataacattaaatgcctatgataaaaatgaagataactcaagtaaacaaccaaatactagaggtcatggaattaaaaagggaagaataaactaagcccaaagttagcgaaggaagaaaatacaaatcagagcacaaataaataaaataatgattagaaaacaatagaaaagatcaacaaaactaagagttggctttttgaaaaatctaaaaaaaaaaattgtcacgcctgtaatcccagcaatttgggaggtcaaggcaggcagatcacttgatgtcaggwgttggagaccagcctgaccaacatggtgaaaccctgtctctactaaaagtacaaaaattagctgggtgtggtggcatgtgcctgtagtcccagctacttgggaggctgaggcaggagaatcgcctgaaccagagaggtggaggctgcagtgagctgagatcacaccattgcactccagcctgggtgacaaagtgagactgtctctcaaaaaaaaaaaaaattgttaaacccttactagattaattaaggaaaaaacgagagtagacttcaaaaatacaatcagaagtaaaggaggaa

SEQ ID NO: 928711 - DNA, 611 bp, Homo sapiens
tatctgaattgattggttttaagatttgattttttaaagattttttaatctagagctttccccaattttttggaattcatttattaaaaaacaaacaaccagatcatttgtcctgtacagttttaccatctggatttcactgattgcaactccatggtgttatttaatttgttcctctgtcccttrtattgcttttgaattggtggtcaactccagagatttaatcacattctggttttatttttgagggatagaaaaagggaaggtgggctaagtgtggtggctcatggccataatcccagcactttgggaggctgaggtgggaggatcacatgaacctaggagtttgagaccagcctgagcaacagagtgagacctcatctctaccaaaaaaaaaaaaaaaaaaaaagccacgcgtggggccatgctcctgtggtctcagctacttgggagcctgaggtggcagtggcaggattacttgagcctggaaagtcgaagttacagtgagccatggttgtaccactgtactccagcctggacaacagaacaagaccctgtctaaaagaaaaagagacagagaaagggaaggtgggtcataattagtaacttca

SEQ ID NO: 928712 - DNA, 620 bp, Homo sapiens
tgagggtcctgactgttagaaggaaaagtaacaaacacaaaggacatccacaccaaaaccccatctgtacgtcaccatcattaaagaccaaaggtagataaaaccacaaagatggggaaaaaacagagcagaaaaactggaaactctaaatcagagtgcctctccttctctaaagsaatgcagctcctcaccagcaatggaacaaagctggatggagaatgactttgacgagttgagagaagacggcttcagatgatcaaacatctctgagctaaaggaggaagttcgaacccatggcaaagaagttaaaaaccttgaaaaaaacttagacgaatggctaactagaataaccaatgcagagaagtccttaaaggacctgagggagctgaaaaccatggcacaagaactacgtgatgaacgcacaagcctcagtagccgatttgatcaactggaagaaaggatatcagtgatggaagatcaaatgaatgaaatgaagtgagaagagaagtttagagaaaaaagaataaaaagaaatgaataaagcctccaagaaatatgggactatgtgaaaagaccaaatctacgtctgattggtgtacctgaaagtgatggggagaatg

SEQ ID NO: 928713 - DNA, 795 bp, Homo sapiens
tgccatgtgctggaggtgccagcataatgactaggccctttgttcctttccagtgtcagggctgtaagggctgagccactgcaactgtagtagcagaggggttgtgagttgactctatgatttcctccttgaagaaatgctgggctgtctttgattgtggtgatcaggcaagggttgggtcattgtgctggagtcccaggccaggcagccctgcccagtgaggatctggatctgcgtggagaacagtctggccacttttctgtgagctggttgctctttgctgggggtctggaccagcctctggtccctacagactctctggatcctggagacagcaagggcaagggctgcaagacagcaaggatagcaactccccttcccaagggagtcctgtccagggagttgcagaactgctactggctcaatagccctgacaaagggtggctggaggcccaggcctggaggacttgcccagtgaggagatgtgggaactagctccatgtaatagtytggccacttttccatagggctgctgcagtatgctgggtgtccgctccagtccctagtcacctcggactttctagtgcctgaaggtaacaatgagtggagggtgcgaaacagcagagatggtggcctgcctctccctctgagagctctgccccagggaggtatgaacctattgccagcccgaacacacctgtaggaggtagctggagaacccggtcaggaggtcccacccagtgaaaaggaatgggatcagagacctacttaaaaataacagtctggccatgtttt

SEQ ID NO: 928714 - DNA, 596 bp, Homo sapiens
tgtaccctccagagccacagaggcagagcttcccaaggtcttgggagtccacccctcgcatcagtgtgccctggatgtgagacatgaaatccaaggagatttgggagctttaagacataatgactgcctggctgagtttcagacttgcacggggcctctggctcctttgttttggccaatttctcccacttggaaagggaacatttaccctatgcctgtacccccattgtatcttggaagtaactaacttgcttttgattttacrggcccataggtggaaaggactctccttgtctcagatgagactttggacttagacttttgagttaatcctggcttgagttaagatcttgagggactgttgggaaggcatgattggttttcaaatgtgaaaaaaaaaatgagattttggaggggtcaagggcagaatgatatggtttggatccgtgtccactcaagtctcatctcaaattgtaatctccatgtgtcaatggaggaacctagtggtaggtgattggatgatgggagtggtttcccccttgccattcttatgatagtgaagaagttcttgtgagacctgatggttttaaaaatgg
